United States Patent Application Publication US 2021/0170017 A1 - sequence listing, part 5

SEQ ID NO: 5401 - RNA, 1951 nt, Artificial Sequence
  mRNA product Design b-4 comprising derived and/or modified sequence from HRSV(A2)__F_DSCav1_mut5 (opt2)
gggagagucccgcagucggcguccagcggcucugcuuguucgugugugugucguugcaggccuuauucaagcuuaccauggagcuccucauccucaaggccaacgccaucaccaccauccucaccgccgucaccuucugcuucgccuccggccagaacaucaccgaggaguucuaccaguccaccugcuccgccgucuccaagggcuaccucuccgcccuccgcaccggcugguacaccuccgucaucaccaucgagcucuccaacaucaaggagaacaagugcaacggcaccgacgccaaggucaagcucaucaagcaggagcucgacaaguacaagaacgccgucaccgagcuccagcuccucaugcaguccacccccgccaccggcuccggcuccgccaucgccuccggcgucgccgucugcaagguccuccaccucgagggcgaggucaacaagaucaaguccgcccuccucuccaccaacaaggccgucgucucccucuccggcugcggcgucuccguccucaccuucaagguccucgaccucaagaacuacaucgacaagcagcuccuccccauccucaacaagcaguccugcuccaucuccaacaucgagaccgucaucgaguuccagcagaagaacaaccgccuccucgagaucacccgcgaguucuccgucaacgccggcgucaccacccccgucuccaccuacaugcucaccaacuccgagcuccucucccucaucaacgacaugcccaucaccaacgaccagaagaagcucauguccaacaacguccagaucguccgccagcaguccuacuccaucaugugcaucaucaaggaggagguccucgccuacgucguccagcucccccucuacggcgucaucgacacccccugcuggaagcuccacaccuccccccucugcaccaccaacaccaaggagggcuccaacaucugccucacccgcaccgaccgcggcugguacugcgacaacgccggcuccgucuccuucuucccccaggccgagaccugcaagguccaguccaaccgcgucuucugcgacaccaugaacucccgcacccuccccuccgaggucaaccucugcaacgucgacaucuucaaccccaaguacgacugcaagaucaugaccuccaagaccgacgucuccuccuccgucaucaccucccucggcgccaucgucuccugcuacggcaagaccaagugcaccgccuccaacaagugccgcggcaucaucaagaccuucuccaacggcugcgacuacgucuccaacaagggcgucgacaccgucuccgucggcaacacccucuacuacgucaacaagcaggagggcaagucccucuacgucaagggcgagcccaucaucaacuucuacgacccccucgucuuccccuccgacgaguucgacgccuccaucucccaggucaacgagaagaucaaccagucccucgccuucauccgcaaguccgacgagcuccuccacaacgucaacgccggcaaguccaccaccaacaucaugaucaccaccaucaucaucgucaucaucgucauccuccucucccucaucgccgucggccuccuccucuacugcaaggcccgcuccacccccgucacccucuccaaggaccagcucuccggcaucaacaacaucgccuucuccaacugaggacuaguaauaaggaaacuguaugaaugucugugggcaggaagugaagagauccuucuguaaagguuuuuggaauuaugucugcugaauaauaaacuuuuuugaaauaauaaaucugguagaaaaaugagaucuaaaaaaaaaaaaaaaaaaaaaaaaaaaaaaaaaaaaaaaaaaaaaaaaaaaaaaaaaaaaaaaaugcaucccccccccccccccccccccccccccccccaaaggcucuuuucagagccaccagaauu

SEQ ID NO: 5402 - RNA, 1951 nt, Artificial Sequence
  mRNA product Design b-4 comprising derived and/or modified sequence from HRSV(A2)__F_DSCav1_mut5 (opt3)
gggagagucccgcagucggcguccagcggcucugcuuguucgugugugugucguugcaggccuuauucaagcuuaccauggagcugcucauccuuaaggccaacgcuauuaccacaauacugacugcagugacguucugcuuugccagcggccagaauaucaccgaagaguucuaccaauccacauguucugcggucucaaaaggguauuugagugcuuuaagaacuggaugguacaccagcguuauuacaaucgaacuguccaacauuaaggagaauaaaugcaacgguaccgacgccaaggugaaacuaaucaagcaggaacucgauaaguauaaaaaugcaguaacugagcugcagcuucugaugcagucuacacccgccaccggcucggggucagcuauagcaagcggaguggccgucuguaagguguugcaccucgagggcgaaguuaacaaaaucaagagugcucugcuguccacgaauaaagccguggucucucucagcgguugcgggguguccguauuaacuuuuaagguucuggaccuuaagaacuacauugauaaacaauugcugccuauccuaaauaagcagucauguaguauuagcaacaucgagaccgugauagaguuccagcagaaaaauaacaggcuccuggaaauuacacgggaguuuucugucaaugcgggagugacuaccccaguguccacauauaugcuuaccaacucagaacuguugagccucaucaaugacaugccgauuacgaacgaucaaaagaaacugaugaguaacaauguccagaucguucgccagcagucuuacuccaucaugugcauuauaaaggaggaaguguuagcauauguagugcaacugccccucuacggcgucaucgacacuccuuguuggaaacuucauacaagcccacugugcaccacuaacacaaaggagggcucgaauauuuguuugacccgaacggaucgugggugguacugcgacaacgccggaucuguguccuucuuuccccaggcugaaaccuguaagguucagucaaauagaguguucugcgauacaaugaacaguagaacucugccuagcgaggucaaucucugcaacguggacaucuuuaauccaaaauaugauuguaagauaaugaccuccaaaacagacguaucuagcucaguuauuaccagucugggugccaucguguccugcuacggcaagacuaaauguacagcaagcaacaagugcagggggaucauuaagaccuucucuaauggaugugauuaugucucaaacaaaggcguggacacugucaguguggguaauacgcuuuacuauguuaacaagcaagaggggaaaagccuguacgugaagggagaacccaucauuaauuuuuaugacccuuugguauucccauccgaugaguuugacgcuucuauaucgcaggucaacgagaaaaucaaccagagccucgccuucauucggaaguccgaugaacuguuacacaaugugaacgcgggcaagucaacaaccaauaucaugaucacuaccauuauaaucguuauuaucgugauucugcuaagucucaucgccgucggccugcuuuuguacugcaaagcacgcucuacaccggugacccugagcaaggaccagcucuccgggauaaacaauaucgcuuucucaaacugaggacuaguaauaaggaaacuguaugaaugucugugggcaggaagugaagagauccuucuguaaagguuuuuggaauuaugucugcugaauaauaaacuuuuuugaaauaauaaaucugguagaaaaaugagaucuaaaaaaaaaaaaaaaaaaaaaaaaaaaaaaaaaaaaaaaaaaaaaaaaaaaaaaaaaaaaaaaaugcaucccccccccccccccccccccccccccccccaaaggcucuuuucagagccaccagaauu

SEQ ID NO: 5403 - RNA, 1951 nt, Artificial Sequence
  mRNA product Design b-4 comprising derived and/or modified sequence from HRSV(A2)__F_DSCav1_mut5 (opt4)
gggagagucccgcagucggcguccagcggcucugcuuguucgugugugugucguugcaggccuuauucaagcuuaccauggagcugcugauccugaaggccaacgccaucaccaccauccugaccgccgugaccuucugcuucgccagcggccagaacaucaccgaggaguucuaccagagcaccugcagcgccgugagcaagggcuaccugagcgcccugagaaccggcugguacaccagcgugaucaccaucgagcugagcaacaucaaggagaacaagugcaacggcaccgacgccaaggugaagcugaucaagcaggagcuggacaaguacaagaacgccgugaccgagcugcagcugcugaugcagagcacccccgccaccggcagcggcagcgccaucgccagcggcguggccgugugcaaggugcugcaccuggagggcgaggugaacaagaucaagagcgcccugcugagcaccaacaaggccguggugagccugagcggcugcggcgugagcgugcugaccuucaaggugcuggaccugaagaacuacaucgacaagcagcugcugcccauccugaacaagcagagcugcagcaucagcaacaucgagaccgugaucgaguuccagcagaagaacaacagacugcuggagaucaccagagaguucagcgugaacgccggcgugaccacccccgugagcaccuacaugcugaccaacagcgagcugcugagccugaucaacgacaugcccaucaccaacgaccagaagaagcugaugagcaacaacgugcagaucgugagacagcagagcuacagcaucaugugcaucaucaaggaggaggugcuggccuacguggugcagcugccccuguacggcgugaucgacacccccugcuggaagcugcacaccagcccccugugcaccaccaacaccaaggagggcagcaacaucugccugaccagaaccgacagaggcugguacugcgacaacgccggcagcgugagcuucuucccccaggccgagaccugcaaggugcagagcaacagaguguucugcgacaccaugaacagcagaacccugcccagcgaggugaaccugugcaacguggacaucuucaaccccaaguacgacugcaagaucaugaccagcaagaccgacgugagcagcagcgugaucaccagccugggcgccaucgugagcugcuacggcaagaccaagugcaccgccagcaacaagugcagaggcaucaucaagaccuucagcaacggcugcgacuacgugagcaacaagggcguggacaccgugagcgugggcaacacccuguacuacgugaacaagcaggagggcaagagccuguacgugaagggcgagcccaucaucaacuucuacgacccccugguguuccccagcgacgaguucgacgccagcaucagccaggugaacgagaagaucaaccagagccuggccuucaucagaaagagcgacgagcugcugcacaacgugaacgccggcaagagcaccaccaacaucaugaucaccaccaucaucaucgugaucaucgugauccugcugagccugaucgccgugggccugcugcuguacugcaaggccagaagcacccccgugacccugagcaaggaccagcugagcggcaucaacaacaucgccuucagcaacugaggacuaguaauaaggaaacuguaugaaugucugugggcaggaagugaagagauccuucuguaaagguuuuuggaauuaugucugcugaauaauaaacuuuuuugaaauaauaaaucugguagaaaaaugagaucuaaaaaaaaaaaaaaaaaaaaaaaaaaaaaaaaaaaaaaaaaaaaaaaaaaaaaaaaaaaaaaaaugcaucccccccccccccccccccccccccccccccaaaggcucuuuucagagccaccagaauu

SEQ ID NO: 5404 - RNA, 1951 nt, Artificial Sequence
  mRNA product Design b-4 comprising derived and/or modified sequence from HRSV(A2)__F_DSCav1_mut5 (opt5)
gggagagucccgcagucggcguccagcggcucugcuuguucgugugugugucguugcaggccuuauucaagcuuaccauggagcugcucauccugaaggccaacgcuauuaccacaauccuuacggccgugaccuucugcuuugcgagcggccagaauauuacagaagaguucuaccaauccaccuguucugcugucagcaaaggguaucuguccgcccucagaacaggaugguacaccucuguuaucacaauugaacugagcaacaucaaggagaauaaaugcaacggcaccgacgccaaggugaaacuuaucaagcaggaacuggauaaguauaaaaaugcugugacggagcuccagcugcugaugcaguccacccccgccacagggucuggaagcgcuauugccuccggcgucgcgguguguaagguucuccaccuggagggggaagugaacaaaaucaagagcgcccuucugucuaccaauaaagcugucgugucccucagcggaugcggcguuucugugcugacauuuaagguccuugaccugaagaacuacauugauaaacaacuccugccuauccugaauaagcaguccuguagcauuucuaacaucgagaccgugauugaguuccagcagaaaaauaaccggcuccuggaaaucacgcgcgaguuuuccgugaaugccggcgucacaaccccgguuagcacauauaugcuuaccaacuccgaacugcucucucugaucaaugacaugcccauuaccaacgaucaaaagaaacuuaugagcaacaaugugcagaucgugagacagcaguccuacagcauuaugugcaucauuaaggaggaaguccuggcuuaugugguucaacucccucuguacggggugaucgacacacccuguuggaaacugcauacgucuccucucugcaccacaaacaccaaggagggauccaauaucugucugacacggaccgaucgcggcugguacugcgacaacgccgggagcgucucuuucuuuccccaggcggaaacguguaaggugcagagcaauagaguuuucugcgauacaaugaacuccagaacccugccuucugaggugaaucucugcaacgucgacauuuuuaauccgaaauaugauuguaagaucaugaccagcaaaacagacguguccagcucugucauuaccucccugggagccaucgugagcugcuacggcaagacaaaauguacggcuucuaacaagugccgggggauuaucaagaccuucuccaauggaugugauuauguuagcaacaaaggcguggacacagucuccgugggcaauacccuuuacuauguuaacaagcaagaggggaaaucucuguacgugaagggagaacccaucauuaauuuuuaugacccucucgucuuccccagcgaugaguuugacgccuccaucucucaggugaacgagaaaauuaaccagagccuggcuuucauccgcaaguccgaugaacugcuccacaaugugaacgccggcaagagcacaaccaauauuaugaucacgaccauuaucaucguuauuaucgucauucugcuuucucugaucgccguggggcuccugcuguacugcaaagcuagauccacaccugugacccuuagcaaggaccagcucucuggaauuaacaauaucgcguucuccaacugaggacuaguaauaaggaaacuguaugaaugucugugggcaggaagugaagagauccuucuguaaagguuuuuggaauuaugucugcugaauaauaaacuuuuuugaaauaauaaaucugguagaaaaaugagaucuaaaaaaaaaaaaaaaaaaaaaaaaaaaaaaaaaaaaaaaaaaaaaaaaaaaaaaaaaaaaaaaaugcaucccccccccccccccccccccccccccccccaaaggcucuuuucagagccaccagaauu

SEQ ID NO: 5405 - RNA, 1951 nt, Artificial Sequence
  mRNA product Design b-4 comprising derived and/or modified sequence from HRSV(A2)__F_DSCav1_mut5 (opt6)
gggagagucccgcagucggcguccagcggcucugcuuguucgugugugugucguugcaggccuuauucaagcuuaccauggaacuauuaauacuuaaagccaacgcaauaacaacaauucucacugcugucaccuucugcuucgccucaggccaaaacauaacggaagaauuuuaccaaucaacaugcucugcaguauccaaaggcuaccuaucugcucuaagaacagguugguauacaucaguaauaaccauagaacuaucaaacauaaaagaaaauaaaugcaacggaacagacgcaaaaguuaaacucauaaaacaagaacuagacaaauauaaaaacgcaguuaccgaacuacaacuacuuaugcaauccacucccgccacuggaucaggaucagcaauagcaucaggagucgcaguauguaaagucuuacaccucgaaggcgaagucaauaaaaucaaauccgcauuacuauccacaaacaaagcagucguaucccuaagcggaugcggaguaucaguacuaacauuuaaaguacuagaccuaaaaaauuacaucgauaaacaacuauuaccuauauuaaacaaacaauccugcuccauuucaaauaucgaaaccguaauagaauuucaacaaaaaaacaacagauuacuagaaauaacaagagaauuuuccguaaaugcuggcguaacaacaccaguauccacauacaugcucacaaacuccgaacuacuaucacuaauaaaugacaugcccauaacaaacgaucaaaaaaaacuaaugucaaauaauguacaaauaguaagacaacaaagcuacuccaucauguguauaauaaaagaagaaguacuagcauacguaguucaacuaccacuuuacggcguaaucgacaccccuugcuggaaacuacacaccuccccucuaugcaccacaaacacaaaagaagguuccaacauaugccuuaccagaacagacagaggcugguauugcgacaacgcaggaucaguuucauuuuuuccacaagcugaaacaugcaaaguacaaucaaacagagucuucugcgacacaaugaacucaagaacucuacccucagaaguaaaccuauguaacguagacauuuucaaccccaaauacgacugcaaaauuaugacaucaaaaacagacguuucaucaucaguuaucaccucauuaggagcaauaguaagcugcuacggaaaaacaaaaugcaccgccucaaauaaaugcagaggaauaauaaaaacuuucuccaacggaugcgacuacguuucaaacaaagguguagacacuguaucaguaggaaacacacuauauuacguaaauaaacaagaaggaaaaucacuuuaugucaaaggagaaccaauaaucaauuucuacgacccauuaguauucccaucagacgaauuugaugcuucaauaucacaaguaaacgaaaaaauaaaucaaucacucgcauuuauacgaaaaucagacgaacuacuacacaauguaaacgcaggcaaaucaacaacaaacauaaugauaacaacaauaaucauuguaauaauaguaauacuucuaucucuaauagcaguaggauuacuccucuacugcaaagcaagaucaaccccuguaacacuaucaaaagaccaacuuucagguauaaauaauauagcuuuuuccaauuaaggacuaguaauaaggaaacuguaugaaugucugugggcaggaagugaagagauccuucuguaaagguuuuuggaauuaugucugcugaauaauaaacuuuuuugaaauaauaaaucugguagaaaaaugagaucuaaaaaaaaaaaaaaaaaaaaaaaaaaaaaaaaaaaaaaaaaaaaaaaaaaaaaaaaaaaaaaaaugcaucccccccccccccccccccccccccccccccaaaggcucuuuucagagccaccagaauu

SEQ ID NO: 5406 - RNA, 1951 nt, Artificial Sequence
  mRNA product Design b-4 comprising derived and/or modified sequence from HRSV(A2)__F_DSCav1_mut5 (opt11)
gggagagucccgcagucggcguccagcggcucugcuuguucgugugugugucguugcaggccuuauucaagcuuaccauggagcuccuaauccucaaagccaacgcgaucacuacaauccucacagccgucaccuucugcuucgccuccggccaaaacaucaccgaggaguucuaccaaucaaccugcuccgccguaucaaaaggauaccuaagcgcccuacggaccggcugguacacaucugucaucaccaucgaacuaucaaacaucaaagaaaacaaaugcaacggaaccgacgcaaaagucaaacugauuaaacaagaacuagacaaauacaaaaacgcagucaccgaacugcaauuacucaugcaaagcacaccggccaccggcucaggcagcgccaucgccuccggcgucgccgucugcaaaguucuccaccucgagggcgaagucaacaaaauaaaaucugcccuccucuccaccaacaaagccgucgucucccucagcggcugcggagucuccguccucaccuucaaaguucucgaucucaagaacuauauugacaaacaacuucuacccauacucaacaaacaaagcugcagcauauccaacaucgaaaccgucaucgaguuccaacaaaagaacaaccgccuccucgaaauaacccgcgaguucagcguuaacgccggagucacuaccccugucuccaccuacaugcucaccaacuccgaacuccuaucacuaaucaacgacaugcccauaaccaacgaccagaagaaacucauguccaacaacguccaaauuguccgacaacaaagcuacuccauaaugugcauaauaaaagaggaaguccucgccuacgucguacaacugccccuuuauggcguaaucgacacacccugcuggaaacuccacacgucaccccucugcaccaccaacacaaaagaaggcucgaacaucugccuaacacggacugaccgcggcugguacugcgacaacgccggcuccgucagcuucuucccacaagccgaaaccugcaaaguacaauccaaccgaguauucugcgacaccaugaacuccagaacccuccccucagaggucaaccugugcaacguagacaucuucaaccccaaauacgacugcaaaauaaugaccucaaaaacagacgucuccucuuccguaaucaccagccucggagccaucgucagcugcuacggcaaaaccaaaugcaccgccucaaacaaaugccgcggcaucaucaaaacauucucaaacggcugcgacuacgucuccaacaaaggcgucgacacaguaagcguaggcaacacacuguacuacgucaacaaacaagagggaaaaucacucuacgucaaaggagaacccauaaucaacuucuacgacccccucguuuuccccagcgacgaguucgacgccagcauaucccaagucaacgagaaaauuaaccaaucccuagcauucauccgaaaaucugacgaacugcuccacaacgucaacgcgggaaaaucaacaaccaacauaaugauaaccacaaucauaauagucaucaucguaauccuccucagccuaaucgcugucggccuccuccucuacugcaaagcccguuccaccccagucacacuuuccaaggaccaacuaagcggaauaaacaacaucgcguucucaaacuaaggacuaguaauaaggaaacuguaugaaugucugugggcaggaagugaagagauccuucuguaaagguuuuuggaauuaugucugcugaauaauaaacuuuuuugaaauaauaaaucugguagaaaaaugagaucuaaaaaaaaaaaaaaaaaaaaaaaaaaaaaaaaaaaaaaaaaaaaaaaaaaaaaaaaaaaaaaaaugcaucccccccccccccccccccccccccccccccaaaggcucuuuucagagccaccagaauu

SEQ ID NO: 5407 - RNA, 2013 nt, Artificial Sequence
  mRNA product Design b-5 comprising derived and/or modified sequence from HRSV(A2)__F_DSCav1_mut5 (opt1)
gggagacuccugucgggcggaaguaggaggaguagaguuuaaaaacaguacucuuuuuccgguucgggacguaguugaagcaacgacaagccggauaaccgcucuugagacaggaagcuuaccauggagcugcucauccugaaggccaacgccaucaccaccauccugacggcggugaccuucugcuucgccagcggccagaacaucaccgaggaguucuaccaguccacgugcagcgccgucuccaagggguaccucagcgcccugcggaccggcugguacaccuccgugaucaccaucgagcugagcaacaucaaggagaacaagugcaacgggaccgacgccaaggugaagcucaucaagcaggagcuggacaaguacaagaacgcggucacggagcugcagcuccugaugcaguccaccccggcaaccggcuccggcuccgccaucgcgagcggcgucgccgugugcaaggugcugcaccucgagggggaggucaacaagaucaagagcgcccugcuguccaccaacaaggccguggugagccucuccggcugcggcgucagcgugcugaccuucaaggugcuggaccucaagaacuacaucgacaagcagcugcugcccauccugaacaagcagagcugcuccaucagcaacaucgagacggugaucgaguuccagcagaagaacaaccggcuccuggagaucacccgcgaguucagcgugaacgccggggucaccacccccguguccacguacaugcugaccaacagcgagcuccugucccugaucaacgacaugccgaucaccaacgaccagaagaagcucaugagcaacaacgugcagaucguccggcagcaguccuacagcaucaugugcaucaucaaggaggaggugcuggcguacgugguccagcugccccucuacggcgugaucgacacccccugcuggaagcugcacacgagcccccugugcaccaccaacaccaaggagggguccaacaucugccucacgcgcaccgaccggggcugguacugcgacaacgccggcagcgucuccuucuucccgcaggccgagaccugcaaggugcagagcaaccgcguguucugcgacaccaugaacucccggacgcugcccagcgagguaaaccucugcaacgucgacaucuucaaccccaaguacgacugcaagaucaugaccuccaagaccgacgugagcuccagcgugaucaccucccugggggccaucgucagcugcuacggcaagacgaagugcaccgccagcaacaagugccgggggaucaucaagaccuucuccaacggcugcgacuacgugagcaacaagggcguggacaccguguccgucgggaacacccuguacuacgugaacaagcaggagggcaagagccucuacgugaagggggagcccaucaucaacuucuacgacccgcuggucuuccccuccgacgaguucgacgcgagcaucucccaggugaacgagaagaucaaccagagccuggccuucauccgcaaguccgacgagcugcuccacaacgugaacgccggcaagagcacgaccaacaucaugaucaccaccaucaucaucgucaucaucgugauccugcugucccucaucgccguggggcugcugcucuacugcaaggcccggagcacgcccgucacccuguccaaggaccagcugagcggcaucaacaacaucgcguucuccaacugaggacuaguacuggcugcaucucccuuuccucuguccuccauccuucucccaggauggugaagggggaccugguacccagugauccccaccccaggauccuaaaucaugacuuaccugcuaauaaaaacucauuggaaaagugagaagaucuaaaaaaaaaaaaaaaaaaaaaaaaaaaaaaaaaaaaaaaaaaaaaaaaaaaaaaaaaaaaaaaaugcaucccccccccccccccccccccccccccccccaaaggcucuuuucagagccaccagaauu

SEQ ID NO: 5408 - RNA, 2013 nt, Artificial Sequence
  mRNA product Design b-5 comprising derived and/or modified sequence from HRSV(A2)__F_DSCav1_mut5 (opt1)
gggagacuccugucgggcggaaguaggaggaguagaguuuaaaaacaguacucuuuuuccgguucgggacguaguugaagcaacgacaagccggauaaccgcucuugagacaggaagcuuaccauggagcugcucauccugaaggccaacgccaucaccaccauccugacggcggugaccuucugcuucgccagcggccagaacaucaccgaggaguucuaccaguccacgugcagcgccgucuccaagggguaccucagcgcccugcgcaccggcugguacaccuccgugaucaccaucgagcugagcaacaucaaggagaacaagugcaacgggaccgacgccaaggugaagcucaucaagcaggagcuggacaaguacaagaacgcggucacggagcugcagcuccugaugcaguccacccccgccaccggcagcggguccgccaucgccagcggcguggcggugugcaagguccugcaccucgagggcgaggugaacaagaucaaguccgcccugcugagcaccaacaaggccguggucucccucagcgggugcggcguguccgugcugacguucaagguccuggaccucaagaacuacaucgacaagcagcugcugccgauccucaacaagcagagcugcuccaucagcaacaucgagaccgugaucgaguuccagcagaagaacaaccggcugcuggagaucacccgcgaguucuccgugaacgccggggucaccacgcccgugagcaccuacaugcucaccaacagcgagcugcugucccucaucaacgacaugcccaucaccaacgaccagaagaagcugaugagcaacaacgugcagaucguccggcagcaguccuacagcaucaugugcaucaucaaggaggaggugcuggccuacgugguccagcucccccuguacggcgugaucgacacgccgugcuggaagcugcacaccagcccccucugcaccaccaacacgaaggagggguccaacaucugccugacccgcaccgaccggggcugguacugcgacaacgcgggcuccgugagcuucuucccccaggccgagaccugcaagguccaguccaaccgcguguucugcgacacgaugaacagccggacccuccccuccgaggucaaccugugcaacguggacaucuucaacccgaaguacgacugcaagaucaugaccagcaagaccgacguguccagcuccgucaucacgagccugggggccaucguguccugcuacggcaagaccaagugcaccgccagcaacaagugccgggggaucaucaagaccuucuccaacggcugcgacuacgugagcaacaagggcgucgacacggugagcguggggaacacccucuacuacgucaacaagcaggagggcaagucccuguacgugaagggggagcccaucaucaacuucuacgacccccugguguuccccagcgacgaguucgacgccuccaucagccaggucaacgagaagaucaaccagucccucgcguucauccgcaagagcgacgagcugcugcacaacgugaacgccggcaaguccaccaccaacaucaugaucaccacgaucaucaucgugaucaucgucauccuccugagccugaucgccguggggcuccugcuguacugcaaggcccgguccaccccggugacccugagcaaggaccagcucuccggcaucaacaacaucgccuucagcaacugaggacuaguacuggcugcaucucccuuuccucuguccuccauccuucucccaggauggugaagggggaccugguacccagugauccccaccccaggauccuaaaucaugacuuaccugcuaauaaaaacucauuggaaaagugagaagaucuaaaaaaaaaaaaaaaaaaaaaaaaaaaaaaaaaaaaaaaaaaaaaaaaaaaaaaaaaaaaaaaaugcaucccccccccccccccccccccccccccccccaaaggcucuuuucagagccaccagaauu

SEQ ID NO: 5409 - RNA, 2013 nt, Artificial Sequence
  mRNA product Design b-5 comprising derived and/or modified sequence from HRSV(A2)__F_DSCav1_mut5 (opt2)
gggagacuccugucgggcggaaguaggaggaguagaguuuaaaaacaguacucuuuuuccgguucgggacguaguugaagcaacgacaagccggauaaccgcucuugagacaggaagcuuaccauggagcuccucauccucaaggccaacgccaucaccaccauccucaccgccgucaccuucugcuucgccuccggccagaacaucaccgaggaguucuaccaguccaccugcuccgccgucuccaagggcuaccucuccgcccuccgcaccggcugguacaccuccgucaucaccaucgagcucuccaacaucaaggagaacaagugcaacggcaccgacgccaaggucaagcucaucaagcaggagcucgacaaguacaagaacgccgucaccgagcuccagcuccucaugcaguccacccccgccaccggcuccggcuccgccaucgccuccggcgucgccgucugcaagguccuccaccucgagggcgaggucaacaagaucaaguccgcccuccucuccaccaacaaggccgucgucucccucuccggcugcggcgucuccguccucaccuucaagguccucgaccucaagaacuacaucgacaagcagcuccuccccauccucaacaagcaguccugcuccaucuccaacaucgagaccgucaucgaguuccagcagaagaacaaccgccuccucgagaucacccgcgaguucuccgucaacgccggcgucaccacccccgucuccaccuacaugcucaccaacuccgagcuccucucccucaucaacgacaugcccaucaccaacgaccagaagaagcucauguccaacaacguccagaucguccgccagcaguccuacuccaucaugugcaucaucaaggaggagguccucgccuacgucguccagcucccccucuacggcgucaucgacacccccugcuggaagcuccacaccuccccccucugcaccaccaacaccaaggagggcuccaacaucugccucacccgcaccgaccgcggcugguacugcgacaacgccggcuccgucuccuucuucccccaggccgagaccugcaagguccaguccaaccgcgucuucugcgacaccaugaacucccgcacccuccccuccgaggucaaccucugcaacgucgacaucuucaaccccaaguacgacugcaagaucaugaccuccaagaccgacgucuccuccuccgucaucaccucccucggcgccaucgucuccugcuacggcaagaccaagugcaccgccuccaacaagugccgcggcaucaucaagaccuucuccaacggcugcgacuacgucuccaacaagggcgucgacaccgucuccgucggcaacacccucuacuacgucaacaagcaggagggcaagucccucuacgucaagggcgagcccaucaucaacuucuacgacccccucgucuuccccuccgacgaguucgacgccuccaucucccaggucaacgagaagaucaaccagucccucgccuucauccgcaaguccgacgagcuccuccacaacgucaacgccggcaaguccaccaccaacaucaugaucaccaccaucaucaucgucaucaucgucauccuccucucccucaucgccgucggccuccuccucuacugcaaggcccgcuccacccccgucacccucuccaaggaccagcucuccggcaucaacaacaucgccuucuccaacugaggacuaguacuggcugcaucucccuuuccucuguccuccauccuucucccaggauggugaagggggaccugguacccagugauccccaccccaggauccuaaaucaugacuuaccugcuaauaaaaacucauuggaaaagugagaagaucuaaaaaaaaaaaaaaaaaaaaaaaaaaaaaaaaaaaaaaaaaaaaaaaaaaaaaaaaaaaaaaaaugcaucccccccccccccccccccccccccccccccaaaggcucuuuucagagccaccagaauu

SEQ ID NO: 5410 - RNA, 2013 nt, Artificial Sequence
  mRNA product Design b-5 comprising derived and/or modified sequence from HRSV(A2)__F_DSCav1_mut5 (opt3)
gggagacuccugucgggcggaaguaggaggaguagaguuuaaaaacaguacucuuuuuccgguucgggacguaguugaagcaacgacaagccggauaaccgcucuugagacaggaagcuuaccauggagcugcucauccuuaaggccaacgcuauuaccacaauacugacugcagugacguucugcuuugccagcggccagaauaucaccgaagaguucuaccaauccacauguucugcggucucaaaaggguauuugagugcuuuaagaacuggaugguacaccagcguuauuacaaucgaacuguccaacauuaaggagaauaaaugcaacgguaccgacgccaaggugaaacuaaucaagcaggaacucgauaaguauaaaaaugcaguaacugagcugcagcuucugaugcagucuacacccgccaccggcucggggucagcuauagcaagcggaguggccgucuguaagguguugcaccucgagggcgaaguuaacaaaaucaagagugcucugcuguccacgaauaaagccguggucucucucagcgguugcgggguguccguauuaacuuuuaagguucuggaccuuaagaacuacauugauaaacaauugcugccuauccuaaauaagcagucauguaguauuagcaacaucgagaccgugauagaguuccagcagaaaaauaacaggcuccuggaaauuacacgggaguuuucugucaaugcgggagugacuaccccaguguccacauauaugcuuaccaacucagaacuguugagccucaucaaugacaugccgauuacgaacgaucaaaagaaacugaugaguaacaauguccagaucguucgccagcagucuuacuccaucaugugcauuauaaaggaggaaguguuagcauauguagugcaacugccccucuacggcgucaucgacacuccuuguuggaaacuucauacaagcccacugugcaccacuaacacaaaggagggcucgaauauuuguuugacccgaacggaucgugggugguacugcgacaacgccggaucuguguccuucuuuccccaggcugaaaccuguaagguucagucaaauagaguguucugcgauacaaugaacaguagaacucugccuagcgaggucaaucucugcaacguggacaucuuuaauccaaaauaugauuguaagauaaugaccuccaaaacagacguaucuagcucaguuauuaccagucugggugccaucguguccugcuacggcaagacuaaauguacagcaagcaacaagugcagggggaucauuaagaccuucucuaauggaugugauuaugucucaaacaaaggcguggacacugucaguguggguaauacgcuuuacuauguuaacaagcaagaggggaaaagccuguacgugaagggagaacccaucauuaauuuuuaugacccuuugguauucccauccgaugaguuugacgcuucuauaucgcaggucaacgagaaaaucaaccagagccucgccuucauucggaaguccgaugaacuguuacacaaugugaacgcgggcaagucaacaaccaauaucaugaucacuaccauuauaaucguuauuaucgugauucugcuaagucucaucgccgucggccugcuuuuguacugcaaagcacgcucuacaccggugacccugagcaaggaccagcucuccgggauaaacaauaucgcuuucucaaacugaggacuaguacuggcugcaucucccuuuccucuguccuccauccuucucccaggauggugaagggggaccugguacccagugauccccaccccaggauccuaaaucaugacuuaccugcuaauaaaaacucauuggaaaagugagaagaucuaaaaaaaaaaaaaaaaaaaaaaaaaaaaaaaaaaaaaaaaaaaaaaaaaaaaaaaaaaaaaaaaugcaucccccccccccccccccccccccccccccccaaaggcucuuuucagagccaccagaauu

SEQ ID NO: 5411 - RNA, 2013 nt, Artificial Sequence
  mRNA product Design b-5 comprising derived and/or modified sequence from HRSV(A2)__F_DSCav1_mut5 (opt4)
gggagacuccugucgggcggaaguaggaggaguagaguuuaaaaacaguacucuuuuuccgguucgggacguaguugaagcaacgacaagccggauaaccgcucuugagacaggaagcuuaccauggagcugcugauccugaaggccaacgccaucaccaccauccugaccgccgugaccuucugcuucgccagcggccagaacaucaccgaggaguucuaccagagcaccugcagcgccgugagcaagggcuaccugagcgcccugagaaccggcugguacaccagcgugaucaccaucgagcugagcaacaucaaggagaacaagugcaacggcaccgacgccaaggugaagcugaucaagcaggagcuggacaaguacaagaacgccgugaccgagcugcagcugcugaugcagagcacccccgccaccggcagcggcagcgccaucgccagcggcguggccgugugcaaggugcugcaccuggagggcgaggugaacaagaucaagagcgcccugcugagcaccaacaaggccguggugagccugagcggcugcggcgugagcgugcugaccuucaaggugcuggaccugaagaacuacaucgacaagcagcugcugcccauccugaacaagcagagcugcagcaucagcaacaucgagaccgugaucgaguuccagcagaagaacaacagacugcuggagaucaccagagaguucagcgugaacgccggcgugaccacccccgugagcaccuacaugcugaccaacagcgagcugcugagccugaucaacgacaugcccaucaccaacgaccagaagaagcugaugagcaacaacgugcagaucgugagacagcagagcuacagcaucaugugcaucaucaaggaggaggugcuggccuacguggugcagcugccccuguacggcgugaucgacacccccugcuggaagcugcacaccagcccccugugcaccaccaacaccaaggagggcagcaacaucugccugaccagaaccgacagaggcugguacugcgacaacgccggcagcgugagcuucuucccccaggccgagaccugcaaggugcagagcaacagaguguucugcgacaccaugaacagcagaacccugcccagcgaggugaaccugugcaacguggacaucuucaaccccaaguacgacugcaagaucaugaccagcaagaccgacgugagcagcagcgugaucaccagccugggcgccaucgugagcugcuacggcaagaccaagugcaccgccagcaacaagugcagaggcaucaucaagaccuucagcaacggcugcgacuacgugagcaacaagggcguggacaccgugagcgugggcaacacccuguacuacgugaacaagcaggagggcaagagccuguacgugaagggcgagcccaucaucaacuucuacgacccccugguguuccccagcgacgaguucgacgccagcaucagccaggugaacgagaagaucaaccagagccuggccuucaucagaaagagcgacgagcugcugcacaacgugaacgccggcaagagcaccaccaacaucaugaucaccaccaucaucaucgugaucaucgugauccugcugagccugaucgccgugggccugcugcuguacugcaaggccagaagcacccccgugacccugagcaaggaccagcugagcggcaucaacaacaucgccuucagcaacugaggacuaguacuggcugcaucucccuuuccucuguccuccauccuucucccaggauggugaagggggaccugguacccagugauccccaccccaggauccuaaaucaugacuuaccugcuaauaaaaacucauuggaaaagugagaagaucuaaaaaaaaaaaaaaaaaaaaaaaaaaaaaaaaaaaaaaaaaaaaaaaaaaaaaaaaaaaaaaaaugcaucccccccccccccccccccccccccccccccaaaggcucuuuucagagccaccagaauu

SEQ ID NO: 5412 - RNA, 2013 nt, Artificial Sequence
  mRNA product Design b-5 comprising derived and/or modified sequence from HRSV(A2)__F_DSCav1_mut5 (opt5)
gggagacuccugucgggcggaaguaggaggaguagaguuuaaaaacaguacucuuuuuccgguucgggacguaguugaagcaacgacaagccggauaaccgcucuugagacaggaagcuuaccauggagcugcucauccugaaggccaacgcuauuaccacaauccuuacggccgugaccuucugcuuugcgagcggccagaauauuacagaagaguucuaccaauccaccuguucugcugucagcaaaggguaucuguccgcccucagaacaggaugguacaccucuguuaucacaauugaacugagcaacaucaaggagaauaaaugcaacggcaccgacgccaaggugaaacuuaucaagcaggaacuggauaaguauaaaaaugcugugacggagcuccagcugcugaugcaguccacccccgccacagggucuggaagcgcuauugccuccggcgucgcgguguguaagguucuccaccuggagggggaagugaacaaaaucaagagcgcccuucugucuaccaauaaagcugucgugucccucagcggaugcggcguuucugugcugacauuuaagguccuugaccugaagaacuacauugauaaacaacuccugccuauccugaauaagcaguccuguagcauuucuaacaucgagaccgugauugaguuccagcagaaaaauaaccggcuccuggaaaucacgcgcgaguuuuccgugaaugccggcgucacaaccccgguuagcacauauaugcuuaccaacuccgaacugcucucucugaucaaugacaugcccauuaccaacgaucaaaagaaacuuaugagcaacaaugugcagaucgugagacagcaguccuacagcauuaugugcaucauuaaggaggaaguccuggcuuaugugguucaacucccucuguacggggugaucgacacacccuguuggaaacugcauacgucuccucucugcaccacaaacaccaaggagggauccaauaucugucugacacggaccgaucgcggcugguacugcgacaacgccgggagcgucucuuucuuuccccaggcggaaacguguaaggugcagagcaauagaguuuucugcgauacaaugaacuccagaacccugccuucugaggugaaucucugcaacgucgacauuuuuaauccgaaauaugauuguaagaucaugaccagcaaaacagacguguccagcucugucauuaccucccugggagccaucgugagcugcuacggcaagacaaaauguacggcuucuaacaagugccgggggauuaucaagaccuucuccaauggaugugauuauguuagcaacaaaggcguggacacagucuccgugggcaauacccuuuacuauguuaacaagcaagaggggaaaucucuguacgugaagggagaacccaucauuaauuuuuaugacccucucgucuuccccagcgaugaguuugacgccuccaucucucaggugaacgagaaaauuaaccagagccuggcuuucauccgcaaguccgaugaacugcuccacaaugugaacgccggcaagagcacaaccaauauuaugaucacgaccauuaucaucguuauuaucgucauucugcuuucucugaucgccguggggcuccugcuguacugcaaagcuagauccacaccugugacccuuagcaaggaccagcucucuggaauuaacaauaucgcguucuccaacugaggacuaguacuggcugcaucucccuuuccucuguccuccauccuucucccaggauggugaagggggaccugguacccagugauccccaccccaggauccuaaaucaugacuuaccugcuaauaaaaacucauuggaaaagugagaagaucuaaaaaaaaaaaaaaaaaaaaaaaaaaaaaaaaaaaaaaaaaaaaaaaaaaaaaaaaaaaaaaaaugcaucccccccccccccccccccccccccccccccaaaggcucuuuucagagccaccagaauu

SEQ ID NO: 5413 - RNA, 2013 nt, Artificial Sequence
  mRNA product Design b-5 comprising derived and/or modified sequence from HRSV(A2)__F_DSCav1_mut5 (opt6)
gggagacuccugucgggcggaaguaggaggaguagaguuuaaaaacaguacucuuuuuccgguucgggacguaguugaagcaacgacaagccggauaaccgcucuugagacaggaagcuuaccauggaacuauuaauacuuaaagccaacgcaauaacaacaauucucacugcugucaccuucugcuucgccucaggccaaaacauaacggaagaauuuuaccaaucaacaugcucugcaguauccaaaggcuaccuaucugcucuaagaacagguugguauacaucaguaauaaccauagaacuaucaaacauaaaagaaaauaaaugcaacggaacagacgcaaaaguuaaacucauaaaacaagaacuagacaaauauaaaaacgcaguuaccgaacuacaacuacuuaugcaauccacucccgccacuggaucaggaucagcaauagcaucaggagucgcaguauguaaagucuuacaccucgaaggcgaagucaauaaaaucaaauccgcauuacuauccacaaacaaagcagucguaucccuaagcggaugcggaguaucaguacuaacauuuaaaguacuagaccuaaaaaauuacaucgauaaacaacuauuaccuauauuaaacaaacaauccugcuccauuucaaauaucgaaaccguaauagaauuucaacaaaaaaacaacagauuacuagaaauaacaagagaauuuuccguaaaugcuggcguaacaacaccaguauccacauacaugcucacaaacuccgaacuacuaucacuaauaaaugacaugcccauaacaaacgaucaaaaaaaacuaaugucaaauaauguacaaauaguaagacaacaaagcuacuccaucauguguauaauaaaagaagaaguacuagcauacguaguucaacuaccacuuuacggcguaaucgacaccccuugcuggaaacuacacaccuccccucuaugcaccacaaacacaaaagaagguuccaacauaugccuuaccagaacagacagaggcugguauugcgacaacgcaggaucaguuucauuuuuuccacaagcugaaacaugcaaaguacaaucaaacagagucuucugcgacacaaugaacucaagaacucuacccucagaaguaaaccuauguaacguagacauuuucaaccccaaauacgacugcaaaauuaugacaucaaaaacagacguuucaucaucaguuaucaccucauuaggagcaauaguaagcugcuacggaaaaacaaaaugcaccgccucaaauaaaugcagaggaauaauaaaaacuuucuccaacggaugcgacuacguuucaaacaaagguguagacacuguaucaguaggaaacacacuauauuacguaaauaaacaagaaggaaaaucacuuuaugucaaaggagaaccaauaaucaauuucuacgacccauuaguauucccaucagacgaauuugaugcuucaauaucacaaguaaacgaaaaaauaaaucaaucacucgcauuuauacgaaaaucagacgaacuacuacacaauguaaacgcaggcaaaucaacaacaaacauaaugauaacaacaauaaucauuguaauaauaguaauacuucuaucucuaauagcaguaggauuacuccucuacugcaaagcaagaucaaccccuguaacacuaucaaaagaccaacuuucagguauaaauaauauagcuuuuuccaauuaaggacuaguacuggcugcaucucccuuuccucuguccuccauccuucucccaggauggugaagggggaccugguacccagugauccccaccccaggauccuaaaucaugacuuaccugcuaauaaaaacucauuggaaaagugagaagaucuaaaaaaaaaaaaaaaaaaaaaaaaaaaaaaaaaaaaaaaaaaaaaaaaaaaaaaaaaaaaaaaaugcaucccccccccccccccccccccccccccccccaaaggcucuuuucagagccaccagaauu

SEQ ID NO: 5414 - RNA, 2013 nt, Artificial Sequence
  mRNA product Design b-5 comprising derived and/or modified sequence from HRSV(A2)__F_DSCav1_mut5 (opt11)
gggagacuccugucgggcggaaguaggaggaguagaguuuaaaaacaguacucuuuuuccgguucgggacguaguugaagcaacgacaagccggauaaccgcucuugagacaggaagcuuaccauggagcuccuaauccucaaagccaacgcgaucacuacaauccucacagccgucaccuucugcuucgccuccggccaaaacaucaccgaggaguucuaccaaucaaccugcuccgccguaucaaaaggauaccuaagcgcccuacggaccggcugguacacaucugucaucaccaucgaacuaucaaacaucaaagaaaacaaaugcaacggaaccgacgcaaaagucaaacugauuaaacaagaacuagacaaauacaaaaacgcagucaccgaacugcaauuacucaugcaaagcacaccggccaccggcucaggcagcgccaucgccuccggcgucgccgucugcaaaguucuccaccucgagggcgaagucaacaaaauaaaaucugcccuccucuccaccaacaaagccgucgucucccucagcggcugcggagucuccguccucaccuucaaaguucucgaucucaagaacuauauugacaaacaacuucuacccauacucaacaaacaaagcugcagcauauccaacaucgaaaccgucaucgaguuccaacaaaagaacaaccgccuccucgaaauaacccgcgaguucagcguuaacgccggagucacuaccccugucuccaccuacaugcucaccaacuccgaacuccuaucacuaaucaacgacaugcccauaaccaacgaccagaagaaacucauguccaacaacguccaaauuguccgacaacaaagcuacuccauaaugugcauaauaaaagaggaaguccucgccuacgucguacaacugccccuuuauggcguaaucgacacacccugcuggaaacuccacacgucaccccucugcaccaccaacacaaaagaaggcucgaacaucugccuaacacggacugaccgcggcugguacugcgacaacgccggcuccgucagcuucuucccacaagccgaaaccugcaaaguacaauccaaccgaguauucugcgacaccaugaacuccagaacccuccccucagaggucaaccugugcaacguagacaucuucaaccccaaauacgacugcaaaauaaugaccucaaaaacagacgucuccucuuccguaaucaccagccucggagccaucgucagcugcuacggcaaaaccaaaugcaccgccucaaacaaaugccgcggcaucaucaaaacauucucaaacggcugcgacuacgucuccaacaaaggcgucgacacaguaagcguaggcaacacacuguacuacgucaacaaacaagagggaaaaucacucuacgucaaaggagaacccauaaucaacuucuacgacccccucguuuuccccagcgacgaguucgacgccagcauaucccaagucaacgagaaaauuaaccaaucccuagcauucauccgaaaaucugacgaacugcuccacaacgucaacgcgggaaaaucaacaaccaacauaaugauaaccacaaucauaauagucaucaucguaauccuccucagccuaaucgcugucggccuccuccucuacugcaaagcccguuccaccccagucacacuuuccaaggaccaacuaagcggaauaaacaacaucgcguucucaaacuaaggacuaguacuggcugcaucucccuuuccucuguccuccauccuucucccaggauggugaagggggaccugguacccagugauccccaccccaggauccuaaaucaugacuuaccugcuaauaaaaacucauuggaaaagugagaagaucuaaaaaaaaaaaaaaaaaaaaaaaaaaaaaaaaaaaaaaaaaaaaaaaaaaaaaaaaaaaaaaaaugcaucccccccccccccccccccccccccccccccaaaggcucuuuucagagccaccagaauu

SEQ ID NO: 5415 - RNA, 1919 nt, Artificial Sequence
  mRNA product Design c-1 comprising derived and/or modified sequence from HRSV(A2)__F_DSCav1_mut5 (opt1)
gggagaguccgcucagccagguugcagaagcggcuuagcguguguccuaaucuucucucugcguguagguaggccugugccgcaaacaagcuuaccauggagcugcucauccugaaggccaacgccaucaccaccauccugacggcggugaccuucugcuucgccagcggccagaacaucaccgaggaguucuaccaguccacgugcagcgccgucuccaagggguaccucagcgcccugcggaccggcugguacaccuccgugaucaccaucgagcugagcaacaucaaggagaacaagugcaacgggaccgacgccaaggugaagcucaucaagcaggagcuggacaaguacaagaacgcggucacggagcugcagcuccugaugcaguccaccccggcaaccggcuccggcuccgccaucgcgagcggcgucgccgugugcaaggugcugcaccucgagggggaggucaacaagaucaagagcgcccugcuguccaccaacaaggccguggugagccucuccggcugcggcgucagcgugcugaccuucaaggugcuggaccucaagaacuacaucgacaagcagcugcugcccauccugaacaagcagagcugcuccaucagcaacaucgagacggugaucgaguuccagcagaagaacaaccggcuccuggagaucacccgcgaguucagcgugaacgccggggucaccacccccguguccacguacaugcugaccaacagcgagcuccugucccugaucaacgacaugccgaucaccaacgaccagaagaagcucaugagcaacaacgugcagaucguccggcagcaguccuacagcaucaugugcaucaucaaggaggaggugcuggcguacgugguccagcugccccucuacggcgugaucgacacccccugcuggaagcugcacacgagcccccugugcaccaccaacaccaaggagggguccaacaucugccucacgcgcaccgaccggggcugguacugcgacaacgccggcagcgucuccuucuucccgcaggccgagaccugcaaggugcagagcaaccgcguguucugcgacaccaugaacucccggacgcugcccagcgagguaaaccucugcaacgucgacaucuucaaccccaaguacgacugcaagaucaugaccuccaagaccgacgugagcuccagcgugaucaccucccugggggccaucgucagcugcuacggcaagacgaagugcaccgccagcaacaagugccgggggaucaucaagaccuucuccaacggcugcgacuacgugagcaacaagggcguggacaccguguccgucgggaacacccuguacuacgugaacaagcaggagggcaagagccucuacgugaagggggagcccaucaucaacuucuacgacccgcuggucuuccccuccgacgaguucgacgcgagcaucucccaggugaacgagaagaucaaccagagccuggccuucauccgcaaguccgacgagcugcuccacaacgugaacgccggcaagagcacgaccaacaucaugaucaccaccaucaucaucgucaucaucgugauccugcugucccucaucgccguggggcugcugcucuacugcaaggcccggagcacgcccgucacccuguccaaggaccagcugagcggcaucaacaacaucgcguucuccaacugaggacuaguguccaccugucccuccugggcugcuggauugucucguuuuccugccaaauaaacaggaucagcgcuuuacagaucuaaaaaaaaaaaaaaaaaaaaaaaaaaaaaaaaaaaaaaaaaaaaaaaaaaaaaaaaaaaaaaaaugcaucccccccccccccccccccccccccccccccaaaggcucuuuucagagccaccagaauu

SEQ ID NO: 5416 - RNA, 1919 nt, Artificial Sequence
  mRNA product Design c-1 comprising derived and/or modified sequence from HRSV(A2)__F_DSCav1_mut5 (opt1)
gggagaguccgcucagccagguugcagaagcggcuuagcguguguccuaaucuucucucugcguguagguaggccugugccgcaaacaagcuuaccauggagcugcucauccugaaggccaacgccaucaccaccauccugacggcggugaccuucugcuucgccagcggccagaacaucaccgaggaguucuaccaguccacgugcagcgccgucuccaagggguaccucagcgcccugcgcaccggcugguacaccuccgugaucaccaucgagcugagcaacaucaaggagaacaagugcaacgggaccgacgccaaggugaagcucaucaagcaggagcuggacaaguacaagaacgcggucacggagcugcagcuccugaugcaguccacccccgccaccggcagcggguccgccaucgccagcggcguggcggugugcaagguccugcaccucgagggcgaggugaacaagaucaaguccgcccugcugagcaccaacaaggccguggucucccucagcgggugcggcguguccgugcugacguucaagguccuggaccucaagaacuacaucgacaagcagcugcugccgauccucaacaagcagagcugcuccaucagcaacaucgagaccgugaucgaguuccagcagaagaacaaccggcugcuggagaucacccgcgaguucuccgugaacgccggggucaccacgcccgugagcaccuacaugcucaccaacagcgagcugcugucccucaucaacgacaugcccaucaccaacgaccagaagaagcugaugagcaacaacgugcagaucguccggcagcaguccuacagcaucaugugcaucaucaaggaggaggugcuggccuacgugguccagcucccccuguacggcgugaucgacacgccgugcuggaagcugcacaccagcccccucugcaccaccaacacgaaggagggguccaacaucugccugacccgcaccgaccggggcugguacugcgacaacgcgggcuccgugagcuucuucccccaggccgagaccugcaagguccaguccaaccgcguguucugcgacacgaugaacagccggacccuccccuccgaggucaaccugugcaacguggacaucuucaacccgaaguacgacugcaagaucaugaccagcaagaccgacguguccagcuccgucaucacgagccugggggccaucguguccugcuacggcaagaccaagugcaccgccagcaacaagugccgggggaucaucaagaccuucuccaacggcugcgacuacgugagcaacaagggcgucgacacggugagcguggggaacacccucuacuacgucaacaagcaggagggcaagucccuguacgugaagggggagcccaucaucaacuucuacgacccccugguguuccccagcgacgaguucgacgccuccaucagccaggucaacgagaagaucaaccagucccucgcguucauccgcaagagcgacgagcugcugcacaacgugaacgccggcaaguccaccaccaacaucaugaucaccacgaucaucaucgugaucaucgucauccuccugagccugaucgccguggggcuccugcuguacugcaaggcccgguccaccccggugacccugagcaaggaccagcucuccggcaucaacaacaucgccuucagcaacugaggacuaguguccaccugucccuccugggcugcuggauugucucguuuuccugccaaauaaacaggaucagcgcuuuacagaucuaaaaaaaaaaaaaaaaaaaaaaaaaaaaaaaaaaaaaaaaaaaaaaaaaaaaaaaaaaaaaaaaugcaucccccccccccccccccccccccccccccccaaaggcucuuuucagagccaccagaauu

SEQ ID NO: 5417 - RNA, 1919 nt, Artificial Sequence
  mRNA product Design c-1 comprising derived and/or modified sequence from HRSV(A2)__F_DSCav1_mut5 (opt2)
gggagaguccgcucagccagguugcagaagcggcuuagcguguguccuaaucuucucucugcguguagguaggccugugccgcaaacaagcuuaccauggagcuccucauccucaaggccaacgccaucaccaccauccucaccgccgucaccuucugcuucgccuccggccagaacaucaccgaggaguucuaccaguccaccugcuccgccgucuccaagggcuaccucuccgcccuccgcaccggcugguacaccuccgucaucaccaucgagcucuccaacaucaaggagaacaagugcaacggcaccgacgccaaggucaagcucaucaagcaggagcucgacaaguacaagaacgccgucaccgagcuccagcuccucaugcaguccacccccgccaccggcuccggcuccgccaucgccuccggcgucgccgucugcaagguccuccaccucgagggcgaggucaacaagaucaaguccgcccuccucuccaccaacaaggccgucgucucccucuccggcugcggcgucuccguccucaccuucaagguccucgaccucaagaacuacaucgacaagcagcuccuccccauccucaacaagcaguccugcuccaucuccaacaucgagaccgucaucgaguuccagcagaagaacaaccgccuccucgagaucacccgcgaguucuccgucaacgccggcgucaccacccccgucuccaccuacaugcucaccaacuccgagcuccucucccucaucaacgacaugcccaucaccaacgaccagaagaagcucauguccaacaacguccagaucguccgccagcaguccuacuccaucaugugcaucaucaaggaggagguccucgccuacgucguccagcucccccucuacggcgucaucgacacccccugcuggaagcuccacaccuccccccucugcaccaccaacaccaaggagggcuccaacaucugccucacccgcaccgaccgcggcugguacugcgacaacgccggcuccgucuccuucuucccccaggccgagaccugcaagguccaguccaaccgcgucuucugcgacaccaugaacucccgcacccuccccuccgaggucaaccucugcaacgucgacaucuucaaccccaaguacgacugcaagaucaugaccuccaagaccgacgucuccuccuccgucaucaccucccucggcgccaucgucuccugcuacggcaagaccaagugcaccgccuccaacaagugccgcggcaucaucaagaccuucuccaacggcugcgacuacgucuccaacaagggcgucgacaccgucuccgucggcaacacccucuacuacgucaacaagcaggagggcaagucccucuacgucaagggcgagcccaucaucaacuucuacgacccccucgucuuccccuccgacgaguucgacgccuccaucucccaggucaacgagaagaucaaccagucccucgccuucauccgcaaguccgacgagcuccuccacaacgucaacgccggcaaguccaccaccaacaucaugaucaccaccaucaucaucgucaucaucgucauccuccucucccucaucgccgucggccuccuccucuacugcaaggcccgcuccacccccgucacccucuccaaggaccagcucuccggcaucaacaacaucgccuucuccaacugaggacuaguguccaccugucccuccugggcugcuggauugucucguuuuccugccaaauaaacaggaucagcgcuuuacagaucuaaaaaaaaaaaaaaaaaaaaaaaaaaaaaaaaaaaaaaaaaaaaaaaaaaaaaaaaaaaaaaaaugcaucccccccccccccccccccccccccccccccaaaggcucuuuucagagccaccagaauu

SEQ ID NO: 5418 - RNA, 1919 nt, Artificial Sequence
  mRNA product Design c-1 comprising derived and/or modified sequence from HRSV(A2)__F_DSCav1_mut5 (opt3)
gggagaguccgcucagccagguugcagaagcggcuuagcguguguccuaaucuucucucugcguguagguaggccugugccgcaaacaagcuuaccauggagcugcucauccuuaaggccaacgcuauuaccacaauacugacugcagugacguucugcuuugccagcggccagaauaucaccgaagaguucuaccaauccacauguucugcggucucaaaaggguauuugagugcuuuaagaacuggaugguacaccagcguuauuacaaucgaacuguccaacauuaaggagaauaaaugcaacgguaccgacgccaaggugaaacuaaucaagcaggaacucgauaaguauaaaaaugcaguaacugagcugcagcuucugaugcagucuacacccgccaccggcucggggucagcuauagcaagcggaguggccgucuguaagguguugcaccucgagggcgaaguuaacaaaaucaagagugcucugcuguccacgaauaaagccguggucucucucagcgguugcgggguguccguauuaacuuuuaagguucuggaccuuaagaacuacauugauaaacaauugcugccuauccuaaauaagcagucauguaguauuagcaacaucgagaccgugauagaguuccagcagaaaaauaacaggcuccuggaaauuacacgggaguuuucugucaaugcgggagugacuaccccaguguccacauauaugcuuaccaacucagaacuguugagccucaucaaugacaugccgauuacgaacgaucaaaagaaacugaugaguaacaauguccagaucguucgccagcagucuuacuccaucaugugcauuauaaaggaggaaguguuagcauauguagugcaacugccccucuacggcgucaucgacacuccuuguuggaaacuucauacaagcccacugugcaccacuaacacaaaggagggcucgaauauuuguuugacccgaacggaucgugggugguacugcgacaacgccggaucuguguccuucuuuccccaggcugaaaccuguaagguucagucaaauagaguguucugcgauacaaugaacaguagaacucugccuagcgaggucaaucucugcaacguggacaucuuuaauccaaaauaugauuguaagauaaugaccuccaaaacagacguaucuagcucaguuauuaccagucugggugccaucguguccugcuacggcaagacuaaauguacagcaagcaacaagugcagggggaucauuaagaccuucucuaauggaugugauuaugucucaaacaaaggcguggacacugucaguguggguaauacgcuuuacuauguuaacaagcaagaggggaaaagccuguacgugaagggagaacccaucauuaauuuuuaugacccuuugguauucccauccgaugaguuugacgcuucuauaucgcaggucaacgagaaaaucaaccagagccucgccuucauucggaaguccgaugaacuguuacacaaugugaacgcgggcaagucaacaaccaauaucaugaucacuaccauuauaaucguuauuaucgugauucugcuaagucucaucgccgucggccugcuuuuguacugcaaagcacgcucuacaccggugacccugagcaaggaccagcucuccgggauaaacaauaucgcuuucucaaacugaggacuaguguccaccugucccuccugggcugcuggauugucucguuuuccugccaaauaaacaggaucagcgcuuuacagaucuaaaaaaaaaaaaaaaaaaaaaaaaaaaaaaaaaaaaaaaaaaaaaaaaaaaaaaaaaaaaaaaaugcaucccccccccccccccccccccccccccccccaaaggcucuuuucagagccaccagaauu

SEQ ID NO: 5419 - RNA, 1919 nt, Artificial Sequence
  mRNA product Design c-1 comprising derived and/or modified sequence from HRSV(A2)__F_DSCav1_mut5 (opt4)
gggagaguccgcucagccagguugcagaagcggcuuagcguguguccuaaucuucucucugcguguagguaggccugugccgcaaacaagcuuaccauggagcugcugauccugaaggccaacgccaucaccaccauccugaccgccgugaccuucugcuucgccagcggccagaacaucaccgaggaguucuaccagagcaccugcagcgccgugagcaagggcuaccugagcgcccugagaaccggcugguacaccagcgugaucaccaucgagcugagcaacaucaaggagaacaagugcaacggcaccgacgccaaggugaagcugaucaagcaggagcuggacaaguacaagaacgccgugaccgagcugcagcugcugaugcagagcacccccgccaccggcagcggcagcgccaucgccagcggcguggccgugugcaaggugcugcaccuggagggcgaggugaacaagaucaagagcgcccugcugagcaccaacaaggccguggugagccugagcggcugcggcgugagcgugcugaccuucaaggugcuggaccugaagaacuacaucgacaagcagcugcugcccauccugaacaagcagagcugcagcaucagcaacaucgagaccgugaucgaguuccagcagaagaacaacagacugcuggagaucaccagagaguucagcgugaacgccggcgugaccacccccgugagcaccuacaugcugaccaacagcgagcugcugagccugaucaacgacaugcccaucaccaacgaccagaagaagcugaugagcaacaacgugcagaucgugagacagcagagcuacagcaucaugugcaucaucaaggaggaggugcuggccuacguggugcagcugccccuguacggcgugaucgacacccccugcuggaagcugcacaccagcccccugugcaccaccaacaccaaggagggcagcaacaucugccugaccagaaccgacagaggcugguacugcgacaacgccggcagcgugagcuucuucccccaggccgagaccugcaaggugcagagcaacagaguguucugcgacaccaugaacagcagaacccugcccagcgaggugaaccugugcaacguggacaucuucaaccccaaguacgacugcaagaucaugaccagcaagaccgacgugagcagcagcgugaucaccagccugggcgccaucgugagcugcuacggcaagaccaagugcaccgccagcaacaagugcagaggcaucaucaagaccuucagcaacggcugcgacuacgugagcaacaagggcguggacaccgugagcgugggcaacacccuguacuacgugaacaagcaggagggcaagagccuguacgugaagggcgagcccaucaucaacuucuacgacccccugguguuccccagcgacgaguucgacgccagcaucagccaggugaacgagaagaucaaccagagccuggccuucaucagaaagagcgacgagcugcugcacaacgugaacgccggcaagagcaccaccaacaucaugaucaccaccaucaucaucgugaucaucgugauccugcugagccugaucgccgugggccugcugcuguacugcaaggccagaagcacccccgugacccugagcaaggaccagcugagcggcaucaacaacaucgccuucagcaacugaggacuaguguccaccugucccuccugggcugcuggauugucucguuuuccugccaaauaaacaggaucagcgcuuuacagaucuaaaaaaaaaaaaaaaaaaaaaaaaaaaaaaaaaaaaaaaaaaaaaaaaaaaaaaaaaaaaaaaaugcaucccccccccccccccccccccccccccccccaaaggcucuuuucagagccaccagaauu

SEQ ID NO: 5420 - RNA, 1919 nt, Artificial Sequence
  mRNA product Design c-1 comprising derived and/or modified sequence from HRSV(A2)__F_DSCav1_mut5 (opt5)
gggagaguccgcucagccagguugcagaagcggcuuagcguguguccuaaucuucucucugcguguagguaggccugugccgcaaacaagcuuaccauggagcugcucauccugaaggccaacgcuauuaccacaauccuuacggccgugaccuucugcuuugcgagcggccagaauauuacagaagaguucuaccaauccaccuguucugcugucagcaaaggguaucuguccgcccucagaacaggaugguacaccucuguuaucacaauugaacugagcaacaucaaggagaauaaaugcaacggcaccgacgccaaggugaaacuuaucaagcaggaacuggauaaguauaaaaaugcugugacggagcuccagcugcugaugcaguccacccccgccacagggucuggaagcgcuauugccuccggcgucgcgguguguaagguucuccaccuggagggggaagugaacaaaaucaagagcgcccuucugucuaccaauaaagcugucgugucccucagcggaugcggcguuucugugcugacauuuaagguccuugaccugaagaacuacauugauaaacaacuccugccuauccugaauaagcaguccuguagcauuucuaacaucgagaccgugauugaguuccagcagaaaaauaaccggcuccuggaaaucacgcgcgaguuuuccgugaaugccggcgucacaaccccgguuagcacauauaugcuuaccaacuccgaacugcucucucugaucaaugacaugcccauuaccaacgaucaaaagaaacuuaugagcaacaaugugcagaucgugagacagcaguccuacagcauuaugugcaucauuaaggaggaaguccuggcuuaugugguucaacucccucuguacggggugaucgacacacccuguuggaaacugcauacgucuccucucugcaccacaaacaccaaggagggauccaauaucugucugacacggaccgaucgcggcugguacugcgacaacgccgggagcgucucuuucuuuccccaggcggaaacguguaaggugcagagcaauagaguuuucugcgauacaaugaacuccagaacccugccuucugaggugaaucucugcaacgucgacauuuuuaauccgaaauaugauuguaagaucaugaccagcaaaacagacguguccagcucugucauuaccucccugggagccaucgugagcugcuacggcaagacaaaauguacggcuucuaacaagugccgggggauuaucaagaccuucuccaauggaugugauuauguuagcaacaaaggcguggacacagucuccgugggcaauacccuuuacuauguuaacaagcaagaggggaaaucucuguacgugaagggagaacccaucauuaauuuuuaugacccucucgucuuccccagcgaugaguuugacgccuccaucucucaggugaacgagaaaauuaaccagagccuggcuuucauccgcaaguccgaugaacugcuccacaaugugaacgccggcaagagcacaaccaauauuaugaucacgaccauuaucaucguuauuaucgucauucugcuuucucugaucgccguggggcuccugcuguacugcaaagcuagauccacaccugugacccuuagcaaggaccagcucucuggaauuaacaauaucgcguucuccaacugaggacuaguguccaccugucccuccugggcugcuggauugucucguuuuccugccaaauaaacaggaucagcgcuuuacagaucuaaaaaaaaaaaaaaaaaaaaaaaaaaaaaaaaaaaaaaaaaaaaaaaaaaaaaaaaaaaaaaaaugcaucccccccccccccccccccccccccccccccaaaggcucuuuucagagccaccagaauu

SEQ ID NO: 5421 - RNA, 1919 nt, Artificial Sequence
  mRNA product Design c-1 comprising derived and/or modified sequence from HRSV(A2)__F_DSCav1_mut5 (opt6)
gggagaguccgcucagccagguugcagaagcggcuuagcguguguccuaaucuucucucugcguguagguaggccugugccgcaaacaagcuuaccauggaacuauuaauacuuaaagccaacgcaauaacaacaauucucacugcugucaccuucugcuucgccucaggccaaaacauaacggaagaauuuuaccaaucaacaugcucugcaguauccaaaggcuaccuaucugcucuaagaacagguugguauacaucaguaauaaccauagaacuaucaaacauaaaagaaaauaaaugcaacggaacagacgcaaaaguuaaacucauaaaacaagaacuagacaaauauaaaaacgcaguuaccgaacuacaacuacuuaugcaauccacucccgccacuggaucaggaucagcaauagcaucaggagucgcaguauguaaagucuuacaccucgaaggcgaagucaauaaaaucaaauccgcauuacuauccacaaacaaagcagucguaucccuaagcggaugcggaguaucaguacuaacauuuaaaguacuagaccuaaaaaauuacaucgauaaacaacuauuaccuauauuaaacaaacaauccugcuccauuucaaauaucgaaaccguaauagaauuucaacaaaaaaacaacagauuacuagaaauaacaagagaauuuuccguaaaugcuggcguaacaacaccaguauccacauacaugcucacaaacuccgaacuacuaucacuaauaaaugacaugcccauaacaaacgaucaaaaaaaacuaaugucaaauaauguacaaauaguaagacaacaaagcuacuccaucauguguauaauaaaagaagaaguacuagcauacguaguucaacuaccacuuuacggcguaaucgacaccccuugcuggaaacuacacaccuccccucuaugcaccacaaacacaaaagaagguuccaacauaugccuuaccagaacagacagaggcugguauugcgacaacgcaggaucaguuucauuuuuuccacaagcugaaacaugcaaaguacaaucaaacagagucuucugcgacacaaugaacucaagaacucuacccucagaaguaaaccuauguaacguagacauuuucaaccccaaauacgacugcaaaauuaugacaucaaaaacagacguuucaucaucaguuaucaccucauuaggagcaauaguaagcugcuacggaaaaacaaaaugcaccgccucaaauaaaugcagaggaauaauaaaaacuuucuccaacggaugcgacuacguuucaaacaaagguguagacacuguaucaguaggaaacacacuauauuacguaaauaaacaagaaggaaaaucacuuuaugucaaaggagaaccaauaaucaauuucuacgacccauuaguauucccaucagacgaauuugaugcuucaauaucacaaguaaacgaaaaaauaaaucaaucacucgcauuuauacgaaaaucagacgaacuacuacacaauguaaacgcaggcaaaucaacaacaaacauaaugauaacaacaauaaucauuguaauaauaguaauacuucuaucucuaauagcaguaggauuacuccucuacugcaaagcaagaucaaccccuguaacacuaucaaaagaccaacuuucagguauaaauaauauagcuuuuuccaauuaaggacuaguguccaccugucccuccugggcugcuggauugucucguuuuccugccaaauaaacaggaucagcgcuuuacagaucuaaaaaaaaaaaaaaaaaaaaaaaaaaaaaaaaaaaaaaaaaaaaaaaaaaaaaaaaaaaaaaaaugcaucccccccccccccccccccccccccccccccaaaggcucuuuucagagccaccagaauu

SEQ ID NO: 5422 - RNA, 1919 nt, Artificial Sequence
  mRNA product Design c-1 comprising derived and/or modified sequence from HRSV(A2)__F_DSCav1_mut5 (opt11)
gggagaguccgcucagccagguugcagaagcggcuuagcguguguccuaaucuucucucugcguguagguaggccugugccgcaaacaagcuuaccauggagcuccuaauccucaaagccaacgcgaucacuacaauccucacagccgucaccuucugcuucgccuccggccaaaacaucaccgaggaguucuaccaaucaaccugcuccgccguaucaaaaggauaccuaagcgcccuacggaccggcugguacacaucugucaucaccaucgaacuaucaaacaucaaagaaaacaaaugcaacggaaccgacgcaaaagucaaacugauuaaacaagaacuagacaaauacaaaaacgcagucaccgaacugcaauuacucaugcaaagcacaccggccaccggcucaggcagcgccaucgccuccggcgucgccgucugcaaaguucuccaccucgagggcgaagucaacaaaauaaaaucugcccuccucuccaccaacaaagccgucgucucccucagcggcugcggagucuccguccucaccuucaaaguucucgaucucaagaacuauauugacaaacaacuucuacccauacucaacaaacaaagcugcagcauauccaacaucgaaaccgucaucgaguuccaacaaaagaacaaccgccuccucgaaauaacccgcgaguucagcguuaacgccggagucacuaccccugucuccaccuacaugcucaccaacuccgaacuccuaucacuaaucaacgacaugcccauaaccaacgaccagaagaaacucauguccaacaacguccaaauuguccgacaacaaagcuacuccauaaugugcauaauaaaagaggaaguccucgccuacgucguacaacugccccuuuauggcguaaucgacacacccugcuggaaacuccacacgucaccccucugcaccaccaacacaaaagaaggcucgaacaucugccuaacacggacugaccgcggcugguacugcgacaacgccggcuccgucagcuucuucccacaagccgaaaccugcaaaguacaauccaaccgaguauucugcgacaccaugaacuccagaacccuccccucagaggucaaccugugcaacguagacaucuucaaccccaaauacgacugcaaaauaaugaccucaaaaacagacgucuccucuuccguaaucaccagccucggagccaucgucagcugcuacggcaaaaccaaaugcaccgccucaaacaaaugccgcggcaucaucaaaacauucucaaacggcugcgacuacgucuccaacaaaggcgucgacacaguaagcguaggcaacacacuguacuacgucaacaaacaagagggaaaaucacucuacgucaaaggagaacccauaaucaacuucuacgacccccucguuuuccccagcgacgaguucgacgccagcauaucccaagucaacgagaaaauuaaccaaucccuagcauucauccgaaaaucugacgaacugcuccacaacgucaacgcgggaaaaucaacaaccaacauaaugauaaccacaaucauaauagucaucaucguaauccuccucagccuaaucgcugucggccuccuccucuacugcaaagcccguuccaccccagucacacuuuccaaggaccaacuaagcggaauaaacaacaucgcguucucaaacuaaggacuaguguccaccugucccuccugggcugcuggauugucucguuuuccugccaaauaaacaggaucagcgcuuuacagaucuaaaaaaaaaaaaaaaaaaaaaaaaaaaaaaaaaaaaaaaaaaaaaaaaaaaaaaaaaaaaaaaaugcaucccccccccccccccccccccccccccccccaaaggcucuuuucagagccaccagaauu

SEQ ID NO: 5423 - RNA, 2009 nt, Artificial Sequence
  mRNA product Design c-2 comprising derived and/or modified sequence from HRSV(A2)__F_DSCav1_mut5 (opt1)
gggagacuccugucgggcggaaguaggaggaguagaguuuaaaaacaguacucuuuuuccgguucgggacguaguugaagcaacgacaagccggauaaccgcucuugagacaggaagcuuaccauggagcugcucauccugaaggccaacgccaucaccaccauccugacggcggugaccuucugcuucgccagcggccagaacaucaccgaggaguucuaccaguccacgugcagcgccgucuccaagggguaccucagcgcccugcggaccggcugguacaccuccgugaucaccaucgagcugagcaacaucaaggagaacaagugcaacgggaccgacgccaaggugaagcucaucaagcaggagcuggacaaguacaagaacgcggucacggagcugcagcuccugaugcaguccaccccggcaaccggcuccggcuccgccaucgcgagcggcgucgccgugugcaaggugcugcaccucgagggggaggucaacaagaucaagagcgcccugcuguccaccaacaaggccguggugagccucuccggcugcggcgucagcgugcugaccuucaaggugcuggaccucaagaacuacaucgacaagcagcugcugcccauccugaacaagcagagcugcuccaucagcaacaucgagacggugaucgaguuccagcagaagaacaaccggcuccuggagaucacccgcgaguucagcgugaacgccggggucaccacccccguguccacguacaugcugaccaacagcgagcuccugucccugaucaacgacaugccgaucaccaacgaccagaagaagcucaugagcaacaacgugcagaucguccggcagcaguccuacagcaucaugugcaucaucaaggaggaggugcuggcguacgugguccagcugccccucuacggcgugaucgacacccccugcuggaagcugcacacgagcccccugugcaccaccaacaccaaggagggguccaacaucugccucacgcgcaccgaccggggcugguacugcgacaacgccggcagcgucuccuucuucccgcaggccgagaccugcaaggugcagagcaaccgcguguucugcgacaccaugaacucccggacgcugcccagcgagguaaaccucugcaacgucgacaucuucaaccccaaguacgacugcaagaucaugaccuccaagaccgacgugagcuccagcgugaucaccucccugggggccaucgucagcugcuacggcaagacgaagugcaccgccagcaacaagugccgggggaucaucaagaccuucuccaacggcugcgacuacgugagcaacaagggcguggacaccguguccgucgggaacacccuguacuacgugaacaagcaggagggcaagagccucuacgugaagggggagcccaucaucaacuucuacgacccgcuggucuuccccuccgacgaguucgacgcgagcaucucccaggugaacgagaagaucaaccagagccuggccuucauccgcaaguccgacgagcugcuccacaacgugaacgccggcaagagcacgaccaacaucaugaucaccaccaucaucaucgucaucaucgugauccugcugucccucaucgccguggggcugcugcucuacugcaaggcccggagcacgcccgucacccuguccaaggaccagcugagcggcaucaacaacaucgcguucuccaacugaggacuaguggaagcauuuuccuggcugauuaaaagaaauuacucagcuauggucaucuguuccuguuagaaggcuaugcagcauauuauauacuaugcgcauguuaugaaaugcauaauaaaaaauuuuaaaaaaucuaaaagaucuaaaaaaaaaaaaaaaaaaaaaaaaaaaaaaaaaaaaaaaaaaaaaaaaaaaaaaaaaaaaaaaaugcaucccccccccccccccccccccccccccccccaaaggcucuuuucagagccaccagaauu

SEQ ID NO: 5424 - RNA, 2009 nt, Artificial Sequence
  mRNA product Design c-2 comprising derived and/or modified sequence from HRSV(A2)__F_DSCav1_mut5 (opt1)
gggagacuccugucgggcggaaguaggaggaguagaguuuaaaaacaguacucuuuuuccgguucgggacguaguugaagcaacgacaagccggauaaccgcucuugagacaggaagcuuaccauggagcugcucauccugaaggccaacgccaucaccaccauccugacggcggugaccuucugcuucgccagcggccagaacaucaccgaggaguucuaccaguccacgugcagcgccgucuccaagggguaccucagcgcccugcgcaccggcugguacaccuccgugaucaccaucgagcugagcaacaucaaggagaacaagugcaacgggaccgacgccaaggugaagcucaucaagcaggagcuggacaaguacaagaacgcggucacggagcugcagcuccugaugcaguccacccccgccaccggcagcggguccgccaucgccagcggcguggcggugugcaagguccugcaccucgagggcgaggugaacaagaucaaguccgcccugcugagcaccaacaaggccguggucucccucagcgggugcggcguguccgugcugacguucaagguccuggaccucaagaacuacaucgacaagcagcugcugccgauccucaacaagcagagcugcuccaucagcaacaucgagaccgugaucgaguuccagcagaagaacaaccggcugcuggagaucacccgcgaguucuccgugaacgccggggucaccacgcccgugagcaccuacaugcucaccaacagcgagcugcugucccucaucaacgacaugcccaucaccaacgaccagaagaagcugaugagcaacaacgugcagaucguccggcagcaguccuacagcaucaugugcaucaucaaggaggaggugcuggccuacgugguccagcucccccuguacggcgugaucgacacgccgugcuggaagcugcacaccagcccccucugcaccaccaacacgaaggagggguccaacaucugccugacccgcaccgaccggggcugguacugcgacaacgcgggcuccgugagcuucuucccccaggccgagaccugcaagguccaguccaaccgcguguucugcgacacgaugaacagccggacccuccccuccgaggucaaccugugcaacguggacaucuucaacccgaaguacgacugcaagaucaugaccagcaagaccgacguguccagcuccgucaucacgagccugggggccaucguguccugcuacggcaagaccaagugcaccgccagcaacaagugccgggggaucaucaagaccuucuccaacggcugcgacuacgugagcaacaagggcgucgacacggugagcguggggaacacccucuacuacgucaacaagcaggagggcaagucccuguacgugaagggggagcccaucaucaacuucuacgacccccugguguuccccagcgacgaguucgacgccuccaucagccaggucaacgagaagaucaaccagucccucgcguucauccgcaagagcgacgagcugcugcacaacgugaacgccggcaaguccaccaccaacaucaugaucaccacgaucaucaucgugaucaucgucauccuccugagccugaucgccguggggcuccugcuguacugcaaggcccgguccaccccggugacccugagcaaggaccagcucuccggcaucaacaacaucgccuucagcaacugaggacuaguggaagcauuuuccuggcugauuaaaagaaauuacucagcuauggucaucuguuccuguuagaaggcuaugcagcauauuauauacuaugcgcauguuaugaaaugcauaauaaaaaauuuuaaaaaaucuaaaagaucuaaaaaaaaaaaaaaaaaaaaaaaaaaaaaaaaaaaaaaaaaaaaaaaaaaaaaaaaaaaaaaaaugcaucccccccccccccccccccccccccccccccaaaggcucuuuucagagccaccagaauu

SEQ ID NO: 5425 - RNA, 2009 nt, Artificial Sequence
  mRNA product Design c-2 comprising derived and/or modified sequence from HRSV(A2)__F_DSCav1_mut5 (opt2)
gggagacuccugucgggcggaaguaggaggaguagaguuuaaaaacaguacucuuuuuccgguucgggacguaguugaagcaacgacaagccggauaaccgcucuugagacaggaagcuuaccauggagcuccucauccucaaggccaacgccaucaccaccauccucaccgccgucaccuucugcuucgccuccggccagaacaucaccgaggaguucuaccaguccaccugcuccgccgucuccaagggcuaccucuccgcccuccgcaccggcugguacaccuccgucaucaccaucgagcucuccaacaucaaggagaacaagugcaacggcaccgacgccaaggucaagcucaucaagcaggagcucgacaaguacaagaacgccgucaccgagcuccagcuccucaugcaguccacccccgccaccggcuccggcuccgccaucgccuccggcgucgccgucugcaagguccuccaccucgagggcgaggucaacaagaucaaguccgcccuccucuccaccaacaaggccgucgucucccucuccggcugcggcgucuccguccucaccuucaagguccucgaccucaagaacuacaucgacaagcagcuccuccccauccucaacaagcaguccugcuccaucuccaacaucgagaccgucaucgaguuccagcagaagaacaaccgccuccucgagaucacccgcgaguucuccgucaacgccggcgucaccacccccgucuccaccuacaugcucaccaacuccgagcuccucucccucaucaacgacaugcccaucaccaacgaccagaagaagcucauguccaacaacguccagaucguccgccagcaguccuacuccaucaugugcaucaucaaggaggagguccucgccuacgucguccagcucccccucuacggcgucaucgacacccccugcuggaagcuccacaccuccccccucugcaccaccaacaccaaggagggcuccaacaucugccucacccgcaccgaccgcggcugguacugcgacaacgccggcuccgucuccuucuucccccaggccgagaccugcaagguccaguccaaccgcgucuucugcgacaccaugaacucccgcacccuccccuccgaggucaaccucugcaacgucgacaucuucaaccccaaguacgacugcaagaucaugaccuccaagaccgacgucuccuccuccgucaucaccucccucggcgccaucgucuccugcuacggcaagaccaagugcaccgccuccaacaagugccgcggcaucaucaagaccuucuccaacggcugcgacuacgucuccaacaagggcgucgacaccgucuccgucggcaacacccucuacuacgucaacaagcaggagggcaagucccucuacgucaagggcgagcccaucaucaacuucuacgacccccucgucuuccccuccgacgaguucgacgccuccaucucccaggucaacgagaagaucaaccagucccucgccuucauccgcaaguccgacgagcuccuccacaacgucaacgccggcaaguccaccaccaacaucaugaucaccaccaucaucaucgucaucaucgucauccuccucucccucaucgccgucggccuccuccucuacugcaaggcccgcuccacccccgucacccucuccaaggaccagcucuccggcaucaacaacaucgccuucuccaacugaggacuaguggaagcauuuuccuggcugauuaaaagaaauuacucagcuauggucaucuguuccuguuagaaggcuaugcagcauauuauauacuaugcgcauguuaugaaaugcauaauaaaaaauuuuaaaaaaucuaaaagaucuaaaaaaaaaaaaaaaaaaaaaaaaaaaaaaaaaaaaaaaaaaaaaaaaaaaaaaaaaaaaaaaaugcaucccccccccccccccccccccccccccccccaaaggcucuuuucagagccaccagaauu

SEQ ID NO: 5426 - RNA, 2009 nt, Artificial Sequence
  mRNA product Design c-2 comprising derived and/or modified sequence from HRSV(A2)__F_DSCav1_mut5 (opt3)
gggagacuccugucgggcggaaguaggaggaguagaguuuaaaaacaguacucuuuuuccgguucgggacguaguugaagcaacgacaagccggauaaccgcucuugagacaggaagcuuaccauggagcugcucauccuuaaggccaacgcuauuaccacaauacugacugcagugacguucugcuuugccagcggccagaauaucaccgaagaguucuaccaauccacauguucugcggucucaaaaggguauuugagugcuuuaagaacuggaugguacaccagcguuauuacaaucgaacuguccaacauuaaggagaauaaaugcaacgguaccgacgccaaggugaaacuaaucaagcaggaacucgauaaguauaaaaaugcaguaacugagcugcagcuucugaugcagucuacacccgccaccggcucggggucagcuauagcaagcggaguggccgucuguaagguguugcaccucgagggcgaaguuaacaaaaucaagagugcucugcuguccacgaauaaagccguggucucucucagcgguugcgggguguccguauuaacuuuuaagguucuggaccuuaagaacuacauugauaaacaauugcugccuauccuaaauaagcagucauguaguauuagcaacaucgagaccgugauagaguuccagcagaaaaauaacaggcuccuggaaauuacacgggaguuuucugucaaugcgggagugacuaccccaguguccacauauaugcuuaccaacucagaacuguugagccucaucaaugacaugccgauuacgaacgaucaaaagaaacugaugaguaacaauguccagaucguucgccagcagucuuacuccaucaugugcauuauaaaggaggaaguguuagcauauguagugcaacugccccucuacggcgucaucgacacuccuuguuggaaacuucauacaagcccacugugcaccacuaacacaaaggagggcucgaauauuuguuugacccgaacggaucgugggugguacugcgacaacgccggaucuguguccuucuuuccccaggcugaaaccuguaagguucagucaaauagaguguucugcgauacaaugaacaguagaacucugccuagcgaggucaaucucugcaacguggacaucuuuaauccaaaauaugauuguaagauaaugaccuccaaaacagacguaucuagcucaguuauuaccagucugggugccaucguguccugcuacggcaagacuaaauguacagcaagcaacaagugcagggggaucauuaagaccuucucuaauggaugugauuaugucucaaacaaaggcguggacacugucaguguggguaauacgcuuuacuauguuaacaagcaagaggggaaaagccuguacgugaagggagaacccaucauuaauuuuuaugacccuuugguauucccauccgaugaguuugacgcuucuauaucgcaggucaacgagaaaaucaaccagagccucgccuucauucggaaguccgaugaacuguuacacaaugugaacgcgggcaagucaacaaccaauaucaugaucacuaccauuauaaucguuauuaucgugauucugcuaagucucaucgccgucggccugcuuuuguacugcaaagcacgcucuacaccggugacccugagcaaggaccagcucuccgggauaaacaauaucgcuuucucaaacugaggacuaguggaagcauuuuccuggcugauuaaaagaaauuacucagcuauggucaucuguuccuguuagaaggcuaugcagcauauuauauacuaugcgcauguuaugaaaugcauaauaaaaaauuuuaaaaaaucuaaaagaucuaaaaaaaaaaaaaaaaaaaaaaaaaaaaaaaaaaaaaaaaaaaaaaaaaaaaaaaaaaaaaaaaugcaucccccccccccccccccccccccccccccccaaaggcucuuuucagagccaccagaauu

SEQ ID NO: 5427 - RNA, 2009 nt, Artificial Sequence
  mRNA product Design c-2 comprising derived and/or modified sequence from HRSV(A2)__F_DSCav1_mut5 (opt4)
gggagacuccugucgggcggaaguaggaggaguagaguuuaaaaacaguacucuuuuuccgguucgggacguaguugaagcaacgacaagccggauaaccgcucuugagacaggaagcuuaccauggagcugcugauccugaaggccaacgccaucaccaccauccugaccgccgugaccuucugcuucgccagcggccagaacaucaccgaggaguucuaccagagcaccugcagcgccgugagcaagggcuaccugagcgcccugagaaccggcugguacaccagcgugaucaccaucgagcugagcaacaucaaggagaacaagugcaacggcaccgacgccaaggugaagcugaucaagcaggagcuggacaaguacaagaacgccgugaccgagcugcagcugcugaugcagagcacccccgccaccggcagcggcagcgccaucgccagcggcguggccgugugcaaggugcugcaccuggagggcgaggugaacaagaucaagagcgcccugcugagcaccaacaaggccguggugagccugagcggcugcggcgugagcgugcugaccuucaaggugcuggaccugaagaacuacaucgacaagcagcugcugcccauccugaacaagcagagcugcagcaucagcaacaucgagaccgugaucgaguuccagcagaagaacaacagacugcuggagaucaccagagaguucagcgugaacgccggcgugaccacccccgugagcaccuacaugcugaccaacagcgagcugcugagccugaucaacgacaugcccaucaccaacgaccagaagaagcugaugagcaacaacgugcagaucgugagacagcagagcuacagcaucaugugcaucaucaaggaggaggugcuggccuacguggugcagcugccccuguacggcgugaucgacacccccugcuggaagcugcacaccagcccccugugcaccaccaacaccaaggagggcagcaacaucugccugaccagaaccgacagaggcugguacugcgacaacgccggcagcgugagcuucuucccccaggccgagaccugcaaggugcagagcaacagaguguucugcgacaccaugaacagcagaacccugcccagcgaggugaaccugugcaacguggacaucuucaaccccaaguacgacugcaagaucaugaccagcaagaccgacgugagcagcagcgugaucaccagccugggcgccaucgugagcugcuacggcaagaccaagugcaccgccagcaacaagugcagaggcaucaucaagaccuucagcaacggcugcgacuacgugagcaacaagggcguggacaccgugagcgugggcaacacccuguacuacgugaacaagcaggagggcaagagccuguacgugaagggcgagcccaucaucaacuucuacgacccccugguguuccccagcgacgaguucgacgccagcaucagccaggugaacgagaagaucaaccagagccuggccuucaucagaaagagcgacgagcugcugcacaacgugaacgccggcaagagcaccaccaacaucaugaucaccaccaucaucaucgugaucaucgugauccugcugagccugaucgccgugggccugcugcuguacugcaaggccagaagcacccccgugacccugagcaaggaccagcugagcggcaucaacaacaucgccuucagcaacugaggacuaguggaagcauuuuccuggcugauuaaaagaaauuacucagcuauggucaucuguuccuguuagaaggcuaugcagcauauuauauacuaugcgcauguuaugaaaugcauaauaaaaaauuuuaaaaaaucuaaaagaucuaaaaaaaaaaaaaaaaaaaaaaaaaaaaaaaaaaaaaaaaaaaaaaaaaaaaaaaaaaaaaaaaugcaucccccccccccccccccccccccccccccccaaaggcucuuuucagagccaccagaauu

SEQ ID NO: 5428 - RNA, 2009 nt, Artificial Sequence
  mRNA product Design c-2 comprising derived and/or modified sequence from HRSV(A2)__F_DSCav1_mut5 (opt5)
gggagacuccugucgggcggaaguaggaggaguagaguuuaaaaacaguacucuuuuuccgguucgggacguaguugaagcaacgacaagccggauaaccgcucuugagacaggaagcuuaccauggagcugcucauccugaaggccaacgcuauuaccacaauccuuacggccgugaccuucugcuuugcgagcggccagaauauuacagaagaguucuaccaauccaccuguucugcugucagcaaaggguaucuguccgcccucagaacaggaugguacaccucuguuaucacaauugaacugagcaacaucaaggagaauaaaugcaacggcaccgacgccaaggugaaacuuaucaagcaggaacuggauaaguauaaaaaugcugugacggagcuccagcugcugaugcaguccacccccgccacagggucuggaagcgcuauugccuccggcgucgcgguguguaagguucuccaccuggagggggaagugaacaaaaucaagagcgcccuucugucuaccaauaaagcugucgugucccucagcggaugcggcguuucugugcugacauuuaagguccuugaccugaagaacuacauugauaaacaacuccugccuauccugaauaagcaguccuguagcauuucuaacaucgagaccgugauugaguuccagcagaaaaauaaccggcuccuggaaaucacgcgcgaguuuuccgugaaugccggcgucacaaccccgguuagcacauauaugcuuaccaacuccgaacugcucucucugaucaaugacaugcccauuaccaacgaucaaaagaaacuuaugagcaacaaugugcagaucgugagacagcaguccuacagcauuaugugcaucauuaaggaggaaguccuggcuuaugugguucaacucccucuguacggggugaucgacacacccuguuggaaacugcauacgucuccucucugcaccacaaacaccaaggagggauccaauaucugucugacacggaccgaucgcggcugguacugcgacaacgccgggagcgucucuuucuuuccccaggcggaaacguguaaggugcagagcaauagaguuuucugcgauacaaugaacuccagaacccugccuucugaggugaaucucugcaacgucgacauuuuuaauccgaaauaugauuguaagaucaugaccagcaaaacagacguguccagcucugucauuaccucccugggagccaucgugagcugcuacggcaagacaaaauguacggcuucuaacaagugccgggggauuaucaagaccuucuccaauggaugugauuauguuagcaacaaaggcguggacacagucuccgugggcaauacccuuuacuauguuaacaagcaagaggggaaaucucuguacgugaagggagaacccaucauuaauuuuuaugacccucucgucuuccccagcgaugaguuugacgccuccaucucucaggugaacgagaaaauuaaccagagccuggcuuucauccgcaaguccgaugaacugcuccacaaugugaacgccggcaagagcacaaccaauauuaugaucacgaccauuaucaucguuauuaucgucauucugcuuucucugaucgccguggggcuccugcuguacugcaaagcuagauccacaccugugacccuuagcaaggaccagcucucuggaauuaacaauaucgcguucuccaacugaggacuaguggaagcauuuuccuggcugauuaaaagaaauuacucagcuauggucaucuguuccuguuagaaggcuaugcagcauauuauauacuaugcgcauguuaugaaaugcauaauaaaaaauuuuaaaaaaucuaaaagaucuaaaaaaaaaaaaaaaaaaaaaaaaaaaaaaaaaaaaaaaaaaaaaaaaaaaaaaaaaaaaaaaaugcaucccccccccccccccccccccccccccccccaaaggcucuuuucagagccaccagaauu

SEQ ID NO: 5429 - RNA, 2009 nt, Artificial Sequence
  mRNA product Design c-2 comprising derived and/or modified sequence from HRSV(A2)__F_DSCav1_mut5 (opt6)
gggagacuccugucgggcggaaguaggaggaguagaguuuaaaaacaguacucuuuuuccgguucgggacguaguugaagcaacgacaagccggauaaccgcucuugagacaggaagcuuaccauggaacuauuaauacuuaaagccaacgcaauaacaacaauucucacugcugucaccuucugcuucgccucaggccaaaacauaacggaagaauuuuaccaaucaacaugcucugcaguauccaaaggcuaccuaucugcucuaagaacagguugguauacaucaguaauaaccauagaacuaucaaacauaaaagaaaauaaaugcaacggaacagacgcaaaaguuaaacucauaaaacaagaacuagacaaauauaaaaacgcaguuaccgaacuacaacuacuuaugcaauccacucccgccacuggaucaggaucagcaauagcaucaggagucgcaguauguaaagucuuacaccucgaaggcgaagucaauaaaaucaaauccgcauuacuauccacaaacaaagcagucguaucccuaagcggaugcggaguaucaguacuaacauuuaaaguacuagaccuaaaaaauuacaucgauaaacaacuauuaccuauauuaaacaaacaauccugcuccauuucaaauaucgaaaccguaauagaauuucaacaaaaaaacaacagauuacuagaaauaacaagagaauuuuccguaaaugcuggcguaacaacaccaguauccacauacaugcucacaaacuccgaacuacuaucacuaauaaaugacaugcccauaacaaacgaucaaaaaaaacuaaugucaaauaauguacaaauaguaagacaacaaagcuacuccaucauguguauaauaaaagaagaaguacuagcauacguaguucaacuaccacuuuacggcguaaucgacaccccuugcuggaaacuacacaccuccccucuaugcaccacaaacacaaaagaagguuccaacauaugccuuaccagaacagacagaggcugguauugcgacaacgcaggaucaguuucauuuuuuccacaagcugaaacaugcaaaguacaaucaaacagagucuucugcgacacaaugaacucaagaacucuacccucagaaguaaaccuauguaacguagacauuuucaaccccaaauacgacugcaaaauuaugacaucaaaaacagacguuucaucaucaguuaucaccucauuaggagcaauaguaagcugcuacggaaaaacaaaaugcaccgccucaaauaaaugcagaggaauaauaaaaacuuucuccaacggaugcgacuacguuucaaacaaagguguagacacuguaucaguaggaaacacacuauauuacguaaauaaacaagaaggaaaaucacuuuaugucaaaggagaaccaauaaucaauuucuacgacccauuaguauucccaucagacgaauuugaugcuucaauaucacaaguaaacgaaaaaauaaaucaaucacucgcauuuauacgaaaaucagacgaacuacuacacaauguaaacgcaggcaaaucaacaacaaacauaaugauaacaacaauaaucauuguaauaauaguaauacuucuaucucuaauagcaguaggauuacuccucuacugcaaagcaagaucaaccccuguaacacuaucaaaagaccaacuuucagguauaaauaauauagcuuuuuccaauuaaggacuaguggaagcauuuuccuggcugauuaaaagaaauuacucagcuauggucaucuguuccuguuagaaggcuaugcagcauauuauauacuaugcgcauguuaugaaaugcauaauaaaaaauuuuaaaaaaucuaaaagaucuaaaaaaaaaaaaaaaaaaaaaaaaaaaaaaaaaaaaaaaaaaaaaaaaaaaaaaaaaaaaaaaaugcaucccccccccccccccccccccccccccccccaaaggcucuuuucagagccaccagaauu

SEQ ID NO: 5430 - RNA, 2009 nt, Artificial Sequence
  mRNA product Design c-2 comprising derived and/or modified sequence from HRSV(A2)__F_DSCav1_mut5 (opt11)
gggagacuccugucgggcggaaguaggaggaguagaguuuaaaaacaguacucuuuuuccgguucgggacguaguugaagcaacgacaagccggauaaccgcucuugagacaggaagcuuaccauggagcuccuaauccucaaagccaacgcgaucacuacaauccucacagccgucaccuucugcuucgccuccggccaaaacaucaccgaggaguucuaccaaucaaccugcuccgccguaucaaaaggauaccuaagcgcccuacggaccggcugguacacaucugucaucaccaucgaacuaucaaacaucaaagaaaacaaaugcaacggaaccgacgcaaaagucaaacugauuaaacaagaacuagacaaauacaaaaacgcagucaccgaacugcaauuacucaugcaaagcacaccggccaccggcucaggcagcgccaucgccuccggcgucgccgucugcaaaguucuccaccucgagggcgaagucaacaaaauaaaaucugcccuccucuccaccaacaaagccgucgucucccucagcggcugcggagucuccguccucaccuucaaaguucucgaucucaagaacuauauugacaaacaacuucuacccauacucaacaaacaaagcugcagcauauccaacaucgaaaccgucaucgaguuccaacaaaagaacaaccgccuccucgaaauaacccgcgaguucagcguuaacgccggagucacuaccccugucuccaccuacaugcucaccaacuccgaacuccuaucacuaaucaacgacaugcccauaaccaacgaccagaagaaacucauguccaacaacguccaaauuguccgacaacaaagcuacuccauaaugugcauaauaaaagaggaaguccucgccuacgucguacaacugccccuuuauggcguaaucgacacacccugcuggaaacuccacacgucaccccucugcaccaccaacacaaaagaaggcucgaacaucugccuaacacggacugaccgcggcugguacugcgacaacgccggcuccgucagcuucuucccacaagccgaaaccugcaaaguacaauccaaccgaguauucugcgacaccaugaacuccagaacccuccccucagaggucaaccugugcaacguagacaucuucaaccccaaauacgacugcaaaauaaugaccucaaaaacagacgucuccucuuccguaaucaccagccucggagccaucgucagcugcuacggcaaaaccaaaugcaccgccucaaacaaaugccgcggcaucaucaaaacauucucaaacggcugcgacuacgucuccaacaaaggcgucgacacaguaagcguaggcaacacacuguacuacgucaacaaacaagagggaaaaucacucuacgucaaaggagaacccauaaucaacuucuacgacccccucguuuuccccagcgacgaguucgacgccagcauaucccaagucaacgagaaaauuaaccaaucccuagcauucauccgaaaaucugacgaacugcuccacaacgucaacgcgggaaaaucaacaaccaacauaaugauaaccacaaucauaauagucaucaucguaauccuccucagccuaaucgcugucggccuccuccucuacugcaaagcccguuccaccccagucacacuuuccaaggaccaacuaagcggaauaaacaacaucgcguucucaaacuaaggacuaguggaagcauuuuccuggcugauuaaaagaaauuacucagcuauggucaucuguuccuguuagaaggcuaugcagcauauuauauacuaugcgcauguuaugaaaugcauaauaaaaaauuuuaaaaaaucuaaaagaucuaaaaaaaaaaaaaaaaaaaaaaaaaaaaaaaaaaaaaaaaaaaaaaaaaaaaaaaaaaaaaaaaugcaucccccccccccccccccccccccccccccccaaaggcucuuuucagagccaccagaauu

SEQ ID NO: 5431 - RNA, 1986 nt, Artificial Sequence
  mRNA product Design c-3 comprising derived and/or modified sequence from HRSV(A2)__F_DSCav1_mut5 (opt1)
gggagaguccgcucagccagguugcagaagcggcuuagcguguguccuaaucuucucucugcguguagguaggccugugccgcaaacaagcuuaccauggagcugcucauccugaaggccaacgccaucaccaccauccugacggcggugaccuucugcuucgccagcggccagaacaucaccgaggaguucuaccaguccacgugcagcgccgucuccaagggguaccucagcgcccugcggaccggcugguacaccuccgugaucaccaucgagcugagcaacaucaaggagaacaagugcaacgggaccgacgccaaggugaagcucaucaagcaggagcuggacaaguacaagaacgcggucacggagcugcagcuccugaugcaguccaccccggcaaccggcuccggcuccgccaucgcgagcggcgucgccgugugcaaggugcugcaccucgagggggaggucaacaagaucaagagcgcccugcuguccaccaacaaggccguggugagccucuccggcugcggcgucagcgugcugaccuucaaggugcuggaccucaagaacuacaucgacaagcagcugcugcccauccugaacaagcagagcugcuccaucagcaacaucgagacggugaucgaguuccagcagaagaacaaccggcuccuggagaucacccgcgaguucagcgugaacgccggggucaccacccccguguccacguacaugcugaccaacagcgagcuccugucccugaucaacgacaugccgaucaccaacgaccagaagaagcucaugagcaacaacgugcagaucguccggcagcaguccuacagcaucaugugcaucaucaaggaggaggugcuggcguacgugguccagcugccccucuacggcgugaucgacacccccugcuggaagcugcacacgagcccccugugcaccaccaacaccaaggagggguccaacaucugccucacgcgcaccgaccggggcugguacugcgacaacgccggcagcgucuccuucuucccgcaggccgagaccugcaaggugcagagcaaccgcguguucugcgacaccaugaacucccggacgcugcccagcgagguaaaccucugcaacgucgacaucuucaaccccaaguacgacugcaagaucaugaccuccaagaccgacgugagcuccagcgugaucaccucccugggggccaucgucagcugcuacggcaagacgaagugcaccgccagcaacaagugccgggggaucaucaagaccuucuccaacggcugcgacuacgugagcaacaagggcguggacaccguguccgucgggaacacccuguacuacgugaacaagcaggagggcaagagccucuacgugaagggggagcccaucaucaacuucuacgacccgcuggucuuccccuccgacgaguucgacgcgagcaucucccaggugaacgagaagaucaaccagagccuggccuucauccgcaaguccgacgagcugcuccacaacgugaacgccggcaagagcacgaccaacaucaugaucaccaccaucaucaucgucaucaucgugauccugcugucccucaucgccguggggcugcugcucuacugcaaggcccggagcacgcccgucacccuguccaaggaccagcugagcggcaucaacaacaucgcguucuccaacugaggacuaguacuggcugcaucucccuuuccucuguccuccauccuucucccaggauggugaagggggaccugguacccagugauccccaccccaggauccuaaaucaugacuuaccugcuaauaaaaacucauuggaaaagugagaagaucuaaaaaaaaaaaaaaaaaaaaaaaaaaaaaaaaaaaaaaaaaaaaaaaaaaaaaaaaaaaaaaaaugcaucccccccccccccccccccccccccccccccaaaggcucuuuucagagccaccagaauu

SEQ ID NO: 5432 - RNA, 1986 nt, Artificial Sequence
  mRNA product Design c-3 comprising derived and/or modified sequence from HRSV(A2)__F_DSCav1_mut5 (opt1)
gggagaguccgcucagccagguugcagaagcggcuuagcguguguccuaaucuucucucugcguguagguaggccugugccgcaaacaagcuuaccauggagcugcucauccugaaggccaacgccaucaccaccauccugacggcggugaccuucugcuucgccagcggccagaacaucaccgaggaguucuaccaguccacgugcagcgccgucuccaagggguaccucagcgcccugcgcaccggcugguacaccuccgugaucaccaucgagcugagcaacaucaaggagaacaagugcaacgggaccgacgccaaggugaagcucaucaagcaggagcuggacaaguacaagaacgcggucacggagcugcagcuccugaugcaguccacccccgccaccggcagcggguccgccaucgccagcggcguggcggugugcaagguccugcaccucgagggcgaggugaacaagaucaaguccgcccugcugagcaccaacaaggccguggucucccucagcgggugcggcguguccgugcugacguucaagguccuggaccucaagaacuacaucgacaagcagcugcugccgauccucaacaagcagagcugcuccaucagcaacaucgagaccgugaucgaguuccagcagaagaacaaccggcugcuggagaucacccgcgaguucuccgugaacgccggggucaccacgcccgugagcaccuacaugcucaccaacagcgagcugcugucccucaucaacgacaugcccaucaccaacgaccagaagaagcugaugagcaacaacgugcagaucguccggcagcaguccuacagcaucaugugcaucaucaaggaggaggugcuggccuacgugguccagcucccccuguacggcgugaucgacacgccgugcuggaagcugcacaccagcccccucugcaccaccaacacgaaggagggguccaacaucugccugacccgcaccgaccggggcugguacugcgacaacgcgggcuccgugagcuucuucccccaggccgagaccugcaagguccaguccaaccgcguguucugcgacacgaugaacagccggacccuccccuccgaggucaaccugugcaacguggacaucuucaacccgaaguacgacugcaagaucaugaccagcaagaccgacguguccagcuccgucaucacgagccugggggccaucguguccugcuacggcaagaccaagugcaccgccagcaacaagugccgggggaucaucaagaccuucuccaacggcugcgacuacgugagcaacaagggcgucgacacggugagcguggggaacacccucuacuacgucaacaagcaggagggcaagucccuguacgugaagggggagcccaucaucaacuucuacgacccccugguguuccccagcgacgaguucgacgccuccaucagccaggucaacgagaagaucaaccagucccucgcguucauccgcaagagcgacgagcugcugcacaacgugaacgccggcaaguccaccaccaacaucaugaucaccacgaucaucaucgugaucaucgucauccuccugagccugaucgccguggggcuccugcuguacugcaaggcccgguccaccccggugacccugagcaaggaccagcucuccggcaucaacaacaucgccuucagcaacugaggacuaguacuggcugcaucucccuuuccucuguccuccauccuucucccaggauggugaagggggaccugguacccagugauccccaccccaggauccuaaaucaugacuuaccugcuaauaaaaacucauuggaaaagugagaagaucuaaaaaaaaaaaaaaaaaaaaaaaaaaaaaaaaaaaaaaaaaaaaaaaaaaaaaaaaaaaaaaaaugcaucccccccccccccccccccccccccccccccaaaggcucuuuucagagccaccagaauu

SEQ ID NO: 5433 - RNA, 1986 nt, Artificial Sequence
  mRNA product Design c-3 comprising derived and/or modified sequence from HRSV(A2)__F_DSCav1_mut5 (opt2)
gggagaguccgcucagccagguugcagaagcggcuuagcguguguccuaaucuucucucugcguguagguaggccugugccgcaaacaagcuuaccauggagcuccucauccucaaggccaacgccaucaccaccauccucaccgccgucaccuucugcuucgccuccggccagaacaucaccgaggaguucuaccaguccaccugcuccgccgucuccaagggcuaccucuccgcccuccgcaccggcugguacaccuccgucaucaccaucgagcucuccaacaucaaggagaacaagugcaacggcaccgacgccaaggucaagcucaucaagcaggagcucgacaaguacaagaacgccgucaccgagcuccagcuccucaugcaguccacccccgccaccggcuccggcuccgccaucgccuccggcgucgccgucugcaagguccuccaccucgagggcgaggucaacaagaucaaguccgcccuccucuccaccaacaaggccgucgucucccucuccggcugcggcgucuccguccucaccuucaagguccucgaccucaagaacuacaucgacaagcagcuccuccccauccucaacaagcaguccugcuccaucuccaacaucgagaccgucaucgaguuccagcagaagaacaaccgccuccucgagaucacccgcgaguucuccgucaacgccggcgucaccacccccgucuccaccuacaugcucaccaacuccgagcuccucucccucaucaacgacaugcccaucaccaacgaccagaagaagcucauguccaacaacguccagaucguccgccagcaguccuacuccaucaugugcaucaucaaggaggagguccucgccuacgucguccagcucccccucuacggcgucaucgacacccccugcuggaagcuccacaccuccccccucugcaccaccaacaccaaggagggcuccaacaucugccucacccgcaccgaccgcggcugguacugcgacaacgccggcuccgucuccuucuucccccaggccgagaccugcaagguccaguccaaccgcgucuucugcgacaccaugaacucccgcacccuccccuccgaggucaaccucugcaacgucgacaucuucaaccccaaguacgacugcaagaucaugaccuccaagaccgacgucuccuccuccgucaucaccucccucggcgccaucgucuccugcuacggcaagaccaagugcaccgccuccaacaagugccgcggcaucaucaagaccuucuccaacggcugcgacuacgucuccaacaagggcgucgacaccgucuccgucggcaacacccucuacuacgucaacaagcaggagggcaagucccucuacgucaagggcgagcccaucaucaacuucuacgacccccucgucuuccccuccgacgaguucgacgccuccaucucccaggucaacgagaagaucaaccagucccucgccuucauccgcaaguccgacgagcuccuccacaacgucaacgccggcaaguccaccaccaacaucaugaucaccaccaucaucaucgucaucaucgucauccuccucucccucaucgccgucggccuccuccucuacugcaaggcccgcuccacccccgucacccucuccaaggaccagcucuccggcaucaacaacaucgccuucuccaacugaggacuaguacuggcugcaucucccuuuccucuguccuccauccuucucccaggauggugaagggggaccugguacccagugauccccaccccaggauccuaaaucaugacuuaccugcuaauaaaaacucauuggaaaagugagaagaucuaaaaaaaaaaaaaaaaaaaaaaaaaaaaaaaaaaaaaaaaaaaaaaaaaaaaaaaaaaaaaaaaugcaucccccccccccccccccccccccccccccccaaaggcucuuuucagagccaccagaauu

SEQ ID NO: 5434 - RNA, 1986 nt, Artificial Sequence
  mRNA product Design c-3 comprising derived and/or modified sequence from HRSV(A2)__F_DSCav1_mut5 (opt3)
gggagaguccgcucagccagguugcagaagcggcuuagcguguguccuaaucuucucucugcguguagguaggccugugccgcaaacaagcuuaccauggagcugcucauccuuaaggccaacgcuauuaccacaauacugacugcagugacguucugcuuugccagcggccagaauaucaccgaagaguucuaccaauccacauguucugcggucucaaaaggguauuugagugcuuuaagaacuggaugguacaccagcguuauuacaaucgaacuguccaacauuaaggagaauaaaugcaacgguaccgacgccaaggugaaacuaaucaagcaggaacucgauaaguauaaaaaugcaguaacugagcugcagcuucugaugcagucuacacccgccaccggcucggggucagcuauagcaagcggaguggccgucuguaagguguugcaccucgagggcgaaguuaacaaaaucaagagugcucugcuguccacgaauaaagccguggucucucucagcgguugcgggguguccguauuaacuuuuaagguucuggaccuuaagaacuacauugauaaacaauugcugccuauccuaaauaagcagucauguaguauuagcaacaucgagaccgugauagaguuccagcagaaaaauaacaggcuccuggaaauuacacgggaguuuucugucaaugcgggagugacuaccccaguguccacauauaugcuuaccaacucagaacuguugagccucaucaaugacaugccgauuacgaacgaucaaaagaaacugaugaguaacaauguccagaucguucgccagcagucuuacuccaucaugugcauuauaaaggaggaaguguuagcauauguagugcaacugccccucuacggcgucaucgacacuccuuguuggaaacuucauacaagcccacugugcaccacuaacacaaaggagggcucgaauauuuguuugacccgaacggaucgugggugguacugcgacaacgccggaucuguguccuucuuuccccaggcugaaaccuguaagguucagucaaauagaguguucugcgauacaaugaacaguagaacucugccuagcgaggucaaucucugcaacguggacaucuuuaauccaaaauaugauuguaagauaaugaccuccaaaacagacguaucuagcucaguuauuaccagucugggugccaucguguccugcuacggcaagacuaaauguacagcaagcaacaagugcagggggaucauuaagaccuucucuaauggaugugauuaugucucaaacaaaggcguggacacugucaguguggguaauacgcuuuacuauguuaacaagcaagaggggaaaagccuguacgugaagggagaacccaucauuaauuuuuaugacccuuugguauucccauccgaugaguuugacgcuucuauaucgcaggucaacgagaaaaucaaccagagccucgccuucauucggaaguccgaugaacuguuacacaaugugaacgcgggcaagucaacaaccaauaucaugaucacuaccauuauaaucguuauuaucgugauucugcuaagucucaucgccgucggccugcuuuuguacugcaaagcacgcucuacaccggugacccugagcaaggaccagcucuccgggauaaacaauaucgcuuucucaaacugaggacuaguacuggcugcaucucccuuuccucuguccuccauccuucucccaggauggugaagggggaccugguacccagugauccccaccccaggauccuaaaucaugacuuaccugcuaauaaaaacucauuggaaaagugagaagaucuaaaaaaaaaaaaaaaaaaaaaaaaaaaaaaaaaaaaaaaaaaaaaaaaaaaaaaaaaaaaaaaaugcaucccccccccccccccccccccccccccccccaaaggcucuuuucagagccaccagaauu

SEQ ID NO: 5435 - RNA, 1986 nt, Artificial Sequence
  mRNA product Design c-3 comprising derived and/or modified sequence from HRSV(A2)__F_DSCav1_mut5 (opt4)
gggagaguccgcucagccagguugcagaagcggcuuagcguguguccuaaucuucucucugcguguagguaggccugugccgcaaacaagcuuaccauggagcugcugauccugaaggccaacgccaucaccaccauccugaccgccgugaccuucugcuucgccagcggccagaacaucaccgaggaguucuaccagagcaccugcagcgccgugagcaagggcuaccugagcgcccugagaaccggcugguacaccagcgugaucaccaucgagcugagcaacaucaaggagaacaagugcaacggcaccgacgccaaggugaagcugaucaagcaggagcuggacaaguacaagaacgccgugaccgagcugcagcugcugaugcagagcacccccgccaccggcagcggcagcgccaucgccagcggcguggccgugugcaaggugcugcaccuggagggcgaggugaacaagaucaagagcgcccugcugagcaccaacaaggccguggugagccugagcggcugcggcgugagcgugcugaccuucaaggugcuggaccugaagaacuacaucgacaagcagcugcugcccauccugaacaagcagagcugcagcaucagcaacaucgagaccgugaucgaguuccagcagaagaacaacagacugcuggagaucaccagagaguucagcgugaacgccggcgugaccacccccgugagcaccuacaugcugaccaacagcgagcugcugagccugaucaacgacaugcccaucaccaacgaccagaagaagcugaugagcaacaacgugcagaucgugagacagcagagcuacagcaucaugugcaucaucaaggaggaggugcuggccuacguggugcagcugccccuguacggcgugaucgacacccccugcuggaagcugcacaccagcccccugugcaccaccaacaccaaggagggcagcaacaucugccugaccagaaccgacagaggcugguacugcgacaacgccggcagcgugagcuucuucccccaggccgagaccugcaaggugcagagcaacagaguguucugcgacaccaugaacagcagaacccugcccagcgaggugaaccugugcaacguggacaucuucaaccccaaguacgacugcaagaucaugaccagcaagaccgacgugagcagcagcgugaucaccagccugggcgccaucgugagcugcuacggcaagaccaagugcaccgccagcaacaagugcagaggcaucaucaagaccuucagcaacggcugcgacuacgugagcaacaagggcguggacaccgugagcgugggcaacacccuguacuacgugaacaagcaggagggcaagagccuguacgugaagggcgagcccaucaucaacuucuacgacccccugguguuccccagcgacgaguucgacgccagcaucagccaggugaacgagaagaucaaccagagccuggccuucaucagaaagagcgacgagcugcugcacaacgugaacgccggcaagagcaccaccaacaucaugaucaccaccaucaucaucgugaucaucgugauccugcugagccugaucgccgugggccugcugcuguacugcaaggccagaagcacccccgugacccugagcaaggaccagcugagcggcaucaacaacaucgccuucagcaacugaggacuaguacuggcugcaucucccuuuccucuguccuccauccuucucccaggauggugaagggggaccugguacccagugauccccaccccaggauccuaaaucaugacuuaccugcuaauaaaaacucauuggaaaagugagaagaucuaaaaaaaaaaaaaaaaaaaaaaaaaaaaaaaaaaaaaaaaaaaaaaaaaaaaaaaaaaaaaaaaugcaucccccccccccccccccccccccccccccccaaaggcucuuuucagagccaccagaauu

SEQ ID NO: 5436 - RNA, 1986 nt, Artificial Sequence
  mRNA product Design c-3 comprising derived and/or modified sequence from HRSV(A2)__F_DSCav1_mut5 (opt5)
gggagaguccgcucagccagguugcagaagcggcuuagcguguguccuaaucuucucucugcguguagguaggccugugccgcaaacaagcuuaccauggagcugcucauccugaaggccaacgcuauuaccacaauccuuacggccgugaccuucugcuuugcgagcggccagaauauuacagaagaguucuaccaauccaccuguucugcugucagcaaaggguaucuguccgcccucagaacaggaugguacaccucuguuaucacaauugaacugagcaacaucaaggagaauaaaugcaacggcaccgacgccaaggugaaacuuaucaagcaggaacuggauaaguauaaaaaugcugugacggagcuccagcugcugaugcaguccacccccgccacagggucuggaagcgcuauugccuccggcgucgcgguguguaagguucuccaccuggagggggaagugaacaaaaucaagagcgcccuucugucuaccaauaaagcugucgugucccucagcggaugcggcguuucugugcugacauuuaagguccuugaccugaagaacuacauugauaaacaacuccugccuauccugaauaagcaguccuguagcauuucuaacaucgagaccgugauugaguuccagcagaaaaauaaccggcuccuggaaaucacgcgcgaguuuuccgugaaugccggcgucacaaccccgguuagcacauauaugcuuaccaacuccgaacugcucucucugaucaaugacaugcccauuaccaacgaucaaaagaaacuuaugagcaacaaugugcagaucgugagacagcaguccuacagcauuaugugcaucauuaaggaggaaguccuggcuuaugugguucaacucccucuguacggggugaucgacacacccuguuggaaacugcauacgucuccucucugcaccacaaacaccaaggagggauccaauaucugucugacacggaccgaucgcggcugguacugcgacaacgccgggagcgucucuuucuuuccccaggcggaaacguguaaggugcagagcaauagaguuuucugcgauacaaugaacuccagaacccugccuucugaggugaaucucugcaacgucgacauuuuuaauccgaaauaugauuguaagaucaugaccagcaaaacagacguguccagcucugucauuaccucccugggagccaucgugagcugcuacggcaagacaaaauguacggcuucuaacaagugccgggggauuaucaagaccuucuccaauggaugugauuauguuagcaacaaaggcguggacacagucuccgugggcaauacccuuuacuauguuaacaagcaagaggggaaaucucuguacgugaagggagaacccaucauuaauuuuuaugacccucucgucuuccccagcgaugaguuugacgccuccaucucucaggugaacgagaaaauuaaccagagccuggcuuucauccgcaaguccgaugaacugcuccacaaugugaacgccggcaagagcacaaccaauauuaugaucacgaccauuaucaucguuauuaucgucauucugcuuucucugaucgccguggggcuccugcuguacugcaaagcuagauccacaccugugacccuuagcaaggaccagcucucuggaauuaacaauaucgcguucuccaacugaggacuaguacuggcugcaucucccuuuccucuguccuccauccuucucccaggauggugaagggggaccugguacccagugauccccaccccaggauccuaaaucaugacuuaccugcuaauaaaaacucauuggaaaagugagaagaucuaaaaaaaaaaaaaaaaaaaaaaaaaaaaaaaaaaaaaaaaaaaaaaaaaaaaaaaaaaaaaaaaugcaucccccccccccccccccccccccccccccccaaaggcucuuuucagagccaccagaauu

SEQ ID NO: 5437 - RNA, 1986 nt, Artificial Sequence
  mRNA product Design c-3 comprising derived and/or modified sequence from HRSV(A2)__F_DSCav1_mut5 (opt6)
gggagaguccgcucagccagguugcagaagcggcuuagcguguguccuaaucuucucucugcguguagguaggccugugccgcaaacaagcuuaccauggaacuauuaauacuuaaagccaacgcaauaacaacaauucucacugcugucaccuucugcuucgccucaggccaaaacauaacggaagaauuuuaccaaucaacaugcucugcaguauccaaaggcuaccuaucugcucuaagaacagguugguauacaucaguaauaaccauagaacuaucaaacauaaaagaaaauaaaugcaacggaacagacgcaaaaguuaaacucauaaaacaagaacuagacaaauauaaaaacgcaguuaccgaacuacaacuacuuaugcaauccacucccgccacuggaucaggaucagcaauagcaucaggagucgcaguauguaaagucuuacaccucgaaggcgaagucaauaaaaucaaauccgcauuacuauccacaaacaaagcagucguaucccuaagcggaugcggaguaucaguacuaacauuuaaaguacuagaccuaaaaaauuacaucgauaaacaacuauuaccuauauuaaacaaacaauccugcuccauuucaaauaucgaaaccguaauagaauuucaacaaaaaaacaacagauuacuagaaauaacaagagaauuuuccguaaaugcuggcguaacaacaccaguauccacauacaugcucacaaacuccgaacuacuaucacuaauaaaugacaugcccauaacaaacgaucaaaaaaaacuaaugucaaauaauguacaaauaguaagacaacaaagcuacuccaucauguguauaauaaaagaagaaguacuagcauacguaguucaacuaccacuuuacggcguaaucgacaccccuugcuggaaacuacacaccuccccucuaugcaccacaaacacaaaagaagguuccaacauaugccuuaccagaacagacagaggcugguauugcgacaacgcaggaucaguuucauuuuuuccacaagcugaaacaugcaaaguacaaucaaacagagucuucugcgacacaaugaacucaagaacucuacccucagaaguaaaccuauguaacguagacauuuucaaccccaaauacgacugcaaaauuaugacaucaaaaacagacguuucaucaucaguuaucaccucauuaggagcaauaguaagcugcuacggaaaaacaaaaugcaccgccucaaauaaaugcagaggaauaauaaaaacuuucuccaacggaugcgacuacguuucaaacaaagguguagacacuguaucaguaggaaacacacuauauuacguaaauaaacaagaaggaaaaucacuuuaugucaaaggagaaccaauaaucaauuucuacgacccauuaguauucccaucagacgaauuugaugcuucaauaucacaaguaaacgaaaaaauaaaucaaucacucgcauuuauacgaaaaucagacgaacuacuacacaauguaaacgcaggcaaaucaacaacaaacauaaugauaacaacaauaaucauuguaauaauaguaauacuucuaucucuaauagcaguaggauuacuccucuacugcaaagcaagaucaaccccuguaacacuaucaaaagaccaacuuucagguauaaauaauauagcuuuuuccaauuaaggacuaguacuggcugcaucucccuuuccucuguccuccauccuucucccaggauggugaagggggaccugguacccagugauccccaccccaggauccuaaaucaugacuuaccugcuaauaaaaacucauuggaaaagugagaagaucuaaaaaaaaaaaaaaaaaaaaaaaaaaaaaaaaaaaaaaaaaaaaaaaaaaaaaaaaaaaaaaaaugcaucccccccccccccccccccccccccccccccaaaggcucuuuucagagccaccagaauu

SEQ ID NO: 5438 - RNA, 1986 nt, Artificial Sequence
  mRNA product Design c-3 comprising derived and/or modified sequence from HRSV(A2)__F_DSCav1_mut5 (opt11)
gggagaguccgcucagccagguugcagaagcggcuuagcguguguccuaaucuucucucugcguguagguaggccugugccgcaaacaagcuuaccauggagcuccuaauccucaaagccaacgcgaucacuacaauccucacagccgucaccuucugcuucgccuccggccaaaacaucaccgaggaguucuaccaaucaaccugcuccgccguaucaaaaggauaccuaagcgcccuacggaccggcugguacacaucugucaucaccaucgaacuaucaaacaucaaagaaaacaaaugcaacggaaccgacgcaaaagucaaacugauuaaacaagaacuagacaaauacaaaaacgcagucaccgaacugcaauuacucaugcaaagcacaccggccaccggcucaggcagcgccaucgccuccggcgucgccgucugcaaaguucuccaccucgagggcgaagucaacaaaauaaaaucugcccuccucuccaccaacaaagccgucgucucccucagcggcugcggagucuccguccucaccuucaaaguucucgaucucaagaacuauauugacaaacaacuucuacccauacucaacaaacaaagcugcagcauauccaacaucgaaaccgucaucgaguuccaacaaaagaacaaccgccuccucgaaauaacccgcgaguucagcguuaacgccggagucacuaccccugucuccaccuacaugcucaccaacuccgaacuccuaucacuaaucaacgacaugcccauaaccaacgaccagaagaaacucauguccaacaacguccaaauuguccgacaacaaagcuacuccauaaugugcauaauaaaagaggaaguccucgccuacgucguacaacugccccuuuauggcguaaucgacacacccugcuggaaacuccacacgucaccccucugcaccaccaacacaaaagaaggcucgaacaucugccuaacacggacugaccgcggcugguacugcgacaacgccggcuccgucagcuucuucccacaagccgaaaccugcaaaguacaauccaaccgaguauucugcgacaccaugaacuccagaacccuccccucagaggucaaccugugcaacguagacaucuucaaccccaaauacgacugcaaaauaaugaccucaaaaacagacgucuccucuuccguaaucaccagccucggagccaucgucagcugcuacggcaaaaccaaaugcaccgccucaaacaaaugccgcggcaucaucaaaacauucucaaacggcugcgacuacgucuccaacaaaggcgucgacacaguaagcguaggcaacacacuguacuacgucaacaaacaagagggaaaaucacucuacgucaaaggagaacccauaaucaacuucuacgacccccucguuuuccccagcgacgaguucgacgccagcauaucccaagucaacgagaaaauuaaccaaucccuagcauucauccgaaaaucugacgaacugcuccacaacgucaacgcgggaaaaucaacaaccaacauaaugauaaccacaaucauaauagucaucaucguaauccuccucagccuaaucgcugucggccuccuccucuacugcaaagcccguuccaccccagucacacuuuccaaggaccaacuaagcggaauaaacaacaucgcguucucaaacuaaggacuaguacuggcugcaucucccuuuccucuguccuccauccuucucccaggauggugaagggggaccugguacccagugauccccaccccaggauccuaaaucaugacuuaccugcuaauaaaaacucauuggaaaagugagaagaucuaaaaaaaaaaaaaaaaaaaaaaaaaaaaaaaaaaaaaaaaaaaaaaaaaaaaaaaaaaaaaaaaugcaucccccccccccccccccccccccccccccccaaaggcucuuuucagagccaccagaauu

SEQ ID NO: 5439 - RNA, 1982 nt, Artificial Sequence
  mRNA product Design c-4 comprising derived and/or modified sequence from HRSV(A2)__F_DSCav1_mut5 (opt1)
gggagaguccgcucagccagguugcagaagcggcuuagcguguguccuaaucuucucucugcguguagguaggccugugccgcaaacaagcuuaccauggagcugcucauccugaaggccaacgccaucaccaccauccugacggcggugaccuucugcuucgccagcggccagaacaucaccgaggaguucuaccaguccacgugcagcgccgucuccaagggguaccucagcgcccugcggaccggcugguacaccuccgugaucaccaucgagcugagcaacaucaaggagaacaagugcaacgggaccgacgccaaggugaagcucaucaagcaggagcuggacaaguacaagaacgcggucacggagcugcagcuccugaugcaguccaccccggcaaccggcuccggcuccgccaucgcgagcggcgucgccgugugcaaggugcugcaccucgagggggaggucaacaagaucaagagcgcccugcuguccaccaacaaggccguggugagccucuccggcugcggcgucagcgugcugaccuucaaggugcuggaccucaagaacuacaucgacaagcagcugcugcccauccugaacaagcagagcugcuccaucagcaacaucgagacggugaucgaguuccagcagaagaacaaccggcuccuggagaucacccgcgaguucagcgugaacgccggggucaccacccccguguccacguacaugcugaccaacagcgagcuccugucccugaucaacgacaugccgaucaccaacgaccagaagaagcucaugagcaacaacgugcagaucguccggcagcaguccuacagcaucaugugcaucaucaaggaggaggugcuggcguacgugguccagcugccccucuacggcgugaucgacacccccugcuggaagcugcacacgagcccccugugcaccaccaacaccaaggagggguccaacaucugccucacgcgcaccgaccggggcugguacugcgacaacgccggcagcgucuccuucuucccgcaggccgagaccugcaaggugcagagcaaccgcguguucugcgacaccaugaacucccggacgcugcccagcgagguaaaccucugcaacgucgacaucuucaaccccaaguacgacugcaagaucaugaccuccaagaccgacgugagcuccagcgugaucaccucccugggggccaucgucagcugcuacggcaagacgaagugcaccgccagcaacaagugccgggggaucaucaagaccuucuccaacggcugcgacuacgugagcaacaagggcguggacaccguguccgucgggaacacccuguacuacgugaacaagcaggagggcaagagccucuacgugaagggggagcccaucaucaacuucuacgacccgcuggucuuccccuccgacgaguucgacgcgagcaucucccaggugaacgagaagaucaaccagagccuggccuucauccgcaaguccgacgagcugcuccacaacgugaacgccggcaagagcacgaccaacaucaugaucaccaccaucaucaucgucaucaucgugauccugcugucccucaucgccguggggcugcugcucuacugcaaggcccggagcacgcccgucacccuguccaaggaccagcugagcggcaucaacaacaucgcguucuccaacugaggacuaguggaagcauuuuccuggcugauuaaaagaaauuacucagcuauggucaucuguuccuguuagaaggcuaugcagcauauuauauacuaugcgcauguuaugaaaugcauaauaaaaaauuuuaaaaaaucuaaaagaucuaaaaaaaaaaaaaaaaaaaaaaaaaaaaaaaaaaaaaaaaaaaaaaaaaaaaaaaaaaaaaaaaugcaucccccccccccccccccccccccccccccccaaaggcucuuuucagagccaccagaauu

SEQ ID NO: 5440 - RNA, 1982 nt, Artificial Sequence
  mRNA product Design c-4 comprising derived and/or modified sequence from HRSV(A2)__F_DSCav1_mut5 (opt1)
gggagaguccgcucagccagguugcagaagcggcuuagcguguguccuaaucuucucucugcguguagguaggccugugccgcaaacaagcuuaccauggagcugcucauccugaaggccaacgccaucaccaccauccugacggcggugaccuucugcuucgccagcggccagaacaucaccgaggaguucuaccaguccacgugcagcgccgucuccaagggguaccucagcgcccugcgcaccggcugguacaccuccgugaucaccaucgagcugagcaacaucaaggagaacaagugcaacgggaccgacgccaaggugaagcucaucaagcaggagcuggacaaguacaagaacgcggucacggagcugcagcuccugaugcaguccacccccgccaccggcagcggguccgccaucgccagcggcguggcggugugcaagguccugcaccucgagggcgaggugaacaagaucaaguccgcccugcugagcaccaacaaggccguggucucccucagcgggugcggcguguccgugcugacguucaagguccuggaccucaagaacuacaucgacaagcagcugcugccgauccucaacaagcagagcugcuccaucagcaacaucgagaccgugaucgaguuccagcagaagaacaaccggcugcuggagaucacccgcgaguucuccgugaacgccggggucaccacgcccgugagcaccuacaugcucaccaacagcgagcugcugucccucaucaacgacaugcccaucaccaacgaccagaagaagcugaugagcaacaacgugcagaucguccggcagcaguccuacagcaucaugugcaucaucaaggaggaggugcuggccuacgugguccagcucccccuguacggcgugaucgacacgccgugcuggaagcugcacaccagcccccucugcaccaccaacacgaaggagggguccaacaucugccugacccgcaccgaccggggcugguacugcgacaacgcgggcuccgugagcuucuucccccaggccgagaccugcaagguccaguccaaccgcguguucugcgacacgaugaacagccggacccuccccuccgaggucaaccugugcaacguggacaucuucaacccgaaguacgacugcaagaucaugaccagcaagaccgacguguccagcuccgucaucacgagccugggggccaucguguccugcuacggcaagaccaagugcaccgccagcaacaagugccgggggaucaucaagaccuucuccaacggcugcgacuacgugagcaacaagggcgucgacacggugagcguggggaacacccucuacuacgucaacaagcaggagggcaagucccuguacgugaagggggagcccaucaucaacuucuacgacccccugguguuccccagcgacgaguucgacgccuccaucagccaggucaacgagaagaucaaccagucccucgcguucauccgcaagagcgacgagcugcugcacaacgugaacgccggcaaguccaccaccaacaucaugaucaccacgaucaucaucgugaucaucgucauccuccugagccugaucgccguggggcuccugcuguacugcaaggcccgguccaccccggugacccugagcaaggaccagcucuccggcaucaacaacaucgccuucagcaacugaggacuaguggaagcauuuuccuggcugauuaaaagaaauuacucagcuauggucaucuguuccuguuagaaggcuaugcagcauauuauauacuaugcgcauguuaugaaaugcauaauaaaaaauuuuaaaaaaucuaaaagaucuaaaaaaaaaaaaaaaaaaaaaaaaaaaaaaaaaaaaaaaaaaaaaaaaaaaaaaaaaaaaaaaaugcaucccccccccccccccccccccccccccccccaaaggcucuuuucagagccaccagaauu

SEQ ID NO: 5441 - RNA, 1982 nt, Artificial Sequence
  mRNA product Design c-4 comprising derived and/or modified sequence from HRSV(A2)__F_DSCav1_mut5 (opt2)
gggagaguccgcucagccagguugcagaagcggcuuagcguguguccuaaucuucucucugcguguagguaggccugugccgcaaacaagcuuaccauggagcuccucauccucaaggccaacgccaucaccaccauccucaccgccgucaccuucugcuucgccuccggccagaacaucaccgaggaguucuaccaguccaccugcuccgccgucuccaagggcuaccucuccgcccuccgcaccggcugguacaccuccgucaucaccaucgagcucuccaacaucaaggagaacaagugcaacggcaccgacgccaaggucaagcucaucaagcaggagcucgacaaguacaagaacgccgucaccgagcuccagcuccucaugcaguccacccccgccaccggcuccggcuccgccaucgccuccggcgucgccgucugcaagguccuccaccucgagggcgaggucaacaagaucaaguccgcccuccucuccaccaacaaggccgucgucucccucuccggcugcggcgucuccguccucaccuucaagguccucgaccucaagaacuacaucgacaagcagcuccuccccauccucaacaagcaguccugcuccaucuccaacaucgagaccgucaucgaguuccagcagaagaacaaccgccuccucgagaucacccgcgaguucuccgucaacgccggcgucaccacccccgucuccaccuacaugcucaccaacuccgagcuccucucccucaucaacgacaugcccaucaccaacgaccagaagaagcucauguccaacaacguccagaucguccgccagcaguccuacuccaucaugugcaucaucaaggaggagguccucgccuacgucguccagcucccccucuacggcgucaucgacacccccugcuggaagcuccacaccuccccccucugcaccaccaacaccaaggagggcuccaacaucugccucacccgcaccgaccgcggcugguacugcgacaacgccggcuccgucuccuucuucccccaggccgagaccugcaagguccaguccaaccgcgucuucugcgacaccaugaacucccgcacccuccccuccgaggucaaccucugcaacgucgacaucuucaaccccaaguacgacugcaagaucaugaccuccaagaccgacgucuccuccuccgucaucaccucccucggcgccaucgucuccugcuacggcaagaccaagugcaccgccuccaacaagugccgcggcaucaucaagaccuucuccaacggcugcgacuacgucuccaacaagggcgucgacaccgucuccgucggcaacacccucuacuacgucaacaagcaggagggcaagucccucuacgucaagggcgagcccaucaucaacuucuacgacccccucgucuuccccuccgacgaguucgacgccuccaucucccaggucaacgagaagaucaaccagucccucgccuucauccgcaaguccgacgagcuccuccacaacgucaacgccggcaaguccaccaccaacaucaugaucaccaccaucaucaucgucaucaucgucauccuccucucccucaucgccgucggccuccuccucuacugcaaggcccgcuccacccccgucacccucuccaaggaccagcucuccggcaucaacaacaucgccuucuccaacugaggacuaguggaagcauuuuccuggcugauuaaaagaaauuacucagcuauggucaucuguuccuguuagaaggcuaugcagcauauuauauacuaugcgcauguuaugaaaugcauaauaaaaaauuuuaaaaaaucuaaaagaucuaaaaaaaaaaaaaaaaaaaaaaaaaaaaaaaaaaaaaaaaaaaaaaaaaaaaaaaaaaaaaaaaugcaucccccccccccccccccccccccccccccccaaaggcucuuuucagagccaccagaauu

SEQ ID NO: 5442 - RNA, 1982 nt, Artificial Sequence
  mRNA product Design c-4 comprising derived and/or modified sequence from HRSV(A2)__F_DSCav1_mut5 (opt3)
gggagaguccgcucagccagguugcagaagcggcuuagcguguguccuaaucuucucucugcguguagguaggccugugccgcaaacaagcuuaccauggagcugcucauccuuaaggccaacgcuauuaccacaauacugacugcagugacguucugcuuugccagcggccagaauaucaccgaagaguucuaccaauccacauguucugcggucucaaaaggguauuugagugcuuuaagaacuggaugguacaccagcguuauuacaaucgaacuguccaacauuaaggagaauaaaugcaacgguaccgacgccaaggugaaacuaaucaagcaggaacucgauaaguauaaaaaugcaguaacugagcugcagcuucugaugcagucuacacccgccaccggcucggggucagcuauagcaagcggaguggccgucuguaagguguugcaccucgagggcgaaguuaacaaaaucaagagugcucugcuguccacgaauaaagccguggucucucucagcgguugcgggguguccguauuaacuuuuaagguucuggaccuuaagaacuacauugauaaacaauugcugccuauccuaaauaagcagucauguaguauuagcaacaucgagaccgugauagaguuccagcagaaaaauaacaggcuccuggaaauuacacgggaguuuucugucaaugcgggagugacuaccccaguguccacauauaugcuuaccaacucagaacuguugagccucaucaaugacaugccgauuacgaacgaucaaaagaaacugaugaguaacaauguccagaucguucgccagcagucuuacuccaucaugugcauuauaaaggaggaaguguuagcauauguagugcaacugccccucuacggcgucaucgacacuccuuguuggaaacuucauacaagcccacugugcaccacuaacacaaaggagggcucgaauauuuguuugacccgaacggaucgugggugguacugcgacaacgccggaucuguguccuucuuuccccaggcugaaaccuguaagguucagucaaauagaguguucugcgauacaaugaacaguagaacucugccuagcgaggucaaucucugcaacguggacaucuuuaauccaaaauaugauuguaagauaaugaccuccaaaacagacguaucuagcucaguuauuaccagucugggugccaucguguccugcuacggcaagacuaaauguacagcaagcaacaagugcagggggaucauuaagaccuucucuaauggaugugauuaugucucaaacaaaggcguggacacugucaguguggguaauacgcuuuacuauguuaacaagcaagaggggaaaagccuguacgugaagggagaacccaucauuaauuuuuaugacccuuugguauucccauccgaugaguuugacgcuucuauaucgcaggucaacgagaaaaucaaccagagccucgccuucauucggaaguccgaugaacuguuacacaaugugaacgcgggcaagucaacaaccaauaucaugaucacuaccauuauaaucguuauuaucgugauucugcuaagucucaucgccgucggccugcuuuuguacugcaaagcacgcucuacaccggugacccugagcaaggaccagcucuccgggauaaacaauaucgcuuucucaaacugaggacuaguggaagcauuuuccuggcugauuaaaagaaauuacucagcuauggucaucuguuccuguuagaaggcuaugcagcauauuauauacuaugcgcauguuaugaaaugcauaauaaaaaauuuuaaaaaaucuaaaagaucuaaaaaaaaaaaaaaaaaaaaaaaaaaaaaaaaaaaaaaaaaaaaaaaaaaaaaaaaaaaaaaaaugcaucccccccccccccccccccccccccccccccaaaggcucuuuucagagccaccagaauu

SEQ ID NO: 5443 - RNA, 1982 nt, Artificial Sequence
  mRNA product Design c-4 comprising derived and/or modified sequence from HRSV(A2)__F_DSCav1_mut5 (opt4)
gggagaguccgcucagccagguugcagaagcggcuuagcguguguccuaaucuucucucugcguguagguaggccugugccgcaaacaagcuuaccauggagcugcugauccugaaggccaacgccaucaccaccauccugaccgccgugaccuucugcuucgccagcggccagaacaucaccgaggaguucuaccagagcaccugcagcgccgugagcaagggcuaccugagcgcccugagaaccggcugguacaccagcgugaucaccaucgagcugagcaacaucaaggagaacaagugcaacggcaccgacgccaaggugaagcugaucaagcaggagcuggacaaguacaagaacgccgugaccgagcugcagcugcugaugcagagcacccccgccaccggcagcggcagcgccaucgccagcggcguggccgugugcaaggugcugcaccuggagggcgaggugaacaagaucaagagcgcccugcugagcaccaacaaggccguggugagccugagcggcugcggcgugagcgugcugaccuucaaggugcuggaccugaagaacuacaucgacaagcagcugcugcccauccugaacaagcagagcugcagcaucagcaacaucgagaccgugaucgaguuccagcagaagaacaacagacugcuggagaucaccagagaguucagcgugaacgccggcgugaccacccccgugagcaccuacaugcugaccaacagcgagcugcugagccugaucaacgacaugcccaucaccaacgaccagaagaagcugaugagcaacaacgugcagaucgugagacagcagagcuacagcaucaugugcaucaucaaggaggaggugcuggccuacguggugcagcugccccuguacggcgugaucgacacccccugcuggaagcugcacaccagcccccugugcaccaccaacaccaaggagggcagcaacaucugccugaccagaaccgacagaggcugguacugcgacaacgccggcagcgugagcuucuucccccaggccgagaccugcaaggugcagagcaacagaguguucugcgacaccaugaacagcagaacccugcccagcgaggugaaccugugcaacguggacaucuucaaccccaaguacgacugcaagaucaugaccagcaagaccgacgugagcagcagcgugaucaccagccugggcgccaucgugagcugcuacggcaagaccaagugcaccgccagcaacaagugcagaggcaucaucaagaccuucagcaacggcugcgacuacgugagcaacaagggcguggacaccgugagcgugggcaacacccuguacuacgugaacaagcaggagggcaagagccuguacgugaagggcgagcccaucaucaacuucuacgacccccugguguuccccagcgacgaguucgacgccagcaucagccaggugaacgagaagaucaaccagagccuggccuucaucagaaagagcgacgagcugcugcacaacgugaacgccggcaagagcaccaccaacaucaugaucaccaccaucaucaucgugaucaucgugauccugcugagccugaucgccgugggccugcugcuguacugcaaggccagaagcacccccgugacccugagcaaggaccagcugagcggcaucaacaacaucgccuucagcaacugaggacuaguggaagcauuuuccuggcugauuaaaagaaauuacucagcuauggucaucuguuccuguuagaaggcuaugcagcauauuauauacuaugcgcauguuaugaaaugcauaauaaaaaauuuuaaaaaaucuaaaagaucuaaaaaaaaaaaaaaaaaaaaaaaaaaaaaaaaaaaaaaaaaaaaaaaaaaaaaaaaaaaaaaaaugcaucccccccccccccccccccccccccccccccaaaggcucuuuucagagccaccagaauu

SEQ ID NO: 5444 - RNA, 1982 nt, Artificial Sequence
  mRNA product Design c-4 comprising derived and/or modified sequence from HRSV(A2)__F_DSCav1_mut5 (opt5)
gggagaguccgcucagccagguugcagaagcggcuuagcguguguccuaaucuucucucugcguguagguaggccugugccgcaaacaagcuuaccauggagcugcucauccugaaggccaacgcuauuaccacaauccuuacggccgugaccuucugcuuugcgagcggccagaauauuacagaagaguucuaccaauccaccuguucugcugucagcaaaggguaucuguccgcccucagaacaggaugguacaccucuguuaucacaauugaacugagcaacaucaaggagaauaaaugcaacggcaccgacgccaaggugaaacuuaucaagcaggaacuggauaaguauaaaaaugcugugacggagcuccagcugcugaugcaguccacccccgccacagggucuggaagcgcuauugccuccggcgucgcgguguguaagguucuccaccuggagggggaagugaacaaaaucaagagcgcccuucugucuaccaauaaagcugucgugucccucagcggaugcggcguuucugugcugacauuuaagguccuugaccugaagaacuacauugauaaacaacuccugccuauccugaauaagcaguccuguagcauuucuaacaucgagaccgugauugaguuccagcagaaaaauaaccggcuccuggaaaucacgcgcgaguuuuccgugaaugccggcgucacaaccccgguuagcacauauaugcuuaccaacuccgaacugcucucucugaucaaugacaugcccauuaccaacgaucaaaagaaacuuaugagcaacaaugugcagaucgugagacagcaguccuacagcauuaugugcaucauuaaggaggaaguccuggcuuaugugguucaacucccucuguacggggugaucgacacacccuguuggaaacugcauacgucuccucucugcaccacaaacaccaaggagggauccaauaucugucugacacggaccgaucgcggcugguacugcgacaacgccgggagcgucucuuucuuuccccaggcggaaacguguaaggugcagagcaauagaguuuucugcgauacaaugaacuccagaacccugccuucugaggugaaucucugcaacgucgacauuuuuaauccgaaauaugauuguaagaucaugaccagcaaaacagacguguccagcucugucauuaccucccugggagccaucgugagcugcuacggcaagacaaaauguacggcuucuaacaagugccgggggauuaucaagaccuucuccaauggaugugauuauguuagcaacaaaggcguggacacagucuccgugggcaauacccuuuacuauguuaacaagcaagaggggaaaucucuguacgugaagggagaacccaucauuaauuuuuaugacccucucgucuuccccagcgaugaguuugacgccuccaucucucaggugaacgagaaaauuaaccagagccuggcuuucauccgcaaguccgaugaacugcuccacaaugugaacgccggcaagagcacaaccaauauuaugaucacgaccauuaucaucguuauuaucgucauucugcuuucucugaucgccguggggcuccugcuguacugcaaagcuagauccacaccugugacccuuagcaaggaccagcucucuggaauuaacaauaucgcguucuccaacugaggacuaguggaagcauuuuccuggcugauuaaaagaaauuacucagcuauggucaucuguuccuguuagaaggcuaugcagcauauuauauacuaugcgcauguuaugaaaugcauaauaaaaaauuuuaaaaaaucuaaaagaucuaaaaaaaaaaaaaaaaaaaaaaaaaaaaaaaaaaaaaaaaaaaaaaaaaaaaaaaaaaaaaaaaugcaucccccccccccccccccccccccccccccccaaaggcucuuuucagagccaccagaauu

SEQ ID NO: 5445 - RNA, 1982 nt, Artificial Sequence
  mRNA product Design c-4 comprising derived and/or modified sequence from HRSV(A2)__F_DSCav1_mut5 (opt6)
gggagaguccgcucagccagguugcagaagcggcuuagcguguguccuaaucuucucucugcguguagguaggccugugccgcaaacaagcuuaccauggaacuauuaauacuuaaagccaacgcaauaacaacaauucucacugcugucaccuucugcuucgccucaggccaaaacauaacggaagaauuuuaccaaucaacaugcucugcaguauccaaaggcuaccuaucugcucuaagaacagguugguauacaucaguaauaaccauagaacuaucaaacauaaaagaaaauaaaugcaacggaacagacgcaaaaguuaaacucauaaaacaagaacuagacaaauauaaaaacgcaguuaccgaacuacaacuacuuaugcaauccacucccgccacuggaucaggaucagcaauagcaucaggagucgcaguauguaaagucuuacaccucgaaggcgaagucaauaaaaucaaauccgcauuacuauccacaaacaaagcagucguaucccuaagcggaugcggaguaucaguacuaacauuuaaaguacuagaccuaaaaaauuacaucgauaaacaacuauuaccuauauuaaacaaacaauccugcuccauuucaaauaucgaaaccguaauagaauuucaacaaaaaaacaacagauuacuagaaauaacaagagaauuuuccguaaaugcuggcguaacaacaccaguauccacauacaugcucacaaacuccgaacuacuaucacuaauaaaugacaugcccauaacaaacgaucaaaaaaaacuaaugucaaauaauguacaaauaguaagacaacaaagcuacuccaucauguguauaauaaaagaagaaguacuagcauacguaguucaacuaccacuuuacggcguaaucgacaccccuugcuggaaacuacacaccuccccucuaugcaccacaaacacaaaagaagguuccaacauaugccuuaccagaacagacagaggcugguauugcgacaacgcaggaucaguuucauuuuuuccacaagcugaaacaugcaaaguacaaucaaacagagucuucugcgacacaaugaacucaagaacucuacccucagaaguaaaccuauguaacguagacauuuucaaccccaaauacgacugcaaaauuaugacaucaaaaacagacguuucaucaucaguuaucaccucauuaggagcaauaguaagcugcuacggaaaaacaaaaugcaccgccucaaauaaaugcagaggaauaauaaaaacuuucuccaacggaugcgacuacguuucaaacaaagguguagacacuguaucaguaggaaacacacuauauuacguaaauaaacaagaaggaaaaucacuuuaugucaaaggagaaccaauaaucaauuucuacgacccauuaguauucccaucagacgaauuugaugcuucaauaucacaaguaaacgaaaaaauaaaucaaucacucgcauuuauacgaaaaucagacgaacuacuacacaauguaaacgcaggcaaaucaacaacaaacauaaugauaacaacaauaaucauuguaauaauaguaauacuucuaucucuaauagcaguaggauuacuccucuacugcaaagcaagaucaaccccuguaacacuaucaaaagaccaacuuucagguauaaauaauauagcuuuuuccaauuaaggacuaguggaagcauuuuccuggcugauuaaaagaaauuacucagcuauggucaucuguuccuguuagaaggcuaugcagcauauuauauacuaugcgcauguuaugaaaugcauaauaaaaaauuuuaaaaaaucuaaaagaucuaaaaaaaaaaaaaaaaaaaaaaaaaaaaaaaaaaaaaaaaaaaaaaaaaaaaaaaaaaaaaaaaugcaucccccccccccccccccccccccccccccccaaaggcucuuuucagagccaccagaauu

SEQ ID NO: 5446 - RNA, 1982 nt, Artificial Sequence
  mRNA product Design c-4 comprising derived and/or modified sequence from HRSV(A2)__F_DSCav1_mut5 (opt11)
gggagaguccgcucagccagguugcagaagcggcuuagcguguguccuaaucuucucucugcguguagguaggccugugccgcaaacaagcuuaccauggagcuccuaauccucaaagccaacgcgaucacuacaauccucacagccgucaccuucugcuucgccuccggccaaaacaucaccgaggaguucuaccaaucaaccugcuccgccguaucaaaaggauaccuaagcgcccuacggaccggcugguacacaucugucaucaccaucgaacuaucaaacaucaaagaaaacaaaugcaacggaaccgacgcaaaagucaaacugauuaaacaagaacuagacaaauacaaaaacgcagucaccgaacugcaauuacucaugcaaagcacaccggccaccggcucaggcagcgccaucgccuccggcgucgccgucugcaaaguucuccaccucgagggcgaagucaacaaaauaaaaucugcccuccucuccaccaacaaagccgucgucucccucagcggcugcggagucuccguccucaccuucaaaguucucgaucucaagaacuauauugacaaacaacuucuacccauacucaacaaacaaagcugcagcauauccaacaucgaaaccgucaucgaguuccaacaaaagaacaaccgccuccucgaaauaacccgcgaguucagcguuaacgccggagucacuaccccugucuccaccuacaugcucaccaacuccgaacuccuaucacuaaucaacgacaugcccauaaccaacgaccagaagaaacucauguccaacaacguccaaauuguccgacaacaaagcuacuccauaaugugcauaauaaaagaggaaguccucgccuacgucguacaacugccccuuuauggcguaaucgacacacccugcuggaaacuccacacgucaccccucugcaccaccaacacaaaagaaggcucgaacaucugccuaacacggacugaccgcggcugguacugcgacaacgccggcuccgucagcuucuucccacaagccgaaaccugcaaaguacaauccaaccgaguauucugcgacaccaugaacuccagaacccuccccucagaggucaaccugugcaacguagacaucuucaaccccaaauacgacugcaaaauaaugaccucaaaaacagacgucuccucuuccguaaucaccagccucggagccaucgucagcugcuacggcaaaaccaaaugcaccgccucaaacaaaugccgcggcaucaucaaaacauucucaaacggcugcgacuacgucuccaacaaaggcgucgacacaguaagcguaggcaacacacuguacuacgucaacaaacaagagggaaaaucacucuacgucaaaggagaacccauaaucaacuucuacgacccccucguuuuccccagcgacgaguucgacgccagcauaucccaagucaacgagaaaauuaaccaaucccuagcauucauccgaaaaucugacgaacugcuccacaacgucaacgcgggaaaaucaacaaccaacauaaugauaaccacaaucauaauagucaucaucguaauccuccucagccuaaucgcugucggccuccuccucuacugcaaagcccguuccaccccagucacacuuuccaaggaccaacuaagcggaauaaacaacaucgcguucucaaacuaaggacuaguggaagcauuuuccuggcugauuaaaagaaauuacucagcuauggucaucuguuccuguuagaaggcuaugcagcauauuauauacuaugcgcauguuaugaaaugcauaauaaaaaauuuuaaaaaaucuaaaagaucuaaaaaaaaaaaaaaaaaaaaaaaaaaaaaaaaaaaaaaaaaaaaaaaaaaaaaaaaaaaaaaaaugcaucccccccccccccccccccccccccccccccaaaggcucuuuucagagccaccagaauu

SEQ ID NO: 5447 - RNA, 1900 nt, Artificial Sequence
  mRNA product Design c-5 comprising derived and/or modified sequence from HRSV(A2)__F_DSCav1_mut5 (opt1)
gggagagcggcucggccauuuugucccagucaguccggaggcugcggcugcagaaguaccgccugcggaguaacugcaaagaagcuuaccauggagcugcucauccugaaggccaacgccaucaccaccauccugacggcggugaccuucugcuucgccagcggccagaacaucaccgaggaguucuaccaguccacgugcagcgccgucuccaagggguaccucagcgcccugcggaccggcugguacaccuccgugaucaccaucgagcugagcaacaucaaggagaacaagugcaacgggaccgacgccaaggugaagcucaucaagcaggagcuggacaaguacaagaacgcggucacggagcugcagcuccugaugcaguccaccccggcaaccggcuccggcuccgccaucgcgagcggcgucgccgugugcaaggugcugcaccucgagggggaggucaacaagaucaagagcgcccugcuguccaccaacaaggccguggugagccucuccggcugcggcgucagcgugcugaccuucaaggugcuggaccucaagaacuacaucgacaagcagcugcugcccauccugaacaagcagagcugcuccaucagcaacaucgagacggugaucgaguuccagcagaagaacaaccggcuccuggagaucacccgcgaguucagcgugaacgccggggucaccacccccguguccacguacaugcugaccaacagcgagcuccugucccugaucaacgacaugccgaucaccaacgaccagaagaagcucaugagcaacaacgugcagaucguccggcagcaguccuacagcaucaugugcaucaucaaggaggaggugcuggcguacgugguccagcugccccucuacggcgugaucgacacccccugcuggaagcugcacacgagcccccugugcaccaccaacaccaaggagggguccaacaucugccucacgcgcaccgaccggggcugguacugcgacaacgccggcagcgucuccuucuucccgcaggccgagaccugcaaggugcagagcaaccgcguguucugcgacaccaugaacucccggacgcugcccagcgagguaaaccucugcaacgucgacaucuucaaccccaaguacgacugcaagaucaugaccuccaagaccgacgugagcuccagcgugaucaccucccugggggccaucgucagcugcuacggcaagacgaagugcaccgccagcaacaagugccgggggaucaucaagaccuucuccaacggcugcgacuacgugagcaacaagggcguggacaccguguccgucgggaacacccuguacuacgugaacaagcaggagggcaagagccucuacgugaagggggagcccaucaucaacuucuacgacccgcuggucuuccccuccgacgaguucgacgcgagcaucucccaggugaacgagaagaucaaccagagccuggccuucauccgcaaguccgacgagcugcuccacaacgugaacgccggcaagagcacgaccaacaucaugaucaccaccaucaucaucgucaucaucgugauccugcugucccucaucgccguggggcugcugcucuacugcaaggcccggagcacgcccgucacccuguccaaggaccagcugagcggcaucaacaacaucgcguucuccaacugaggacuagucccuguucccagagcccacuuuuuuuucuuuuuuugaaauaaaauagccugucuuucagaucuaaaaaaaaaaaaaaaaaaaaaaaaaaaaaaaaaaaaaaaaaaaaaaaaaaaaaaaaaaaaaaaaugcaucccccccccccccccccccccccccccccccaaaggcucuuuucagagccaccagaauu

SEQ ID NO: 5448 - RNA, 1900 nt, Artificial Sequence
  mRNA product Design c-5 comprising derived and/or modified sequence from HRSV(A2)__F_DSCav1_mut5 (opt1)
gggagagcggcucggccauuuugucccagucaguccggaggcugcggcugcagaaguaccgccugcggaguaacugcaaagaagcuuaccauggagcugcucauccugaaggccaacgccaucaccaccauccugacggcggugaccuucugcuucgccagcggccagaacaucaccgaggaguucuaccaguccacgugcagcgccgucuccaagggguaccucagcgcccugcgcaccggcugguacaccuccgugaucaccaucgagcugagcaacaucaaggagaacaagugcaacgggaccgacgccaaggugaagcucaucaagcaggagcuggacaaguacaagaacgcggucacggagcugcagcuccugaugcaguccacccccgccaccggcagcggguccgccaucgccagcggcguggcggugugcaagguccugcaccucgagggcgaggugaacaagaucaaguccgcccugcugagcaccaacaaggccguggucucccucagcgggugcggcguguccgugcugacguucaagguccuggaccucaagaacuacaucgacaagcagcugcugccgauccucaacaagcagagcugcuccaucagcaacaucgagaccgugaucgaguuccagcagaagaacaaccggcugcuggagaucacccgcgaguucuccgugaacgccggggucaccacgcccgugagcaccuacaugcucaccaacagcgagcugcugucccucaucaacgacaugcccaucaccaacgaccagaagaagcugaugagcaacaacgugcagaucguccggcagcaguccuacagcaucaugugcaucaucaaggaggaggugcuggccuacgugguccagcucccccuguacggcgugaucgacacgccgugcuggaagcugcacaccagcccccucugcaccaccaacacgaaggagggguccaacaucugccugacccgcaccgaccggggcugguacugcgacaacgcgggcuccgugagcuucuucccccaggccgagaccugcaagguccaguccaaccgcguguucugcgacacgaugaacagccggacccuccccuccgaggucaaccugugcaacguggacaucuucaacccgaaguacgacugcaagaucaugaccagcaagaccgacguguccagcuccgucaucacgagccugggggccaucguguccugcuacggcaagaccaagugcaccgccagcaacaagugccgggggaucaucaagaccuucuccaacggcugcgacuacgugagcaacaagggcgucgacacggugagcguggggaacacccucuacuacgucaacaagcaggagggcaagucccuguacgugaagggggagcccaucaucaacuucuacgacccccugguguuccccagcgacgaguucgacgccuccaucagccaggucaacgagaagaucaaccagucccucgcguucauccgcaagagcgacgagcugcugcacaacgugaacgccggcaaguccaccaccaacaucaugaucaccacgaucaucaucgugaucaucgucauccuccugagccugaucgccguggggcuccugcuguacugcaaggcccgguccaccccggugacccugagcaaggaccagcucuccggcaucaacaacaucgccuucagcaacugaggacuagucccuguucccagagcccacuuuuuuuucuuuuuuugaaauaaaauagccugucuuucagaucuaaaaaaaaaaaaaaaaaaaaaaaaaaaaaaaaaaaaaaaaaaaaaaaaaaaaaaaaaaaaaaaaugcaucccccccccccccccccccccccccccccccaaaggcucuuuucagagccaccagaauu

SEQ ID NO: 5449 - RNA, 1900 nt, Artificial Sequence
  mRNA product Design c-5 comprising derived and/or modified sequence from HRSV(A2)__F_DSCav1_mut5 (opt2)
gggagagcggcucggccauuuugucccagucaguccggaggcugcggcugcagaaguaccgccugcggaguaacugcaaagaagcuuaccauggagcuccucauccucaaggccaacgccaucaccaccauccucaccgccgucaccuucugcuucgccuccggccagaacaucaccgaggaguucuaccaguccaccugcuccgccgucuccaagggcuaccucuccgcccuccgcaccggcugguacaccuccgucaucaccaucgagcucuccaacaucaaggagaacaagugcaacggcaccgacgccaaggucaagcucaucaagcaggagcucgacaaguacaagaacgccgucaccgagcuccagcuccucaugcaguccacccccgccaccggcuccggcuccgccaucgccuccggcgucgccgucugcaagguccuccaccucgagggcgaggucaacaagaucaaguccgcccuccucuccaccaacaaggccgucgucucccucuccggcugcggcgucuccguccucaccuucaagguccucgaccucaagaacuacaucgacaagcagcuccuccccauccucaacaagcaguccugcuccaucuccaacaucgagaccgucaucgaguuccagcagaagaacaaccgccuccucgagaucacccgcgaguucuccgucaacgccggcgucaccacccccgucuccaccuacaugcucaccaacuccgagcuccucucccucaucaacgacaugcccaucaccaacgaccagaagaagcucauguccaacaacguccagaucguccgccagcaguccuacuccaucaugugcaucaucaaggaggagguccucgccuacgucguccagcucccccucuacggcgucaucgacacccccugcuggaagcuccacaccuccccccucugcaccaccaacaccaaggagggcuccaacaucugccucacccgcaccgaccgcggcugguacugcgacaacgccggcuccgucuccuucuucccccaggccgagaccugcaagguccaguccaaccgcgucuucugcgacaccaugaacucccgcacccuccccuccgaggucaaccucugcaacgucgacaucuucaaccccaaguacgacugcaagaucaugaccuccaagaccgacgucuccuccuccgucaucaccucccucggcgccaucgucuccugcuacggcaagaccaagugcaccgccuccaacaagugccgcggcaucaucaagaccuucuccaacggcugcgacuacgucuccaacaagggcgucgacaccgucuccgucggcaacacccucuacuacgucaacaagcaggagggcaagucccucuacgucaagggcgagcccaucaucaacuucuacgacccccucgucuuccccuccgacgaguucgacgccuccaucucccaggucaacgagaagaucaaccagucccucgccuucauccgcaaguccgacgagcuccuccacaacgucaacgccggcaaguccaccaccaacaucaugaucaccaccaucaucaucgucaucaucgucauccuccucucccucaucgccgucggccuccuccucuacugcaaggcccgcuccacccccgucacccucuccaaggaccagcucuccggcaucaacaacaucgccuucuccaacugaggacuagucccuguucccagagcccacuuuuuuuucuuuuuuugaaauaaaauagccugucuuucagaucuaaaaaaaaaaaaaaaaaaaaaaaaaaaaaaaaaaaaaaaaaaaaaaaaaaaaaaaaaaaaaaaaugcaucccccccccccccccccccccccccccccccaaaggcucuuuucagagccaccagaauu

SEQ ID NO: 5450 - RNA, 1900 nt, Artificial Sequence
  mRNA product Design c-5 comprising derived and/or modified sequence from HRSV(A2)__F_DSCav1_mut5 (opt3)
gggagagcggcucggccauuuugucccagucaguccggaggcugcggcugcagaaguaccgccugcggaguaacugcaaagaagcuuaccauggagcugcucauccuuaaggccaacgcuauuaccacaauacugacugcagugacguucugcuuugccagcggccagaauaucaccgaagaguucuaccaauccacauguucugcggucucaaaaggguauuugagugcuuuaagaacuggaugguacaccagcguuauuacaaucgaacuguccaacauuaaggagaauaaaugcaacgguaccgacgccaaggugaaacuaaucaagcaggaacucgauaaguauaaaaaugcaguaacugagcugcagcuucugaugcagucuacacccgccaccggcucggggucagcuauagcaagcggaguggccgucuguaagguguugcaccucgagggcgaaguuaacaaaaucaagagugcucugcuguccacgaauaaagccguggucucucucagcgguugcgggguguccguauuaacuuuuaagguucuggaccuuaagaacuacauugauaaacaauugcugccuauccuaaauaagcagucauguaguauuagcaacaucgagaccgugauagaguuccagcagaaaaauaacaggcuccuggaaauuacacgggaguuuucugucaaugcgggagugacuaccccaguguccacauauaugcuuaccaacucagaacuguugagccucaucaaugacaugccgauuacgaacgaucaaaagaaacugaugaguaacaauguccagaucguucgccagcagucuuacuccaucaugugcauuauaaaggaggaaguguuagcauauguagugcaacugccccucuacggcgucaucgacacuccuuguuggaaacuucauacaagcccacugugcaccacuaacacaaaggagggcucgaauauuuguuugacccgaacggaucgugggugguacugcgacaacgccggaucuguguccuucuuuccccaggcugaaaccuguaagguucagucaaauagaguguucugcgauacaaugaacaguagaacucugccuagcgaggucaaucucugcaacguggacaucuuuaauccaaaauaugauuguaagauaaugaccuccaaaacagacguaucuagcucaguuauuaccagucugggugccaucguguccugcuacggcaagacuaaauguacagcaagcaacaagugcagggggaucauuaagaccuucucuaauggaugugauuaugucucaaacaaaggcguggacacugucaguguggguaauacgcuuuacuauguuaacaagcaagaggggaaaagccuguacgugaagggagaacccaucauuaauuuuuaugacccuuugguauucccauccgaugaguuugacgcuucuauaucgcaggucaacgagaaaaucaaccagagccucgccuucauucggaaguccgaugaacuguuacacaaugugaacgcgggcaagucaacaaccaauaucaugaucacuaccauuauaaucguuauuaucgugauucugcuaagucucaucgccgucggccugcuuuuguacugcaaagcacgcucuacaccggugacccugagcaaggaccagcucuccgggauaaacaauaucgcuuucucaaacugaggacuagucccuguucccagagcccacuuuuuuuucuuuuuuugaaauaaaauagccugucuuucagaucuaaaaaaaaaaaaaaaaaaaaaaaaaaaaaaaaaaaaaaaaaaaaaaaaaaaaaaaaaaaaaaaaugcaucccccccccccccccccccccccccccccccaaaggcucuuuucagagccaccagaauu

SEQ ID NO: 5451 - RNA, 1900 nt, Artificial Sequence
  mRNA product Design c-5 comprising derived and/or modified sequence from HRSV(A2)__F_DSCav1_mut5 (opt4)
gggagagcggcucggccauuuugucccagucaguccggaggcugcggcugcagaaguaccgccugcggaguaacugcaaagaagcuuaccauggagcugcugauccugaaggccaacgccaucaccaccauccugaccgccgugaccuucugcuucgccagcggccagaacaucaccgaggaguucuaccagagcaccugcagcgccgugagcaagggcuaccugagcgcccugagaaccggcugguacaccagcgugaucaccaucgagcugagcaacaucaaggagaacaagugcaacggcaccgacgccaaggugaagcugaucaagcaggagcuggacaaguacaagaacgccgugaccgagcugcagcugcugaugcagagcacccccgccaccggcagcggcagcgccaucgccagcggcguggccgugugcaaggugcugcaccuggagggcgaggugaacaagaucaagagcgcccugcugagcaccaacaaggccguggugagccugagcggcugcggcgugagcgugcugaccuucaaggugcuggaccugaagaacuacaucgacaagcagcugcugcccauccugaacaagcagagcugcagcaucagcaacaucgagaccgugaucgaguuccagcagaagaacaacagacugcuggagaucaccagagaguucagcgugaacgccggcgugaccacccccgugagcaccuacaugcugaccaacagcgagcugcugagccugaucaacgacaugcccaucaccaacgaccagaagaagcugaugagcaacaacgugcagaucgugagacagcagagcuacagcaucaugugcaucaucaaggaggaggugcuggccuacguggugcagcugccccuguacggcgugaucgacacccccugcuggaagcugcacaccagcccccugugcaccaccaacaccaaggagggcagcaacaucugccugaccagaaccgacagaggcugguacugcgacaacgccggcagcgugagcuucuucccccaggccgagaccugcaaggugcagagcaacagaguguucugcgacaccaugaacagcagaacccugcccagcgaggugaaccugugcaacguggacaucuucaaccccaaguacgacugcaagaucaugaccagcaagaccgacgugagcagcagcgugaucaccagccugggcgccaucgugagcugcuacggcaagaccaagugcaccgccagcaacaagugcagaggcaucaucaagaccuucagcaacggcugcgacuacgugagcaacaagggcguggacaccgugagcgugggcaacacccuguacuacgugaacaagcaggagggcaagagccuguacgugaagggcgagcccaucaucaacuucuacgacccccugguguuccccagcgacgaguucgacgccagcaucagccaggugaacgagaagaucaaccagagccuggccuucaucagaaagagcgacgagcugcugcacaacgugaacgccggcaagagcaccaccaacaucaugaucaccaccaucaucaucgugaucaucgugauccugcugagccugaucgccgugggccugcugcuguacugcaaggccagaagcacccccgugacccugagcaaggaccagcugagcggcaucaacaacaucgccuucagcaacugaggacuagucccuguucccagagcccacuuuuuuuucuuuuuuugaaauaaaauagccugucuuucagaucuaaaaaaaaaaaaaaaaaaaaaaaaaaaaaaaaaaaaaaaaaaaaaaaaaaaaaaaaaaaaaaaaugcaucccccccccccccccccccccccccccccccaaaggcucuuuucagagccaccagaauu

SEQ ID NO: 5452 - RNA, 1900 nt, Artificial Sequence
  mRNA product Design c-5 comprising derived and/or modified sequence from HRSV(A2)__F_DSCav1_mut5 (opt5)
gggagagcggcucggccauuuugucccagucaguccggaggcugcggcugcagaaguaccgccugcggaguaacugcaaagaagcuuaccauggagcugcucauccugaaggccaacgcuauuaccacaauccuuacggccgugaccuucugcuuugcgagcggccagaauauuacagaagaguucuaccaauccaccuguucugcugucagcaaaggguaucuguccgcccucagaacaggaugguacaccucuguuaucacaauugaacugagcaacaucaaggagaauaaaugcaacggcaccgacgccaaggugaaacuuaucaagcaggaacuggauaaguauaaaaaugcugugacggagcuccagcugcugaugcaguccacccccgccacagggucuggaagcgcuauugccuccggcgucgcgguguguaagguucuccaccuggagggggaagugaacaaaaucaagagcgcccuucugucuaccaauaaagcugucgugucccucagcggaugcggcguuucugugcugacauuuaagguccuugaccugaagaacuacauugauaaacaacuccugccuauccugaauaagcaguccuguagcauuucuaacaucgagaccgugauugaguuccagcagaaaaauaaccggcuccuggaaaucacgcgcgaguuuuccgugaaugccggcgucacaaccccgguuagcacauauaugcuuaccaacuccgaacugcucucucugaucaaugacaugcccauuaccaacgaucaaaagaaacuuaugagcaacaaugugcagaucgugagacagcaguccuacagcauuaugugcaucauuaaggaggaaguccuggcuuaugugguucaacucccucuguacggggugaucgacacacccuguuggaaacugcauacgucuccucucugcaccacaaacaccaaggagggauccaauaucugucugacacggaccgaucgcggcugguacugcgacaacgccgggagcgucucuuucuuuccccaggcggaaacguguaaggugcagagcaauagaguuuucugcgauacaaugaacuccagaacccugccuucugaggugaaucucugcaacgucgacauuuuuaauccgaaauaugauuguaagaucaugaccagcaaaacagacguguccagcucugucauuaccucccugggagccaucgugagcugcuacggcaagacaaaauguacggcuucuaacaagugccgggggauuaucaagaccuucuccaauggaugugauuauguuagcaacaaaggcguggacacagucuccgugggcaauacccuuuacuauguuaacaagcaagaggggaaaucucuguacgugaagggagaacccaucauuaauuuuuaugacccucucgucuuccccagcgaugaguuugacgccuccaucucucaggugaacgagaaaauuaaccagagccuggcuuucauccgcaaguccgaugaacugcuccacaaugugaacgccggcaagagcacaaccaauauuaugaucacgaccauuaucaucguuauuaucgucauucugcuuucucugaucgccguggggcuccugcuguacugcaaagcuagauccacaccugugacccuuagcaaggaccagcucucuggaauuaacaauaucgcguucuccaacugaggacuagucccuguucccagagcccacuuuuuuuucuuuuuuugaaauaaaauagccugucuuucagaucuaaaaaaaaaaaaaaaaaaaaaaaaaaaaaaaaaaaaaaaaaaaaaaaaaaaaaaaaaaaaaaaaugcaucccccccccccccccccccccccccccccccaaaggcucuuuucagagccaccagaauu

SEQ ID NO: 5453 - RNA, 1900 nt, Artificial Sequence
  mRNA product Design c-5 comprising derived and/or modified sequence from HRSV(A2)__F_DSCav1_mut5 (opt6)
gggagagcggcucggccauuuugucccagucaguccggaggcugcggcugcagaaguaccgccugcggaguaacugcaaagaagcuuaccauggaacuauuaauacuuaaagccaacgcaauaacaacaauucucacugcugucaccuucugcuucgccucaggccaaaacauaacggaagaauuuuaccaaucaacaugcucugcaguauccaaaggcuaccuaucugcucuaagaacagguugguauacaucaguaauaaccauagaacuaucaaacauaaaagaaaauaaaugcaacggaacagacgcaaaaguuaaacucauaaaacaagaacuagacaaauauaaaaacgcaguuaccgaacuacaacuacuuaugcaauccacucccgccacuggaucaggaucagcaauagcaucaggagucgcaguauguaaagucuuacaccucgaaggcgaagucaauaaaaucaaauccgcauuacuauccacaaacaaagcagucguaucccuaagcggaugcggaguaucaguacuaacauuuaaaguacuagaccuaaaaaauuacaucgauaaacaacuauuaccuauauuaaacaaacaauccugcuccauuucaaauaucgaaaccguaauagaauuucaacaaaaaaacaacagauuacuagaaauaacaagagaauuuuccguaaaugcuggcguaacaacaccaguauccacauacaugcucacaaacuccgaacuacuaucacuaauaaaugacaugcccauaacaaacgaucaaaaaaaacuaaugucaaauaauguacaaauaguaagacaacaaagcuacuccaucauguguauaauaaaagaagaaguacuagcauacguaguucaacuaccacuuuacggcguaaucgacaccccuugcuggaaacuacacaccuccccucuaugcaccacaaacacaaaagaagguuccaacauaugccuuaccagaacagacagaggcugguauugcgacaacgcaggaucaguuucauuuuuuccacaagcugaaacaugcaaaguacaaucaaacagagucuucugcgacacaaugaacucaagaacucuacccucagaaguaaaccuauguaacguagacauuuucaaccccaaauacgacugcaaaauuaugacaucaaaaacagacguuucaucaucaguuaucaccucauuaggagcaauaguaagcugcuacggaaaaacaaaaugcaccgccucaaauaaaugcagaggaauaauaaaaacuuucuccaacggaugcgacuacguuucaaacaaagguguagacacuguaucaguaggaaacacacuauauuacguaaauaaacaagaaggaaaaucacuuuaugucaaaggagaaccaauaaucaauuucuacgacccauuaguauucccaucagacgaauuugaugcuucaauaucacaaguaaacgaaaaaauaaaucaaucacucgcauuuauacgaaaaucagacgaacuacuacacaauguaaacgcaggcaaaucaacaacaaacauaaugauaacaacaauaaucauuguaauaauaguaauacuucuaucucuaauagcaguaggauuacuccucuacugcaaagcaagaucaaccccuguaacacuaucaaaagaccaacuuucagguauaaauaauauagcuuuuuccaauuaaggacuagucccuguucccagagcccacuuuuuuuucuuuuuuugaaauaaaauagccugucuuucagaucuaaaaaaaaaaaaaaaaaaaaaaaaaaaaaaaaaaaaaaaaaaaaaaaaaaaaaaaaaaaaaaaaugcaucccccccccccccccccccccccccccccccaaaggcucuuuucagagccaccagaauu

SEQ ID NO: 5454 - RNA, 1900 nt, Artificial Sequence
  mRNA product Design c-5 comprising derived and/or modified sequence from HRSV(A2)__F_DSCav1_mut5 (opt11)
gggagagcggcucggccauuuugucccagucaguccggaggcugcggcugcagaaguaccgccugcggaguaacugcaaagaagcuuaccauggagcuccuaauccucaaagccaacgcgaucacuacaauccucacagccgucaccuucugcuucgccuccggccaaaacaucaccgaggaguucuaccaaucaaccugcuccgccguaucaaaaggauaccuaagcgcccuacggaccggcugguacacaucugucaucaccaucgaacuaucaaacaucaaagaaaacaaaugcaacggaaccgacgcaaaagucaaacugauuaaacaagaacuagacaaauacaaaaacgcagucaccgaacugcaauuacucaugcaaagcacaccggccaccggcucaggcagcgccaucgccuccggcgucgccgucugcaaaguucuccaccucgagggcgaagucaacaaaauaaaaucugcccuccucuccaccaacaaagccgucgucucccucagcggcugcggagucuccguccucaccuucaaaguucucgaucucaagaacuauauugacaaacaacuucuacccauacucaacaaacaaagcugcagcauauccaacaucgaaaccgucaucgaguuccaacaaaagaacaaccgccuccucgaaauaacccgcgaguucagcguuaacgccggagucacuaccccugucuccaccuacaugcucaccaacuccgaacuccuaucacuaaucaacgacaugcccauaaccaacgaccagaagaaacucauguccaacaacguccaaauuguccgacaacaaagcuacuccauaaugugcauaauaaaagaggaaguccucgccuacgucguacaacugccccuuuauggcguaaucgacacacccugcuggaaacuccacacgucaccccucugcaccaccaacacaaaagaaggcucgaacaucugccuaacacggacugaccgcggcugguacugcgacaacgccggcuccgucagcuucuucccacaagccgaaaccugcaaaguacaauccaaccgaguauucugcgacaccaugaacuccagaacccuccccucagaggucaaccugugcaacguagacaucuucaaccccaaauacgacugcaaaauaaugaccucaaaaacagacgucuccucuuccguaaucaccagccucggagccaucgucagcugcuacggcaaaaccaaaugcaccgccucaaacaaaugccgcggcaucaucaaaacauucucaaacggcugcgacuacgucuccaacaaaggcgucgacacaguaagcguaggcaacacacuguacuacgucaacaaacaagagggaaaaucacucuacgucaaaggagaacccauaaucaacuucuacgacccccucguuuuccccagcgacgaguucgacgccagcauaucccaagucaacgagaaaauuaaccaaucccuagcauucauccgaaaaucugacgaacugcuccacaacgucaacgcgggaaaaucaacaaccaacauaaugauaaccacaaucauaauagucaucaucguaauccuccucagccuaaucgcugucggccuccuccucuacugcaaagcccguuccaccccagucacacuuuccaaggaccaacuaagcggaauaaacaacaucgcguucucaaacuaaggacuagucccuguucccagagcccacuuuuuuuucuuuuuuugaaauaaaauagccugucuuucagaucuaaaaaaaaaaaaaaaaaaaaaaaaaaaaaaaaaaaaaaaaaaaaaaaaaaaaaaaaaaaaaaaaugcaucccccccccccccccccccccccccccccccaaaggcucuuuucagagccaccagaauu

SEQ ID NO: 5455 - RNA, 1909 nt, Artificial Sequence
  mRNA product Design d-1 comprising derived and/or modified sequence from HRSV(A2)__F_DSCav1_mut5 (opt1)
gggagacccgugacccggaaguuguacggcuacgcgacuuucccucccacaaacccucgcgcccuuccuuuccuacuugggcccggcagaaagcuuaccauggagcugcucauccugaaggccaacgccaucaccaccauccugacggcggugaccuucugcuucgccagcggccagaacaucaccgaggaguucuaccaguccacgugcagcgccgucuccaagggguaccucagcgcccugcggaccggcugguacaccuccgugaucaccaucgagcugagcaacaucaaggagaacaagugcaacgggaccgacgccaaggugaagcucaucaagcaggagcuggacaaguacaagaacgcggucacggagcugcagcuccugaugcaguccaccccggcaaccggcuccggcuccgccaucgcgagcggcgucgccgugugcaaggugcugcaccucgagggggaggucaacaagaucaagagcgcccugcuguccaccaacaaggccguggugagccucuccggcugcggcgucagcgugcugaccuucaaggugcuggaccucaagaacuacaucgacaagcagcugcugcccauccugaacaagcagagcugcuccaucagcaacaucgagacggugaucgaguuccagcagaagaacaaccggcuccuggagaucacccgcgaguucagcgugaacgccggggucaccacccccguguccacguacaugcugaccaacagcgagcuccugucccugaucaacgacaugccgaucaccaacgaccagaagaagcucaugagcaacaacgugcagaucguccggcagcaguccuacagcaucaugugcaucaucaaggaggaggugcuggcguacgugguccagcugccccucuacggcgugaucgacacccccugcuggaagcugcacacgagcccccugugcaccaccaacaccaaggagggguccaacaucugccucacgcgcaccgaccggggcugguacugcgacaacgccggcagcgucuccuucuucccgcaggccgagaccugcaaggugcagagcaaccgcguguucugcgacaccaugaacucccggacgcugcccagcgagguaaaccucugcaacgucgacaucuucaaccccaaguacgacugcaagaucaugaccuccaagaccgacgugagcuccagcgugaucaccucccugggggccaucgucagcugcuacggcaagacgaagugcaccgccagcaacaagugccgggggaucaucaagaccuucuccaacggcugcgacuacgugagcaacaagggcguggacaccguguccgucgggaacacccuguacuacgugaacaagcaggagggcaagagccucuacgugaagggggagcccaucaucaacuucuacgacccgcuggucuuccccuccgacgaguucgacgcgagcaucucccaggugaacgagaagaucaaccagagccuggccuucauccgcaaguccgacgagcugcuccacaacgugaacgccggcaagagcacgaccaacaucaugaucaccaccaucaucaucgucaucaucgugauccugcugucccucaucgccguggggcugcugcucuacugcaaggcccggagcacgcccgucacccuguccaaggaccagcugagcggcaucaacaacaucgcguucuccaacugaggacuagucccuguucccagagcccacuuuuuuuucuuuuuuugaaauaaaauagccugucuuucagaucuaaaaaaaaaaaaaaaaaaaaaaaaaaaaaaaaaaaaaaaaaaaaaaaaaaaaaaaaaaaaaaaaugcaucccccccccccccccccccccccccccccccaaaggcucuuuucagagccaccagaauu

SEQ ID NO: 5456 - RNA, 1909 nt, Artificial Sequence
  mRNA product Design d-1 comprising derived and/or modified sequence from HRSV(A2)__F_DSCav1_mut5 (opt1)
gggagacccgugacccggaaguuguacggcuacgcgacuuucccucccacaaacccucgcgcccuuccuuuccuacuugggcccggcagaaagcuuaccauggagcugcucauccugaaggccaacgccaucaccaccauccugacggcggugaccuucugcuucgccagcggccagaacaucaccgaggaguucuaccaguccacgugcagcgccgucuccaagggguaccucagcgcccugcgcaccggcugguacaccuccgugaucaccaucgagcugagcaacaucaaggagaacaagugcaacgggaccgacgccaaggugaagcucaucaagcaggagcuggacaaguacaagaacgcggucacggagcugcagcuccugaugcaguccacccccgccaccggcagcggguccgccaucgccagcggcguggcggugugcaagguccugcaccucgagggcgaggugaacaagaucaaguccgcccugcugagcaccaacaaggccguggucucccucagcgggugcggcguguccgugcugacguucaagguccuggaccucaagaacuacaucgacaagcagcugcugccgauccucaacaagcagagcugcuccaucagcaacaucgagaccgugaucgaguuccagcagaagaacaaccggcugcuggagaucacccgcgaguucuccgugaacgccggggucaccacgcccgugagcaccuacaugcucaccaacagcgagcugcugucccucaucaacgacaugcccaucaccaacgaccagaagaagcugaugagcaacaacgugcagaucguccggcagcaguccuacagcaucaugugcaucaucaaggaggaggugcuggccuacgugguccagcucccccuguacggcgugaucgacacgccgugcuggaagcugcacaccagcccccucugcaccaccaacacgaaggagggguccaacaucugccugacccgcaccgaccggggcugguacugcgacaacgcgggcuccgugagcuucuucccccaggccgagaccugcaagguccaguccaaccgcguguucugcgacacgaugaacagccggacccuccccuccgaggucaaccugugcaacguggacaucuucaacccgaaguacgacugcaagaucaugaccagcaagaccgacguguccagcuccgucaucacgagccugggggccaucguguccugcuacggcaagaccaagugcaccgccagcaacaagugccgggggaucaucaagaccuucuccaacggcugcgacuacgugagcaacaagggcgucgacacggugagcguggggaacacccucuacuacgucaacaagcaggagggcaagucccuguacgugaagggggagcccaucaucaacuucuacgacccccugguguuccccagcgacgaguucgacgccuccaucagccaggucaacgagaagaucaaccagucccucgcguucauccgcaagagcgacgagcugcugcacaacgugaacgccggcaaguccaccaccaacaucaugaucaccacgaucaucaucgugaucaucgucauccuccugagccugaucgccguggggcuccugcuguacugcaaggcccgguccaccccggugacccugagcaaggaccagcucuccggcaucaacaacaucgccuucagcaacugaggacuagucccuguucccagagcccacuuuuuuuucuuuuuuugaaauaaaauagccugucuuucagaucuaaaaaaaaaaaaaaaaaaaaaaaaaaaaaaaaaaaaaaaaaaaaaaaaaaaaaaaaaaaaaaaaugcaucccccccccccccccccccccccccccccccaaaggcucuuuucagagccaccagaauu

SEQ ID NO: 5457 - RNA, 1909 nt, Artificial Sequence
  mRNA product Design d-1 comprising derived and/or modified sequence from HRSV(A2)__F_DSCav1_mut5 (opt2)
gggagacccgugacccggaaguuguacggcuacgcgacuuucccucccacaaacccucgcgcccuuccuuuccuacuugggcccggcagaaagcuuaccauggagcuccucauccucaaggccaacgccaucaccaccauccucaccgccgucaccuucugcuucgccuccggccagaacaucaccgaggaguucuaccaguccaccugcuccgccgucuccaagggcuaccucuccgcccuccgcaccggcugguacaccuccgucaucaccaucgagcucuccaacaucaaggagaacaagugcaacggcaccgacgccaaggucaagcucaucaagcaggagcucgacaaguacaagaacgccgucaccgagcuccagcuccucaugcaguccacccccgccaccggcuccggcuccgccaucgccuccggcgucgccgucugcaagguccuccaccucgagggcgaggucaacaagaucaaguccgcccuccucuccaccaacaaggccgucgucucccucuccggcugcggcgucuccguccucaccuucaagguccucgaccucaagaacuacaucgacaagcagcuccuccccauccucaacaagcaguccugcuccaucuccaacaucgagaccgucaucgaguuccagcagaagaacaaccgccuccucgagaucacccgcgaguucuccgucaacgccggcgucaccacccccgucuccaccuacaugcucaccaacuccgagcuccucucccucaucaacgacaugcccaucaccaacgaccagaagaagcucauguccaacaacguccagaucguccgccagcaguccuacuccaucaugugcaucaucaaggaggagguccucgccuacgucguccagcucccccucuacggcgucaucgacacccccugcuggaagcuccacaccuccccccucugcaccaccaacaccaaggagggcuccaacaucugccucacccgcaccgaccgcggcugguacugcgacaacgccggcuccgucuccuucuucccccaggccgagaccugcaagguccaguccaaccgcgucuucugcgacaccaugaacucccgcacccuccccuccgaggucaaccucugcaacgucgacaucuucaaccccaaguacgacugcaagaucaugaccuccaagaccgacgucuccuccuccgucaucaccucccucggcgccaucgucuccugcuacggcaagaccaagugcaccgccuccaacaagugccgcggcaucaucaagaccuucuccaacggcugcgacuacgucuccaacaagggcgucgacaccgucuccgucggcaacacccucuacuacgucaacaagcaggagggcaagucccucuacgucaagggcgagcccaucaucaacuucuacgacccccucgucuuccccuccgacgaguucgacgccuccaucucccaggucaacgagaagaucaaccagucccucgccuucauccgcaaguccgacgagcuccuccacaacgucaacgccggcaaguccaccaccaacaucaugaucaccaccaucaucaucgucaucaucgucauccuccucucccucaucgccgucggccuccuccucuacugcaaggcccgcuccacccccgucacccucuccaaggaccagcucuccggcaucaacaacaucgccuucuccaacugaggacuagucccuguucccagagcccacuuuuuuuucuuuuuuugaaauaaaauagccugucuuucagaucuaaaaaaaaaaaaaaaaaaaaaaaaaaaaaaaaaaaaaaaaaaaaaaaaaaaaaaaaaaaaaaaaugcaucccccccccccccccccccccccccccccccaaaggcucuuuucagagccaccagaauu

SEQ ID NO: 5458 - RNA, 1909 nt, Artificial Sequence
  mRNA product Design d-1 comprising derived and/or modified sequence from HRSV(A2)__F_DSCav1_mut5 (opt3)
gggagacccgugacccggaaguuguacggcuacgcgacuuucccucccacaaacccucgcgcccuuccuuuccuacuugggcccggcagaaagcuuaccauggagcugcucauccuuaaggccaacgcuauuaccacaauacugacugcagugacguucugcuuugccagcggccagaauaucaccgaagaguucuaccaauccacauguucugcggucucaaaaggguauuugagugcuuuaagaacuggaugguacaccagcguuauuacaaucgaacuguccaacauuaaggagaauaaaugcaacgguaccgacgccaaggugaaacuaaucaagcaggaacucgauaaguauaaaaaugcaguaacugagcugcagcuucugaugcagucuacacccgccaccggcucggggucagcuauagcaagcggaguggccgucuguaagguguugcaccucgagggcgaaguuaacaaaaucaagagugcucugcuguccacgaauaaagccguggucucucucagcgguugcgggguguccguauuaacuuuuaagguucuggaccuuaagaacuacauugauaaacaauugcugccuauccuaaauaagcagucauguaguauuagcaacaucgagaccgugauagaguuccagcagaaaaauaacaggcuccuggaaauuacacgggaguuuucugucaaugcgggagugacuaccccaguguccacauauaugcuuaccaacucagaacuguugagccucaucaaugacaugccgauuacgaacgaucaaaagaaacugaugaguaacaauguccagaucguucgccagcagucuuacuccaucaugugcauuauaaaggaggaaguguuagcauauguagugcaacugccccucuacggcgucaucgacacuccuuguuggaaacuucauacaagcccacugugcaccacuaacacaaaggagggcucgaauauuuguuugacccgaacggaucgugggugguacugcgacaacgccggaucuguguccuucuuuccccaggcugaaaccuguaagguucagucaaauagaguguucugcgauacaaugaacaguagaacucugccuagcgaggucaaucucugcaacguggacaucuuuaauccaaaauaugauuguaagauaaugaccuccaaaacagacguaucuagcucaguuauuaccagucugggugccaucguguccugcuacggcaagacuaaauguacagcaagcaacaagugcagggggaucauuaagaccuucucuaauggaugugauuaugucucaaacaaaggcguggacacugucaguguggguaauacgcuuuacuauguuaacaagcaagaggggaaaagccuguacgugaagggagaacccaucauuaauuuuuaugacccuuugguauucccauccgaugaguuugacgcuucuauaucgcaggucaacgagaaaaucaaccagagccucgccuucauucggaaguccgaugaacuguuacacaaugugaacgcgggcaagucaacaaccaauaucaugaucacuaccauuauaaucguuauuaucgugauucugcuaagucucaucgccgucggccugcuuuuguacugcaaagcacgcucuacaccggugacccugagcaaggaccagcucuccgggauaaacaauaucgcuuucucaaacugaggacuagucccuguucccagagcccacuuuuuuuucuuuuuuugaaauaaaauagccugucuuucagaucuaaaaaaaaaaaaaaaaaaaaaaaaaaaaaaaaaaaaaaaaaaaaaaaaaaaaaaaaaaaaaaaaugcaucccccccccccccccccccccccccccccccaaaggcucuuuucagagccaccagaauu

SEQ ID NO: 5459 - RNA, 1909 nt, Artificial Sequence
  mRNA product Design d-1 comprising derived and/or modified sequence from HRSV(A2)__F_DSCav1_mut5 (opt4)
gggagacccgugacccggaaguuguacggcuacgcgacuuucccucccacaaacccucgcgcccuuccuuuccuacuugggcccggcagaaagcuuaccauggagcugcugauccugaaggccaacgccaucaccaccauccugaccgccgugaccuucugcuucgccagcggccagaacaucaccgaggaguucuaccagagcaccugcagcgccgugagcaagggcuaccugagcgcccugagaaccggcugguacaccagcgugaucaccaucgagcugagcaacaucaaggagaacaagugcaacggcaccgacgccaaggugaagcugaucaagcaggagcuggacaaguacaagaacgccgugaccgagcugcagcugcugaugcagagcacccccgccaccggcagcggcagcgccaucgccagcggcguggccgugugcaaggugcugcaccuggagggcgaggugaacaagaucaagagcgcccugcugagcaccaacaaggccguggugagccugagcggcugcggcgugagcgugcugaccuucaaggugcuggaccugaagaacuacaucgacaagcagcugcugcccauccugaacaagcagagcugcagcaucagcaacaucgagaccgugaucgaguuccagcagaagaacaacagacugcuggagaucaccagagaguucagcgugaacgccggcgugaccacccccgugagcaccuacaugcugaccaacagcgagcugcugagccugaucaacgacaugcccaucaccaacgaccagaagaagcugaugagcaacaacgugcagaucgugagacagcagagcuacagcaucaugugcaucaucaaggaggaggugcuggccuacguggugcagcugccccuguacggcgugaucgacacccccugcuggaagcugcacaccagcccccugugcaccaccaacaccaaggagggcagcaacaucugccugaccagaaccgacagaggcugguacugcgacaacgccggcagcgugagcuucuucccccaggccgagaccugcaaggugcagagcaacagaguguucugcgacaccaugaacagcagaacccugcccagcgaggugaaccugugcaacguggacaucuucaaccccaaguacgacugcaagaucaugaccagcaagaccgacgugagcagcagcgugaucaccagccugggcgccaucgugagcugcuacggcaagaccaagugcaccgccagcaacaagugcagaggcaucaucaagaccuucagcaacggcugcgacuacgugagcaacaagggcguggacaccgugagcgugggcaacacccuguacuacgugaacaagcaggagggcaagagccuguacgugaagggcgagcccaucaucaacuucuacgacccccugguguuccccagcgacgaguucgacgccagcaucagccaggugaacgagaagaucaaccagagccuggccuucaucagaaagagcgacgagcugcugcacaacgugaacgccggcaagagcaccaccaacaucaugaucaccaccaucaucaucgugaucaucgugauccugcugagccugaucgccgugggccugcugcuguacugcaaggccagaagcacccccgugacccugagcaaggaccagcugagcggcaucaacaacaucgccuucagcaacugaggacuagucccuguucccagagcccacuuuuuuuucuuuuuuugaaauaaaauagccugucuuucagaucuaaaaaaaaaaaaaaaaaaaaaaaaaaaaaaaaaaaaaaaaaaaaaaaaaaaaaaaaaaaaaaaaugcaucccccccccccccccccccccccccccccccaaaggcucuuuucagagccaccagaauu

SEQ ID NO: 5460 - RNA, 1909 nt, Artificial Sequence
  mRNA product Design d-1 comprising derived and/or modified sequence from HRSV(A2)__F_DSCav1_mut5 (opt5)
gggagacccgugacccggaaguuguacggcuacgcgacuuucccucccacaaacccucgcgcccuuccuuuccuacuugggcccggcagaaagcuuaccauggagcugcucauccugaaggccaacgcuauuaccacaauccuuacggccgugaccuucugcuuugcgagcggccagaauauuacagaagaguucuaccaauccaccuguucugcugucagcaaaggguaucuguccgcccucagaacaggaugguacaccucuguuaucacaauugaacugagcaacaucaaggagaauaaaugcaacggcaccgacgccaaggugaaacuuaucaagcaggaacuggauaaguauaaaaaugcugugacggagcuccagcugcugaugcaguccacccccgccacagggucuggaagcgcuauugccuccggcgucgcgguguguaagguucuccaccuggagggggaagugaacaaaaucaagagcgcccuucugucuaccaauaaagcugucgugucccucagcggaugcggcguuucugugcugacauuuaagguccuugaccugaagaacuacauugauaaacaacuccugccuauccugaauaagcaguccuguagcauuucuaacaucgagaccgugauugaguuccagcagaaaaauaaccggcuccuggaaaucacgcgcgaguuuuccgugaaugccggcgucacaaccccgguuagcacauauaugcuuaccaacuccgaacugcucucucugaucaaugacaugcccauuaccaacgaucaaaagaaacuuaugagcaacaaugugcagaucgugagacagcaguccuacagcauuaugugcaucauuaaggaggaaguccuggcuuaugugguucaacucccucuguacggggugaucgacacacccuguuggaaacugcauacgucuccucucugcaccacaaacaccaaggagggauccaauaucugucugacacggaccgaucgcggcugguacugcgacaacgccgggagcgucucuuucuuuccccaggcggaaacguguaaggugcagagcaauagaguuuucugcgauacaaugaacuccagaacccugccuucugaggugaaucucugcaacgucgacauuuuuaauccgaaauaugauuguaagaucaugaccagcaaaacagacguguccagcucugucauuaccucccugggagccaucgugagcugcuacggcaagacaaaauguacggcuucuaacaagugccgggggauuaucaagaccuucuccaauggaugugauuauguuagcaacaaaggcguggacacagucuccgugggcaauacccuuuacuauguuaacaagcaagaggggaaaucucuguacgugaagggagaacccaucauuaauuuuuaugacccucucgucuuccccagcgaugaguuugacgccuccaucucucaggugaacgagaaaauuaaccagagccuggcuuucauccgcaaguccgaugaacugcuccacaaugugaacgccggcaagagcacaaccaauauuaugaucacgaccauuaucaucguuauuaucgucauucugcuuucucugaucgccguggggcuccugcuguacugcaaagcuagauccacaccugugacccuuagcaaggaccagcucucuggaauuaacaauaucgcguucuccaacugaggacuagucccuguucccagagcccacuuuuuuuucuuuuuuugaaauaaaauagccugucuuucagaucuaaaaaaaaaaaaaaaaaaaaaaaaaaaaaaaaaaaaaaaaaaaaaaaaaaaaaaaaaaaaaaaaugcaucccccccccccccccccccccccccccccccaaaggcucuuuucagagccaccagaauu

SEQ ID NO: 5461 - RNA, 1909 nt, Artificial Sequence
  mRNA product Design d-1 comprising derived and/or modified sequence from HRSV(A2)__F_DSCav1_mut5 (opt6)
gggagacccgugacccggaaguuguacggcuacgcgacuuucccucccacaaacccucgcgcccuuccuuuccuacuugggcccggcagaaagcuuaccauggaacuauuaauacuuaaagccaacgcaauaacaacaauucucacugcugucaccuucugcuucgccucaggccaaaacauaacggaagaauuuuaccaaucaacaugcucugcaguauccaaaggcuaccuaucugcucuaagaacagguugguauacaucaguaauaaccauagaacuaucaaacauaaaagaaaauaaaugcaacggaacagacgcaaaaguuaaacucauaaaacaagaacuagacaaauauaaaaacgcaguuaccgaacuacaacuacuuaugcaauccacucccgccacuggaucaggaucagcaauagcaucaggagucgcaguauguaaagucuuacaccucgaaggcgaagucaauaaaaucaaauccgcauuacuauccacaaacaaagcagucguaucccuaagcggaugcggaguaucaguacuaacauuuaaaguacuagaccuaaaaaauuacaucgauaaacaacuauuaccuauauuaaacaaacaauccugcuccauuucaaauaucgaaaccguaauagaauuucaacaaaaaaacaacagauuacuagaaauaacaagagaauuuuccguaaaugcuggcguaacaacaccaguauccacauacaugcucacaaacuccgaacuacuaucacuaauaaaugacaugcccauaacaaacgaucaaaaaaaacuaaugucaaauaauguacaaauaguaagacaacaaagcuacuccaucauguguauaauaaaagaagaaguacuagcauacguaguucaacuaccacuuuacggcguaaucgacaccccuugcuggaaacuacacaccuccccucuaugcaccacaaacacaaaagaagguuccaacauaugccuuaccagaacagacagaggcugguauugcgacaacgcaggaucaguuucauuuuuuccacaagcugaaacaugcaaaguacaaucaaacagagucuucugcgacacaaugaacucaagaacucuacccucagaaguaaaccuauguaacguagacauuuucaaccccaaauacgacugcaaaauuaugacaucaaaaacagacguuucaucaucaguuaucaccucauuaggagcaauaguaagcugcuacggaaaaacaaaaugcaccgccucaaauaaaugcagaggaauaauaaaaacuuucuccaacggaugcgacuacguuucaaacaaagguguagacacuguaucaguaggaaacacacuauauuacguaaauaaacaagaaggaaaaucacuuuaugucaaaggagaaccaauaaucaauuucuacgacccauuaguauucccaucagacgaauuugaugcuucaauaucacaaguaaacgaaaaaauaaaucaaucacucgcauuuauacgaaaaucagacgaacuacuacacaauguaaacgcaggcaaaucaacaacaaacauaaugauaacaacaauaaucauuguaauaauaguaauacuucuaucucuaauagcaguaggauuacuccucuacugcaaagcaagaucaaccccuguaacacuaucaaaagaccaacuuucagguauaaauaauauagcuuuuuccaauuaaggacuagucccuguucccagagcccacuuuuuuuucuuuuuuugaaauaaaauagccugucuuucagaucuaaaaaaaaaaaaaaaaaaaaaaaaaaaaaaaaaaaaaaaaaaaaaaaaaaaaaaaaaaaaaaaaugcaucccccccccccccccccccccccccccccccaaaggcucuuuucagagccaccagaauu

SEQ ID NO: 5462 - RNA, 1909 nt, Artificial Sequence
  mRNA product Design d-1 comprising derived and/or modified sequence from HRSV(A2)__F_DSCav1_mut5 (opt11)
gggagacccgugacccggaaguuguacggcuacgcgacuuucccucccacaaacccucgcgcccuuccuuuccuacuugggcccggcagaaagcuuaccauggagcuccuaauccucaaagccaacgcgaucacuacaauccucacagccgucaccuucugcuucgccuccggccaaaacaucaccgaggaguucuaccaaucaaccugcuccgccguaucaaaaggauaccuaagcgcccuacggaccggcugguacacaucugucaucaccaucgaacuaucaaacaucaaagaaaacaaaugcaacggaaccgacgcaaaagucaaacugauuaaacaagaacuagacaaauacaaaaacgcagucaccgaacugcaauuacucaugcaaagcacaccggccaccggcucaggcagcgccaucgccuccggcgucgccgucugcaaaguucuccaccucgagggcgaagucaacaaaauaaaaucugcccuccucuccaccaacaaagccgucgucucccucagcggcugcggagucuccguccucaccuucaaaguucucgaucucaagaacuauauugacaaacaacuucuacccauacucaacaaacaaagcugcagcauauccaacaucgaaaccgucaucgaguuccaacaaaagaacaaccgccuccucgaaauaacccgcgaguucagcguuaacgccggagucacuaccccugucuccaccuacaugcucaccaacuccgaacuccuaucacuaaucaacgacaugcccauaaccaacgaccagaagaaacucauguccaacaacguccaaauuguccgacaacaaagcuacuccauaaugugcauaauaaaagaggaaguccucgccuacgucguacaacugccccuuuauggcguaaucgacacacccugcuggaaacuccacacgucaccccucugcaccaccaacacaaaagaaggcucgaacaucugccuaacacggacugaccgcggcugguacugcgacaacgccggcuccgucagcuucuucccacaagccgaaaccugcaaaguacaauccaaccgaguauucugcgacaccaugaacuccagaacccuccccucagaggucaaccugugcaacguagacaucuucaaccccaaauacgacugcaaaauaaugaccucaaaaacagacgucuccucuuccguaaucaccagccucggagccaucgucagcugcuacggcaaaaccaaaugcaccgccucaaacaaaugccgcggcaucaucaaaacauucucaaacggcugcgacuacgucuccaacaaaggcgucgacacaguaagcguaggcaacacacuguacuacgucaacaaacaagagggaaaaucacucuacgucaaaggagaacccauaaucaacuucuacgacccccucguuuuccccagcgacgaguucgacgccagcauaucccaagucaacgagaaaauuaaccaaucccuagcauucauccgaaaaucugacgaacugcuccacaacgucaacgcgggaaaaucaacaaccaacauaaugauaaccacaaucauaauagucaucaucguaauccuccucagccuaaucgcugucggccuccuccucuacugcaaagcccguuccaccccagucacacuuuccaaggaccaacuaagcggaauaaacaacaucgcguucucaaacuaaggacuagucccuguucccagagcccacuuuuuuuucuuuuuuugaaauaaaauagccugucuuucagaucuaaaaaaaaaaaaaaaaaaaaaaaaaaaaaaaaaaaaaaaaaaaaaaaaaaaaaaaaaaaaaaaaugcaucccccccccccccccccccccccccccccccaaaggcucuuuucagagccaccagaauu

SEQ ID NO: 5463 - RNA, 1964 nt, Artificial Sequence
  mRNA product Design d-2 comprising derived and/or modified sequence from HRSV(A2)__F_DSCav1_mut5 (opt1)
gggagagcggcucggccauuuugucccagucaguccggaggcugcggcugcagaaguaccgccugcggaguaacugcaaagaagcuuaccauggagcugcucauccugaaggccaacgccaucaccaccauccugacggcggugaccuucugcuucgccagcggccagaacaucaccgaggaguucuaccaguccacgugcagcgccgucuccaagggguaccucagcgcccugcggaccggcugguacaccuccgugaucaccaucgagcugagcaacaucaaggagaacaagugcaacgggaccgacgccaaggugaagcucaucaagcaggagcuggacaaguacaagaacgcggucacggagcugcagcuccugaugcaguccaccccggcaaccggcuccggcuccgccaucgcgagcggcgucgccgugugcaaggugcugcaccucgagggggaggucaacaagaucaagagcgcccugcuguccaccaacaaggccguggugagccucuccggcugcggcgucagcgugcugaccuucaaggugcuggaccucaagaacuacaucgacaagcagcugcugcccauccugaacaagcagagcugcuccaucagcaacaucgagacggugaucgaguuccagcagaagaacaaccggcuccuggagaucacccgcgaguucagcgugaacgccggggucaccacccccguguccacguacaugcugaccaacagcgagcuccugucccugaucaacgacaugccgaucaccaacgaccagaagaagcucaugagcaacaacgugcagaucguccggcagcaguccuacagcaucaugugcaucaucaaggaggaggugcuggcguacgugguccagcugccccucuacggcgugaucgacacccccugcuggaagcugcacacgagcccccugugcaccaccaacaccaaggagggguccaacaucugccucacgcgcaccgaccggggcugguacugcgacaacgccggcagcgucuccuucuucccgcaggccgagaccugcaaggugcagagcaaccgcguguucugcgacaccaugaacucccggacgcugcccagcgagguaaaccucugcaacgucgacaucuucaaccccaaguacgacugcaagaucaugaccuccaagaccgacgugagcuccagcgugaucaccucccugggggccaucgucagcugcuacggcaagacgaagugcaccgccagcaacaagugccgggggaucaucaagaccuucuccaacggcugcgacuacgugagcaacaagggcguggacaccguguccgucgggaacacccuguacuacgugaacaagcaggagggcaagagccucuacgugaagggggagcccaucaucaacuucuacgacccgcuggucuuccccuccgacgaguucgacgcgagcaucucccaggugaacgagaagaucaaccagagccuggccuucauccgcaaguccgacgagcugcuccacaacgugaacgccggcaagagcacgaccaacaucaugaucaccaccaucaucaucgucaucaucgugauccugcugucccucaucgccguggggcugcugcucuacugcaaggcccggagcacgcccgucacccuguccaaggaccagcugagcggcaucaacaacaucgcguucuccaacugaggacuaguaauaaggaaacuguaugaaugucugugggcaggaagugaagagauccuucuguaaagguuuuuggaauuaugucugcugaauaauaaacuuuuuugaaauaauaaaucugguagaaaaaugagaucuaaaaaaaaaaaaaaaaaaaaaaaaaaaaaaaaaaaaaaaaaaaaaaaaaaaaaaaaaaaaaaaaugcaucccccccccccccccccccccccccccccccaaaggcucuuuucagagccaccagaauu

SEQ ID NO: 5464 - RNA, 1964 nt, Artificial Sequence
  mRNA product Design d-2 comprising derived and/or modified sequence from HRSV(A2)__F_DSCav1_mut5 (opt1)
gggagagcggcucggccauuuugucccagucaguccggaggcugcggcugcagaaguaccgccugcggaguaacugcaaagaagcuuaccauggagcugcucauccugaaggccaacgccaucaccaccauccugacggcggugaccuucugcuucgccagcggccagaacaucaccgaggaguucuaccaguccacgugcagcgccgucuccaagggguaccucagcgcccugcgcaccggcugguacaccuccgugaucaccaucgagcugagcaacaucaaggagaacaagugcaacgggaccgacgccaaggugaagcucaucaagcaggagcuggacaaguacaagaacgcggucacggagcugcagcuccugaugcaguccacccccgccaccggcagcggguccgccaucgccagcggcguggcggugugcaagguccugcaccucgagggcgaggugaacaagaucaaguccgcccugcugagcaccaacaaggccguggucucccucagcgggugcggcguguccgugcugacguucaagguccuggaccucaagaacuacaucgacaagcagcugcugccgauccucaacaagcagagcugcuccaucagcaacaucgagaccgugaucgaguuccagcagaagaacaaccggcugcuggagaucacccgcgaguucuccgugaacgccggggucaccacgcccgugagcaccuacaugcucaccaacagcgagcugcugucccucaucaacgacaugcccaucaccaacgaccagaagaagcugaugagcaacaacgugcagaucguccggcagcaguccuacagcaucaugugcaucaucaaggaggaggugcuggccuacgugguccagcucccccuguacggcgugaucgacacgccgugcuggaagcugcacaccagcccccucugcaccaccaacacgaaggagggguccaacaucugccugacccgcaccgaccggggcugguacugcgacaacgcgggcuccgugagcuucuucccccaggccgagaccugcaagguccaguccaaccgcguguucugcgacacgaugaacagccggacccuccccuccgaggucaaccugugcaacguggacaucuucaacccgaaguacgacugcaagaucaugaccagcaagaccgacguguccagcuccgucaucacgagccugggggccaucguguccugcuacggcaagaccaagugcaccgccagcaacaagugccgggggaucaucaagaccuucuccaacggcugcgacuacgugagcaacaagggcgucgacacggugagcguggggaacacccucuacuacgucaacaagcaggagggcaagucccuguacgugaagggggagcccaucaucaacuucuacgacccccugguguuccccagcgacgaguucgacgccuccaucagccaggucaacgagaagaucaaccagucccucgcguucauccgcaagagcgacgagcugcugcacaacgugaacgccggcaaguccaccaccaacaucaugaucaccacgaucaucaucgugaucaucgucauccuccugagccugaucgccguggggcuccugcuguacugcaaggcccgguccaccccggugacccugagcaaggaccagcucuccggcaucaacaacaucgccuucagcaacugaggacuaguaauaaggaaacuguaugaaugucugugggcaggaagugaagagauccuucuguaaagguuuuuggaauuaugucugcugaauaauaaacuuuuuugaaauaauaaaucugguagaaaaaugagaucuaaaaaaaaaaaaaaaaaaaaaaaaaaaaaaaaaaaaaaaaaaaaaaaaaaaaaaaaaaaaaaaaugcaucccccccccccccccccccccccccccccccaaaggcucuuuucagagccaccagaauu

SEQ ID NO: 5465 - RNA, 1964 nt, Artificial Sequence
  mRNA product Design d-2 comprising derived and/or modified sequence from HRSV(A2)__F_DSCav1_mut5 (opt2)
gggagagcggcucggccauuuugucccagucaguccggaggcugcggcugcagaaguaccgccugcggaguaacugcaaagaagcuuaccauggagcuccucauccucaaggccaacgccaucaccaccauccucaccgccgucaccuucugcuucgccuccggccagaacaucaccgaggaguucuaccaguccaccugcuccgccgucuccaagggcuaccucuccgcccuccgcaccggcugguacaccuccgucaucaccaucgagcucuccaacaucaaggagaacaagugcaacggcaccgacgccaaggucaagcucaucaagcaggagcucgacaaguacaagaacgccgucaccgagcuccagcuccucaugcaguccacccccgccaccggcuccggcuccgccaucgccuccggcgucgccgucugcaagguccuccaccucgagggcgaggucaacaagaucaaguccgcccuccucuccaccaacaaggccgucgucucccucuccggcugcggcgucuccguccucaccuucaagguccucgaccucaagaacuacaucgacaagcagcuccuccccauccucaacaagcaguccugcuccaucuccaacaucgagaccgucaucgaguuccagcagaagaacaaccgccuccucgagaucacccgcgaguucuccgucaacgccggcgucaccacccccgucuccaccuacaugcucaccaacuccgagcuccucucccucaucaacgacaugcccaucaccaacgaccagaagaagcucauguccaacaacguccagaucguccgccagcaguccuacuccaucaugugcaucaucaaggaggagguccucgccuacgucguccagcucccccucuacggcgucaucgacacccccugcuggaagcuccacaccuccccccucugcaccaccaacaccaaggagggcuccaacaucugccucacccgcaccgaccgcggcugguacugcgacaacgccggcuccgucuccuucuucccccaggccgagaccugcaagguccaguccaaccgcgucuucugcgacaccaugaacucccgcacccuccccuccgaggucaaccucugcaacgucgacaucuucaaccccaaguacgacugcaagaucaugaccuccaagaccgacgucuccuccuccgucaucaccucccucggcgccaucgucuccugcuacggcaagaccaagugcaccgccuccaacaagugccgcggcaucaucaagaccuucuccaacggcugcgacuacgucuccaacaagggcgucgacaccgucuccgucggcaacacccucuacuacgucaacaagcaggagggcaagucccucuacgucaagggcgagcccaucaucaacuucuacgacccccucgucuuccccuccgacgaguucgacgccuccaucucccaggucaacgagaagaucaaccagucccucgccuucauccgcaaguccgacgagcuccuccacaacgucaacgccggcaaguccaccaccaacaucaugaucaccaccaucaucaucgucaucaucgucauccuccucucccucaucgccgucggccuccuccucuacugcaaggcccgcuccacccccgucacccucuccaaggaccagcucuccggcaucaacaacaucgccuucuccaacugaggacuaguaauaaggaaacuguaugaaugucugugggcaggaagugaagagauccuucuguaaagguuuuuggaauuaugucugcugaauaauaaacuuuuuugaaauaauaaaucugguagaaaaaugagaucuaaaaaaaaaaaaaaaaaaaaaaaaaaaaaaaaaaaaaaaaaaaaaaaaaaaaaaaaaaaaaaaaugcaucccccccccccccccccccccccccccccccaaaggcucuuuucagagccaccagaauu

SEQ ID NO: 5466 - RNA, 1964 nt, Artificial Sequence
  mRNA product Design d-2 comprising derived and/or modified sequence from HRSV(A2)__F_DSCav1_mut5 (opt3)
gggagagcggcucggccauuuugucccagucaguccggaggcugcggcugcagaaguaccgccugcggaguaacugcaaagaagcuuaccauggagcugcucauccuuaaggccaacgcuauuaccacaauacugacugcagugacguucugcuuugccagcggccagaauaucaccgaagaguucuaccaauccacauguucugcggucucaaaaggguauuugagugcuuuaagaacuggaugguacaccagcguuauuacaaucgaacuguccaacauuaaggagaauaaaugcaacgguaccgacgccaaggugaaacuaaucaagcaggaacucgauaaguauaaaaaugcaguaacugagcugcagcuucugaugcagucuacacccgccaccggcucggggucagcuauagcaagcggaguggccgucuguaagguguugcaccucgagggcgaaguuaacaaaaucaagagugcucugcuguccacgaauaaagccguggucucucucagcgguugcgggguguccguauuaacuuuuaagguucuggaccuuaagaacuacauugauaaacaauugcugccuauccuaaauaagcagucauguaguauuagcaacaucgagaccgugauagaguuccagcagaaaaauaacaggcuccuggaaauuacacgggaguuuucugucaaugcgggagugacuaccccaguguccacauauaugcuuaccaacucagaacuguugagccucaucaaugacaugccgauuacgaacgaucaaaagaaacugaugaguaacaauguccagaucguucgccagcagucuuacuccaucaugugcauuauaaaggaggaaguguuagcauauguagugcaacugccccucuacggcgucaucgacacuccuuguuggaaacuucauacaagcccacugugcaccacuaacacaaaggagggcucgaauauuuguuugacccgaacggaucgugggugguacugcgacaacgccggaucuguguccuucuuuccccaggcugaaaccuguaagguucagucaaauagaguguucugcgauacaaugaacaguagaacucugccuagcgaggucaaucucugcaacguggacaucuuuaauccaaaauaugauuguaagauaaugaccuccaaaacagacguaucuagcucaguuauuaccagucugggugccaucguguccugcuacggcaagacuaaauguacagcaagcaacaagugcagggggaucauuaagaccuucucuaauggaugugauuaugucucaaacaaaggcguggacacugucaguguggguaauacgcuuuacuauguuaacaagcaagaggggaaaagccuguacgugaagggagaacccaucauuaauuuuuaugacccuuugguauucccauccgaugaguuugacgcuucuauaucgcaggucaacgagaaaaucaaccagagccucgccuucauucggaaguccgaugaacuguuacacaaugugaacgcgggcaagucaacaaccaauaucaugaucacuaccauuauaaucguuauuaucgugauucugcuaagucucaucgccgucggccugcuuuuguacugcaaagcacgcucuacaccggugacccugagcaaggaccagcucuccgggauaaacaauaucgcuuucucaaacugaggacuaguaauaaggaaacuguaugaaugucugugggcaggaagugaagagauccuucuguaaagguuuuuggaauuaugucugcugaauaauaaacuuuuuugaaauaauaaaucugguagaaaaaugagaucuaaaaaaaaaaaaaaaaaaaaaaaaaaaaaaaaaaaaaaaaaaaaaaaaaaaaaaaaaaaaaaaaugcaucccccccccccccccccccccccccccccccaaaggcucuuuucagagccaccagaauu

SEQ ID NO: 5467 - RNA, 1964 nt, Artificial Sequence
  mRNA product Design d-2 comprising derived and/or modified sequence from HRSV(A2)__F_DSCav1_mut5 (opt4)
gggagagcggcucggccauuuugucccagucaguccggaggcugcggcugcagaaguaccgccugcggaguaacugcaaagaagcuuaccauggagcugcugauccugaaggccaacgccaucaccaccauccugaccgccgugaccuucugcuucgccagcggccagaacaucaccgaggaguucuaccagagcaccugcagcgccgugagcaagggcuaccugagcgcccugagaaccggcugguacaccagcgugaucaccaucgagcugagcaacaucaaggagaacaagugcaacggcaccgacgccaaggugaagcugaucaagcaggagcuggacaaguacaagaacgccgugaccgagcugcagcugcugaugcagagcacccccgccaccggcagcggcagcgccaucgccagcggcguggccgugugcaaggugcugcaccuggagggcgaggugaacaagaucaagagcgcccugcugagcaccaacaaggccguggugagccugagcggcugcggcgugagcgugcugaccuucaaggugcuggaccugaagaacuacaucgacaagcagcugcugcccauccugaacaagcagagcugcagcaucagcaacaucgagaccgugaucgaguuccagcagaagaacaacagacugcuggagaucaccagagaguucagcgugaacgccggcgugaccacccccgugagcaccuacaugcugaccaacagcgagcugcugagccugaucaacgacaugcccaucaccaacgaccagaagaagcugaugagcaacaacgugcagaucgugagacagcagagcuacagcaucaugugcaucaucaaggaggaggugcuggccuacguggugcagcugccccuguacggcgugaucgacacccccugcuggaagcugcacaccagcccccugugcaccaccaacaccaaggagggcagcaacaucugccugaccagaaccgacagaggcugguacugcgacaacgccggcagcgugagcuucuucccccaggccgagaccugcaaggugcagagcaacagaguguucugcgacaccaugaacagcagaacccugcccagcgaggugaaccugugcaacguggacaucuucaaccccaaguacgacugcaagaucaugaccagcaagaccgacgugagcagcagcgugaucaccagccugggcgccaucgugagcugcuacggcaagaccaagugcaccgccagcaacaagugcagaggcaucaucaagaccuucagcaacggcugcgacuacgugagcaacaagggcguggacaccgugagcgugggcaacacccuguacuacgugaacaagcaggagggcaagagccuguacgugaagggcgagcccaucaucaacuucuacgacccccugguguuccccagcgacgaguucgacgccagcaucagccaggugaacgagaagaucaaccagagccuggccuucaucagaaagagcgacgagcugcugcacaacgugaacgccggcaagagcaccaccaacaucaugaucaccaccaucaucaucgugaucaucgugauccugcugagccugaucgccgugggccugcugcuguacugcaaggccagaagcacccccgugacccugagcaaggaccagcugagcggcaucaacaacaucgccuucagcaacugaggacuaguaauaaggaaacuguaugaaugucugugggcaggaagugaagagauccuucuguaaagguuuuuggaauuaugucugcugaauaauaaacuuuuuugaaauaauaaaucugguagaaaaaugagaucuaaaaaaaaaaaaaaaaaaaaaaaaaaaaaaaaaaaaaaaaaaaaaaaaaaaaaaaaaaaaaaaaugcaucccccccccccccccccccccccccccccccaaaggcucuuuucagagccaccagaauu

SEQ ID NO: 5468 - RNA, 1964 nt, Artificial Sequence
  mRNA product Design d-2 comprising derived and/or modified sequence from HRSV(A2)__F_DSCav1_mut5 (opt5)
gggagagcggcucggccauuuugucccagucaguccggaggcugcggcugcagaaguaccgccugcggaguaacugcaaagaagcuuaccauggagcugcucauccugaaggccaacgcuauuaccacaauccuuacggccgugaccuucugcuuugcgagcggccagaauauuacagaagaguucuaccaauccaccuguucugcugucagcaaaggguaucuguccgcccucagaacaggaugguacaccucuguuaucacaauugaacugagcaacaucaaggagaauaaaugcaacggcaccgacgccaaggugaaacuuaucaagcaggaacuggauaaguauaaaaaugcugugacggagcuccagcugcugaugcaguccacccccgccacagggucuggaagcgcuauugccuccggcgucgcgguguguaagguucuccaccuggagggggaagugaacaaaaucaagagcgcccuucugucuaccaauaaagcugucgugucccucagcggaugcggcguuucugugcugacauuuaagguccuugaccugaagaacuacauugauaaacaacuccugccuauccugaauaagcaguccuguagcauuucuaacaucgagaccgugauugaguuccagcagaaaaauaaccggcuccuggaaaucacgcgcgaguuuuccgugaaugccggcgucacaaccccgguuagcacauauaugcuuaccaacuccgaacugcucucucugaucaaugacaugcccauuaccaacgaucaaaagaaacuuaugagcaacaaugugcagaucgugagacagcaguccuacagcauuaugugcaucauuaaggaggaaguccuggcuuaugugguucaacucccucuguacggggugaucgacacacccuguuggaaacugcauacgucuccucucugcaccacaaacaccaaggagggauccaauaucugucugacacggaccgaucgcggcugguacugcgacaacgccgggagcgucucuuucuuuccccaggcggaaacguguaaggugcagagcaauagaguuuucugcgauacaaugaacuccagaacccugccuucugaggugaaucucugcaacgucgacauuuuuaauccgaaauaugauuguaagaucaugaccagcaaaacagacguguccagcucugucauuaccucccugggagccaucgugagcugcuacggcaagacaaaauguacggcuucuaacaagugccgggggauuaucaagaccuucuccaauggaugugauuauguuagcaacaaaggcguggacacagucuccgugggcaauacccuuuacuauguuaacaagcaagaggggaaaucucuguacgugaagggagaacccaucauuaauuuuuaugacccucucgucuuccccagcgaugaguuugacgccuccaucucucaggugaacgagaaaauuaaccagagccuggcuuucauccgcaaguccgaugaacugcuccacaaugugaacgccggcaagagcacaaccaauauuaugaucacgaccauuaucaucguuauuaucgucauucugcuuucucugaucgccguggggcuccugcuguacugcaaagcuagauccacaccugugacccuuagcaaggaccagcucucuggaauuaacaauaucgcguucuccaacugaggacuaguaauaaggaaacuguaugaaugucugugggcaggaagugaagagauccuucuguaaagguuuuuggaauuaugucugcugaauaauaaacuuuuuugaaauaauaaaucugguagaaaaaugagaucuaaaaaaaaaaaaaaaaaaaaaaaaaaaaaaaaaaaaaaaaaaaaaaaaaaaaaaaaaaaaaaaaugcaucccccccccccccccccccccccccccccccaaaggcucuuuucagagccaccagaauu

SEQ ID NO: 5469 - RNA, 1964 nt, Artificial Sequence
  mRNA product Design d-2 comprising derived and/or modified sequence from HRSV(A2)__F_DSCav1_mut5 (opt6)
gggagagcggcucggccauuuugucccagucaguccggaggcugcggcugcagaaguaccgccugcggaguaacugcaaagaagcuuaccauggaacuauuaauacuuaaagccaacgcaauaacaacaauucucacugcugucaccuucugcuucgccucaggccaaaacauaacggaagaauuuuaccaaucaacaugcucugcaguauccaaaggcuaccuaucugcucuaagaacagguugguauacaucaguaauaaccauagaacuaucaaacauaaaagaaaauaaaugcaacggaacagacgcaaaaguuaaacucauaaaacaagaacuagacaaauauaaaaacgcaguuaccgaacuacaacuacuuaugcaauccacucccgccacuggaucaggaucagcaauagcaucaggagucgcaguauguaaagucuuacaccucgaaggcgaagucaauaaaaucaaauccgcauuacuauccacaaacaaagcagucguaucccuaagcggaugcggaguaucaguacuaacauuuaaaguacuagaccuaaaaaauuacaucgauaaacaacuauuaccuauauuaaacaaacaauccugcuccauuucaaauaucgaaaccguaauagaauuucaacaaaaaaacaacagauuacuagaaauaacaagagaauuuuccguaaaugcuggcguaacaacaccaguauccacauacaugcucacaaacuccgaacuacuaucacuaauaaaugacaugcccauaacaaacgaucaaaaaaaacuaaugucaaauaauguacaaauaguaagacaacaaagcuacuccaucauguguauaauaaaagaagaaguacuagcauacguaguucaacuaccacuuuacggcguaaucgacaccccuugcuggaaacuacacaccuccccucuaugcaccacaaacacaaaagaagguuccaacauaugccuuaccagaacagacagaggcugguauugcgacaacgcaggaucaguuucauuuuuuccacaagcugaaacaugcaaaguacaaucaaacagagucuucugcgacacaaugaacucaagaacucuacccucagaaguaaaccuauguaacguagacauuuucaaccccaaauacgacugcaaaauuaugacaucaaaaacagacguuucaucaucaguuaucaccucauuaggagcaauaguaagcugcuacggaaaaacaaaaugcaccgccucaaauaaaugcagaggaauaauaaaaacuuucuccaacggaugcgacuacguuucaaacaaagguguagacacuguaucaguaggaaacacacuauauuacguaaauaaacaagaaggaaaaucacuuuaugucaaaggagaaccaauaaucaauuucuacgacccauuaguauucccaucagacgaauuugaugcuucaauaucacaaguaaacgaaaaaauaaaucaaucacucgcauuuauacgaaaaucagacgaacuacuacacaauguaaacgcaggcaaaucaacaacaaacauaaugauaacaacaauaaucauuguaauaauaguaauacuucuaucucuaauagcaguaggauuacuccucuacugcaaagcaagaucaaccccuguaacacuaucaaaagaccaacuuucagguauaaauaauauagcuuuuuccaauuaaggacuaguaauaaggaaacuguaugaaugucugugggcaggaagugaagagauccuucuguaaagguuuuuggaauuaugucugcugaauaauaaacuuuuuugaaauaauaaaucugguagaaaaaugagaucuaaaaaaaaaaaaaaaaaaaaaaaaaaaaaaaaaaaaaaaaaaaaaaaaaaaaaaaaaaaaaaaaugcaucccccccccccccccccccccccccccccccaaaggcucuuuucagagccaccagaauu

SEQ ID NO: 5470 - RNA, 1964 nt, Artificial Sequence
  mRNA product Design d-2 comprising derived and/or modified sequence from HRSV(A2)__F_DSCav1_mut5 (opt11)
gggagagcggcucggccauuuugucccagucaguccggaggcugcggcugcagaaguaccgccugcggaguaacugcaaagaagcuuaccauggagcuccuaauccucaaagccaacgcgaucacuacaauccucacagccgucaccuucugcuucgccuccggccaaaacaucaccgaggaguucuaccaaucaaccugcuccgccguaucaaaaggauaccuaagcgcccuacggaccggcugguacacaucugucaucaccaucgaacuaucaaacaucaaagaaaacaaaugcaacggaaccgacgcaaaagucaaacugauuaaacaagaacuagacaaauacaaaaacgcagucaccgaacugcaauuacucaugcaaagcacaccggccaccggcucaggcagcgccaucgccuccggcgucgccgucugcaaaguucuccaccucgagggcgaagucaacaaaauaaaaucugcccuccucuccaccaacaaagccgucgucucccucagcggcugcggagucuccguccucaccuucaaaguucucgaucucaagaacuauauugacaaacaacuucuacccauacucaacaaacaaagcugcagcauauccaacaucgaaaccgucaucgaguuccaacaaaagaacaaccgccuccucgaaauaacccgcgaguucagcguuaacgccggagucacuaccccugucuccaccuacaugcucaccaacuccgaacuccuaucacuaaucaacgacaugcccauaaccaacgaccagaagaaacucauguccaacaacguccaaauuguccgacaacaaagcuacuccauaaugugcauaauaaaagaggaaguccucgccuacgucguacaacugccccuuuauggcguaaucgacacacccugcuggaaacuccacacgucaccccucugcaccaccaacacaaaagaaggcucgaacaucugccuaacacggacugaccgcggcugguacugcgacaacgccggcuccgucagcuucuucccacaagccgaaaccugcaaaguacaauccaaccgaguauucugcgacaccaugaacuccagaacccuccccucagaggucaaccugugcaacguagacaucuucaaccccaaauacgacugcaaaauaaugaccucaaaaacagacgucuccucuuccguaaucaccagccucggagccaucgucagcugcuacggcaaaaccaaaugcaccgccucaaacaaaugccgcggcaucaucaaaacauucucaaacggcugcgacuacgucuccaacaaaggcgucgacacaguaagcguaggcaacacacuguacuacgucaacaaacaagagggaaaaucacucuacgucaaaggagaacccauaaucaacuucuacgacccccucguuuuccccagcgacgaguucgacgccagcauaucccaagucaacgagaaaauuaaccaaucccuagcauucauccgaaaaucugacgaacugcuccacaacgucaacgcgggaaaaucaacaaccaacauaaugauaaccacaaucauaauagucaucaucguaauccuccucagccuaaucgcugucggccuccuccucuacugcaaagcccguuccaccccagucacacuuuccaaggaccaacuaagcggaauaaacaacaucgcguucucaaacuaaggacuaguaauaaggaaacuguaugaaugucugugggcaggaagugaagagauccuucuguaaagguuuuuggaauuaugucugcugaauaauaaacuuuuuugaaauaauaaaucugguagaaaaaugagaucuaaaaaaaaaaaaaaaaaaaaaaaaaaaaaaaaaaaaaaaaaaaaaaaaaaaaaaaaaaaaaaaaugcaucccccccccccccccccccccccccccccccaaaggcucuuuucagagccaccagaauu

SEQ ID NO: 5471 - RNA, 2280 nt, Artificial Sequence
  mRNA product Design d-3 comprising derived and/or modified sequence from HRSV(A2)__F_DSCav1_mut5 (opt1)
gggagagggcgcuuggcuugcaaggacccugagcugcggcauugaagcacacccaacccaacucgacugaagucagccucacugaaccggaucugagaaucuucucucucugggcuugccagggcucuccgaaccuagcuagcauccucuucaauuccaacuagaaagcuuaccauggagcugcucauccugaaggccaacgccaucaccaccauccugacggcggugaccuucugcuucgccagcggccagaacaucaccgaggaguucuaccaguccacgugcagcgccgucuccaagggguaccucagcgcccugcggaccggcugguacaccuccgugaucaccaucgagcugagcaacaucaaggagaacaagugcaacgggaccgacgccaaggugaagcucaucaagcaggagcuggacaaguacaagaacgcggucacggagcugcagcuccugaugcaguccaccccggcaaccggcuccggcuccgccaucgcgagcggcgucgccgugugcaaggugcugcaccucgagggggaggucaacaagaucaagagcgcccugcuguccaccaacaaggccguggugagccucuccggcugcggcgucagcgugcugaccuucaaggugcuggaccucaagaacuacaucgacaagcagcugcugcccauccugaacaagcagagcugcuccaucagcaacaucgagacggugaucgaguuccagcagaagaacaaccggcuccuggagaucacccgcgaguucagcgugaacgccggggucaccacccccguguccacguacaugcugaccaacagcgagcuccugucccugaucaacgacaugccgaucaccaacgaccagaagaagcucaugagcaacaacgugcagaucguccggcagcaguccuacagcaucaugugcaucaucaaggaggaggugcuggcguacgugguccagcugccccucuacggcgugaucgacacccccugcuggaagcugcacacgagcccccugugcaccaccaacaccaaggagggguccaacaucugccucacgcgcaccgaccggggcugguacugcgacaacgccggcagcgucuccuucuucccgcaggccgagaccugcaaggugcagagcaaccgcguguucugcgacaccaugaacucccggacgcugcccagcgagguaaaccucugcaacgucgacaucuucaaccccaaguacgacugcaagaucaugaccuccaagaccgacgugagcuccagcgugaucaccucccugggggccaucgucagcugcuacggcaagacgaagugcaccgccagcaacaagugccgggggaucaucaagaccuucuccaacggcugcgacuacgugagcaacaagggcguggacaccguguccgucgggaacacccuguacuacgugaacaagcaggagggcaagagccucuacgugaagggggagcccaucaucaacuucuacgacccgcuggucuuccccuccgacgaguucgacgcgagcaucucccaggugaacgagaagaucaaccagagccuggccuucauccgcaaguccgacgagcugcuccacaacgugaacgccggcaagagcacgaccaacaucaugaucaccaccaucaucaucgucaucaucgugauccugcugucccucaucgccguggggcugcugcucuacugcaaggcccggagcacgcccgucacccuguccaaggaccagcugagcggcaucaacaacaucgcguucuccaacugaggacuagugaagggaacacccaaauuuaauucagccuuaagcacaauuaauuaagagugaaacguaauuguacaagcaguuggucacccaccauagggcaugaucaacaccgcaaccuuuccuuuuucccccagugauucugaaaaaccccucuucccuucagcuugcuuagauguuccaaauuuaguaagcuuaaggcggccuacagaagaaaaagaaaaaaaaggccacaaaaguucccucucacuuucaguaaauaaaauaaaagcagcaacagaaauaaagaaauaaaugaaauucaaaaugaaauaaauauuguguugugcagcauuaaaaaaucaauaaaaauuaaaaaugagcaagaucuaaaaaaaaaaaaaaaaaaaaaaaaaaaaaaaaaaaaaaaaaaaaaaaaaaaaaaaaaaaaaaaaugcaucccccccccccccccccccccccccccccccaaaggcucuuuucagagccaccagaauu

SEQ ID NO: 5472 - RNA, 2280 nt, Artificial Sequence
  mRNA product Design d-3 comprising derived and/or modified sequence from HRSV(A2)__F_DSCav1_mut5 (opt1)
gggagagggcgcuuggcuugcaaggacccugagcugcggcauugaagcacacccaacccaacucgacugaagucagccucacugaaccggaucugagaaucuucucucucugggcuugccagggcucuccgaaccuagcuagcauccucuucaauuccaacuagaaagcuuaccauggagcugcucauccugaaggccaacgccaucaccaccauccugacggcggugaccuucugcuucgccagcggccagaacaucaccgaggaguucuaccaguccacgugcagcgccgucuccaagggguaccucagcgcccugcgcaccggcugguacaccuccgugaucaccaucgagcugagcaacaucaaggagaacaagugcaacgggaccgacgccaaggugaagcucaucaagcaggagcuggacaaguacaagaacgcggucacggagcugcagcuccugaugcaguccacccccgccaccggcagcggguccgccaucgccagcggcguggcggugugcaagguccugcaccucgagggcgaggugaacaagaucaaguccgcccugcugagcaccaacaaggccguggucucccucagcgggugcggcguguccgugcugacguucaagguccuggaccucaagaacuacaucgacaagcagcugcugccgauccucaacaagcagagcugcuccaucagcaacaucgagaccgugaucgaguuccagcagaagaacaaccggcugcuggagaucacccgcgaguucuccgugaacgccggggucaccacgcccgugagcaccuacaugcucaccaacagcgagcugcugucccucaucaacgacaugcccaucaccaacgaccagaagaagcugaugagcaacaacgugcagaucguccggcagcaguccuacagcaucaugugcaucaucaaggaggaggugcuggccuacgugguccagcucccccuguacggcgugaucgacacgccgugcuggaagcugcacaccagcccccucugcaccaccaacacgaaggagggguccaacaucugccugacccgcaccgaccggggcugguacugcgacaacgcgggcuccgugagcuucuucccccaggccgagaccugcaagguccaguccaaccgcguguucugcgacacgaugaacagccggacccuccccuccgaggucaaccugugcaacguggacaucuucaacccgaaguacgacugcaagaucaugaccagcaagaccgacguguccagcuccgucaucacgagccugggggccaucguguccugcuacggcaagaccaagugcaccgccagcaacaagugccgggggaucaucaagaccuucuccaacggcugcgacuacgugagcaacaagggcgucgacacggugagcguggggaacacccucuacuacgucaacaagcaggagggcaagucccuguacgugaagggggagcccaucaucaacuucuacgacccccugguguuccccagcgacgaguucgacgccuccaucagccaggucaacgagaagaucaaccagucccucgcguucauccgcaagagcgacgagcugcugcacaacgugaacgccggcaaguccaccaccaacaucaugaucaccacgaucaucaucgugaucaucgucauccuccugagccugaucgccguggggcuccugcuguacugcaaggcccgguccaccccggugacccugagcaaggaccagcucuccggcaucaacaacaucgccuucagcaacugaggacuagugaagggaacacccaaauuuaauucagccuuaagcacaauuaauuaagagugaaacguaauuguacaagcaguuggucacccaccauagggcaugaucaacaccgcaaccuuuccuuuuucccccagugauucugaaaaaccccucuucccuucagcuugcuuagauguuccaaauuuaguaagcuuaaggcggccuacagaagaaaaagaaaaaaaaggccacaaaaguucccucucacuuucaguaaauaaaauaaaagcagcaacagaaauaaagaaauaaaugaaauucaaaaugaaauaaauauuguguugugcagcauuaaaaaaucaauaaaaauuaaaaaugagcaagaucuaaaaaaaaaaaaaaaaaaaaaaaaaaaaaaaaaaaaaaaaaaaaaaaaaaaaaaaaaaaaaaaaugcaucccccccccccccccccccccccccccccccaaaggcucuuuucagagccaccagaauu

SEQ ID NO: 5473 - RNA, 2280 nt, Artificial Sequence
  mRNA product Design d-3 comprising derived and/or modified sequence from HRSV(A2)__F_DSCav1_mut5 (opt2)
gggagagggcgcuuggcuugcaaggacccugagcugcggcauugaagcacacccaacccaacucgacugaagucagccucacugaaccggaucugagaaucuucucucucugggcuugccagggcucuccgaaccuagcuagcauccucuucaauuccaacuagaaagcuuaccauggagcuccucauccucaaggccaacgccaucaccaccauccucaccgccgucaccuucugcuucgccuccggccagaacaucaccgaggaguucuaccaguccaccugcuccgccgucuccaagggcuaccucuccgcccuccgcaccggcugguacaccuccgucaucaccaucgagcucuccaacaucaaggagaacaagugcaacggcaccgacgccaaggucaagcucaucaagcaggagcucgacaaguacaagaacgccgucaccgagcuccagcuccucaugcaguccacccccgccaccggcuccggcuccgccaucgccuccggcgucgccgucugcaagguccuccaccucgagggcgaggucaacaagaucaaguccgcccuccucuccaccaacaaggccgucgucucccucuccggcugcggcgucuccguccucaccuucaagguccucgaccucaagaacuacaucgacaagcagcuccuccccauccucaacaagcaguccugcuccaucuccaacaucgagaccgucaucgaguuccagcagaagaacaaccgccuccucgagaucacccgcgaguucuccgucaacgccggcgucaccacccccgucuccaccuacaugcucaccaacuccgagcuccucucccucaucaacgacaugcccaucaccaacgaccagaagaagcucauguccaacaacguccagaucguccgccagcaguccuacuccaucaugugcaucaucaaggaggagguccucgccuacgucguccagcucccccucuacggcgucaucgacacccccugcuggaagcuccacaccuccccccucugcaccaccaacaccaaggagggcuccaacaucugccucacccgcaccgaccgcggcugguacugcgacaacgccggcuccgucuccuucuucccccaggccgagaccugcaagguccaguccaaccgcgucuucugcgacaccaugaacucccgcacccuccccuccgaggucaaccucugcaacgucgacaucuucaaccccaaguacgacugcaagaucaugaccuccaagaccgacgucuccuccuccgucaucaccucccucggcgccaucgucuccugcuacggcaagaccaagugcaccgccuccaacaagugccgcggcaucaucaagaccuucuccaacggcugcgacuacgucuccaacaagggcgucgacaccgucuccgucggcaacacccucuacuacgucaacaagcaggagggcaagucccucuacgucaagggcgagcccaucaucaacuucuacgacccccucgucuuccccuccgacgaguucgacgccuccaucucccaggucaacgagaagaucaaccagucccucgccuucauccgcaaguccgacgagcuccuccacaacgucaacgccggcaaguccaccaccaacaucaugaucaccaccaucaucaucgucaucaucgucauccuccucucccucaucgccgucggccuccuccucuacugcaaggcccgcuccacccccgucacccucuccaaggaccagcucuccggcaucaacaacaucgccuucuccaacugaggacuagugaagggaacacccaaauuuaauucagccuuaagcacaauuaauuaagagugaaacguaauuguacaagcaguuggucacccaccauagggcaugaucaacaccgcaaccuuuccuuuuucccccagugauucugaaaaaccccucuucccuucagcuugcuuagauguuccaaauuuaguaagcuuaaggcggccuacagaagaaaaagaaaaaaaaggccacaaaaguucccucucacuuucaguaaauaaaauaaaagcagcaacagaaauaaagaaauaaaugaaauucaaaaugaaauaaauauuguguugugcagcauuaaaaaaucaauaaaaauuaaaaaugagcaagaucuaaaaaaaaaaaaaaaaaaaaaaaaaaaaaaaaaaaaaaaaaaaaaaaaaaaaaaaaaaaaaaaaugcaucccccccccccccccccccccccccccccccaaaggcucuuuucagagccaccagaauu

SEQ ID NO: 5474 - RNA, 2280 nt, Artificial Sequence
  mRNA product Design d-3 comprising derived and/or modified sequence from HRSV(A2)__F_DSCav1_mut5 (opt3)
gggagagggcgcuuggcuugcaaggacccugagcugcggcauugaagcacacccaacccaacucgacugaagucagccucacugaaccggaucugagaaucuucucucucugggcuugccagggcucuccgaaccuagcuagcauccucuucaauuccaacuagaaagcuuaccauggagcugcucauccuuaaggccaacgcuauuaccacaauacugacugcagugacguucugcuuugccagcggccagaauaucaccgaagaguucuaccaauccacauguucugcggucucaaaaggguauuugagugcuuuaagaacuggaugguacaccagcguuauuacaaucgaacuguccaacauuaaggagaauaaaugcaacgguaccgacgccaaggugaaacuaaucaagcaggaacucgauaaguauaaaaaugcaguaacugagcugcagcuucugaugcagucuacacccgccaccggcucggggucagcuauagcaagcggaguggccgucuguaagguguugcaccucgagggcgaaguuaacaaaaucaagagugcucugcuguccacgaauaaagccguggucucucucagcgguugcgggguguccguauuaacuuuuaagguucuggaccuuaagaacuacauugauaaacaauugcugccuauccuaaauaagcagucauguaguauuagcaacaucgagaccgugauagaguuccagcagaaaaauaacaggcuccuggaaauuacacgggaguuuucugucaaugcgggagugacuaccccaguguccacauauaugcuuaccaacucagaacuguugagccucaucaaugacaugccgauuacgaacgaucaaaagaaacugaugaguaacaauguccagaucguucgccagcagucuuacuccaucaugugcauuauaaaggaggaaguguuagcauauguagugcaacugccccucuacggcgucaucgacacuccuuguuggaaacuucauacaagcccacugugcaccacuaacacaaaggagggcucgaauauuuguuugacccgaacggaucgugggugguacugcgacaacgccggaucuguguccuucuuuccccaggcugaaaccuguaagguucagucaaauagaguguucugcgauacaaugaacaguagaacucugccuagcgaggucaaucucugcaacguggacaucuuuaauccaaaauaugauuguaagauaaugaccuccaaaacagacguaucuagcucaguuauuaccagucugggugccaucguguccugcuacggcaagacuaaauguacagcaagcaacaagugcagggggaucauuaagaccuucucuaauggaugugauuaugucucaaacaaaggcguggacacugucaguguggguaauacgcuuuacuauguuaacaagcaagaggggaaaagccuguacgugaagggagaacccaucauuaauuuuuaugacccuuugguauucccauccgaugaguuugacgcuucuauaucgcaggucaacgagaaaaucaaccagagccucgccuucauucggaaguccgaugaacuguuacacaaugugaacgcgggcaagucaacaaccaauaucaugaucacuaccauuauaaucguuauuaucgugauucugcuaagucucaucgccgucggccugcuuuuguacugcaaagcacgcucuacaccggugacccugagcaaggaccagcucuccgggauaaacaauaucgcuuucucaaacugaggacuagugaagggaacacccaaauuuaauucagccuuaagcacaauuaauuaagagugaaacguaauuguacaagcaguuggucacccaccauagggcaugaucaacaccgcaaccuuuccuuuuucccccagugauucugaaaaaccccucuucccuucagcuugcuuagauguuccaaauuuaguaagcuuaaggcggccuacagaagaaaaagaaaaaaaaggccacaaaaguucccucucacuuucaguaaauaaaauaaaagcagcaacagaaauaaagaaauaaaugaaauucaaaaugaaauaaauauuguguugugcagcauuaaaaaaucaauaaaaauuaaaaaugagcaagaucuaaaaaaaaaaaaaaaaaaaaaaaaaaaaaaaaaaaaaaaaaaaaaaaaaaaaaaaaaaaaaaaaugcaucccccccccccccccccccccccccccccccaaaggcucuuuucagagccaccagaauu

SEQ ID NO: 5475 - RNA, 2280 nt, Artificial Sequence
  mRNA product Design d-3 comprising derived and/or modified sequence from HRSV(A2)__F_DSCav1_mut5 (opt4)
gggagagggcgcuuggcuugcaaggacccugagcugcggcauugaagcacacccaacccaacucgacugaagucagccucacugaaccggaucugagaaucuucucucucugggcuugccagggcucuccgaaccuagcuagcauccucuucaauuccaacuagaaagcuuaccauggagcugcugauccugaaggccaacgccaucaccaccauccugaccgccgugaccuucugcuucgccagcggccagaacaucaccgaggaguucuaccagagcaccugcagcgccgugagcaagggcuaccugagcgcccugagaaccggcugguacaccagcgugaucaccaucgagcugagcaacaucaaggagaacaagugcaacggcaccgacgccaaggugaagcugaucaagcaggagcuggacaaguacaagaacgccgugaccgagcugcagcugcugaugcagagcacccccgccaccggcagcggcagcgccaucgccagcggcguggccgugugcaaggugcugcaccuggagggcgaggugaacaagaucaagagcgcccugcugagcaccaacaaggccguggugagccugagcggcugcggcgugagcgugcugaccuucaaggugcuggaccugaagaacuacaucgacaagcagcugcugcccauccugaacaagcagagcugcagcaucagcaacaucgagaccgugaucgaguuccagcagaagaacaacagacugcuggagaucaccagagaguucagcgugaacgccggcgugaccacccccgugagcaccuacaugcugaccaacagcgagcugcugagccugaucaacgacaugcccaucaccaacgaccagaagaagcugaugagcaacaacgugcagaucgugagacagcagagcuacagcaucaugugcaucaucaaggaggaggugcuggccuacguggugcagcugccccuguacggcgugaucgacacccccugcuggaagcugcacaccagcccccugugcaccaccaacaccaaggagggcagcaacaucugccugaccagaaccgacagaggcugguacugcgacaacgccggcagcgugagcuucuucccccaggccgagaccugcaaggugcagagcaacagaguguucugcgacaccaugaacagcagaacccugcccagcgaggugaaccugugcaacguggacaucuucaaccccaaguacgacugcaagaucaugaccagcaagaccgacgugagcagcagcgugaucaccagccugggcgccaucgugagcugcuacggcaagaccaagugcaccgccagcaacaagugcagaggcaucaucaagaccuucagcaacggcugcgacuacgugagcaacaagggcguggacaccgugagcgugggcaacacccuguacuacgugaacaagcaggagggcaagagccuguacgugaagggcgagcccaucaucaacuucuacgacccccugguguuccccagcgacgaguucgacgccagcaucagccaggugaacgagaagaucaaccagagccuggccuucaucagaaagagcgacgagcugcugcacaacgugaacgccggcaagagcaccaccaacaucaugaucaccaccaucaucaucgugaucaucgugauccugcugagccugaucgccgugggccugcugcuguacugcaaggccagaagcacccccgugacccugagcaaggaccagcugagcggcaucaacaacaucgccuucagcaacugaggacuagugaagggaacacccaaauuuaauucagccuuaagcacaauuaauuaagagugaaacguaauuguacaagcaguuggucacccaccauagggcaugaucaacaccgcaaccuuuccuuuuucccccagugauucugaaaaaccccucuucccuucagcuugcuuagauguuccaaauuuaguaagcuuaaggcggccuacagaagaaaaagaaaaaaaaggccacaaaaguucccucucacuuucaguaaauaaaauaaaagcagcaacagaaauaaagaaauaaaugaaauucaaaaugaaauaaauauuguguugugcagcauuaaaaaaucaauaaaaauuaaaaaugagcaagaucuaaaaaaaaaaaaaaaaaaaaaaaaaaaaaaaaaaaaaaaaaaaaaaaaaaaaaaaaaaaaaaaaugcaucccccccccccccccccccccccccccccccaaaggcucuuuucagagccaccagaauu

SEQ ID NO: 5476 - RNA, 2280 nt, Artificial Sequence
  mRNA product Design d-3 comprising derived and/or modified sequence from HRSV(A2)__F_DSCav1_mut5 (opt5)
gggagagggcgcuuggcuugcaaggacccugagcugcggcauugaagcacacccaacccaacucgacugaagucagccucacugaaccggaucugagaaucuucucucucugggcuugccagggcucuccgaaccuagcuagcauccucuucaauuccaacuagaaagcuuaccauggagcugcucauccugaaggccaacgcuauuaccacaauccuuacggccgugaccuucugcuuugcgagcggccagaauauuacagaagaguucuaccaauccaccuguucugcugucagcaaaggguaucuguccgcccucagaacaggaugguacaccucuguuaucacaauugaacugagcaacaucaaggagaauaaaugcaacggcaccgacgccaaggugaaacuuaucaagcaggaacuggauaaguauaaaaaugcugugacggagcuccagcugcugaugcaguccacccccgccacagggucuggaagcgcuauugccuccggcgucgcgguguguaagguucuccaccuggagggggaagugaacaaaaucaagagcgcccuucugucuaccaauaaagcugucgugucccucagcggaugcggcguuucugugcugacauuuaagguccuugaccugaagaacuacauugauaaacaacuccugccuauccugaauaagcaguccuguagcauuucuaacaucgagaccgugauugaguuccagcagaaaaauaaccggcuccuggaaaucacgcgcgaguuuuccgugaaugccggcgucacaaccccgguuagcacauauaugcuuaccaacuccgaacugcucucucugaucaaugacaugcccauuaccaacgaucaaaagaaacuuaugagcaacaaugugcagaucgugagacagcaguccuacagcauuaugugcaucauuaaggaggaaguccuggcuuaugugguucaacucccucuguacggggugaucgacacacccuguuggaaacugcauacgucuccucucugcaccacaaacaccaaggagggauccaauaucugucugacacggaccgaucgcggcugguacugcgacaacgccgggagcgucucuuucuuuccccaggcggaaacguguaaggugcagagcaauagaguuuucugcgauacaaugaacuccagaacccugccuucugaggugaaucucugcaacgucgacauuuuuaauccgaaauaugauuguaagaucaugaccagcaaaacagacguguccagcucugucauuaccucccugggagccaucgugagcugcuacggcaagacaaaauguacggcuucuaacaagugccgggggauuaucaagaccuucuccaauggaugugauuauguuagcaacaaaggcguggacacagucuccgugggcaauacccuuuacuauguuaacaagcaagaggggaaaucucuguacgugaagggagaacccaucauuaauuuuuaugacccucucgucuuccccagcgaugaguuugacgccuccaucucucaggugaacgagaaaauuaaccagagccuggcuuucauccgcaaguccgaugaacugcuccacaaugugaacgccggcaagagcacaaccaauauuaugaucacgaccauuaucaucguuauuaucgucauucugcuuucucugaucgccguggggcuccugcuguacugcaaagcuagauccacaccugugacccuuagcaaggaccagcucucuggaauuaacaauaucgcguucuccaacugaggacuagugaagggaacacccaaauuuaauucagccuuaagcacaauuaauuaagagugaaacguaauuguacaagcaguuggucacccaccauagggcaugaucaacaccgcaaccuuuccuuuuucccccagugauucugaaaaaccccucuucccuucagcuugcuuagauguuccaaauuuaguaagcuuaaggcggccuacagaagaaaaagaaaaaaaaggccacaaaaguucccucucacuuucaguaaauaaaauaaaagcagcaacagaaauaaagaaauaaaugaaauucaaaaugaaauaaauauuguguugugcagcauuaaaaaaucaauaaaaauuaaaaaugagcaagaucuaaaaaaaaaaaaaaaaaaaaaaaaaaaaaaaaaaaaaaaaaaaaaaaaaaaaaaaaaaaaaaaaugcaucccccccccccccccccccccccccccccccaaaggcucuuuucagagccaccagaauu

SEQ ID NO: 5477 - RNA, 2280 nt, Artificial Sequence
  mRNA product Design d-3 comprising derived and/or modified sequence from HRSV(A2)__F_DSCav1_mut5 (opt6)
gggagagggcgcuuggcuugcaaggacccugagcugcggcauugaagcacacccaacccaacucgacugaagucagccucacugaaccggaucugagaaucuucucucucugggcuugccagggcucuccgaaccuagcuagcauccucuucaauuccaacuagaaagcuuaccauggaacuauuaauacuuaaagccaacgcaauaacaacaauucucacugcugucaccuucugcuucgccucaggccaaaacauaacggaagaauuuuaccaaucaacaugcucugcaguauccaaaggcuaccuaucugcucuaagaacagguugguauacaucaguaauaaccauagaacuaucaaacauaaaagaaaauaaaugcaacggaacagacgcaaaaguuaaacucauaaaacaagaacuagacaaauauaaaaacgcaguuaccgaacuacaacuacuuaugcaauccacucccgccacuggaucaggaucagcaauagcaucaggagucgcaguauguaaagucuuacaccucgaaggcgaagucaauaaaaucaaauccgcauuacuauccacaaacaaagcagucguaucccuaagcggaugcggaguaucaguacuaacauuuaaaguacuagaccuaaaaaauuacaucgauaaacaacuauuaccuauauuaaacaaacaauccugcuccauuucaaauaucgaaaccguaauagaauuucaacaaaaaaacaacagauuacuagaaauaacaagagaauuuuccguaaaugcuggcguaacaacaccaguauccacauacaugcucacaaacuccgaacuacuaucacuaauaaaugacaugcccauaacaaacgaucaaaaaaaacuaaugucaaauaauguacaaauaguaagacaacaaagcuacuccaucauguguauaauaaaagaagaaguacuagcauacguaguucaacuaccacuuuacggcguaaucgacaccccuugcuggaaacuacacaccuccccucuaugcaccacaaacacaaaagaagguuccaacauaugccuuaccagaacagacagaggcugguauugcgacaacgcaggaucaguuucauuuuuuccacaagcugaaacaugcaaaguacaaucaaacagagucuucugcgacacaaugaacucaagaacucuacccucagaaguaaaccuauguaacguagacauuuucaaccccaaauacgacugcaaaauuaugacaucaaaaacagacguuucaucaucaguuaucaccucauuaggagcaauaguaagcugcuacggaaaaacaaaaugcaccgccucaaauaaaugcagaggaauaauaaaaacuuucuccaacggaugcgacuacguuucaaacaaagguguagacacuguaucaguaggaaacacacuauauuacguaaauaaacaagaaggaaaaucacuuuaugucaaaggagaaccaauaaucaauuucuacgacccauuaguauucccaucagacgaauuugaugcuucaauaucacaaguaaacgaaaaaauaaaucaaucacucgcauuuauacgaaaaucagacgaacuacuacacaauguaaacgcaggcaaaucaacaacaaacauaaugauaacaacaauaaucauuguaauaauaguaauacuucuaucucuaauagcaguaggauuacuccucuacugcaaagcaagaucaaccccuguaacacuaucaaaagaccaacuuucagguauaaauaauauagcuuuuuccaauuaaggacuagugaagggaacacccaaauuuaauucagccuuaagcacaauuaauuaagagugaaacguaauuguacaagcaguuggucacccaccauagggcaugaucaacaccgcaaccuuuccuuuuucccccagugauucugaaaaaccccucuucccuucagcuugcuuagauguuccaaauuuaguaagcuuaaggcggccuacagaagaaaaagaaaaaaaaggccacaaaaguucccucucacuuucaguaaauaaaauaaaagcagcaacagaaauaaagaaauaaaugaaauucaaaaugaaauaaauauuguguugugcagcauuaaaaaaucaauaaaaauuaaaaaugagcaagaucuaaaaaaaaaaaaaaaaaaaaaaaaaaaaaaaaaaaaaaaaaaaaaaaaaaaaaaaaaaaaaaaaugcaucccccccccccccccccccccccccccccccaaaggcucuuuucagagccaccagaauu

SEQ ID NO: 5478 - RNA, 2280 nt, Artificial Sequence
  mRNA product Design d-3 comprising derived and/or modified sequence from HRSV(A2)__F_DSCav1_mut5 (opt11)
gggagagggcgcuuggcuugcaaggacccugagcugcggcauugaagcacacccaacccaacucgacugaagucagccucacugaaccggaucugagaaucuucucucucugggcuugccagggcucuccgaaccuagcuagcauccucuucaauuccaacuagaaagcuuaccauggagcuccuaauccucaaagccaacgcgaucacuacaauccucacagccgucaccuucugcuucgccuccggccaaaacaucaccgaggaguucuaccaaucaaccugcuccgccguaucaaaaggauaccuaagcgcccuacggaccggcugguacacaucugucaucaccaucgaacuaucaaacaucaaagaaaacaaaugcaacggaaccgacgcaaaagucaaacugauuaaacaagaacuagacaaauacaaaaacgcagucaccgaacugcaauuacucaugcaaagcacaccggccaccggcucaggcagcgccaucgccuccggcgucgccgucugcaaaguucuccaccucgagggcgaagucaacaaaauaaaaucugcccuccucuccaccaacaaagccgucgucucccucagcggcugcggagucuccguccucaccuucaaaguucucgaucucaagaacuauauugacaaacaacuucuacccauacucaacaaacaaagcugcagcauauccaacaucgaaaccgucaucgaguuccaacaaaagaacaaccgccuccucgaaauaacccgcgaguucagcguuaacgccggagucacuaccccugucuccaccuacaugcucaccaacuccgaacuccuaucacuaaucaacgacaugcccauaaccaacgaccagaagaaacucauguccaacaacguccaaauuguccgacaacaaagcuacuccauaaugugcauaauaaaagaggaaguccucgccuacgucguacaacugccccuuuauggcguaaucgacacacccugcuggaaacuccacacgucaccccucugcaccaccaacacaaaagaaggcucgaacaucugccuaacacggacugaccgcggcugguacugcgacaacgccggcuccgucagcuucuucccacaagccgaaaccugcaaaguacaauccaaccgaguauucugcgacaccaugaacuccagaacccuccccucagaggucaaccugugcaacguagacaucuucaaccccaaauacgacugcaaaauaaugaccucaaaaacagacgucuccucuuccguaaucaccagccucggagccaucgucagcugcuacggcaaaaccaaaugcaccgccucaaacaaaugccgcggcaucaucaaaacauucucaaacggcugcgacuacgucuccaacaaaggcgucgacacaguaagcguaggcaacacacuguacuacgucaacaaacaagagggaaaaucacucuacgucaaaggagaacccauaaucaacuucuacgacccccucguuuuccccagcgacgaguucgacgccagcauaucccaagucaacgagaaaauuaaccaaucccuagcauucauccgaaaaucugacgaacugcuccacaacgucaacgcgggaaaaucaacaaccaacauaaugauaaccacaaucauaauagucaucaucguaauccuccucagccuaaucgcugucggccuccuccucuacugcaaagcccguuccaccccagucacacuuuccaaggaccaacuaagcggaauaaacaacaucgcguucucaaacuaaggacuagugaagggaacacccaaauuuaauucagccuuaagcacaauuaauuaagagugaaacguaauuguacaagcaguuggucacccaccauagggcaugaucaacaccgcaaccuuuccuuuuucccccagugauucugaaaaaccccucuucccuucagcuugcuuagauguuccaaauuuaguaagcuuaaggcggccuacagaagaaaaagaaaaaaaaggccacaaaaguucccucucacuuucaguaaauaaaauaaaagcagcaacagaaauaaagaaauaaaugaaauucaaaaugaaauaaauauuguguugugcagcauuaaaaaaucaauaaaaauuaaaaaugagcaagaucuaaaaaaaaaaaaaaaaaaaaaaaaaaaaaaaaaaaaaaaaaaaaaaaaaaaaaaaaaaaaaaaaugcaucccccccccccccccccccccccccccccccaaaggcucuuuucagagccaccagaauu

SEQ ID NO: 5479 - RNA, 1963 nt, Artificial Sequence
  mRNA product Design d-4 comprising derived and/or modified sequence from HRSV(A2)__F_DSCav1_mut5 (opt1)
gggagagucccgcagucggcguccagcggcucugcuuguucgugugugugucguugcaggccuuauucaagcuuaccauggagcugcucauccugaaggccaacgccaucaccaccauccugacggcggugaccuucugcuucgccagcggccagaacaucaccgaggaguucuaccaguccacgugcagcgccgucuccaagggguaccucagcgcccugcggaccggcugguacaccuccgugaucaccaucgagcugagcaacaucaaggagaacaagugcaacgggaccgacgccaaggugaagcucaucaagcaggagcuggacaaguacaagaacgcggucacggagcugcagcuccugaugcaguccaccccggcaaccggcuccggcuccgccaucgcgagcggcgucgccgugugcaaggugcugcaccucgagggggaggucaacaagaucaagagcgcccugcuguccaccaacaaggccguggugagccucuccggcugcggcgucagcgugcugaccuucaaggugcuggaccucaagaacuacaucgacaagcagcugcugcccauccugaacaagcagagcugcuccaucagcaacaucgagacggugaucgaguuccagcagaagaacaaccggcuccuggagaucacccgcgaguucagcgugaacgccggggucaccacccccguguccacguacaugcugaccaacagcgagcuccugucccugaucaacgacaugccgaucaccaacgaccagaagaagcucaugagcaacaacgugcagaucguccggcagcaguccuacagcaucaugugcaucaucaaggaggaggugcuggcguacgugguccagcugccccucuacggcgugaucgacacccccugcuggaagcugcacacgagcccccugugcaccaccaacaccaaggagggguccaacaucugccucacgcgcaccgaccggggcugguacugcgacaacgccggcagcgucuccuucuucccgcaggccgagaccugcaaggugcagagcaaccgcguguucugcgacaccaugaacucccggacgcugcccagcgagguaaaccucugcaacgucgacaucuucaaccccaaguacgacugcaagaucaugaccuccaagaccgacgugagcuccagcgugaucaccucccugggggccaucgucagcugcuacggcaagacgaagugcaccgccagcaacaagugccgggggaucaucaagaccuucuccaacggcugcgacuacgugagcaacaagggcguggacaccguguccgucgggaacacccuguacuacgugaacaagcaggagggcaagagccucuacgugaagggggagcccaucaucaacuucuacgacccgcuggucuuccccuccgacgaguucgacgcgagcaucucccaggugaacgagaagaucaaccagagccuggccuucauccgcaaguccgacgagcugcuccacaacgugaacgccggcaagagcacgaccaacaucaugaucaccaccaucaucaucgucaucaucgugauccugcugucccucaucgccguggggcugcugcucuacugcaaggcccggagcacgcccgucacccuguccaaggaccagcugagcggcaucaacaacaucgcguucuccaacugaggacuaguggaagcauuuuccuggcugauuaaaagaaauuacucagcuauggucaucuguuccuguuagaaggcuaugcagcauauuauauacuaugcgcauguuaugaaaugcauaauaaaaaauuuuaaaaaaucuaaaagaucuaaaaaaaaaaaaaaaaaaaaaaaaaaaaaaaaaaaaaaaaaaaaaaaaaaaaaaaaaaaaaaaaugcaucccccccccccccccccccccccccccccccaaaggcucuuuucagagccaccagaauu

SEQ ID NO: 5480 - RNA, 1963 nt, Artificial Sequence
  mRNA product Design d-4 comprising derived and/or modified sequence from HRSV(A2)__F_DSCav1_mut5 (opt1)
gggagagucccgcagucggcguccagcggcucugcuuguucgugugugugucguugcaggccuuauucaagcuuaccauggagcugcucauccugaaggccaacgccaucaccaccauccugacggcggugaccuucugcuucgccagcggccagaacaucaccgaggaguucuaccaguccacgugcagcgccgucuccaagggguaccucagcgcccugcgcaccggcugguacaccuccgugaucaccaucgagcugagcaacaucaaggagaacaagugcaacgggaccgacgccaaggugaagcucaucaagcaggagcuggacaaguacaagaacgcggucacggagcugcagcuccugaugcaguccacccccgccaccggcagcggguccgccaucgccagcggcguggcggugugcaagguccugcaccucgagggcgaggugaacaagaucaaguccgcccugcugagcaccaacaaggccguggucucccucagcgggugcggcguguccgugcugacguucaagguccuggaccucaagaacuacaucgacaagcagcugcugccgauccucaacaagcagagcugcuccaucagcaacaucgagaccgugaucgaguuccagcagaagaacaaccggcugcuggagaucacccgcgaguucuccgugaacgccggggucaccacgcccgugagcaccuacaugcucaccaacagcgagcugcugucccucaucaacgacaugcccaucaccaacgaccagaagaagcugaugagcaacaacgugcagaucguccggcagcaguccuacagcaucaugugcaucaucaaggaggaggugcuggccuacgugguccagcucccccuguacggcgugaucgacacgccgugcuggaagcugcacaccagcccccucugcaccaccaacacgaaggagggguccaacaucugccugacccgcaccgaccggggcugguacugcgacaacgcgggcuccgugagcuucuucccccaggccgagaccugcaagguccaguccaaccgcguguucugcgacacgaugaacagccggacccuccccuccgaggucaaccugugcaacguggacaucuucaacccgaaguacgacugcaagaucaugaccagcaagaccgacguguccagcuccgucaucacgagccugggggccaucguguccugcuacggcaagaccaagugcaccgccagcaacaagugccgggggaucaucaagaccuucuccaacggcugcgacuacgugagcaacaagggcgucgacacggugagcguggggaacacccucuacuacgucaacaagcaggagggcaagucccuguacgugaagggggagcccaucaucaacuucuacgacccccugguguuccccagcgacgaguucgacgccuccaucagccaggucaacgagaagaucaaccagucccucgcguucauccgcaagagcgacgagcugcugcacaacgugaacgccggcaaguccaccaccaacaucaugaucaccacgaucaucaucgugaucaucgucauccuccugagccugaucgccguggggcuccugcuguacugcaaggcccgguccaccccggugacccugagcaaggaccagcucuccggcaucaacaacaucgccuucagcaacugaggacuaguggaagcauuuuccuggcugauuaaaagaaauuacucagcuauggucaucuguuccuguuagaaggcuaugcagcauauuauauacuaugcgcauguuaugaaaugcauaauaaaaaauuuuaaaaaaucuaaaagaucuaaaaaaaaaaaaaaaaaaaaaaaaaaaaaaaaaaaaaaaaaaaaaaaaaaaaaaaaaaaaaaaaugcaucccccccccccccccccccccccccccccccaaaggcucuuuucagagccaccagaauu

SEQ ID NO: 5481 - RNA, 1963 nt, Artificial Sequence
  mRNA product Design d-4 comprising derived and/or modified sequence from HRSV(A2)__F_DSCav1_mut5 (opt2)
gggagagucccgcagucggcguccagcggcucugcuuguucgugugugugucguugcaggccuuauucaagcuuaccauggagcuccucauccucaaggccaacgccaucaccaccauccucaccgccgucaccuucugcuucgccuccggccagaacaucaccgaggaguucuaccaguccaccugcuccgccgucuccaagggcuaccucuccgcccuccgcaccggcugguacaccuccgucaucaccaucgagcucuccaacaucaaggagaacaagugcaacggcaccgacgccaaggucaagcucaucaagcaggagcucgacaaguacaagaacgccgucaccgagcuccagcuccucaugcaguccacccccgccaccggcuccggcuccgccaucgccuccggcgucgccgucugcaagguccuccaccucgagggcgaggucaacaagaucaaguccgcccuccucuccaccaacaaggccgucgucucccucuccggcugcggcgucuccguccucaccuucaagguccucgaccucaagaacuacaucgacaagcagcuccuccccauccucaacaagcaguccugcuccaucuccaacaucgagaccgucaucgaguuccagcagaagaacaaccgccuccucgagaucacccgcgaguucuccgucaacgccggcgucaccacccccgucuccaccuacaugcucaccaacuccgagcuccucucccucaucaacgacaugcccaucaccaacgaccagaagaagcucauguccaacaacguccagaucguccgccagcaguccuacuccaucaugugcaucaucaaggaggagguccucgccuacgucguccagcucccccucuacggcgucaucgacacccccugcuggaagcuccacaccuccccccucugcaccaccaacaccaaggagggcuccaacaucugccucacccgcaccgaccgcggcugguacugcgacaacgccggcuccgucuccuucuucccccaggccgagaccugcaagguccaguccaaccgcgucuucugcgacaccaugaacucccgcacccuccccuccgaggucaaccucugcaacgucgacaucuucaaccccaaguacgacugcaagaucaugaccuccaagaccgacgucuccuccuccgucaucaccucccucggcgccaucgucuccugcuacggcaagaccaagugcaccgccuccaacaagugccgcggcaucaucaagaccuucuccaacggcugcgacuacgucuccaacaagggcgucgacaccgucuccgucggcaacacccucuacuacgucaacaagcaggagggcaagucccucuacgucaagggcgagcccaucaucaacuucuacgacccccucgucuuccccuccgacgaguucgacgccuccaucucccaggucaacgagaagaucaaccagucccucgccuucauccgcaaguccgacgagcuccuccacaacgucaacgccggcaaguccaccaccaacaucaugaucaccaccaucaucaucgucaucaucgucauccuccucucccucaucgccgucggccuccuccucuacugcaaggcccgcuccacccccgucacccucuccaaggaccagcucuccggcaucaacaacaucgccuucuccaacugaggacuaguggaagcauuuuccuggcugauuaaaagaaauuacucagcuauggucaucuguuccuguuagaaggcuaugcagcauauuauauacuaugcgcauguuaugaaaugcauaauaaaaaauuuuaaaaaaucuaaaagaucuaaaaaaaaaaaaaaaaaaaaaaaaaaaaaaaaaaaaaaaaaaaaaaaaaaaaaaaaaaaaaaaaugcaucccccccccccccccccccccccccccccccaaaggcucuuuucagagccaccagaauu

SEQ ID NO: 5482 - RNA, 1963 nt, Artificial Sequence
  mRNA product Design d-4 comprising derived and/or modified sequence from HRSV(A2)__F_DSCav1_mut5 (opt3)
gggagagucccgcagucggcguccagcggcucugcuuguucgugugugugucguugcaggccuuauucaagcuuaccauggagcugcucauccuuaaggccaacgcuauuaccacaauacugacugcagugacguucugcuuugccagcggccagaauaucaccgaagaguucuaccaauccacauguucugcggucucaaaaggguauuugagugcuuuaagaacuggaugguacaccagcguuauuacaaucgaacuguccaacauuaaggagaauaaaugcaacgguaccgacgccaaggugaaacuaaucaagcaggaacucgauaaguauaaaaaugcaguaacugagcugcagcuucugaugcagucuacacccgccaccggcucggggucagcuauagcaagcggaguggccgucuguaagguguugcaccucgagggcgaaguuaacaaaaucaagagugcucugcuguccacgaauaaagccguggucucucucagcgguugcgggguguccguauuaacuuuuaagguucuggaccuuaagaacuacauugauaaacaauugcugccuauccuaaauaagcagucauguaguauuagcaacaucgagaccgugauagaguuccagcagaaaaauaacaggcuccuggaaauuacacgggaguuuucugucaaugcgggagugacuaccccaguguccacauauaugcuuaccaacucagaacuguugagccucaucaaugacaugccgauuacgaacgaucaaaagaaacugaugaguaacaauguccagaucguucgccagcagucuuacuccaucaugugcauuauaaaggaggaaguguuagcauauguagugcaacugccccucuacggcgucaucgacacuccuuguuggaaacuucauacaagcccacugugcaccacuaacacaaaggagggcucgaauauuuguuugacccgaacggaucgugggugguacugcgacaacgccggaucuguguccuucuuuccccaggcugaaaccuguaagguucagucaaauagaguguucugcgauacaaugaacaguagaacucugccuagcgaggucaaucucugcaacguggacaucuuuaauccaaaauaugauuguaagauaaugaccuccaaaacagacguaucuagcucaguuauuaccagucugggugccaucguguccugcuacggcaagacuaaauguacagcaagcaacaagugcagggggaucauuaagaccuucucuaauggaugugauuaugucucaaacaaaggcguggacacugucaguguggguaauacgcuuuacuauguuaacaagcaagaggggaaaagccuguacgugaagggagaacccaucauuaauuuuuaugacccuuugguauucccauccgaugaguuugacgcuucuauaucgcaggucaacgagaaaaucaaccagagccucgccuucauucggaaguccgaugaacuguuacacaaugugaacgcgggcaagucaacaaccaauaucaugaucacuaccauuauaaucguuauuaucgugauucugcuaagucucaucgccgucggccugcuuuuguacugcaaagcacgcucuacaccggugacccugagcaaggaccagcucuccgggauaaacaauaucgcuuucucaaacugaggacuaguggaagcauuuuccuggcugauuaaaagaaauuacucagcuauggucaucuguuccuguuagaaggcuaugcagcauauuauauacuaugcgcauguuaugaaaugcauaauaaaaaauuuuaaaaaaucuaaaagaucuaaaaaaaaaaaaaaaaaaaaaaaaaaaaaaaaaaaaaaaaaaaaaaaaaaaaaaaaaaaaaaaaugcaucccccccccccccccccccccccccccccccaaaggcucuuuucagagccaccagaauu

SEQ ID NO: 5483 - RNA, 1963 nt, Artificial Sequence
  mRNA product Design d-4 comprising derived and/or modified sequence from HRSV(A2)__F_DSCav1_mut5 (opt4)
gggagagucccgcagucggcguccagcggcucugcuuguucgugugugugucguugcaggccuuauucaagcuuaccauggagcugcugauccugaaggccaacgccaucaccaccauccugaccgccgugaccuucugcuucgccagcggccagaacaucaccgaggaguucuaccagagcaccugcagcgccgugagcaagggcuaccugagcgcccugagaaccggcugguacaccagcgugaucaccaucgagcugagcaacaucaaggagaacaagugcaacggcaccgacgccaaggugaagcugaucaagcaggagcuggacaaguacaagaacgccgugaccgagcugcagcugcugaugcagagcacccccgccaccggcagcggcagcgccaucgccagcggcguggccgugugcaaggugcugcaccuggagggcgaggugaacaagaucaagagcgcccugcugagcaccaacaaggccguggugagccugagcggcugcggcgugagcgugcugaccuucaaggugcuggaccugaagaacuacaucgacaagcagcugcugcccauccugaacaagcagagcugcagcaucagcaacaucgagaccgugaucgaguuccagcagaagaacaacagacugcuggagaucaccagagaguucagcgugaacgccggcgugaccacccccgugagcaccuacaugcugaccaacagcgagcugcugagccugaucaacgacaugcccaucaccaacgaccagaagaagcugaugagcaacaacgugcagaucgugagacagcagagcuacagcaucaugugcaucaucaaggaggaggugcuggccuacguggugcagcugccccuguacggcgugaucgacacccccugcuggaagcugcacaccagcccccugugcaccaccaacaccaaggagggcagcaacaucugccugaccagaaccgacagaggcugguacugcgacaacgccggcagcgugagcuucuucccccaggccgagaccugcaaggugcagagcaacagaguguucugcgacaccaugaacagcagaacccugcccagcgaggugaaccugugcaacguggacaucuucaaccccaaguacgacugcaagaucaugaccagcaagaccgacgugagcagcagcgugaucaccagccugggcgccaucgugagcugcuacggcaagaccaagugcaccgccagcaacaagugcagaggcaucaucaagaccuucagcaacggcugcgacuacgugagcaacaagggcguggacaccgugagcgugggcaacacccuguacuacgugaacaagcaggagggcaagagccuguacgugaagggcgagcccaucaucaacuucuacgacccccugguguuccccagcgacgaguucgacgccagcaucagccaggugaacgagaagaucaaccagagccuggccuucaucagaaagagcgacgagcugcugcacaacgugaacgccggcaagagcaccaccaacaucaugaucaccaccaucaucaucgugaucaucgugauccugcugagccugaucgccgugggccugcugcuguacugcaaggccagaagcacccccgugacccugagcaaggaccagcugagcggcaucaacaacaucgccuucagcaacugaggacuaguggaagcauuuuccuggcugauuaaaagaaauuacucagcuauggucaucuguuccuguuagaaggcuaugcagcauauuauauacuaugcgcauguuaugaaaugcauaauaaaaaauuuuaaaaaaucuaaaagaucuaaaaaaaaaaaaaaaaaaaaaaaaaaaaaaaaaaaaaaaaaaaaaaaaaaaaaaaaaaaaaaaaugcaucccccccccccccccccccccccccccccccaaaggcucuuuucagagccaccagaauu

SEQ ID NO: 5484 - RNA, 1963 nt, Artificial Sequence
  mRNA product Design d-4 comprising derived and/or modified sequence from HRSV(A2)__F_DSCav1_mut5 (opt5)
gggagagucccgcagucggcguccagcggcucugcuuguucgugugugugucguugcaggccuuauucaagcuuaccauggagcugcucauccugaaggccaacgcuauuaccacaauccuuacggccgugaccuucugcuuugcgagcggccagaauauuacagaagaguucuaccaauccaccuguucugcugucagcaaaggguaucuguccgcccucagaacaggaugguacaccucuguuaucacaauugaacugagcaacaucaaggagaauaaaugcaacggcaccgacgccaaggugaaacuuaucaagcaggaacuggauaaguauaaaaaugcugugacggagcuccagcugcugaugcaguccacccccgccacagggucuggaagcgcuauugccuccggcgucgcgguguguaagguucuccaccuggagggggaagugaacaaaaucaagagcgcccuucugucuaccaauaaagcugucgugucccucagcggaugcggcguuucugugcugacauuuaagguccuugaccugaagaacuacauugauaaacaacuccugccuauccugaauaagcaguccuguagcauuucuaacaucgagaccgugauugaguuccagcagaaaaauaaccggcuccuggaaaucacgcgcgaguuuuccgugaaugccggcgucacaaccccgguuagcacauauaugcuuaccaacuccgaacugcucucucugaucaaugacaugcccauuaccaacgaucaaaagaaacuuaugagcaacaaugugcagaucgugagacagcaguccuacagcauuaugugcaucauuaaggaggaaguccuggcuuaugugguucaacucccucuguacggggugaucgacacacccuguuggaaacugcauacgucuccucucugcaccacaaacaccaaggagggauccaauaucugucugacacggaccgaucgcggcugguacugcgacaacgccgggagcgucucuuucuuuccccaggcggaaacguguaaggugcagagcaauagaguuuucugcgauacaaugaacuccagaacccugccuucugaggugaaucucugcaacgucgacauuuuuaauccgaaauaugauuguaagaucaugaccagcaaaacagacguguccagcucugucauuaccucccugggagccaucgugagcugcuacggcaagacaaaauguacggcuucuaacaagugccgggggauuaucaagaccuucuccaauggaugugauuauguuagcaacaaaggcguggacacagucuccgugggcaauacccuuuacuauguuaacaagcaagaggggaaaucucuguacgugaagggagaacccaucauuaauuuuuaugacccucucgucuuccccagcgaugaguuugacgccuccaucucucaggugaacgagaaaauuaaccagagccuggcuuucauccgcaaguccgaugaacugcuccacaaugugaacgccggcaagagcacaaccaauauuaugaucacgaccauuaucaucguuauuaucgucauucugcuuucucugaucgccguggggcuccugcuguacugcaaagcuagauccacaccugugacccuuagcaaggaccagcucucuggaauuaacaauaucgcguucuccaacugaggacuaguggaagcauuuuccuggcugauuaaaagaaauuacucagcuauggucaucuguuccuguuagaaggcuaugcagcauauuauauacuaugcgcauguuaugaaaugcauaauaaaaaauuuuaaaaaaucuaaaagaucuaaaaaaaaaaaaaaaaaaaaaaaaaaaaaaaaaaaaaaaaaaaaaaaaaaaaaaaaaaaaaaaaugcaucccccccccccccccccccccccccccccccaaaggcucuuuucagagccaccagaauu

SEQ ID NO: 5485 - RNA, 1963 nt, Artificial Sequence
  mRNA product Design d-4 comprising derived and/or modified sequence from HRSV(A2)__F_DSCav1_mut5 (opt6)
gggagagucccgcagucggcguccagcggcucugcuuguucgugugugugucguugcaggccuuauucaagcuuaccauggaacuauuaauacuuaaagccaacgcaauaacaacaauucucacugcugucaccuucugcuucgccucaggccaaaacauaacggaagaauuuuaccaaucaacaugcucugcaguauccaaaggcuaccuaucugcucuaagaacagguugguauacaucaguaauaaccauagaacuaucaaacauaaaagaaaauaaaugcaacggaacagacgcaaaaguuaaacucauaaaacaagaacuagacaaauauaaaaacgcaguuaccgaacuacaacuacuuaugcaauccacucccgccacuggaucaggaucagcaauagcaucaggagucgcaguauguaaagucuuacaccucgaaggcgaagucaauaaaaucaaauccgcauuacuauccacaaacaaagcagucguaucccuaagcggaugcggaguaucaguacuaacauuuaaaguacuagaccuaaaaaauuacaucgauaaacaacuauuaccuauauuaaacaaacaauccugcuccauuucaaauaucgaaaccguaauagaauuucaacaaaaaaacaacagauuacuagaaauaacaagagaauuuuccguaaaugcuggcguaacaacaccaguauccacauacaugcucacaaacuccgaacuacuaucacuaauaaaugacaugcccauaacaaacgaucaaaaaaaacuaaugucaaauaauguacaaauaguaagacaacaaagcuacuccaucauguguauaauaaaagaagaaguacuagcauacguaguucaacuaccacuuuacggcguaaucgacaccccuugcuggaaacuacacaccuccccucuaugcaccacaaacacaaaagaagguuccaacauaugccuuaccagaacagacagaggcugguauugcgacaacgcaggaucaguuucauuuuuuccacaagcugaaacaugcaaaguacaaucaaacagagucuucugcgacacaaugaacucaagaacucuacccucagaaguaaaccuauguaacguagacauuuucaaccccaaauacgacugcaaaauuaugacaucaaaaacagacguuucaucaucaguuaucaccucauuaggagcaauaguaagcugcuacggaaaaacaaaaugcaccgccucaaauaaaugcagaggaauaauaaaaacuuucuccaacggaugcgacuacguuucaaacaaagguguagacacuguaucaguaggaaacacacuauauuacguaaauaaacaagaaggaaaaucacuuuaugucaaaggagaaccaauaaucaauuucuacgacccauuaguauucccaucagacgaauuugaugcuucaauaucacaaguaaacgaaaaaauaaaucaaucacucgcauuuauacgaaaaucagacgaacuacuacacaauguaaacgcaggcaaaucaacaacaaacauaaugauaacaacaauaaucauuguaauaauaguaauacuucuaucucuaauagcaguaggauuacuccucuacugcaaagcaagaucaaccccuguaacacuaucaaaagaccaacuuucagguauaaauaauauagcuuuuuccaauuaaggacuaguggaagcauuuuccuggcugauuaaaagaaauuacucagcuauggucaucuguuccuguuagaaggcuaugcagcauauuauauacuaugcgcauguuaugaaaugcauaauaaaaaauuuuaaaaaaucuaaaagaucuaaaaaaaaaaaaaaaaaaaaaaaaaaaaaaaaaaaaaaaaaaaaaaaaaaaaaaaaaaaaaaaaugcaucccccccccccccccccccccccccccccccaaaggcucuuuucagagccaccagaauu

SEQ ID NO: 5486 - RNA, 1963 nt, Artificial Sequence
  mRNA product Design d-4 comprising derived and/or modified sequence from HRSV(A2)__F_DSCav1_mut5 (opt11)
gggagagucccgcagucggcguccagcggcucugcuuguucgugugugugucguugcaggccuuauucaagcuuaccauggagcuccuaauccucaaagccaacgcgaucacuacaauccucacagccgucaccuucugcuucgccuccggccaaaacaucaccgaggaguucuaccaaucaaccugcuccgccguaucaaaaggauaccuaagcgcccuacggaccggcugguacacaucugucaucaccaucgaacuaucaaacaucaaagaaaacaaaugcaacggaaccgacgcaaaagucaaacugauuaaacaagaacuagacaaauacaaaaacgcagucaccgaacugcaauuacucaugcaaagcacaccggccaccggcucaggcagcgccaucgccuccggcgucgccgucugcaaaguucuccaccucgagggcgaagucaacaaaauaaaaucugcccuccucuccaccaacaaagccgucgucucccucagcggcugcggagucuccguccucaccuucaaaguucucgaucucaagaacuauauugacaaacaacuucuacccauacucaacaaacaaagcugcagcauauccaacaucgaaaccgucaucgaguuccaacaaaagaacaaccgccuccucgaaauaacccgcgaguucagcguuaacgccggagucacuaccccugucuccaccuacaugcucaccaacuccgaacuccuaucacuaaucaacgacaugcccauaaccaacgaccagaagaaacucauguccaacaacguccaaauuguccgacaacaaagcuacuccauaaugugcauaauaaaagaggaaguccucgccuacgucguacaacugccccuuuauggcguaaucgacacacccugcuggaaacuccacacgucaccccucugcaccaccaacacaaaagaaggcucgaacaucugccuaacacggacugaccgcggcugguacugcgacaacgccggcuccgucagcuucuucccacaagccgaaaccugcaaaguacaauccaaccgaguauucugcgacaccaugaacuccagaacccuccccucagaggucaaccugugcaacguagacaucuucaaccccaaauacgacugcaaaauaaugaccucaaaaacagacgucuccucuuccguaaucaccagccucggagccaucgucagcugcuacggcaaaaccaaaugcaccgccucaaacaaaugccgcggcaucaucaaaacauucucaaacggcugcgacuacgucuccaacaaaggcgucgacacaguaagcguaggcaacacacuguacuacgucaacaaacaagagggaaaaucacucuacgucaaaggagaacccauaaucaacuucuacgacccccucguuuuccccagcgacgaguucgacgccagcauaucccaagucaacgagaaaauuaaccaaucccuagcauucauccgaaaaucugacgaacugcuccacaacgucaacgcgggaaaaucaacaaccaacauaaugauaaccacaaucauaauagucaucaucguaauccuccucagccuaaucgcugucggccuccuccucuacugcaaagcccguuccaccccagucacacuuuccaaggaccaacuaagcggaauaaacaacaucgcguucucaaacuaaggacuaguggaagcauuuuccuggcugauuaaaagaaauuacucagcuauggucaucuguuccuguuagaaggcuaugcagcauauuauauacuaugcgcauguuaugaaaugcauaauaaaaaauuuuaaaaaaucuaaaagaucuaaaaaaaaaaaaaaaaaaaaaaaaaaaaaaaaaaaaaaaaaaaaaaaaaaaaaaaaaaaaaaaaugcaucccccccccccccccccccccccccccccccaaaggcucuuuucagagccaccagaauu

SEQ ID NO: 5487 - RNA, 2060 nt, Artificial Sequence
  mRNA product Design d-5 comprising derived and/or modified sequence from HRSV(A2)__F_DSCav1_mut5 (opt1)
gggagagggcgcuuggcuugcaaggacccugagcugcggcauugaagcacacccaacccaacucgacugaagucagccucacugaaccggaucugagaaucuucucucucugggcuugccagggcucuccgaaccuagcuagcauccucuucaauuccaacuagaaagcuuaccauggagcugcucauccugaaggccaacgccaucaccaccauccugacggcggugaccuucugcuucgccagcggccagaacaucaccgaggaguucuaccaguccacgugcagcgccgucuccaagggguaccucagcgcccugcggaccggcugguacaccuccgugaucaccaucgagcugagcaacaucaaggagaacaagugcaacgggaccgacgccaaggugaagcucaucaagcaggagcuggacaaguacaagaacgcggucacggagcugcagcuccugaugcaguccaccccggcaaccggcuccggcuccgccaucgcgagcggcgucgccgugugcaaggugcugcaccucgagggggaggucaacaagaucaagagcgcccugcuguccaccaacaaggccguggugagccucuccggcugcggcgucagcgugcugaccuucaaggugcuggaccucaagaacuacaucgacaagcagcugcugcccauccugaacaagcagagcugcuccaucagcaacaucgagacggugaucgaguuccagcagaagaacaaccggcuccuggagaucacccgcgaguucagcgugaacgccggggucaccacccccguguccacguacaugcugaccaacagcgagcuccugucccugaucaacgacaugccgaucaccaacgaccagaagaagcucaugagcaacaacgugcagaucguccggcagcaguccuacagcaucaugugcaucaucaaggaggaggugcuggcguacgugguccagcugccccucuacggcgugaucgacacccccugcuggaagcugcacacgagcccccugugcaccaccaacaccaaggagggguccaacaucugccucacgcgcaccgaccggggcugguacugcgacaacgccggcagcgucuccuucuucccgcaggccgagaccugcaaggugcagagcaaccgcguguucugcgacaccaugaacucccggacgcugcccagcgagguaaaccucugcaacgucgacaucuucaaccccaaguacgacugcaagaucaugaccuccaagaccgacgugagcuccagcgugaucaccucccugggggccaucgucagcugcuacggcaagacgaagugcaccgccagcaacaagugccgggggaucaucaagaccuucuccaacggcugcgacuacgugagcaacaagggcguggacaccguguccgucgggaacacccuguacuacgugaacaagcaggagggcaagagccucuacgugaagggggagcccaucaucaacuucuacgacccgcuggucuuccccuccgacgaguucgacgcgagcaucucccaggugaacgagaagaucaaccagagccuggccuucauccgcaaguccgacgagcugcuccacaacgugaacgccggcaagagcacgaccaacaucaugaucaccaccaucaucaucgucaucaucgugauccugcugucccucaucgccguggggcugcugcucuacugcaaggcccggagcacgcccgucacccuguccaaggaccagcugagcggcaucaacaacaucgcguucuccaacugaggacuaguggaagcauuuuccuggcugauuaaaagaaauuacucagcuauggucaucuguuccuguuagaaggcuaugcagcauauuauauacuaugcgcauguuaugaaaugcauaauaaaaaauuuuaaaaaaucuaaaagaucuaaaaaaaaaaaaaaaaaaaaaaaaaaaaaaaaaaaaaaaaaaaaaaaaaaaaaaaaaaaaaaaaugcaucccccccccccccccccccccccccccccccaaaggcucuuuucagagccaccagaauu

SEQ ID NO: 5488 - RNA, 2060 nt, Artificial Sequence
  mRNA product Design d-5 comprising derived and/or modified sequence from HRSV(A2)__F_DSCav1_mut5 (opt1)
gggagagggcgcuuggcuugcaaggacccugagcugcggcauugaagcacacccaacccaacucgacugaagucagccucacugaaccggaucugagaaucuucucucucugggcuugccagggcucuccgaaccuagcuagcauccucuucaauuccaacuagaaagcuuaccauggagcugcucauccugaaggccaacgccaucaccaccauccugacggcggugaccuucugcuucgccagcggccagaacaucaccgaggaguucuaccaguccacgugcagcgccgucuccaagggguaccucagcgcccugcgcaccggcugguacaccuccgugaucaccaucgagcugagcaacaucaaggagaacaagugcaacgggaccgacgccaaggugaagcucaucaagcaggagcuggacaaguacaagaacgcggucacggagcugcagcuccugaugcaguccacccccgccaccggcagcggguccgccaucgccagcggcguggcggugugcaagguccugcaccucgagggcgaggugaacaagaucaaguccgcccugcugagcaccaacaaggccguggucucccucagcgggugcggcguguccgugcugacguucaagguccuggaccucaagaacuacaucgacaagcagcugcugccgauccucaacaagcagagcugcuccaucagcaacaucgagaccgugaucgaguuccagcagaagaacaaccggcugcuggagaucacccgcgaguucuccgugaacgccggggucaccacgcccgugagcaccuacaugcucaccaacagcgagcugcugucccucaucaacgacaugcccaucaccaacgaccagaagaagcugaugagcaacaacgugcagaucguccggcagcaguccuacagcaucaugugcaucaucaaggaggaggugcuggccuacgugguccagcucccccuguacggcgugaucgacacgccgugcuggaagcugcacaccagcccccucugcaccaccaacacgaaggagggguccaacaucugccugacccgcaccgaccggggcugguacugcgacaacgcgggcuccgugagcuucuucccccaggccgagaccugcaagguccaguccaaccgcguguucugcgacacgaugaacagccggacccuccccuccgaggucaaccugugcaacguggacaucuucaacccgaaguacgacugcaagaucaugaccagcaagaccgacguguccagcuccgucaucacgagccugggggccaucguguccugcuacggcaagaccaagugcaccgccagcaacaagugccgggggaucaucaagaccuucuccaacggcugcgacuacgugagcaacaagggcgucgacacggugagcguggggaacacccucuacuacgucaacaagcaggagggcaagucccuguacgugaagggggagcccaucaucaacuucuacgacccccugguguuccccagcgacgaguucgacgccuccaucagccaggucaacgagaagaucaaccagucccucgcguucauccgcaagagcgacgagcugcugcacaacgugaacgccggcaaguccaccaccaacaucaugaucaccacgaucaucaucgugaucaucgucauccuccugagccugaucgccguggggcuccugcuguacugcaaggcccgguccaccccggugacccugagcaaggaccagcucuccggcaucaacaacaucgccuucagcaacugaggacuaguggaagcauuuuccuggcugauuaaaagaaauuacucagcuauggucaucuguuccuguuagaaggcuaugcagcauauuauauacuaugcgcauguuaugaaaugcauaauaaaaaauuuuaaaaaaucuaaaagaucuaaaaaaaaaaaaaaaaaaaaaaaaaaaaaaaaaaaaaaaaaaaaaaaaaaaaaaaaaaaaaaaaugcaucccccccccccccccccccccccccccccccaaaggcucuuuucagagccaccagaauu

SEQ ID NO: 5489 - RNA, 2060 nt, Artificial Sequence
  mRNA product Design d-5 comprising derived and/or modified sequence from HRSV(A2)__F_DSCav1_mut5 (opt2)
gggagagggcgcuuggcuugcaaggacccugagcugcggcauugaagcacacccaacccaacucgacugaagucagccucacugaaccggaucugagaaucuucucucucugggcuugccagggcucuccgaaccuagcuagcauccucuucaauuccaacuagaaagcuuaccauggagcuccucauccucaaggccaacgccaucaccaccauccucaccgccgucaccuucugcuucgccuccggccagaacaucaccgaggaguucuaccaguccaccugcuccgccgucuccaagggcuaccucuccgcccuccgcaccggcugguacaccuccgucaucaccaucgagcucuccaacaucaaggagaacaagugcaacggcaccgacgccaaggucaagcucaucaagcaggagcucgacaaguacaagaacgccgucaccgagcuccagcuccucaugcaguccacccccgccaccggcuccggcuccgccaucgccuccggcgucgccgucugcaagguccuccaccucgagggcgaggucaacaagaucaaguccgcccuccucuccaccaacaaggccgucgucucccucuccggcugcggcgucuccguccucaccuucaagguccucgaccucaagaacuacaucgacaagcagcuccuccccauccucaacaagcaguccugcuccaucuccaacaucgagaccgucaucgaguuccagcagaagaacaaccgccuccucgagaucacccgcgaguucuccgucaacgccggcgucaccacccccgucuccaccuacaugcucaccaacuccgagcuccucucccucaucaacgacaugcccaucaccaacgaccagaagaagcucauguccaacaacguccagaucguccgccagcaguccuacuccaucaugugcaucaucaaggaggagguccucgccuacgucguccagcucccccucuacggcgucaucgacacccccugcuggaagcuccacaccuccccccucugcaccaccaacaccaaggagggcuccaacaucugccucacccgcaccgaccgcggcugguacugcgacaacgccggcuccgucuccuucuucccccaggccgagaccugcaagguccaguccaaccgcgucuucugcgacaccaugaacucccgcacccuccccuccgaggucaaccucugcaacgucgacaucuucaaccccaaguacgacugcaagaucaugaccuccaagaccgacgucuccuccuccgucaucaccucccucggcgccaucgucuccugcuacggcaagaccaagugcaccgccuccaacaagugccgcggcaucaucaagaccuucuccaacggcugcgacuacgucuccaacaagggcgucgacaccgucuccgucggcaacacccucuacuacgucaacaagcaggagggcaagucccucuacgucaagggcgagcccaucaucaacuucuacgacccccucgucuuccccuccgacgaguucgacgccuccaucucccaggucaacgagaagaucaaccagucccucgccuucauccgcaaguccgacgagcuccuccacaacgucaacgccggcaaguccaccaccaacaucaugaucaccaccaucaucaucgucaucaucgucauccuccucucccucaucgccgucggccuccuccucuacugcaaggcccgcuccacccccgucacccucuccaaggaccagcucuccggcaucaacaacaucgccuucuccaacugaggacuaguggaagcauuuuccuggcugauuaaaagaaauuacucagcuauggucaucuguuccuguuagaaggcuaugcagcauauuauauacuaugcgcauguuaugaaaugcauaauaaaaaauuuuaaaaaaucuaaaagaucuaaaaaaaaaaaaaaaaaaaaaaaaaaaaaaaaaaaaaaaaaaaaaaaaaaaaaaaaaaaaaaaaugcaucccccccccccccccccccccccccccccccaaaggcucuuuucagagccaccagaauu

SEQ ID NO: 5490 - RNA, 2060 nt, Artificial Sequence
  mRNA product Design d-5 comprising derived and/or modified sequence from HRSV(A2)__F_DSCav1_mut5 (opt3)
gggagagggcgcuuggcuugcaaggacccugagcugcggcauugaagcacacccaacccaacucgacugaagucagccucacugaaccggaucugagaaucuucucucucugggcuugccagggcucuccgaaccuagcuagcauccucuucaauuccaacuagaaagcuuaccauggagcugcucauccuuaaggccaacgcuauuaccacaauacugacugcagugacguucugcuuugccagcggccagaauaucaccgaagaguucuaccaauccacauguucugcggucucaaaaggguauuugagugcuuuaagaacuggaugguacaccagcguuauuacaaucgaacuguccaacauuaaggagaauaaaugcaacgguaccgacgccaaggugaaacuaaucaagcaggaacucgauaaguauaaaaaugcaguaacugagcugcagcuucugaugcagucuacacccgccaccggcucggggucagcuauagcaagcggaguggccgucuguaagguguugcaccucgagggcgaaguuaacaaaaucaagagugcucugcuguccacgaauaaagccguggucucucucagcgguugcgggguguccguauuaacuuuuaagguucuggaccuuaagaacuacauugauaaacaauugcugccuauccuaaauaagcagucauguaguauuagcaacaucgagaccgugauagaguuccagcagaaaaauaacaggcuccuggaaauuacacgggaguuuucugucaaugcgggagugacuaccccaguguccacauauaugcuuaccaacucagaacuguugagccucaucaaugacaugccgauuacgaacgaucaaaagaaacugaugaguaacaauguccagaucguucgccagcagucuuacuccaucaugugcauuauaaaggaggaaguguuagcauauguagugcaacugccccucuacggcgucaucgacacuccuuguuggaaacuucauacaagcccacugugcaccacuaacacaaaggagggcucgaauauuuguuugacccgaacggaucgugggugguacugcgacaacgccggaucuguguccuucuuuccccaggcugaaaccuguaagguucagucaaauagaguguucugcgauacaaugaacaguagaacucugccuagcgaggucaaucucugcaacguggacaucuuuaauccaaaauaugauuguaagauaaugaccuccaaaacagacguaucuagcucaguuauuaccagucugggugccaucguguccugcuacggcaagacuaaauguacagcaagcaacaagugcagggggaucauuaagaccuucucuaauggaugugauuaugucucaaacaaaggcguggacacugucaguguggguaauacgcuuuacuauguuaacaagcaagaggggaaaagccuguacgugaagggagaacccaucauuaauuuuuaugacccuuugguauucccauccgaugaguuugacgcuucuauaucgcaggucaacgagaaaaucaaccagagccucgccuucauucggaaguccgaugaacuguuacacaaugugaacgcgggcaagucaacaaccaauaucaugaucacuaccauuauaaucguuauuaucgugauucugcuaagucucaucgccgucggccugcuuuuguacugcaaagcacgcucuacaccggugacccugagcaaggaccagcucuccgggauaaacaauaucgcuuucucaaacugaggacuaguggaagcauuuuccuggcugauuaaaagaaauuacucagcuauggucaucuguuccuguuagaaggcuaugcagcauauuauauacuaugcgcauguuaugaaaugcauaauaaaaaauuuuaaaaaaucuaaaagaucuaaaaaaaaaaaaaaaaaaaaaaaaaaaaaaaaaaaaaaaaaaaaaaaaaaaaaaaaaaaaaaaaugcaucccccccccccccccccccccccccccccccaaaggcucuuuucagagccaccagaauu

SEQ ID NO: 5491 - RNA, 2060 nt, Artificial Sequence
  mRNA product Design d-5 comprising derived and/or modified sequence from HRSV(A2)__F_DSCav1_mut5 (opt4)
gggagagggcgcuuggcuugcaaggacccugagcugcggcauugaagcacacccaacccaacucgacugaagucagccucacugaaccggaucugagaaucuucucucucugggcuugccagggcucuccgaaccuagcuagcauccucuucaauuccaacuagaaagcuuaccauggagcugcugauccugaaggccaacgccaucaccaccauccugaccgccgugaccuucugcuucgccagcggccagaacaucaccgaggaguucuaccagagcaccugcagcgccgugagcaagggcuaccugagcgcccugagaaccggcugguacaccagcgugaucaccaucgagcugagcaacaucaaggagaacaagugcaacggcaccgacgccaaggugaagcugaucaagcaggagcuggacaaguacaagaacgccgugaccgagcugcagcugcugaugcagagcacccccgccaccggcagcggcagcgccaucgccagcggcguggccgugugcaaggugcugcaccuggagggcgaggugaacaagaucaagagcgcccugcugagcaccaacaaggccguggugagccugagcggcugcggcgugagcgugcugaccuucaaggugcuggaccugaagaacuacaucgacaagcagcugcugcccauccugaacaagcagagcugcagcaucagcaacaucgagaccgugaucgaguuccagcagaagaacaacagacugcuggagaucaccagagaguucagcgugaacgccggcgugaccacccccgugagcaccuacaugcugaccaacagcgagcugcugagccugaucaacgacaugcccaucaccaacgaccagaagaagcugaugagcaacaacgugcagaucgugagacagcagagcuacagcaucaugugcaucaucaaggaggaggugcuggccuacguggugcagcugccccuguacggcgugaucgacacccccugcuggaagcugcacaccagcccccugugcaccaccaacaccaaggagggcagcaacaucugccugaccagaaccgacagaggcugguacugcgacaacgccggcagcgugagcuucuucccccaggccgagaccugcaaggugcagagcaacagaguguucugcgacaccaugaacagcagaacccugcccagcgaggugaaccugugcaacguggacaucuucaaccccaaguacgacugcaagaucaugaccagcaagaccgacgugagcagcagcgugaucaccagccugggcgccaucgugagcugcuacggcaagaccaagugcaccgccagcaacaagugcagaggcaucaucaagaccuucagcaacggcugcgacuacgugagcaacaagggcguggacaccgugagcgugggcaacacccuguacuacgugaacaagcaggagggcaagagccuguacgugaagggcgagcccaucaucaacuucuacgacccccugguguuccccagcgacgaguucgacgccagcaucagccaggugaacgagaagaucaaccagagccuggccuucaucagaaagagcgacgagcugcugcacaacgugaacgccggcaagagcaccaccaacaucaugaucaccaccaucaucaucgugaucaucgugauccugcugagccugaucgccgugggccugcugcuguacugcaaggccagaagcacccccgugacccugagcaaggaccagcugagcggcaucaacaacaucgccuucagcaacugaggacuaguggaagcauuuuccuggcugauuaaaagaaauuacucagcuauggucaucuguuccuguuagaaggcuaugcagcauauuauauacuaugcgcauguuaugaaaugcauaauaaaaaauuuuaaaaaaucuaaaagaucuaaaaaaaaaaaaaaaaaaaaaaaaaaaaaaaaaaaaaaaaaaaaaaaaaaaaaaaaaaaaaaaaugcaucccccccccccccccccccccccccccccccaaaggcucuuuucagagccaccagaauu

SEQ ID NO: 5492 - RNA, 2060 nt, Artificial Sequence
  mRNA product Design d-5 comprising derived and/or modified sequence from HRSV(A2)__F_DSCav1_mut5 (opt5)
gggagagggcgcuuggcuugcaaggacccugagcugcggcauugaagcacacccaacccaacucgacugaagucagccucacugaaccggaucugagaaucuucucucucugggcuugccagggcucuccgaaccuagcuagcauccucuucaauuccaacuagaaagcuuaccauggagcugcucauccugaaggccaacgcuauuaccacaauccuuacggccgugaccuucugcuuugcgagcggccagaauauuacagaagaguucuaccaauccaccuguucugcugucagcaaaggguaucuguccgcccucagaacaggaugguacaccucuguuaucacaauugaacugagcaacaucaaggagaauaaaugcaacggcaccgacgccaaggugaaacuuaucaagcaggaacuggauaaguauaaaaaugcugugacggagcuccagcugcugaugcaguccacccccgccacagggucuggaagcgcuauugccuccggcgucgcgguguguaagguucuccaccuggagggggaagugaacaaaaucaagagcgcccuucugucuaccaauaaagcugucgugucccucagcggaugcggcguuucugugcugacauuuaagguccuugaccugaagaacuacauugauaaacaacuccugccuauccugaauaagcaguccuguagcauuucuaacaucgagaccgugauugaguuccagcagaaaaauaaccggcuccuggaaaucacgcgcgaguuuuccgugaaugccggcgucacaaccccgguuagcacauauaugcuuaccaacuccgaacugcucucucugaucaaugacaugcccauuaccaacgaucaaaagaaacuuaugagcaacaaugugcagaucgugagacagcaguccuacagcauuaugugcaucauuaaggaggaaguccuggcuuaugugguucaacucccucuguacggggugaucgacacacccuguuggaaacugcauacgucuccucucugcaccacaaacaccaaggagggauccaauaucugucugacacggaccgaucgcggcugguacugcgacaacgccgggagcgucucuuucuuuccccaggcggaaacguguaaggugcagagcaauagaguuuucugcgauacaaugaacuccagaacccugccuucugaggugaaucucugcaacgucgacauuuuuaauccgaaauaugauuguaagaucaugaccagcaaaacagacguguccagcucugucauuaccucccugggagccaucgugagcugcuacggcaagacaaaauguacggcuucuaacaagugccgggggauuaucaagaccuucuccaauggaugugauuauguuagcaacaaaggcguggacacagucuccgugggcaauacccuuuacuauguuaacaagcaagaggggaaaucucuguacgugaagggagaacccaucauuaauuuuuaugacccucucgucuuccccagcgaugaguuugacgccuccaucucucaggugaacgagaaaauuaaccagagccuggcuuucauccgcaaguccgaugaacugcuccacaaugugaacgccggcaagagcacaaccaauauuaugaucacgaccauuaucaucguuauuaucgucauucugcuuucucugaucgccguggggcuccugcuguacugcaaagcuagauccacaccugugacccuuagcaaggaccagcucucuggaauuaacaauaucgcguucuccaacugaggacuaguggaagcauuuuccuggcugauuaaaagaaauuacucagcuauggucaucuguuccuguuagaaggcuaugcagcauauuauauacuaugcgcauguuaugaaaugcauaauaaaaaauuuuaaaaaaucuaaaagaucuaaaaaaaaaaaaaaaaaaaaaaaaaaaaaaaaaaaaaaaaaaaaaaaaaaaaaaaaaaaaaaaaugcaucccccccccccccccccccccccccccccccaaaggcucuuuucagagccaccagaauu

SEQ ID NO: 5493 - RNA, 2060 nt, Artificial Sequence
  mRNA product Design d-5 comprising derived and/or modified sequence from HRSV(A2)__F_DSCav1_mut5 (opt6)
gggagagggcgcuuggcuugcaaggacccugagcugcggcauugaagcacacccaacccaacucgacugaagucagccucacugaaccggaucugagaaucuucucucucugggcuugccagggcucuccgaaccuagcuagcauccucuucaauuccaacuagaaagcuuaccauggaacuauuaauacuuaaagccaacgcaauaacaacaauucucacugcugucaccuucugcuucgccucaggccaaaacauaacggaagaauuuuaccaaucaacaugcucugcaguauccaaaggcuaccuaucugcucuaagaacagguugguauacaucaguaauaaccauagaacuaucaaacauaaaagaaaauaaaugcaacggaacagacgcaaaaguuaaacucauaaaacaagaacuagacaaauauaaaaacgcaguuaccgaacuacaacuacuuaugcaauccacucccgccacuggaucaggaucagcaauagcaucaggagucgcaguauguaaagucuuacaccucgaaggcgaagucaauaaaaucaaauccgcauuacuauccacaaacaaagcagucguaucccuaagcggaugcggaguaucaguacuaacauuuaaaguacuagaccuaaaaaauuacaucgauaaacaacuauuaccuauauuaaacaaacaauccugcuccauuucaaauaucgaaaccguaauagaauuucaacaaaaaaacaacagauuacuagaaauaacaagagaauuuuccguaaaugcuggcguaacaacaccaguauccacauacaugcucacaaacuccgaacuacuaucacuaauaaaugacaugcccauaacaaacgaucaaaaaaaacuaaugucaaauaauguacaaauaguaagacaacaaagcuacuccaucauguguauaauaaaagaagaaguacuagcauacguaguucaacuaccacuuuacggcguaaucgacaccccuugcuggaaacuacacaccuccccucuaugcaccacaaacacaaaagaagguuccaacauaugccuuaccagaacagacagaggcugguauugcgacaacgcaggaucaguuucauuuuuuccacaagcugaaacaugcaaaguacaaucaaacagagucuucugcgacacaaugaacucaagaacucuacccucagaaguaaaccuauguaacguagacauuuucaaccccaaauacgacugcaaaauuaugacaucaaaaacagacguuucaucaucaguuaucaccucauuaggagcaauaguaagcugcuacggaaaaacaaaaugcaccgccucaaauaaaugcagaggaauaauaaaaacuuucuccaacggaugcgacuacguuucaaacaaagguguagacacuguaucaguaggaaacacacuauauuacguaaauaaacaagaaggaaaaucacuuuaugucaaaggagaaccaauaaucaauuucuacgacccauuaguauucccaucagacgaauuugaugcuucaauaucacaaguaaacgaaaaaauaaaucaaucacucgcauuuauacgaaaaucagacgaacuacuacacaauguaaacgcaggcaaaucaacaacaaacauaaugauaacaacaauaaucauuguaauaauaguaauacuucuaucucuaauagcaguaggauuacuccucuacugcaaagcaagaucaaccccuguaacacuaucaaaagaccaacuuucagguauaaauaauauagcuuuuuccaauuaaggacuaguggaagcauuuuccuggcugauuaaaagaaauuacucagcuauggucaucuguuccuguuagaaggcuaugcagcauauuauauacuaugcgcauguuaugaaaugcauaauaaaaaauuuuaaaaaaucuaaaagaucuaaaaaaaaaaaaaaaaaaaaaaaaaaaaaaaaaaaaaaaaaaaaaaaaaaaaaaaaaaaaaaaaugcaucccccccccccccccccccccccccccccccaaaggcucuuuucagagccaccagaauu

SEQ ID NO: 5494 - RNA, 2060 nt, Artificial Sequence
  mRNA product Design d-5 comprising derived and/or modified sequence from HRSV(A2)__F_DSCav1_mut5 (opt11)
gggagagggcgcuuggcuugcaaggacccugagcugcggcauugaagcacacccaacccaacucgacugaagucagccucacugaaccggaucugagaaucuucucucucugggcuugccagggcucuccgaaccuagcuagcauccucuucaauuccaacuagaaagcuuaccauggagcuccuaauccucaaagccaacgcgaucacuacaauccucacagccgucaccuucugcuucgccuccggccaaaacaucaccgaggaguucuaccaaucaaccugcuccgccguaucaaaaggauaccuaagcgcccuacggaccggcugguacacaucugucaucaccaucgaacuaucaaacaucaaagaaaacaaaugcaacggaaccgacgcaaaagucaaacugauuaaacaagaacuagacaaauacaaaaacgcagucaccgaacugcaauuacucaugcaaagcacaccggccaccggcucaggcagcgccaucgccuccggcgucgccgucugcaaaguucuccaccucgagggcgaagucaacaaaauaaaaucugcccuccucuccaccaacaaagccgucgucucccucagcggcugcggagucuccguccucaccuucaaaguucucgaucucaagaacuauauugacaaacaacuucuacccauacucaacaaacaaagcugcagcauauccaacaucgaaaccgucaucgaguuccaacaaaagaacaaccgccuccucgaaauaacccgcgaguucagcguuaacgccggagucacuaccccugucuccaccuacaugcucaccaacuccgaacuccuaucacuaaucaacgacaugcccauaaccaacgaccagaagaaacucauguccaacaacguccaaauuguccgacaacaaagcuacuccauaaugugcauaauaaaagaggaaguccucgccuacgucguacaacugccccuuuauggcguaaucgacacacccugcuggaaacuccacacgucaccccucugcaccaccaacacaaaagaaggcucgaacaucugccuaacacggacugaccgcggcugguacugcgacaacgccggcuccgucagcuucuucccacaagccgaaaccugcaaaguacaauccaaccgaguauucugcgacaccaugaacuccagaacccuccccucagaggucaaccugugcaacguagacaucuucaaccccaaauacgacugcaaaauaaugaccucaaaaacagacgucuccucuuccguaaucaccagccucggagccaucgucagcugcuacggcaaaaccaaaugcaccgccucaaacaaaugccgcggcaucaucaaaacauucucaaacggcugcgacuacgucuccaacaaaggcgucgacacaguaagcguaggcaacacacuguacuacgucaacaaacaagagggaaaaucacucuacgucaaaggagaacccauaaucaacuucuacgacccccucguuuuccccagcgacgaguucgacgccagcauaucccaagucaacgagaaaauuaaccaaucccuagcauucauccgaaaaucugacgaacugcuccacaacgucaacgcgggaaaaucaacaaccaacauaaugauaaccacaaucauaauagucaucaucguaauccuccucagccuaaucgcugucggccuccuccucuacugcaaagcccguuccaccccagucacacuuuccaaggaccaacuaagcggaauaaacaacaucgcguucucaaacuaaggacuaguggaagcauuuuccuggcugauuaaaagaaauuacucagcuauggucaucuguuccuguuagaaggcuaugcagcauauuauauacuaugcgcauguuaugaaaugcauaauaaaaaauuuuaaaaaaucuaaaagaucuaaaaaaaaaaaaaaaaaaaaaaaaaaaaaaaaaaaaaaaaaaaaaaaaaaaaaaaaaaaaaaaaugcaucccccccccccccccccccccccccccccccaaaggcucuuuucagagccaccagaauu

SEQ ID NO: 5495 - RNA, 1940 nt, Artificial Sequence
  mRNA product Design e-1 comprising derived and/or modified sequence from HRSV(A2)__F_DSCav1_mut5 (opt1)
gggagaauauaagcguuggcggagcgucgguuguagcacucugcgcgcccgcucuucugcugcuguuugucuacuuccuccugcuuccccgccgccgccgccgccaucaagcuuaccauggagcugcucauccugaaggccaacgccaucaccaccauccugacggcggugaccuucugcuucgccagcggccagaacaucaccgaggaguucuaccaguccacgugcagcgccgucuccaagggguaccucagcgcccugcggaccggcugguacaccuccgugaucaccaucgagcugagcaacaucaaggagaacaagugcaacgggaccgacgccaaggugaagcucaucaagcaggagcuggacaaguacaagaacgcggucacggagcugcagcuccugaugcaguccaccccggcaaccggcuccggcuccgccaucgcgagcggcgucgccgugugcaaggugcugcaccucgagggggaggucaacaagaucaagagcgcccugcuguccaccaacaaggccguggugagccucuccggcugcggcgucagcgugcugaccuucaaggugcuggaccucaagaacuacaucgacaagcagcugcugcccauccugaacaagcagagcugcuccaucagcaacaucgagacggugaucgaguuccagcagaagaacaaccggcuccuggagaucacccgcgaguucagcgugaacgccggggucaccacccccguguccacguacaugcugaccaacagcgagcuccugucccugaucaacgacaugccgaucaccaacgaccagaagaagcucaugagcaacaacgugcagaucguccggcagcaguccuacagcaucaugugcaucaucaaggaggaggugcuggcguacgugguccagcugccccucuacggcgugaucgacacccccugcuggaagcugcacacgagcccccugugcaccaccaacaccaaggagggguccaacaucugccucacgcgcaccgaccggggcugguacugcgacaacgccggcagcgucuccuucuucccgcaggccgagaccugcaaggugcagagcaaccgcguguucugcgacaccaugaacucccggacgcugcccagcgagguaaaccucugcaacgucgacaucuucaaccccaaguacgacugcaagaucaugaccuccaagaccgacgugagcuccagcgugaucaccucccugggggccaucgucagcugcuacggcaagacgaagugcaccgccagcaacaagugccgggggaucaucaagaccuucuccaacggcugcgacuacgugagcaacaagggcguggacaccguguccgucgggaacacccuguacuacgugaacaagcaggagggcaagagccucuacgugaagggggagcccaucaucaacuucuacgacccgcuggucuuccccuccgacgaguucgacgcgagcaucucccaggugaacgagaagaucaaccagagccuggccuucauccgcaaguccgacgagcugcuccacaacgugaacgccggcaagagcacgaccaacaucaugaucaccaccaucaucaucgucaucaucgugauccugcugucccucaucgccguggggcugcugcucuacugcaaggcccggagcacgcccgucacccuguccaaggaccagcugagcggcaucaacaacaucgcguucuccaacugaggacuaguguccaccugucccuccugggcugcuggauugucucguuuuccugccaaauaaacaggaucagcgcuuuacagaucuaaaaaaaaaaaaaaaaaaaaaaaaaaaaaaaaaaaaaaaaaaaaaaaaaaaaaaaaaaaaaaaaugcaucccccccccccccccccccccccccccccccaaaggcucuuuucagagccaccagaauu

SEQ ID NO: 5496 - RNA, 1940 nt, Artificial Sequence
  mRNA product Design e-1 comprising derived and/or modified sequence from HRSV(A2)__F_DSCav1_mut5 (opt1)
gggagaauauaagcguuggcggagcgucgguuguagcacucugcgcgcccgcucuucugcugcuguuugucuacuuccuccugcuuccccgccgccgccgccgccaucaagcuuaccauggagcugcucauccugaaggccaacgccaucaccaccauccugacggcggugaccuucugcuucgccagcggccagaacaucaccgaggaguucuaccaguccacgugcagcgccgucuccaagggguaccucagcgcccugcgcaccggcugguacaccuccgugaucaccaucgagcugagcaacaucaaggagaacaagugcaacgggaccgacgccaaggugaagcucaucaagcaggagcuggacaaguacaagaacgcggucacggagcugcagcuccugaugcaguccacccccgccaccggcagcggguccgccaucgccagcggcguggcggugugcaagguccugcaccucgagggcgaggugaacaagaucaaguccgcccugcugagcaccaacaaggccguggucucccucagcgggugcggcguguccgugcugacguucaagguccuggaccucaagaacuacaucgacaagcagcugcugccgauccucaacaagcagagcugcuccaucagcaacaucgagaccgugaucgaguuccagcagaagaacaaccggcugcuggagaucacccgcgaguucuccgugaacgccggggucaccacgcccgugagcaccuacaugcucaccaacagcgagcugcugucccucaucaacgacaugcccaucaccaacgaccagaagaagcugaugagcaacaacgugcagaucguccggcagcaguccuacagcaucaugugcaucaucaaggaggaggugcuggccuacgugguccagcucccccuguacggcgugaucgacacgccgugcuggaagcugcacaccagcccccucugcaccaccaacacgaaggagggguccaacaucugccugacccgcaccgaccggggcugguacugcgacaacgcgggcuccgugagcuucuucccccaggccgagaccugcaagguccaguccaaccgcguguucugcgacacgaugaacagccggacccuccccuccgaggucaaccugugcaacguggacaucuucaacccgaaguacgacugcaagaucaugaccagcaagaccgacguguccagcuccgucaucacgagccugggggccaucguguccugcuacggcaagaccaagugcaccgccagcaacaagugccgggggaucaucaagaccuucuccaacggcugcgacuacgugagcaacaagggcgucgacacggugagcguggggaacacccucuacuacgucaacaagcaggagggcaagucccuguacgugaagggggagcccaucaucaacuucuacgacccccugguguuccccagcgacgaguucgacgccuccaucagccaggucaacgagaagaucaaccagucccucgcguucauccgcaagagcgacgagcugcugcacaacgugaacgccggcaaguccaccaccaacaucaugaucaccacgaucaucaucgugaucaucgucauccuccugagccugaucgccguggggcuccugcuguacugcaaggcccgguccaccccggugacccugagcaaggaccagcucuccggcaucaacaacaucgccuucagcaacugaggacuaguguccaccugucccuccugggcugcuggauugucucguuuuccugccaaauaaacaggaucagcgcuuuacagaucuaaaaaaaaaaaaaaaaaaaaaaaaaaaaaaaaaaaaaaaaaaaaaaaaaaaaaaaaaaaaaaaaugcaucccccccccccccccccccccccccccccccaaaggcucuuuucagagccaccagaauu

SEQ ID NO: 5497 - RNA, 1940 nt, Artificial Sequence
  mRNA product Design e-1 comprising derived and/or modified sequence from HRSV(A2)__F_DSCav1_mut5 (opt2)
gggagaauauaagcguuggcggagcgucgguuguagcacucugcgcgcccgcucuucugcugcuguuugucuacuuccuccugcuuccccgccgccgccgccgccaucaagcuuaccauggagcuccucauccucaaggccaacgccaucaccaccauccucaccgccgucaccuucugcuucgccuccggccagaacaucaccgaggaguucuaccaguccaccugcuccgccgucuccaagggcuaccucuccgcccuccgcaccggcugguacaccuccgucaucaccaucgagcucuccaacaucaaggagaacaagugcaacggcaccgacgccaaggucaagcucaucaagcaggagcucgacaaguacaagaacgccgucaccgagcuccagcuccucaugcaguccacccccgccaccggcuccggcuccgccaucgccuccggcgucgccgucugcaagguccuccaccucgagggcgaggucaacaagaucaaguccgcccuccucuccaccaacaaggccgucgucucccucuccggcugcggcgucuccguccucaccuucaagguccucgaccucaagaacuacaucgacaagcagcuccuccccauccucaacaagcaguccugcuccaucuccaacaucgagaccgucaucgaguuccagcagaagaacaaccgccuccucgagaucacccgcgaguucuccgucaacgccggcgucaccacccccgucuccaccuacaugcucaccaacuccgagcuccucucccucaucaacgacaugcccaucaccaacgaccagaagaagcucauguccaacaacguccagaucguccgccagcaguccuacuccaucaugugcaucaucaaggaggagguccucgccuacgucguccagcucccccucuacggcgucaucgacacccccugcuggaagcuccacaccuccccccucugcaccaccaacaccaaggagggcuccaacaucugccucacccgcaccgaccgcggcugguacugcgacaacgccggcuccgucuccuucuucccccaggccgagaccugcaagguccaguccaaccgcgucuucugcgacaccaugaacucccgcacccuccccuccgaggucaaccucugcaacgucgacaucuucaaccccaaguacgacugcaagaucaugaccuccaagaccgacgucuccuccuccgucaucaccucccucggcgccaucgucuccugcuacggcaagaccaagugcaccgccuccaacaagugccgcggcaucaucaagaccuucuccaacggcugcgacuacgucuccaacaagggcgucgacaccgucuccgucggcaacacccucuacuacgucaacaagcaggagggcaagucccucuacgucaagggcgagcccaucaucaacuucuacgacccccucgucuuccccuccgacgaguucgacgccuccaucucccaggucaacgagaagaucaaccagucccucgccuucauccgcaaguccgacgagcuccuccacaacgucaacgccggcaaguccaccaccaacaucaugaucaccaccaucaucaucgucaucaucgucauccuccucucccucaucgccgucggccuccuccucuacugcaaggcccgcuccacccccgucacccucuccaaggaccagcucuccggcaucaacaacaucgccuucuccaacugaggacuaguguccaccugucccuccugggcugcuggauugucucguuuuccugccaaauaaacaggaucagcgcuuuacagaucuaaaaaaaaaaaaaaaaaaaaaaaaaaaaaaaaaaaaaaaaaaaaaaaaaaaaaaaaaaaaaaaaugcaucccccccccccccccccccccccccccccccaaaggcucuuuucagagccaccagaauu

SEQ ID NO: 5498 - RNA, 1940 nt, Artificial Sequence
  mRNA product Design e-1 comprising derived and/or modified sequence from HRSV(A2)__F_DSCav1_mut5 (opt3)
gggagaauauaagcguuggcggagcgucgguuguagcacucugcgcgcccgcucuucugcugcuguuugucuacuuccuccugcuuccccgccgccgccgccgccaucaagcuuaccauggagcugcucauccuuaaggccaacgcuauuaccacaauacugacugcagugacguucugcuuugccagcggccagaauaucaccgaagaguucuaccaauccacauguucugcggucucaaaaggguauuugagugcuuuaagaacuggaugguacaccagcguuauuacaaucgaacuguccaacauuaaggagaauaaaugcaacgguaccgacgccaaggugaaacuaaucaagcaggaacucgauaaguauaaaaaugcaguaacugagcugcagcuucugaugcagucuacacccgccaccggcucggggucagcuauagcaagcggaguggccgucuguaagguguugcaccucgagggcgaaguuaacaaaaucaagagugcucugcuguccacgaauaaagccguggucucucucagcgguugcgggguguccguauuaacuuuuaagguucuggaccuuaagaacuacauugauaaacaauugcugccuauccuaaauaagcagucauguaguauuagcaacaucgagaccgugauagaguuccagcagaaaaauaacaggcuccuggaaauuacacgggaguuuucugucaaugcgggagugacuaccccaguguccacauauaugcuuaccaacucagaacuguugagccucaucaaugacaugccgauuacgaacgaucaaaagaaacugaugaguaacaauguccagaucguucgccagcagucuuacuccaucaugugcauuauaaaggaggaaguguuagcauauguagugcaacugccccucuacggcgucaucgacacuccuuguuggaaacuucauacaagcccacugugcaccacuaacacaaaggagggcucgaauauuuguuugacccgaacggaucgugggugguacugcgacaacgccggaucuguguccuucuuuccccaggcugaaaccuguaagguucagucaaauagaguguucugcgauacaaugaacaguagaacucugccuagcgaggucaaucucugcaacguggacaucuuuaauccaaaauaugauuguaagauaaugaccuccaaaacagacguaucuagcucaguuauuaccagucugggugccaucguguccugcuacggcaagacuaaauguacagcaagcaacaagugcagggggaucauuaagaccuucucuaauggaugugauuaugucucaaacaaaggcguggacacugucaguguggguaauacgcuuuacuauguuaacaagcaagaggggaaaagccuguacgugaagggagaacccaucauuaauuuuuaugacccuuugguauucccauccgaugaguuugacgcuucuauaucgcaggucaacgagaaaaucaaccagagccucgccuucauucggaaguccgaugaacuguuacacaaugugaacgcgggcaagucaacaaccaauaucaugaucacuaccauuauaaucguuauuaucgugauucugcuaagucucaucgccgucggccugcuuuuguacugcaaagcacgcucuacaccggugacccugagcaaggaccagcucuccgggauaaacaauaucgcuuucucaaacugaggacuaguguccaccugucccuccugggcugcuggauugucucguuuuccugccaaauaaacaggaucagcgcuuuacagaucuaaaaaaaaaaaaaaaaaaaaaaaaaaaaaaaaaaaaaaaaaaaaaaaaaaaaaaaaaaaaaaaaugcaucccccccccccccccccccccccccccccccaaaggcucuuuucagagccaccagaauu

SEQ ID NO: 5499 - RNA, 1940 nt, Artificial Sequence
  mRNA product Design e-1 comprising derived and/or modified sequence from HRSV(A2)__F_DSCav1_mut5 (opt4)
gggagaauauaagcguuggcggagcgucgguuguagcacucugcgcgcccgcucuucugcugcuguuugucuacuuccuccugcuuccccgccgccgccgccgccaucaagcuuaccauggagcugcugauccugaaggccaacgccaucaccaccauccugaccgccgugaccuucugcuucgccagcggccagaacaucaccgaggaguucuaccagagcaccugcagcgccgugagcaagggcuaccugagcgcccugagaaccggcugguacaccagcgugaucaccaucgagcugagcaacaucaaggagaacaagugcaacggcaccgacgccaaggugaagcugaucaagcaggagcuggacaaguacaagaacgccgugaccgagcugcagcugcugaugcagagcacccccgccaccggcagcggcagcgccaucgccagcggcguggccgugugcaaggugcugcaccuggagggcgaggugaacaagaucaagagcgcccugcugagcaccaacaaggccguggugagccugagcggcugcggcgugagcgugcugaccuucaaggugcuggaccugaagaacuacaucgacaagcagcugcugcccauccugaacaagcagagcugcagcaucagcaacaucgagaccgugaucgaguuccagcagaagaacaacagacugcuggagaucaccagagaguucagcgugaacgccggcgugaccacccccgugagcaccuacaugcugaccaacagcgagcugcugagccugaucaacgacaugcccaucaccaacgaccagaagaagcugaugagcaacaacgugcagaucgugagacagcagagcuacagcaucaugugcaucaucaaggaggaggugcuggccuacguggugcagcugccccuguacggcgugaucgacacccccugcuggaagcugcacaccagcccccugugcaccaccaacaccaaggagggcagcaacaucugccugaccagaaccgacagaggcugguacugcgacaacgccggcagcgugagcuucuucccccaggccgagaccugcaaggugcagagcaacagaguguucugcgacaccaugaacagcagaacccugcccagcgaggugaaccugugcaacguggacaucuucaaccccaaguacgacugcaagaucaugaccagcaagaccgacgugagcagcagcgugaucaccagccugggcgccaucgugagcugcuacggcaagaccaagugcaccgccagcaacaagugcagaggcaucaucaagaccuucagcaacggcugcgacuacgugagcaacaagggcguggacaccgugagcgugggcaacacccuguacuacgugaacaagcaggagggcaagagccuguacgugaagggcgagcccaucaucaacuucuacgacccccugguguuccccagcgacgaguucgacgccagcaucagccaggugaacgagaagaucaaccagagccuggccuucaucagaaagagcgacgagcugcugcacaacgugaacgccggcaagagcaccaccaacaucaugaucaccaccaucaucaucgugaucaucgugauccugcugagccugaucgccgugggccugcugcuguacugcaaggccagaagcacccccgugacccugagcaaggaccagcugagcggcaucaacaacaucgccuucagcaacugaggacuaguguccaccugucccuccugggcugcuggauugucucguuuuccugccaaauaaacaggaucagcgcuuuacagaucuaaaaaaaaaaaaaaaaaaaaaaaaaaaaaaaaaaaaaaaaaaaaaaaaaaaaaaaaaaaaaaaaugcaucccccccccccccccccccccccccccccccaaaggcucuuuucagagccaccagaauu

SEQ ID NO: 5500 - RNA, 1940 nt, Artificial Sequence
  mRNA product Design e-1 comprising derived and/or modified sequence from HRSV(A2)__F_DSCav1_mut5 (opt5)
gggagaauauaagcguuggcggagcgucgguuguagcacucugcgcgcccgcucuucugcugcuguuugucuacuuccuccugcuuccccgccgccgccgccgccaucaagcuuaccauggagcugcucauccugaaggccaacgcuauuaccacaauccuuacggccgugaccuucugcuuugcgagcggccagaauauuacagaagaguucuaccaauccaccuguucugcugucagcaaaggguaucuguccgcccucagaacaggaugguacaccucuguuaucacaauugaacugagcaacaucaaggagaauaaaugcaacggcaccgacgccaaggugaaacuuaucaagcaggaacuggauaaguauaaaaaugcugugacggagcuccagcugcugaugcaguccacccccgccacagggucuggaagcgcuauugccuccggcgucgcgguguguaagguucuccaccuggagggggaagugaacaaaaucaagagcgcccuucugucuaccaauaaagcugucgugucccucagcggaugcggcguuucugugcugacauuuaagguccuugaccugaagaacuacauugauaaacaacuccugccuauccugaauaagcaguccuguagcauuucuaacaucgagaccgugauugaguuccagcagaaaaauaaccggcuccuggaaaucacgcgcgaguuuuccgugaaugccggcgucacaaccccgguuagcacauauaugcuuaccaacuccgaacugcucucucugaucaaugacaugcccauuaccaacgaucaaaagaaacuuaugagcaacaaugugcagaucgugagacagcaguccuacagcauuaugugcaucauuaaggaggaaguccuggcuuaugugguucaacucccucuguacggggugaucgacacacccuguuggaaacugcauacgucuccucucugcaccacaaacaccaaggagggauccaauaucugucugacacggaccgaucgcggcugguacugcgacaacgccgggagcgucucuuucuuuccccaggcggaaacguguaaggugcagagcaauagaguuuucugcgauacaaugaacuccagaacccugccuucugaggugaaucucugcaacgucgacauuuuuaauccgaaauaugauuguaagaucaugaccagcaaaacagacguguccagcucugucauuaccucccugggagccaucgugagcugcuacggcaagacaaaauguacggcuucuaacaagugccgggggauuaucaagaccuucuccaauggaugugauuauguuagcaacaaaggcguggacacagucuccgugggcaauacccuuuacuauguuaacaagcaagaggggaaaucucuguacgugaagggagaacccaucauuaauuuuuaugacccucucgucuuccccagcgaugaguuugacgccuccaucucucaggugaacgagaaaauuaaccagagccuggcuuucauccgcaaguccgaugaacugcuccacaaugugaacgccggcaagagcacaaccaauauuaugaucacgaccauuaucaucguuauuaucgucauucugcuuucucugaucgccguggggcuccugcuguacugcaaagcuagauccacaccugugacccuuagcaaggaccagcucucuggaauuaacaauaucgcguucuccaacugaggacuaguguccaccugucccuccugggcugcuggauugucucguuuuccugccaaauaaacaggaucagcgcuuuacagaucuaaaaaaaaaaaaaaaaaaaaaaaaaaaaaaaaaaaaaaaaaaaaaaaaaaaaaaaaaaaaaaaaugcaucccccccccccccccccccccccccccccccaaaggcucuuuucagagccaccagaauu

SEQ ID NO: 5501 - RNA, 1940 nt, Artificial Sequence
  mRNA product Design e-1 comprising derived and/or modified sequence from HRSV(A2)__F_DSCav1_mut5 (opt6)
gggagaauauaagcguuggcggagcgucgguuguagcacucugcgcgcccgcucuucugcugcuguuugucuacuuccuccugcuuccccgccgccgccgccgccaucaagcuuaccauggaacuauuaauacuuaaagccaacgcaauaacaacaauucucacugcugucaccuucugcuucgccucaggccaaaacauaacggaagaauuuuaccaaucaacaugcucugcaguauccaaaggcuaccuaucugcucuaagaacagguugguauacaucaguaauaaccauagaacuaucaaacauaaaagaaaauaaaugcaacggaacagacgcaaaaguuaaacucauaaaacaagaacuagacaaauauaaaaacgcaguuaccgaacuacaacuacuuaugcaauccacucccgccacuggaucaggaucagcaauagcaucaggagucgcaguauguaaagucuuacaccucgaaggcgaagucaauaaaaucaaauccgcauuacuauccacaaacaaagcagucguaucccuaagcggaugcggaguaucaguacuaacauuuaaaguacuagaccuaaaaaauuacaucgauaaacaacuauuaccuauauuaaacaaacaauccugcuccauuucaaauaucgaaaccguaauagaauuucaacaaaaaaacaacagauuacuagaaauaacaagagaauuuuccguaaaugcuggcguaacaacaccaguauccacauacaugcucacaaacuccgaacuacuaucacuaauaaaugacaugcccauaacaaacgaucaaaaaaaacuaaugucaaauaauguacaaauaguaagacaacaaagcuacuccaucauguguauaauaaaagaagaaguacuagcauacguaguucaacuaccacuuuacggcguaaucgacaccccuugcuggaaacuacacaccuccccucuaugcaccacaaacacaaaagaagguuccaacauaugccuuaccagaacagacagaggcugguauugcgacaacgcaggaucaguuucauuuuuuccacaagcugaaacaugcaaaguacaaucaaacagagucuucugcgacacaaugaacucaagaacucuacccucagaaguaaaccuauguaacguagacauuuucaaccccaaauacgacugcaaaauuaugacaucaaaaacagacguuucaucaucaguuaucaccucauuaggagcaauaguaagcugcuacggaaaaacaaaaugcaccgccucaaauaaaugcagaggaauaauaaaaacuuucuccaacggaugcgacuacguuucaaacaaagguguagacacuguaucaguaggaaacacacuauauuacguaaauaaacaagaaggaaaaucacuuuaugucaaaggagaaccaauaaucaauuucuacgacccauuaguauucccaucagacgaauuugaugcuucaauaucacaaguaaacgaaaaaauaaaucaaucacucgcauuuauacgaaaaucagacgaacuacuacacaauguaaacgcaggcaaaucaacaacaaacauaaugauaacaacaauaaucauuguaauaauaguaauacuucuaucucuaauagcaguaggauuacuccucuacugcaaagcaagaucaaccccuguaacacuaucaaaagaccaacuuucagguauaaauaauauagcuuuuuccaauuaaggacuaguguccaccugucccuccugggcugcuggauugucucguuuuccugccaaauaaacaggaucagcgcuuuacagaucuaaaaaaaaaaaaaaaaaaaaaaaaaaaaaaaaaaaaaaaaaaaaaaaaaaaaaaaaaaaaaaaaugcaucccccccccccccccccccccccccccccccaaaggcucuuuucagagccaccagaauu

SEQ ID NO: 5502 - RNA, 1940 nt, Artificial Sequence
  mRNA product Design e-1 comprising derived and/or modified sequence from HRSV(A2)__F_DSCav1_mut5 (opt11)
gggagaauauaagcguuggcggagcgucgguuguagcacucugcgcgcccgcucuucugcugcuguuugucuacuuccuccugcuuccccgccgccgccgccgccaucaagcuuaccauggagcuccuaauccucaaagccaacgcgaucacuacaauccucacagccgucaccuucugcuucgccuccggccaaaacaucaccgaggaguucuaccaaucaaccugcuccgccguaucaaaaggauaccuaagcgcccuacggaccggcugguacacaucugucaucaccaucgaacuaucaaacaucaaagaaaacaaaugcaacggaaccgacgcaaaagucaaacugauuaaacaagaacuagacaaauacaaaaacgcagucaccgaacugcaauuacucaugcaaagcacaccggccaccggcucaggcagcgccaucgccuccggcgucgccgucugcaaaguucuccaccucgagggcgaagucaacaaaauaaaaucugcccuccucuccaccaacaaagccgucgucucccucagcggcugcggagucuccguccucaccuucaaaguucucgaucucaagaacuauauugacaaacaacuucuacccauacucaacaaacaaagcugcagcauauccaacaucgaaaccgucaucgaguuccaacaaaagaacaaccgccuccucgaaauaacccgcgaguucagcguuaacgccggagucacuaccccugucuccaccuacaugcucaccaacuccgaacuccuaucacuaaucaacgacaugcccauaaccaacgaccagaagaaacucauguccaacaacguccaaauuguccgacaacaaagcuacuccauaaugugcauaauaaaagaggaaguccucgccuacgucguacaacugccccuuuauggcguaaucgacacacccugcuggaaacuccacacgucaccccucugcaccaccaacacaaaagaaggcucgaacaucugccuaacacggacugaccgcggcugguacugcgacaacgccggcuccgucagcuucuucccacaagccgaaaccugcaaaguacaauccaaccgaguauucugcgacaccaugaacuccagaacccuccccucagaggucaaccugugcaacguagacaucuucaaccccaaauacgacugcaaaauaaugaccucaaaaacagacgucuccucuuccguaaucaccagccucggagccaucgucagcugcuacggcaaaaccaaaugcaccgccucaaacaaaugccgcggcaucaucaaaacauucucaaacggcugcgacuacgucuccaacaaaggcgucgacacaguaagcguaggcaacacacuguacuacgucaacaaacaagagggaaaaucacucuacgucaaaggagaacccauaaucaacuucuacgacccccucguuuuccccagcgacgaguucgacgccagcauaucccaagucaacgagaaaauuaaccaaucccuagcauucauccgaaaaucugacgaacugcuccacaacgucaacgcgggaaaaucaacaaccaacauaaugauaaccacaaucauaauagucaucaucguaauccuccucagccuaaucgcugucggccuccuccucuacugcaaagcccguuccaccccagucacacuuuccaaggaccaacuaagcggaauaaacaacaucgcguucucaaacuaaggacuaguguccaccugucccuccugggcugcuggauugucucguuuuccugccaaauaaacaggaucagcgcuuuacagaucuaaaaaaaaaaaaaaaaaaaaaaaaaaaaaaaaaaaaaaaaaaaaaaaaaaaaaaaaaaaaaaaaugcaucccccccccccccccccccccccccccccccaaaggcucuuuucagagccaccagaauu

SEQ ID NO: 5503 - RNA, 1922 nt, Artificial Sequence
  mRNA product Design e-2 comprising derived and/or modified sequence from HRSV(A2)__F_DSCav1_mut5 (opt1)
gggagacccgugacccggaaguuguacggcuacgcgacuuucccucccacaaacccucgcgcccuuccuuuccuacuugggcccggcagaaagcuuaccauggagcugcucauccugaaggccaacgccaucaccaccauccugacggcggugaccuucugcuucgccagcggccagaacaucaccgaggaguucuaccaguccacgugcagcgccgucuccaagggguaccucagcgcccugcggaccggcugguacaccuccgugaucaccaucgagcugagcaacaucaaggagaacaagugcaacgggaccgacgccaaggugaagcucaucaagcaggagcuggacaaguacaagaacgcggucacggagcugcagcuccugaugcaguccaccccggcaaccggcuccggcuccgccaucgcgagcggcgucgccgugugcaaggugcugcaccucgagggggaggucaacaagaucaagagcgcccugcuguccaccaacaaggccguggugagccucuccggcugcggcgucagcgugcugaccuucaaggugcuggaccucaagaacuacaucgacaagcagcugcugcccauccugaacaagcagagcugcuccaucagcaacaucgagacggugaucgaguuccagcagaagaacaaccggcuccuggagaucacccgcgaguucagcgugaacgccggggucaccacccccguguccacguacaugcugaccaacagcgagcuccugucccugaucaacgacaugccgaucaccaacgaccagaagaagcucaugagcaacaacgugcagaucguccggcagcaguccuacagcaucaugugcaucaucaaggaggaggugcuggcguacgugguccagcugccccucuacggcgugaucgacacccccugcuggaagcugcacacgagcccccugugcaccaccaacaccaaggagggguccaacaucugccucacgcgcaccgaccggggcugguacugcgacaacgccggcagcgucuccuucuucccgcaggccgagaccugcaaggugcagagcaaccgcguguucugcgacaccaugaacucccggacgcugcccagcgagguaaaccucugcaacgucgacaucuucaaccccaaguacgacugcaagaucaugaccuccaagaccgacgugagcuccagcgugaucaccucccugggggccaucgucagcugcuacggcaagacgaagugcaccgccagcaacaagugccgggggaucaucaagaccuucuccaacggcugcgacuacgugagcaacaagggcguggacaccguguccgucgggaacacccuguacuacgugaacaagcaggagggcaagagccucuacgugaagggggagcccaucaucaacuucuacgacccgcuggucuuccccuccgacgaguucgacgcgagcaucucccaggugaacgagaagaucaaccagagccuggccuucauccgcaaguccgacgagcugcuccacaacgugaacgccggcaagagcacgaccaacaucaugaucaccaccaucaucaucgucaucaucgugauccugcugucccucaucgccguggggcugcugcucuacugcaaggcccggagcacgcccgucacccuguccaaggaccagcugagcggcaucaacaacaucgcguucuccaacugaggacuaguguccaccugucccuccugggcugcuggauugucucguuuuccugccaaauaaacaggaucagcgcuuuacagaucuaaaaaaaaaaaaaaaaaaaaaaaaaaaaaaaaaaaaaaaaaaaaaaaaaaaaaaaaaaaaaaaaugcaucccccccccccccccccccccccccccccccaaaggcucuuuucagagccaccagaauu

SEQ ID NO: 5504 - RNA, 1922 nt, Artificial Sequence
  mRNA product Design e-2 comprising derived and/or modified sequence from HRSV(A2)__F_DSCav1_mut5 (opt1)
gggagacccgugacccggaaguuguacggcuacgcgacuuucccucccacaaacccucgcgcccuuccuuuccuacuugggcccggcagaaagcuuaccauggagcugcucauccugaaggccaacgccaucaccaccauccugacggcggugaccuucugcuucgccagcggccagaacaucaccgaggaguucuaccaguccacgugcagcgccgucuccaagggguaccucagcgcccugcgcaccggcugguacaccuccgugaucaccaucgagcugagcaacaucaaggagaacaagugcaacgggaccgacgccaaggugaagcucaucaagcaggagcuggacaaguacaagaacgcggucacggagcugcagcuccugaugcaguccacccccgccaccggcagcggguccgccaucgccagcggcguggcggugugcaagguccugcaccucgagggcgaggugaacaagaucaaguccgcccugcugagcaccaacaaggccguggucucccucagcgggugcggcguguccgugcugacguucaagguccuggaccucaagaacuacaucgacaagcagcugcugccgauccucaacaagcagagcugcuccaucagcaacaucgagaccgugaucgaguuccagcagaagaacaaccggcugcuggagaucacccgcgaguucuccgugaacgccggggucaccacgcccgugagcaccuacaugcucaccaacagcgagcugcugucccucaucaacgacaugcccaucaccaacgaccagaagaagcugaugagcaacaacgugcagaucguccggcagcaguccuacagcaucaugugcaucaucaaggaggaggugcuggccuacgugguccagcucccccuguacggcgugaucgacacgccgugcuggaagcugcacaccagcccccucugcaccaccaacacgaaggagggguccaacaucugccugacccgcaccgaccggggcugguacugcgacaacgcgggcuccgugagcuucuucccccaggccgagaccugcaagguccaguccaaccgcguguucugcgacacgaugaacagccggacccuccccuccgaggucaaccugugcaacguggacaucuucaacccgaaguacgacugcaagaucaugaccagcaagaccgacguguccagcuccgucaucacgagccugggggccaucguguccugcuacggcaagaccaagugcaccgccagcaacaagugccgggggaucaucaagaccuucuccaacggcugcgacuacgugagcaacaagggcgucgacacggugagcguggggaacacccucuacuacgucaacaagcaggagggcaagucccuguacgugaagggggagcccaucaucaacuucuacgacccccugguguuccccagcgacgaguucgacgccuccaucagccaggucaacgagaagaucaaccagucccucgcguucauccgcaagagcgacgagcugcugcacaacgugaacgccggcaaguccaccaccaacaucaugaucaccacgaucaucaucgugaucaucgucauccuccugagccugaucgccguggggcuccugcuguacugcaaggcccgguccaccccggugacccugagcaaggaccagcucuccggcaucaacaacaucgccuucagcaacugaggacuaguguccaccugucccuccugggcugcuggauugucucguuuuccugccaaauaaacaggaucagcgcuuuacagaucuaaaaaaaaaaaaaaaaaaaaaaaaaaaaaaaaaaaaaaaaaaaaaaaaaaaaaaaaaaaaaaaaugcaucccccccccccccccccccccccccccccccaaaggcucuuuucagagccaccagaauu

SEQ ID NO: 5505 - RNA, 1922 nt, Artificial Sequence
  mRNA product Design e-2 comprising derived and/or modified sequence from HRSV(A2)__F_DSCav1_mut5 (opt2)
gggagacccgugacccggaaguuguacggcuacgcgacuuucccucccacaaacccucgcgcccuuccuuuccuacuugggcccggcagaaagcuuaccauggagcuccucauccucaaggccaacgccaucaccaccauccucaccgccgucaccuucugcuucgccuccggccagaacaucaccgaggaguucuaccaguccaccugcuccgccgucuccaagggcuaccucuccgcccuccgcaccggcugguacaccuccgucaucaccaucgagcucuccaacaucaaggagaacaagugcaacggcaccgacgccaaggucaagcucaucaagcaggagcucgacaaguacaagaacgccgucaccgagcuccagcuccucaugcaguccacccccgccaccggcuccggcuccgccaucgccuccggcgucgccgucugcaagguccuccaccucgagggcgaggucaacaagaucaaguccgcccuccucuccaccaacaaggccgucgucucccucuccggcugcggcgucuccguccucaccuucaagguccucgaccucaagaacuacaucgacaagcagcuccuccccauccucaacaagcaguccugcuccaucuccaacaucgagaccgucaucgaguuccagcagaagaacaaccgccuccucgagaucacccgcgaguucuccgucaacgccggcgucaccacccccgucuccaccuacaugcucaccaacuccgagcuccucucccucaucaacgacaugcccaucaccaacgaccagaagaagcucauguccaacaacguccagaucguccgccagcaguccuacuccaucaugugcaucaucaaggaggagguccucgccuacgucguccagcucccccucuacggcgucaucgacacccccugcuggaagcuccacaccuccccccucugcaccaccaacaccaaggagggcuccaacaucugccucacccgcaccgaccgcggcugguacugcgacaacgccggcuccgucuccuucuucccccaggccgagaccugcaagguccaguccaaccgcgucuucugcgacaccaugaacucccgcacccuccccuccgaggucaaccucugcaacgucgacaucuucaaccccaaguacgacugcaagaucaugaccuccaagaccgacgucuccuccuccgucaucaccucccucggcgccaucgucuccugcuacggcaagaccaagugcaccgccuccaacaagugccgcggcaucaucaagaccuucuccaacggcugcgacuacgucuccaacaagggcgucgacaccgucuccgucggcaacacccucuacuacgucaacaagcaggagggcaagucccucuacgucaagggcgagcccaucaucaacuucuacgacccccucgucuuccccuccgacgaguucgacgccuccaucucccaggucaacgagaagaucaaccagucccucgccuucauccgcaaguccgacgagcuccuccacaacgucaacgccggcaaguccaccaccaacaucaugaucaccaccaucaucaucgucaucaucgucauccuccucucccucaucgccgucggccuccuccucuacugcaaggcccgcuccacccccgucacccucuccaaggaccagcucuccggcaucaacaacaucgccuucuccaacugaggacuaguguccaccugucccuccugggcugcuggauugucucguuuuccugccaaauaaacaggaucagcgcuuuacagaucuaaaaaaaaaaaaaaaaaaaaaaaaaaaaaaaaaaaaaaaaaaaaaaaaaaaaaaaaaaaaaaaaugcaucccccccccccccccccccccccccccccccaaaggcucuuuucagagccaccagaauu

SEQ ID NO: 5506 - RNA, 1922 nt, Artificial Sequence
  mRNA product Design e-2 comprising derived and/or modified sequence from HRSV(A2)__F_DSCav1_mut5 (opt3)
gggagacccgugacccggaaguuguacggcuacgcgacuuucccucccacaaacccucgcgcccuuccuuuccuacuugggcccggcagaaagcuuaccauggagcugcucauccuuaaggccaacgcuauuaccacaauacugacugcagugacguucugcuuugccagcggccagaauaucaccgaagaguucuaccaauccacauguucugcggucucaaaaggguauuugagugcuuuaagaacuggaugguacaccagcguuauuacaaucgaacuguccaacauuaaggagaauaaaugcaacgguaccgacgccaaggugaaacuaaucaagcaggaacucgauaaguauaaaaaugcaguaacugagcugcagcuucugaugcagucuacacccgccaccggcucggggucagcuauagcaagcggaguggccgucuguaagguguugcaccucgagggcgaaguuaacaaaaucaagagugcucugcuguccacgaauaaagccguggucucucucagcgguugcgggguguccguauuaacuuuuaagguucuggaccuuaagaacuacauugauaaacaauugcugccuauccuaaauaagcagucauguaguauuagcaacaucgagaccgugauagaguuccagcagaaaaauaacaggcuccuggaaauuacacgggaguuuucugucaaugcgggagugacuaccccaguguccacauauaugcuuaccaacucagaacuguugagccucaucaaugacaugccgauuacgaacgaucaaaagaaacugaugaguaacaauguccagaucguucgccagcagucuuacuccaucaugugcauuauaaaggaggaaguguuagcauauguagugcaacugccccucuacggcgucaucgacacuccuuguuggaaacuucauacaagcccacugugcaccacuaacacaaaggagggcucgaauauuuguuugacccgaacggaucgugggugguacugcgacaacgccggaucuguguccuucuuuccccaggcugaaaccuguaagguucagucaaauagaguguucugcgauacaaugaacaguagaacucugccuagcgaggucaaucucugcaacguggacaucuuuaauccaaaauaugauuguaagauaaugaccuccaaaacagacguaucuagcucaguuauuaccagucugggugccaucguguccugcuacggcaagacuaaauguacagcaagcaacaagugcagggggaucauuaagaccuucucuaauggaugugauuaugucucaaacaaaggcguggacacugucaguguggguaauacgcuuuacuauguuaacaagcaagaggggaaaagccuguacgugaagggagaacccaucauuaauuuuuaugacccuuugguauucccauccgaugaguuugacgcuucuauaucgcaggucaacgagaaaaucaaccagagccucgccuucauucggaaguccgaugaacuguuacacaaugugaacgcgggcaagucaacaaccaauaucaugaucacuaccauuauaaucguuauuaucgugauucugcuaagucucaucgccgucggccugcuuuuguacugcaaagcacgcucuacaccggugacccugagcaaggaccagcucuccgggauaaacaauaucgcuuucucaaacugaggacuaguguccaccugucccuccugggcugcuggauugucucguuuuccugccaaauaaacaggaucagcgcuuuacagaucuaaaaaaaaaaaaaaaaaaaaaaaaaaaaaaaaaaaaaaaaaaaaaaaaaaaaaaaaaaaaaaaaugcaucccccccccccccccccccccccccccccccaaaggcucuuuucagagccaccagaauu

SEQ ID NO: 5507 - RNA, 1922 nt, Artificial Sequence
  mRNA product Design e-2 comprising derived and/or modified sequence from HRSV(A2)__F_DSCav1_mut5 (opt4)
gggagacccgugacccggaaguuguacggcuacgcgacuuucccucccacaaacccucgcgcccuuccuuuccuacuugggcccggcagaaagcuuaccauggagcugcugauccugaaggccaacgccaucaccaccauccugaccgccgugaccuucugcuucgccagcggccagaacaucaccgaggaguucuaccagagcaccugcagcgccgugagcaagggcuaccugagcgcccugagaaccggcugguacaccagcgugaucaccaucgagcugagcaacaucaaggagaacaagugcaacggcaccgacgccaaggugaagcugaucaagcaggagcuggacaaguacaagaacgccgugaccgagcugcagcugcugaugcagagcacccccgccaccggcagcggcagcgccaucgccagcggcguggccgugugcaaggugcugcaccuggagggcgaggugaacaagaucaagagcgcccugcugagcaccaacaaggccguggugagccugagcggcugcggcgugagcgugcugaccuucaaggugcuggaccugaagaacuacaucgacaagcagcugcugcccauccugaacaagcagagcugcagcaucagcaacaucgagaccgugaucgaguuccagcagaagaacaacagacugcuggagaucaccagagaguucagcgugaacgccggcgugaccacccccgugagcaccuacaugcugaccaacagcgagcugcugagccugaucaacgacaugcccaucaccaacgaccagaagaagcugaugagcaacaacgugcagaucgugagacagcagagcuacagcaucaugugcaucaucaaggaggaggugcuggccuacguggugcagcugccccuguacggcgugaucgacacccccugcuggaagcugcacaccagcccccugugcaccaccaacaccaaggagggcagcaacaucugccugaccagaaccgacagaggcugguacugcgacaacgccggcagcgugagcuucuucccccaggccgagaccugcaaggugcagagcaacagaguguucugcgacaccaugaacagcagaacccugcccagcgaggugaaccugugcaacguggacaucuucaaccccaaguacgacugcaagaucaugaccagcaagaccgacgugagcagcagcgugaucaccagccugggcgccaucgugagcugcuacggcaagaccaagugcaccgccagcaacaagugcagaggcaucaucaagaccuucagcaacggcugcgacuacgugagcaacaagggcguggacaccgugagcgugggcaacacccuguacuacgugaacaagcaggagggcaagagccuguacgugaagggcgagcccaucaucaacuucuacgacccccugguguuccccagcgacgaguucgacgccagcaucagccaggugaacgagaagaucaaccagagccuggccuucaucagaaagagcgacgagcugcugcacaacgugaacgccggcaagagcaccaccaacaucaugaucaccaccaucaucaucgugaucaucgugauccugcugagccugaucgccgugggccugcugcuguacugcaaggccagaagcacccccgugacccugagcaaggaccagcugagcggcaucaacaacaucgccuucagcaacugaggacuaguguccaccugucccuccugggcugcuggauugucucguuuuccugccaaauaaacaggaucagcgcuuuacagaucuaaaaaaaaaaaaaaaaaaaaaaaaaaaaaaaaaaaaaaaaaaaaaaaaaaaaaaaaaaaaaaaaugcaucccccccccccccccccccccccccccccccaaaggcucuuuucagagccaccagaauu

SEQ ID NO: 5508 - RNA, 1922 nt, Artificial Sequence
  mRNA product Design e-2 comprising derived and/or modified sequence from HRSV(A2)__F_DSCav1_mut5 (opt5)
gggagacccgugacccggaaguuguacggcuacgcgacuuucccucccacaaacccucgcgcccuuccuuuccuacuugggcccggcagaaagcuuaccauggagcugcucauccugaaggccaacgcuauuaccacaauccuuacggccgugaccuucugcuuugcgagcggccagaauauuacagaagaguucuaccaauccaccuguucugcugucagcaaaggguaucuguccgcccucagaacaggaugguacaccucuguuaucacaauugaacugagcaacaucaaggagaauaaaugcaacggcaccgacgccaaggugaaacuuaucaagcaggaacuggauaaguauaaaaaugcugugacggagcuccagcugcugaugcaguccacccccgccacagggucuggaagcgcuauugccuccggcgucgcgguguguaagguucuccaccuggagggggaagugaacaaaaucaagagcgcccuucugucuaccaauaaagcugucgugucccucagcggaugcggcguuucugugcugacauuuaagguccuugaccugaagaacuacauugauaaacaacuccugccuauccugaauaagcaguccuguagcauuucuaacaucgagaccgugauugaguuccagcagaaaaauaaccggcuccuggaaaucacgcgcgaguuuuccgugaaugccggcgucacaaccccgguuagcacauauaugcuuaccaacuccgaacugcucucucugaucaaugacaugcccauuaccaacgaucaaaagaaacuuaugagcaacaaugugcagaucgugagacagcaguccuacagcauuaugugcaucauuaaggaggaaguccuggcuuaugugguucaacucccucuguacggggugaucgacacacccuguuggaaacugcauacgucuccucucugcaccacaaacaccaaggagggauccaauaucugucugacacggaccgaucgcggcugguacugcgacaacgccgggagcgucucuuucuuuccccaggcggaaacguguaaggugcagagcaauagaguuuucugcgauacaaugaacuccagaacccugccuucugaggugaaucucugcaacgucgacauuuuuaauccgaaauaugauuguaagaucaugaccagcaaaacagacguguccagcucugucauuaccucccugggagccaucgugagcugcuacggcaagacaaaauguacggcuucuaacaagugccgggggauuaucaagaccuucuccaauggaugugauuauguuagcaacaaaggcguggacacagucuccgugggcaauacccuuuacuauguuaacaagcaagaggggaaaucucuguacgugaagggagaacccaucauuaauuuuuaugacccucucgucuuccccagcgaugaguuugacgccuccaucucucaggugaacgagaaaauuaaccagagccuggcuuucauccgcaaguccgaugaacugcuccacaaugugaacgccggcaagagcacaaccaauauuaugaucacgaccauuaucaucguuauuaucgucauucugcuuucucugaucgccguggggcuccugcuguacugcaaagcuagauccacaccugugacccuuagcaaggaccagcucucuggaauuaacaauaucgcguucuccaacugaggacuaguguccaccugucccuccugggcugcuggauugucucguuuuccugccaaauaaacaggaucagcgcuuuacagaucuaaaaaaaaaaaaaaaaaaaaaaaaaaaaaaaaaaaaaaaaaaaaaaaaaaaaaaaaaaaaaaaaugcaucccccccccccccccccccccccccccccccaaaggcucuuuucagagccaccagaauu

SEQ ID NO: 5509 - RNA, 1922 nt, Artificial Sequence
  mRNA product Design e-2 comprising derived and/or modified sequence from HRSV(A2)__F_DSCav1_mut5 (opt6)
gggagacccgugacccggaaguuguacggcuacgcgacuuucccucccacaaacccucgcgcccuuccuuuccuacuugggcccggcagaaagcuuaccauggaacuauuaauacuuaaagccaacgcaauaacaacaauucucacugcugucaccuucugcuucgccucaggccaaaacauaacggaagaauuuuaccaaucaacaugcucugcaguauccaaaggcuaccuaucugcucuaagaacagguugguauacaucaguaauaaccauagaacuaucaaacauaaaagaaaauaaaugcaacggaacagacgcaaaaguuaaacucauaaaacaagaacuagacaaauauaaaaacgcaguuaccgaacuacaacuacuuaugcaauccacucccgccacuggaucaggaucagcaauagcaucaggagucgcaguauguaaagucuuacaccucgaaggcgaagucaauaaaaucaaauccgcauuacuauccacaaacaaagcagucguaucccuaagcggaugcggaguaucaguacuaacauuuaaaguacuagaccuaaaaaauuacaucgauaaacaacuauuaccuauauuaaacaaacaauccugcuccauuucaaauaucgaaaccguaauagaauuucaacaaaaaaacaacagauuacuagaaauaacaagagaauuuuccguaaaugcuggcguaacaacaccaguauccacauacaugcucacaaacuccgaacuacuaucacuaauaaaugacaugcccauaacaaacgaucaaaaaaaacuaaugucaaauaauguacaaauaguaagacaacaaagcuacuccaucauguguauaauaaaagaagaaguacuagcauacguaguucaacuaccacuuuacggcguaaucgacaccccuugcuggaaacuacacaccuccccucuaugcaccacaaacacaaaagaagguuccaacauaugccuuaccagaacagacagaggcugguauugcgacaacgcaggaucaguuucauuuuuuccacaagcugaaacaugcaaaguacaaucaaacagagucuucugcgacacaaugaacucaagaacucuacccucagaaguaaaccuauguaacguagacauuuucaaccccaaauacgacugcaaaauuaugacaucaaaaacagacguuucaucaucaguuaucaccucauuaggagcaauaguaagcugcuacggaaaaacaaaaugcaccgccucaaauaaaugcagaggaauaauaaaaacuuucuccaacggaugcgacuacguuucaaacaaagguguagacacuguaucaguaggaaacacacuauauuacguaaauaaacaagaaggaaaaucacuuuaugucaaaggagaaccaauaaucaauuucuacgacccauuaguauucccaucagacgaauuugaugcuucaauaucacaaguaaacgaaaaaauaaaucaaucacucgcauuuauacgaaaaucagacgaacuacuacacaauguaaacgcaggcaaaucaacaacaaacauaaugauaacaacaauaaucauuguaauaauaguaauacuucuaucucuaauagcaguaggauuacuccucuacugcaaagcaagaucaaccccuguaacacuaucaaaagaccaacuuucagguauaaauaauauagcuuuuuccaauuaaggacuaguguccaccugucccuccugggcugcuggauugucucguuuuccugccaaauaaacaggaucagcgcuuuacagaucuaaaaaaaaaaaaaaaaaaaaaaaaaaaaaaaaaaaaaaaaaaaaaaaaaaaaaaaaaaaaaaaaugcaucccccccccccccccccccccccccccccccaaaggcucuuuucagagccaccagaauu

SEQ ID NO: 5510 - RNA, 1922 nt, Artificial Sequence
  mRNA product Design e-2 comprising derived and/or modified sequence from HRSV(A2)__F_DSCav1_mut5 (opt11)
gggagacccgugacccggaaguuguacggcuacgcgacuuucccucccacaaacccucgcgcccuuccuuuccuacuugggcccggcagaaagcuuaccauggagcuccuaauccucaaagccaacgcgaucacuacaauccucacagccgucaccuucugcuucgccuccggccaaaacaucaccgaggaguucuaccaaucaaccugcuccgccguaucaaaaggauaccuaagcgcccuacggaccggcugguacacaucugucaucaccaucgaacuaucaaacaucaaagaaaacaaaugcaacggaaccgacgcaaaagucaaacugauuaaacaagaacuagacaaauacaaaaacgcagucaccgaacugcaauuacucaugcaaagcacaccggccaccggcucaggcagcgccaucgccuccggcgucgccgucugcaaaguucuccaccucgagggcgaagucaacaaaauaaaaucugcccuccucuccaccaacaaagccgucgucucccucagcggcugcggagucuccguccucaccuucaaaguucucgaucucaagaacuauauugacaaacaacuucuacccauacucaacaaacaaagcugcagcauauccaacaucgaaaccgucaucgaguuccaacaaaagaacaaccgccuccucgaaauaacccgcgaguucagcguuaacgccggagucacuaccccugucuccaccuacaugcucaccaacuccgaacuccuaucacuaaucaacgacaugcccauaaccaacgaccagaagaaacucauguccaacaacguccaaauuguccgacaacaaagcuacuccauaaugugcauaauaaaagaggaaguccucgccuacgucguacaacugccccuuuauggcguaaucgacacacccugcuggaaacuccacacgucaccccucugcaccaccaacacaaaagaaggcucgaacaucugccuaacacggacugaccgcggcugguacugcgacaacgccggcuccgucagcuucuucccacaagccgaaaccugcaaaguacaauccaaccgaguauucugcgacaccaugaacuccagaacccuccccucagaggucaaccugugcaacguagacaucuucaaccccaaauacgacugcaaaauaaugaccucaaaaacagacgucuccucuuccguaaucaccagccucggagccaucgucagcugcuacggcaaaaccaaaugcaccgccucaaacaaaugccgcggcaucaucaaaacauucucaaacggcugcgacuacgucuccaacaaaggcgucgacacaguaagcguaggcaacacacuguacuacgucaacaaacaagagggaaaaucacucuacgucaaaggagaacccauaaucaacuucuacgacccccucguuuuccccagcgacgaguucgacgccagcauaucccaagucaacgagaaaauuaaccaaucccuagcauucauccgaaaaucugacgaacugcuccacaacgucaacgcgggaaaaucaacaaccaacauaaugauaaccacaaucauaauagucaucaucguaauccuccucagccuaaucgcugucggccuccuccucuacugcaaagcccguuccaccccagucacacuuuccaaggaccaacuaagcggaauaaacaacaucgcguucucaaacuaaggacuaguguccaccugucccuccugggcugcuggauugucucguuuuccugccaaauaaacaggaucagcgcuuuacagaucuaaaaaaaaaaaaaaaaaaaaaaaaaaaaaaaaaaaaaaaaaaaaaaaaaaaaaaaaaaaaaaaaugcaucccccccccccccccccccccccccccccccaaaggcucuuuucagagccaccagaauu

SEQ ID NO: 5511 - RNA, 1892 nt, Artificial Sequence
  mRNA product Design e-3 comprising derived and/or modified sequence from HRSV(A2)__F_DSCav1_mut5 (opt1)
gggagacuuucccauucuguagcagaauuugguguugccuguggucuuggucccgcggagaagcuuaccauggagcugcucauccugaaggccaacgccaucaccaccauccugacggcggugaccuucugcuucgccagcggccagaacaucaccgaggaguucuaccaguccacgugcagcgccgucuccaagggguaccucagcgcccugcggaccggcugguacaccuccgugaucaccaucgagcugagcaacaucaaggagaacaagugcaacgggaccgacgccaaggugaagcucaucaagcaggagcuggacaaguacaagaacgcggucacggagcugcagcuccugaugcaguccaccccggcaaccggcuccggcuccgccaucgcgagcggcgucgccgugugcaaggugcugcaccucgagggggaggucaacaagaucaagagcgcccugcuguccaccaacaaggccguggugagccucuccggcugcggcgucagcgugcugaccuucaaggugcuggaccucaagaacuacaucgacaagcagcugcugcccauccugaacaagcagagcugcuccaucagcaacaucgagacggugaucgaguuccagcagaagaacaaccggcuccuggagaucacccgcgaguucagcgugaacgccggggucaccacccccguguccacguacaugcugaccaacagcgagcuccugucccugaucaacgacaugccgaucaccaacgaccagaagaagcucaugagcaacaacgugcagaucguccggcagcaguccuacagcaucaugugcaucaucaaggaggaggugcuggcguacgugguccagcugccccucuacggcgugaucgacacccccugcuggaagcugcacacgagcccccugugcaccaccaacaccaaggagggguccaacaucugccucacgcgcaccgaccggggcugguacugcgacaacgccggcagcgucuccuucuucccgcaggccgagaccugcaaggugcagagcaaccgcguguucugcgacaccaugaacucccggacgcugcccagcgagguaaaccucugcaacgucgacaucuucaaccccaaguacgacugcaagaucaugaccuccaagaccgacgugagcuccagcgugaucaccucccugggggccaucgucagcugcuacggcaagacgaagugcaccgccagcaacaagugccgggggaucaucaagaccuucuccaacggcugcgacuacgugagcaacaagggcguggacaccguguccgucgggaacacccuguacuacgugaacaagcaggagggcaagagccucuacgugaagggggagcccaucaucaacuucuacgacccgcuggucuuccccuccgacgaguucgacgcgagcaucucccaggugaacgagaagaucaaccagagccuggccuucauccgcaaguccgacgagcugcuccacaacgugaacgccggcaagagcacgaccaacaucaugaucaccaccaucaucaucgucaucaucgugauccugcugucccucaucgccguggggcugcugcucuacugcaaggcccggagcacgcccgucacccuguccaaggaccagcugagcggcaucaacaacaucgcguucuccaacugaggacuaguguccaccugucccuccugggcugcuggauugucucguuuuccugccaaauaaacaggaucagcgcuuuacagaucuaaaaaaaaaaaaaaaaaaaaaaaaaaaaaaaaaaaaaaaaaaaaaaaaaaaaaaaaaaaaaaaaugcaucccccccccccccccccccccccccccccccaaaggcucuuuucagagccaccagaauu

SEQ ID NO: 5512 - RNA, 1892 nt, Artificial Sequence
  mRNA product Design e-3 comprising derived and/or modified sequence from HRSV(A2)__F_DSCav1_mut5 (opt1)
gggagacuuucccauucuguagcagaauuugguguugccuguggucuuggucccgcggagaagcuuaccauggagcugcucauccugaaggccaacgccaucaccaccauccugacggcggugaccuucugcuucgccagcggccagaacaucaccgaggaguucuaccaguccacgugcagcgccgucuccaagggguaccucagcgcccugcgcaccggcugguacaccuccgugaucaccaucgagcugagcaacaucaaggagaacaagugcaacgggaccgacgccaaggugaagcucaucaagcaggagcuggacaaguacaagaacgcggucacggagcugcagcuccugaugcaguccacccccgccaccggcagcggguccgccaucgccagcggcguggcggugugcaagguccugcaccucgagggcgaggugaacaagaucaaguccgcccugcugagcaccaacaaggccguggucucccucagcgggugcggcguguccgugcugacguucaagguccuggaccucaagaacuacaucgacaagcagcugcugccgauccucaacaagcagagcugcuccaucagcaacaucgagaccgugaucgaguuccagcagaagaacaaccggcugcuggagaucacccgcgaguucuccgugaacgccggggucaccacgcccgugagcaccuacaugcucaccaacagcgagcugcugucccucaucaacgacaugcccaucaccaacgaccagaagaagcugaugagcaacaacgugcagaucguccggcagcaguccuacagcaucaugugcaucaucaaggaggaggugcuggccuacgugguccagcucccccuguacggcgugaucgacacgccgugcuggaagcugcacaccagcccccucugcaccaccaacacgaaggagggguccaacaucugccugacccgcaccgaccggggcugguacugcgacaacgcgggcuccgugagcuucuucccccaggccgagaccugcaagguccaguccaaccgcguguucugcgacacgaugaacagccggacccuccccuccgaggucaaccugugcaacguggacaucuucaacccgaaguacgacugcaagaucaugaccagcaagaccgacguguccagcuccgucaucacgagccugggggccaucguguccugcuacggcaagaccaagugcaccgccagcaacaagugccgggggaucaucaagaccuucuccaacggcugcgacuacgugagcaacaagggcgucgacacggugagcguggggaacacccucuacuacgucaacaagcaggagggcaagucccuguacgugaagggggagcccaucaucaacuucuacgacccccugguguuccccagcgacgaguucgacgccuccaucagccaggucaacgagaagaucaaccagucccucgcguucauccgcaagagcgacgagcugcugcacaacgugaacgccggcaaguccaccaccaacaucaugaucaccacgaucaucaucgugaucaucgucauccuccugagccugaucgccguggggcuccugcuguacugcaaggcccgguccaccccggugacccugagcaaggaccagcucuccggcaucaacaacaucgccuucagcaacugaggacuaguguccaccugucccuccugggcugcuggauugucucguuuuccugccaaauaaacaggaucagcgcuuuacagaucuaaaaaaaaaaaaaaaaaaaaaaaaaaaaaaaaaaaaaaaaaaaaaaaaaaaaaaaaaaaaaaaaugcaucccccccccccccccccccccccccccccccaaaggcucuuuucagagccaccagaauu

SEQ ID NO: 5513 - RNA, 1892 nt, Artificial Sequence
  mRNA product Design e-3 comprising derived and/or modified sequence from HRSV(A2)__F_DSCav1_mut5 (opt2)
gggagacuuucccauucuguagcagaauuugguguugccuguggucuuggucccgcggagaagcuuaccauggagcuccucauccucaaggccaacgccaucaccaccauccucaccgccgucaccuucugcuucgccuccggccagaacaucaccgaggaguucuaccaguccaccugcuccgccgucuccaagggcuaccucuccgcccuccgcaccggcugguacaccuccgucaucaccaucgagcucuccaacaucaaggagaacaagugcaacggcaccgacgccaaggucaagcucaucaagcaggagcucgacaaguacaagaacgccgucaccgagcuccagcuccucaugcaguccacccccgccaccggcuccggcuccgccaucgccuccggcgucgccgucugcaagguccuccaccucgagggcgaggucaacaagaucaaguccgcccuccucuccaccaacaaggccgucgucucccucuccggcugcggcgucuccguccucaccuucaagguccucgaccucaagaacuacaucgacaagcagcuccuccccauccucaacaagcaguccugcuccaucuccaacaucgagaccgucaucgaguuccagcagaagaacaaccgccuccucgagaucacccgcgaguucuccgucaacgccggcgucaccacccccgucuccaccuacaugcucaccaacuccgagcuccucucccucaucaacgacaugcccaucaccaacgaccagaagaagcucauguccaacaacguccagaucguccgccagcaguccuacuccaucaugugcaucaucaaggaggagguccucgccuacgucguccagcucccccucuacggcgucaucgacacccccugcuggaagcuccacaccuccccccucugcaccaccaacaccaaggagggcuccaacaucugccucacccgcaccgaccgcggcugguacugcgacaacgccggcuccgucuccuucuucccccaggccgagaccugcaagguccaguccaaccgcgucuucugcgacaccaugaacucccgcacccuccccuccgaggucaaccucugcaacgucgacaucuucaaccccaaguacgacugcaagaucaugaccuccaagaccgacgucuccuccuccgucaucaccucccucggcgccaucgucuccugcuacggcaagaccaagugcaccgccuccaacaagugccgcggcaucaucaagaccuucuccaacggcugcgacuacgucuccaacaagggcgucgacaccgucuccgucggcaacacccucuacuacgucaacaagcaggagggcaagucccucuacgucaagggcgagcccaucaucaacuucuacgacccccucgucuuccccuccgacgaguucgacgccuccaucucccaggucaacgagaagaucaaccagucccucgccuucauccgcaaguccgacgagcuccuccacaacgucaacgccggcaaguccaccaccaacaucaugaucaccaccaucaucaucgucaucaucgucauccuccucucccucaucgccgucggccuccuccucuacugcaaggcccgcuccacccccgucacccucuccaaggaccagcucuccggcaucaacaacaucgccuucuccaacugaggacuaguguccaccugucccuccugggcugcuggauugucucguuuuccugccaaauaaacaggaucagcgcuuuacagaucuaaaaaaaaaaaaaaaaaaaaaaaaaaaaaaaaaaaaaaaaaaaaaaaaaaaaaaaaaaaaaaaaugcaucccccccccccccccccccccccccccccccaaaggcucuuuucagagccaccagaauu

SEQ ID NO: 5514 - RNA, 1892 nt, Artificial Sequence
  mRNA product Design e-3 comprising derived and/or modified sequence from HRSV(A2)__F_DSCav1_mut5 (opt3)
gggagacuuucccauucuguagcagaauuugguguugccuguggucuuggucccgcggagaagcuuaccauggagcugcucauccuuaaggccaacgcuauuaccacaauacugacugcagugacguucugcuuugccagcggccagaauaucaccgaagaguucuaccaauccacauguucugcggucucaaaaggguauuugagugcuuuaagaacuggaugguacaccagcguuauuacaaucgaacuguccaacauuaaggagaauaaaugcaacgguaccgacgccaaggugaaacuaaucaagcaggaacucgauaaguauaaaaaugcaguaacugagcugcagcuucugaugcagucuacacccgccaccggcucggggucagcuauagcaagcggaguggccgucuguaagguguugcaccucgagggcgaaguuaacaaaaucaagagugcucugcuguccacgaauaaagccguggucucucucagcgguugcgggguguccguauuaacuuuuaagguucuggaccuuaagaacuacauugauaaacaauugcugccuauccuaaauaagcagucauguaguauuagcaacaucgagaccgugauagaguuccagcagaaaaauaacaggcuccuggaaauuacacgggaguuuucugucaaugcgggagugacuaccccaguguccacauauaugcuuaccaacucagaacuguugagccucaucaaugacaugccgauuacgaacgaucaaaagaaacugaugaguaacaauguccagaucguucgccagcagucuuacuccaucaugugcauuauaaaggaggaaguguuagcauauguagugcaacugccccucuacggcgucaucgacacuccuuguuggaaacuucauacaagcccacugugcaccacuaacacaaaggagggcucgaauauuuguuugacccgaacggaucgugggugguacugcgacaacgccggaucuguguccuucuuuccccaggcugaaaccuguaagguucagucaaauagaguguucugcgauacaaugaacaguagaacucugccuagcgaggucaaucucugcaacguggacaucuuuaauccaaaauaugauuguaagauaaugaccuccaaaacagacguaucuagcucaguuauuaccagucugggugccaucguguccugcuacggcaagacuaaauguacagcaagcaacaagugcagggggaucauuaagaccuucucuaauggaugugauuaugucucaaacaaaggcguggacacugucaguguggguaauacgcuuuacuauguuaacaagcaagaggggaaaagccuguacgugaagggagaacccaucauuaauuuuuaugacccuuugguauucccauccgaugaguuugacgcuucuauaucgcaggucaacgagaaaaucaaccagagccucgccuucauucggaaguccgaugaacuguuacacaaugugaacgcgggcaagucaacaaccaauaucaugaucacuaccauuauaaucguuauuaucgugauucugcuaagucucaucgccgucggccugcuuuuguacugcaaagcacgcucuacaccggugacccugagcaaggaccagcucuccgggauaaacaauaucgcuuucucaaacugaggacuaguguccaccugucccuccugggcugcuggauugucucguuuuccugccaaauaaacaggaucagcgcuuuacagaucuaaaaaaaaaaaaaaaaaaaaaaaaaaaaaaaaaaaaaaaaaaaaaaaaaaaaaaaaaaaaaaaaugcaucccccccccccccccccccccccccccccccaaaggcucuuuucagagccaccagaauu

SEQ ID NO: 5515 - RNA, 1892 nt, Artificial Sequence
  mRNA product Design e-3 comprising derived and/or modified sequence from HRSV(A2)__F_DSCav1_mut5 (opt4)
gggagacuuucccauucuguagcagaauuugguguugccuguggucuuggucccgcggagaagcuuaccauggagcugcugauccugaaggccaacgccaucaccaccauccugaccgccgugaccuucugcuucgccagcggccagaacaucaccgaggaguucuaccagagcaccugcagcgccgugagcaagggcuaccugagcgcccugagaaccggcugguacaccagcgugaucaccaucgagcugagcaacaucaaggagaacaagugcaacggcaccgacgccaaggugaagcugaucaagcaggagcuggacaaguacaagaacgccgugaccgagcugcagcugcugaugcagagcacccccgccaccggcagcggcagcgccaucgccagcggcguggccgugugcaaggugcugcaccuggagggcgaggugaacaagaucaagagcgcccugcugagcaccaacaaggccguggugagccugagcggcugcggcgugagcgugcugaccuucaaggugcuggaccugaagaacuacaucgacaagcagcugcugcccauccugaacaagcagagcugcagcaucagcaacaucgagaccgugaucgaguuccagcagaagaacaacagacugcuggagaucaccagagaguucagcgugaacgccggcgugaccacccccgugagcaccuacaugcugaccaacagcgagcugcugagccugaucaacgacaugcccaucaccaacgaccagaagaagcugaugagcaacaacgugcagaucgugagacagcagagcuacagcaucaugugcaucaucaaggaggaggugcuggccuacguggugcagcugccccuguacggcgugaucgacacccccugcuggaagcugcacaccagcccccugugcaccaccaacaccaaggagggcagcaacaucugccugaccagaaccgacagaggcugguacugcgacaacgccggcagcgugagcuucuucccccaggccgagaccugcaaggugcagagcaacagaguguucugcgacaccaugaacagcagaacccugcccagcgaggugaaccugugcaacguggacaucuucaaccccaaguacgacugcaagaucaugaccagcaagaccgacgugagcagcagcgugaucaccagccugggcgccaucgugagcugcuacggcaagaccaagugcaccgccagcaacaagugcagaggcaucaucaagaccuucagcaacggcugcgacuacgugagcaacaagggcguggacaccgugagcgugggcaacacccuguacuacgugaacaagcaggagggcaagagccuguacgugaagggcgagcccaucaucaacuucuacgacccccugguguuccccagcgacgaguucgacgccagcaucagccaggugaacgagaagaucaaccagagccuggccuucaucagaaagagcgacgagcugcugcacaacgugaacgccggcaagagcaccaccaacaucaugaucaccaccaucaucaucgugaucaucgugauccugcugagccugaucgccgugggccugcugcuguacugcaaggccagaagcacccccgugacccugagcaaggaccagcugagcggcaucaacaacaucgccuucagcaacugaggacuaguguccaccugucccuccugggcugcuggauugucucguuuuccugccaaauaaacaggaucagcgcuuuacagaucuaaaaaaaaaaaaaaaaaaaaaaaaaaaaaaaaaaaaaaaaaaaaaaaaaaaaaaaaaaaaaaaaugcaucccccccccccccccccccccccccccccccaaaggcucuuuucagagccaccagaauu

SEQ ID NO: 5516 - RNA, 1892 nt, Artificial Sequence
  mRNA product Design e-3 comprising derived and/or modified sequence from HRSV(A2)__F_DSCav1_mut5 (opt5)
gggagacuuucccauucuguagcagaauuugguguugccuguggucuuggucccgcggagaagcuuaccauggagcugcucauccugaaggccaacgcuauuaccacaauccuuacggccgugaccuucugcuuugcgagcggccagaauauuacagaagaguucuaccaauccaccuguucugcugucagcaaaggguaucuguccgcccucagaacaggaugguacaccucuguuaucacaauugaacugagcaacaucaaggagaauaaaugcaacggcaccgacgccaaggugaaacuuaucaagcaggaacuggauaaguauaaaaaugcugugacggagcuccagcugcugaugcaguccacccccgccacagggucuggaagcgcuauugccuccggcgucgcgguguguaagguucuccaccuggagggggaagugaacaaaaucaagagcgcccuucugucuaccaauaaagcugucgugucccucagcggaugcggcguuucugugcugacauuuaagguccuugaccugaagaacuacauugauaaacaacuccugccuauccugaauaagcaguccuguagcauuucuaacaucgagaccgugauugaguuccagcagaaaaauaaccggcuccuggaaaucacgcgcgaguuuuccgugaaugccggcgucacaaccccgguuagcacauauaugcuuaccaacuccgaacugcucucucugaucaaugacaugcccauuaccaacgaucaaaagaaacuuaugagcaacaaugugcagaucgugagacagcaguccuacagcauuaugugcaucauuaaggaggaaguccuggcuuaugugguucaacucccucuguacggggugaucgacacacccuguuggaaacugcauacgucuccucucugcaccacaaacaccaaggagggauccaauaucugucugacacggaccgaucgcggcugguacugcgacaacgccgggagcgucucuuucuuuccccaggcggaaacguguaaggugcagagcaauagaguuuucugcgauacaaugaacuccagaacccugccuucugaggugaaucucugcaacgucgacauuuuuaauccgaaauaugauuguaagaucaugaccagcaaaacagacguguccagcucugucauuaccucccugggagccaucgugagcugcuacggcaagacaaaauguacggcuucuaacaagugccgggggauuaucaagaccuucuccaauggaugugauuauguuagcaacaaaggcguggacacagucuccgugggcaauacccuuuacuauguuaacaagcaagaggggaaaucucuguacgugaagggagaacccaucauuaauuuuuaugacccucucgucuuccccagcgaugaguuugacgccuccaucucucaggugaacgagaaaauuaaccagagccuggcuuucauccgcaaguccgaugaacugcuccacaaugugaacgccggcaagagcacaaccaauauuaugaucacgaccauuaucaucguuauuaucgucauucugcuuucucugaucgccguggggcuccugcuguacugcaaagcuagauccacaccugugacccuuagcaaggaccagcucucuggaauuaacaauaucgcguucuccaacugaggacuaguguccaccugucccuccugggcugcuggauugucucguuuuccugccaaauaaacaggaucagcgcuuuacagaucuaaaaaaaaaaaaaaaaaaaaaaaaaaaaaaaaaaaaaaaaaaaaaaaaaaaaaaaaaaaaaaaaugcaucccccccccccccccccccccccccccccccaaaggcucuuuucagagccaccagaauu

SEQ ID NO: 5517 - RNA, 1892 nt, Artificial Sequence
  mRNA product Design e-3 comprising derived and/or modified sequence from HRSV(A2)__F_DSCav1_mut5 (opt6)
gggagacuuucccauucuguagcagaauuugguguugccuguggucuuggucccgcggagaagcuuaccauggaacuauuaauacuuaaagccaacgcaauaacaacaauucucacugcugucaccuucugcuucgccucaggccaaaacauaacggaagaauuuuaccaaucaacaugcucugcaguauccaaaggcuaccuaucugcucuaagaacagguugguauacaucaguaauaaccauagaacuaucaaacauaaaagaaaauaaaugcaacggaacagacgcaaaaguuaaacucauaaaacaagaacuagacaaauauaaaaacgcaguuaccgaacuacaacuacuuaugcaauccacucccgccacuggaucaggaucagcaauagcaucaggagucgcaguauguaaagucuuacaccucgaaggcgaagucaauaaaaucaaauccgcauuacuauccacaaacaaagcagucguaucccuaagcggaugcggaguaucaguacuaacauuuaaaguacuagaccuaaaaaauuacaucgauaaacaacuauuaccuauauuaaacaaacaauccugcuccauuucaaauaucgaaaccguaauagaauuucaacaaaaaaacaacagauuacuagaaauaacaagagaauuuuccguaaaugcuggcguaacaacaccaguauccacauacaugcucacaaacuccgaacuacuaucacuaauaaaugacaugcccauaacaaacgaucaaaaaaaacuaaugucaaauaauguacaaauaguaagacaacaaagcuacuccaucauguguauaauaaaagaagaaguacuagcauacguaguucaacuaccacuuuacggcguaaucgacaccccuugcuggaaacuacacaccuccccucuaugcaccacaaacacaaaagaagguuccaacauaugccuuaccagaacagacagaggcugguauugcgacaacgcaggaucaguuucauuuuuuccacaagcugaaacaugcaaaguacaaucaaacagagucuucugcgacacaaugaacucaagaacucuacccucagaaguaaaccuauguaacguagacauuuucaaccccaaauacgacugcaaaauuaugacaucaaaaacagacguuucaucaucaguuaucaccucauuaggagcaauaguaagcugcuacggaaaaacaaaaugcaccgccucaaauaaaugcagaggaauaauaaaaacuuucuccaacggaugcgacuacguuucaaacaaagguguagacacuguaucaguaggaaacacacuauauuacguaaauaaacaagaaggaaaaucacuuuaugucaaaggagaaccaauaaucaauuucuacgacccauuaguauucccaucagacgaauuugaugcuucaauaucacaaguaaacgaaaaaauaaaucaaucacucgcauuuauacgaaaaucagacgaacuacuacacaauguaaacgcaggcaaaucaacaacaaacauaaugauaacaacaauaaucauuguaauaauaguaauacuucuaucucuaauagcaguaggauuacuccucuacugcaaagcaagaucaaccccuguaacacuaucaaaagaccaacuuucagguauaaauaauauagcuuuuuccaauuaaggacuaguguccaccugucccuccugggcugcuggauugucucguuuuccugccaaauaaacaggaucagcgcuuuacagaucuaaaaaaaaaaaaaaaaaaaaaaaaaaaaaaaaaaaaaaaaaaaaaaaaaaaaaaaaaaaaaaaaugcaucccccccccccccccccccccccccccccccaaaggcucuuuucagagccaccagaauu

SEQ ID NO: 5518 - RNA, 1892 nt, Artificial Sequence
  mRNA product Design e-3 comprising derived and/or modified sequence from HRSV(A2)__F_DSCav1_mut5 (opt11)
gggagacuuucccauucuguagcagaauuugguguugccuguggucuuggucccgcggagaagcuuaccauggagcuccuaauccucaaagccaacgcgaucacuacaauccucacagccgucaccuucugcuucgccuccggccaaaacaucaccgaggaguucuaccaaucaaccugcuccgccguaucaaaaggauaccuaagcgcccuacggaccggcugguacacaucugucaucaccaucgaacuaucaaacaucaaagaaaacaaaugcaacggaaccgacgcaaaagucaaacugauuaaacaagaacuagacaaauacaaaaacgcagucaccgaacugcaauuacucaugcaaagcacaccggccaccggcucaggcagcgccaucgccuccggcgucgccgucugcaaaguucuccaccucgagggcgaagucaacaaaauaaaaucugcccuccucuccaccaacaaagccgucgucucccucagcggcugcggagucuccguccucaccuucaaaguucucgaucucaagaacuauauugacaaacaacuucuacccauacucaacaaacaaagcugcagcauauccaacaucgaaaccgucaucgaguuccaacaaaagaacaaccgccuccucgaaauaacccgcgaguucagcguuaacgccggagucacuaccccugucuccaccuacaugcucaccaacuccgaacuccuaucacuaaucaacgacaugcccauaaccaacgaccagaagaaacucauguccaacaacguccaaauuguccgacaacaaagcuacuccauaaugugcauaauaaaagaggaaguccucgccuacgucguacaacugccccuuuauggcguaaucgacacacccugcuggaaacuccacacgucaccccucugcaccaccaacacaaaagaaggcucgaacaucugccuaacacggacugaccgcggcugguacugcgacaacgccggcuccgucagcuucuucccacaagccgaaaccugcaaaguacaauccaaccgaguauucugcgacaccaugaacuccagaacccuccccucagaggucaaccugugcaacguagacaucuucaaccccaaauacgacugcaaaauaaugaccucaaaaacagacgucuccucuuccguaaucaccagccucggagccaucgucagcugcuacggcaaaaccaaaugcaccgccucaaacaaaugccgcggcaucaucaaaacauucucaaacggcugcgacuacgucuccaacaaaggcgucgacacaguaagcguaggcaacacacuguacuacgucaacaaacaagagggaaaaucacucuacgucaaaggagaacccauaaucaacuucuacgacccccucguuuuccccagcgacgaguucgacgccagcauaucccaagucaacgagaaaauuaaccaaucccuagcauucauccgaaaaucugacgaacugcuccacaacgucaacgcgggaaaaucaacaaccaacauaaugauaaccacaaucauaauagucaucaucguaauccuccucagccuaaucgcugucggccuccuccucuacugcaaagcccguuccaccccagucacacuuuccaaggaccaacuaagcggaauaaacaacaucgcguucucaaacuaaggacuaguguccaccugucccuccugggcugcuggauugucucguuuuccugccaaauaaacaggaucagcgcuuuacagaucuaaaaaaaaaaaaaaaaaaaaaaaaaaaaaaaaaaaaaaaaaaaaaaaaaaaaaaaaaaaaaaaaugcaucccccccccccccccccccccccccccccccaaaggcucuuuucagagccaccagaauu

SEQ ID NO: 5519 - RNA, 1946 nt, Artificial Sequence
  mRNA product Design e-4 comprising derived and/or modified sequence from HRSV(A2)__F_DSCav1_mut5 (opt1)
gggagacuccugucgggcggaaguaggaggaguagaguuuaaaaacaguacucuuuuuccgguucgggacguaguugaagcaacgacaagccggauaaccgcucuugagacaggaagcuuaccauggagcugcucauccugaaggccaacgccaucaccaccauccugacggcggugaccuucugcuucgccagcggccagaacaucaccgaggaguucuaccaguccacgugcagcgccgucuccaagggguaccucagcgcccugcggaccggcugguacaccuccgugaucaccaucgagcugagcaacaucaaggagaacaagugcaacgggaccgacgccaaggugaagcucaucaagcaggagcuggacaaguacaagaacgcggucacggagcugcagcuccugaugcaguccaccccggcaaccggcuccggcuccgccaucgcgagcggcgucgccgugugcaaggugcugcaccucgagggggaggucaacaagaucaagagcgcccugcuguccaccaacaaggccguggugagccucuccggcugcggcgucagcgugcugaccuucaaggugcuggaccucaagaacuacaucgacaagcagcugcugcccauccugaacaagcagagcugcuccaucagcaacaucgagacggugaucgaguuccagcagaagaacaaccggcuccuggagaucacccgcgaguucagcgugaacgccggggucaccacccccguguccacguacaugcugaccaacagcgagcuccugucccugaucaacgacaugccgaucaccaacgaccagaagaagcucaugagcaacaacgugcagaucguccggcagcaguccuacagcaucaugugcaucaucaaggaggaggugcuggcguacgugguccagcugccccucuacggcgugaucgacacccccugcuggaagcugcacacgagcccccugugcaccaccaacaccaaggagggguccaacaucugccucacgcgcaccgaccggggcugguacugcgacaacgccggcagcgucuccuucuucccgcaggccgagaccugcaaggugcagagcaaccgcguguucugcgacaccaugaacucccggacgcugcccagcgagguaaaccucugcaacgucgacaucuucaaccccaaguacgacugcaagaucaugaccuccaagaccgacgugagcuccagcgugaucaccucccugggggccaucgucagcugcuacggcaagacgaagugcaccgccagcaacaagugccgggggaucaucaagaccuucuccaacggcugcgacuacgugagcaacaagggcguggacaccguguccgucgggaacacccuguacuacgugaacaagcaggagggcaagagccucuacgugaagggggagcccaucaucaacuucuacgacccgcuggucuuccccuccgacgaguucgacgcgagcaucucccaggugaacgagaagaucaaccagagccuggccuucauccgcaaguccgacgagcugcuccacaacgugaacgccggcaagagcacgaccaacaucaugaucaccaccaucaucaucgucaucaucgugauccugcugucccucaucgccguggggcugcugcucuacugcaaggcccggagcacgcccgucacccuguccaaggaccagcugagcggcaucaacaacaucgcguucuccaacugaggacuaguguccaccugucccuccugggcugcuggauugucucguuuuccugccaaauaaacaggaucagcgcuuuacagaucuaaaaaaaaaaaaaaaaaaaaaaaaaaaaaaaaaaaaaaaaaaaaaaaaaaaaaaaaaaaaaaaaugcaucccccccccccccccccccccccccccccccaaaggcucuuuucagagccaccagaauu

SEQ ID NO: 5520 - RNA, 1946 nt, Artificial Sequence
  mRNA product Design e-4 comprising derived and/or modified sequence from HRSV(A2)__F_DSCav1_mut5 (opt1)
gggagacuccugucgggcggaaguaggaggaguagaguuuaaaaacaguacucuuuuuccgguucgggacguaguugaagcaacgacaagccggauaaccgcucuugagacaggaagcuuaccauggagcugcucauccugaaggccaacgccaucaccaccauccugacggcggugaccuucugcuucgccagcggccagaacaucaccgaggaguucuaccaguccacgugcagcgccgucuccaagggguaccucagcgcccugcgcaccggcugguacaccuccgugaucaccaucgagcugagcaacaucaaggagaacaagugcaacgggaccgacgccaaggugaagcucaucaagcaggagcuggacaaguacaagaacgcggucacggagcugcagcuccugaugcaguccacccccgccaccggcagcggguccgccaucgccagcggcguggcggugugcaagguccugcaccucgagggcgaggugaacaagaucaaguccgcccugcugagcaccaacaaggccguggucucccucagcgggugcggcguguccgugcugacguucaagguccuggaccucaagaacuacaucgacaagcagcugcugccgauccucaacaagcagagcugcuccaucagcaacaucgagaccgugaucgaguuccagcagaagaacaaccggcugcuggagaucacccgcgaguucuccgugaacgccggggucaccacgcccgugagcaccuacaugcucaccaacagcgagcugcugucccucaucaacgacaugcccaucaccaacgaccagaagaagcugaugagcaacaacgugcagaucguccggcagcaguccuacagcaucaugugcaucaucaaggaggaggugcuggccuacgugguccagcucccccuguacggcgugaucgacacgccgugcuggaagcugcacaccagcccccucugcaccaccaacacgaaggagggguccaacaucugccugacccgcaccgaccggggcugguacugcgacaacgcgggcuccgugagcuucuucccccaggccgagaccugcaagguccaguccaaccgcguguucugcgacacgaugaacagccggacccuccccuccgaggucaaccugugcaacguggacaucuucaacccgaaguacgacugcaagaucaugaccagcaagaccgacguguccagcuccgucaucacgagccugggggccaucguguccugcuacggcaagaccaagugcaccgccagcaacaagugccgggggaucaucaagaccuucuccaacggcugcgacuacgugagcaacaagggcgucgacacggugagcguggggaacacccucuacuacgucaacaagcaggagggcaagucccuguacgugaagggggagcccaucaucaacuucuacgacccccugguguuccccagcgacgaguucgacgccuccaucagccaggucaacgagaagaucaaccagucccucgcguucauccgcaagagcgacgagcugcugcacaacgugaacgccggcaaguccaccaccaacaucaugaucaccacgaucaucaucgugaucaucgucauccuccugagccugaucgccguggggcuccugcuguacugcaaggcccgguccaccccggugacccugagcaaggaccagcucuccggcaucaacaacaucgccuucagcaacugaggacuaguguccaccugucccuccugggcugcuggauugucucguuuuccugccaaauaaacaggaucagcgcuuuacagaucuaaaaaaaaaaaaaaaaaaaaaaaaaaaaaaaaaaaaaaaaaaaaaaaaaaaaaaaaaaaaaaaaugcaucccccccccccccccccccccccccccccccaaaggcucuuuucagagccaccagaauu

SEQ ID NO: 5521 - RNA, 1946 nt, Artificial Sequence
  mRNA product Design e-4 comprising derived and/or modified sequence from HRSV(A2)__F_DSCav1_mut5 (opt2)
gggagacuccugucgggcggaaguaggaggaguagaguuuaaaaacaguacucuuuuuccgguucgggacguaguugaagcaacgacaagccggauaaccgcucuugagacaggaagcuuaccauggagcuccucauccucaaggccaacgccaucaccaccauccucaccgccgucaccuucugcuucgccuccggccagaacaucaccgaggaguucuaccaguccaccugcuccgccgucuccaagggcuaccucuccgcccuccgcaccggcugguacaccuccgucaucaccaucgagcucuccaacaucaaggagaacaagugcaacggcaccgacgccaaggucaagcucaucaagcaggagcucgacaaguacaagaacgccgucaccgagcuccagcuccucaugcaguccacccccgccaccggcuccggcuccgccaucgccuccggcgucgccgucugcaagguccuccaccucgagggcgaggucaacaagaucaaguccgcccuccucuccaccaacaaggccgucgucucccucuccggcugcggcgucuccguccucaccuucaagguccucgaccucaagaacuacaucgacaagcagcuccuccccauccucaacaagcaguccugcuccaucuccaacaucgagaccgucaucgaguuccagcagaagaacaaccgccuccucgagaucacccgcgaguucuccgucaacgccggcgucaccacccccgucuccaccuacaugcucaccaacuccgagcuccucucccucaucaacgacaugcccaucaccaacgaccagaagaagcucauguccaacaacguccagaucguccgccagcaguccuacuccaucaugugcaucaucaaggaggagguccucgccuacgucguccagcucccccucuacggcgucaucgacacccccugcuggaagcuccacaccuccccccucugcaccaccaacaccaaggagggcuccaacaucugccucacccgcaccgaccgcggcugguacugcgacaacgccggcuccgucuccuucuucccccaggccgagaccugcaagguccaguccaaccgcgucuucugcgacaccaugaacucccgcacccuccccuccgaggucaaccucugcaacgucgacaucuucaaccccaaguacgacugcaagaucaugaccuccaagaccgacgucuccuccuccgucaucaccucccucggcgccaucgucuccugcuacggcaagaccaagugcaccgccuccaacaagugccgcggcaucaucaagaccuucuccaacggcugcgacuacgucuccaacaagggcgucgacaccgucuccgucggcaacacccucuacuacgucaacaagcaggagggcaagucccucuacgucaagggcgagcccaucaucaacuucuacgacccccucgucuuccccuccgacgaguucgacgccuccaucucccaggucaacgagaagaucaaccagucccucgccuucauccgcaaguccgacgagcuccuccacaacgucaacgccggcaaguccaccaccaacaucaugaucaccaccaucaucaucgucaucaucgucauccuccucucccucaucgccgucggccuccuccucuacugcaaggcccgcuccacccccgucacccucuccaaggaccagcucuccggcaucaacaacaucgccuucuccaacugaggacuaguguccaccugucccuccugggcugcuggauugucucguuuuccugccaaauaaacaggaucagcgcuuuacagaucuaaaaaaaaaaaaaaaaaaaaaaaaaaaaaaaaaaaaaaaaaaaaaaaaaaaaaaaaaaaaaaaaugcaucccccccccccccccccccccccccccccccaaaggcucuuuucagagccaccagaauu

SEQ ID NO: 5522 - RNA, 1946 nt, Artificial Sequence
  mRNA product Design e-4 comprising derived and/or modified sequence from HRSV(A2)__F_DSCav1_mut5 (opt3)
gggagacuccugucgggcggaaguaggaggaguagaguuuaaaaacaguacucuuuuuccgguucgggacguaguugaagcaacgacaagccggauaaccgcucuugagacaggaagcuuaccauggagcugcucauccuuaaggccaacgcuauuaccacaauacugacugcagugacguucugcuuugccagcggccagaauaucaccgaagaguucuaccaauccacauguucugcggucucaaaaggguauuugagugcuuuaagaacuggaugguacaccagcguuauuacaaucgaacuguccaacauuaaggagaauaaaugcaacgguaccgacgccaaggugaaacuaaucaagcaggaacucgauaaguauaaaaaugcaguaacugagcugcagcuucugaugcagucuacacccgccaccggcucggggucagcuauagcaagcggaguggccgucuguaagguguugcaccucgagggcgaaguuaacaaaaucaagagugcucugcuguccacgaauaaagccguggucucucucagcgguugcgggguguccguauuaacuuuuaagguucuggaccuuaagaacuacauugauaaacaauugcugccuauccuaaauaagcagucauguaguauuagcaacaucgagaccgugauagaguuccagcagaaaaauaacaggcuccuggaaauuacacgggaguuuucugucaaugcgggagugacuaccccaguguccacauauaugcuuaccaacucagaacuguugagccucaucaaugacaugccgauuacgaacgaucaaaagaaacugaugaguaacaauguccagaucguucgccagcagucuuacuccaucaugugcauuauaaaggaggaaguguuagcauauguagugcaacugccccucuacggcgucaucgacacuccuuguuggaaacuucauacaagcccacugugcaccacuaacacaaaggagggcucgaauauuuguuugacccgaacggaucgugggugguacugcgacaacgccggaucuguguccuucuuuccccaggcugaaaccuguaagguucagucaaauagaguguucugcgauacaaugaacaguagaacucugccuagcgaggucaaucucugcaacguggacaucuuuaauccaaaauaugauuguaagauaaugaccuccaaaacagacguaucuagcucaguuauuaccagucugggugccaucguguccugcuacggcaagacuaaauguacagcaagcaacaagugcagggggaucauuaagaccuucucuaauggaugugauuaugucucaaacaaaggcguggacacugucaguguggguaauacgcuuuacuauguuaacaagcaagaggggaaaagccuguacgugaagggagaacccaucauuaauuuuuaugacccuuugguauucccauccgaugaguuugacgcuucuauaucgcaggucaacgagaaaaucaaccagagccucgccuucauucggaaguccgaugaacuguuacacaaugugaacgcgggcaagucaacaaccaauaucaugaucacuaccauuauaaucguuauuaucgugauucugcuaagucucaucgccgucggccugcuuuuguacugcaaagcacgcucuacaccggugacccugagcaaggaccagcucuccgggauaaacaauaucgcuuucucaaacugaggacuaguguccaccugucccuccugggcugcuggauugucucguuuuccugccaaauaaacaggaucagcgcuuuacagaucuaaaaaaaaaaaaaaaaaaaaaaaaaaaaaaaaaaaaaaaaaaaaaaaaaaaaaaaaaaaaaaaaugcaucccccccccccccccccccccccccccccccaaaggcucuuuucagagccaccagaauu

SEQ ID NO: 5523 - RNA, 1946 nt, Artificial Sequence
  mRNA product Design e-4 comprising derived and/or modified sequence from HRSV(A2)__F_DSCav1_mut5 (opt4)
gggagacuccugucgggcggaaguaggaggaguagaguuuaaaaacaguacucuuuuuccgguucgggacguaguugaagcaacgacaagccggauaaccgcucuugagacaggaagcuuaccauggagcugcugauccugaaggccaacgccaucaccaccauccugaccgccgugaccuucugcuucgccagcggccagaacaucaccgaggaguucuaccagagcaccugcagcgccgugagcaagggcuaccugagcgcccugagaaccggcugguacaccagcgugaucaccaucgagcugagcaacaucaaggagaacaagugcaacggcaccgacgccaaggugaagcugaucaagcaggagcuggacaaguacaagaacgccgugaccgagcugcagcugcugaugcagagcacccccgccaccggcagcggcagcgccaucgccagcggcguggccgugugcaaggugcugcaccuggagggcgaggugaacaagaucaagagcgcccugcugagcaccaacaaggccguggugagccugagcggcugcggcgugagcgugcugaccuucaaggugcuggaccugaagaacuacaucgacaagcagcugcugcccauccugaacaagcagagcugcagcaucagcaacaucgagaccgugaucgaguuccagcagaagaacaacagacugcuggagaucaccagagaguucagcgugaacgccggcgugaccacccccgugagcaccuacaugcugaccaacagcgagcugcugagccugaucaacgacaugcccaucaccaacgaccagaagaagcugaugagcaacaacgugcagaucgugagacagcagagcuacagcaucaugugcaucaucaaggaggaggugcuggccuacguggugcagcugccccuguacggcgugaucgacacccccugcuggaagcugcacaccagcccccugugcaccaccaacaccaaggagggcagcaacaucugccugaccagaaccgacagaggcugguacugcgacaacgccggcagcgugagcuucuucccccaggccgagaccugcaaggugcagagcaacagaguguucugcgacaccaugaacagcagaacccugcccagcgaggugaaccugugcaacguggacaucuucaaccccaaguacgacugcaagaucaugaccagcaagaccgacgugagcagcagcgugaucaccagccugggcgccaucgugagcugcuacggcaagaccaagugcaccgccagcaacaagugcagaggcaucaucaagaccuucagcaacggcugcgacuacgugagcaacaagggcguggacaccgugagcgugggcaacacccuguacuacgugaacaagcaggagggcaagagccuguacgugaagggcgagcccaucaucaacuucuacgacccccugguguuccccagcgacgaguucgacgccagcaucagccaggugaacgagaagaucaaccagagccuggccuucaucagaaagagcgacgagcugcugcacaacgugaacgccggcaagagcaccaccaacaucaugaucaccaccaucaucaucgugaucaucgugauccugcugagccugaucgccgugggccugcugcuguacugcaaggccagaagcacccccgugacccugagcaaggaccagcugagcggcaucaacaacaucgccuucagcaacugaggacuaguguccaccugucccuccugggcugcuggauugucucguuuuccugccaaauaaacaggaucagcgcuuuacagaucuaaaaaaaaaaaaaaaaaaaaaaaaaaaaaaaaaaaaaaaaaaaaaaaaaaaaaaaaaaaaaaaaugcaucccccccccccccccccccccccccccccccaaaggcucuuuucagagccaccagaauu

SEQ ID NO: 5524 - RNA, 1946 nt, Artificial Sequence
  mRNA product Design e-4 comprising derived and/or modified sequence from HRSV(A2)__F_DSCav1_mut5 (opt5)
gggagacuccugucgggcggaaguaggaggaguagaguuuaaaaacaguacucuuuuuccgguucgggacguaguugaagcaacgacaagccggauaaccgcucuugagacaggaagcuuaccauggagcugcucauccugaaggccaacgcuauuaccacaauccuuacggccgugaccuucugcuuugcgagcggccagaauauuacagaagaguucuaccaauccaccuguucugcugucagcaaaggguaucuguccgcccucagaacaggaugguacaccucuguuaucacaauugaacugagcaacaucaaggagaauaaaugcaacggcaccgacgccaaggugaaacuuaucaagcaggaacuggauaaguauaaaaaugcugugacggagcuccagcugcugaugcaguccacccccgccacagggucuggaagcgcuauugccuccggcgucgcgguguguaagguucuccaccuggagggggaagugaacaaaaucaagagcgcccuucugucuaccaauaaagcugucgugucccucagcggaugcggcguuucugugcugacauuuaagguccuugaccugaagaacuacauugauaaacaacuccugccuauccugaauaagcaguccuguagcauuucuaacaucgagaccgugauugaguuccagcagaaaaauaaccggcuccuggaaaucacgcgcgaguuuuccgugaaugccggcgucacaaccccgguuagcacauauaugcuuaccaacuccgaacugcucucucugaucaaugacaugcccauuaccaacgaucaaaagaaacuuaugagcaacaaugugcagaucgugagacagcaguccuacagcauuaugugcaucauuaaggaggaaguccuggcuuaugugguucaacucccucuguacggggugaucgacacacccuguuggaaacugcauacgucuccucucugcaccacaaacaccaaggagggauccaauaucugucugacacggaccgaucgcggcugguacugcgacaacgccgggagcgucucuuucuuuccccaggcggaaacguguaaggugcagagcaauagaguuuucugcgauacaaugaacuccagaacccugccuucugaggugaaucucugcaacgucgacauuuuuaauccgaaauaugauuguaagaucaugaccagcaaaacagacguguccagcucugucauuaccucccugggagccaucgugagcugcuacggcaagacaaaauguacggcuucuaacaagugccgggggauuaucaagaccuucuccaauggaugugauuauguuagcaacaaaggcguggacacagucuccgugggcaauacccuuuacuauguuaacaagcaagaggggaaaucucuguacgugaagggagaacccaucauuaauuuuuaugacccucucgucuuccccagcgaugaguuugacgccuccaucucucaggugaacgagaaaauuaaccagagccuggcuuucauccgcaaguccgaugaacugcuccacaaugugaacgccggcaagagcacaaccaauauuaugaucacgaccauuaucaucguuauuaucgucauucugcuuucucugaucgccguggggcuccugcuguacugcaaagcuagauccacaccugugacccuuagcaaggaccagcucucuggaauuaacaauaucgcguucuccaacugaggacuaguguccaccugucccuccugggcugcuggauugucucguuuuccugccaaauaaacaggaucagcgcuuuacagaucuaaaaaaaaaaaaaaaaaaaaaaaaaaaaaaaaaaaaaaaaaaaaaaaaaaaaaaaaaaaaaaaaugcaucccccccccccccccccccccccccccccccaaaggcucuuuucagagccaccagaauu

SEQ ID NO: 5525 - RNA, 1946 nt, Artificial Sequence
  mRNA product Design e-4 comprising derived and/or modified sequence from HRSV(A2)__F_DSCav1_mut5 (opt6)
gggagacuccugucgggcggaaguaggaggaguagaguuuaaaaacaguacucuuuuuccgguucgggacguaguugaagcaacgacaagccggauaaccgcucuugagacaggaagcuuaccauggaacuauuaauacuuaaagccaacgcaauaacaacaauucucacugcugucaccuucugcuucgccucaggccaaaacauaacggaagaauuuuaccaaucaacaugcucugcaguauccaaaggcuaccuaucugcucuaagaacagguugguauacaucaguaauaaccauagaacuaucaaacauaaaagaaaauaaaugcaacggaacagacgcaaaaguuaaacucauaaaacaagaacuagacaaauauaaaaacgcaguuaccgaacuacaacuacuuaugcaauccacucccgccacuggaucaggaucagcaauagcaucaggagucgcaguauguaaagucuuacaccucgaaggcgaagucaauaaaaucaaauccgcauuacuauccacaaacaaagcagucguaucccuaagcggaugcggaguaucaguacuaacauuuaaaguacuagaccuaaaaaauuacaucgauaaacaacuauuaccuauauuaaacaaacaauccugcuccauuucaaauaucgaaaccguaauagaauuucaacaaaaaaacaacagauuacuagaaauaacaagagaauuuuccguaaaugcuggcguaacaacaccaguauccacauacaugcucacaaacuccgaacuacuaucacuaauaaaugacaugcccauaacaaacgaucaaaaaaaacuaaugucaaauaauguacaaauaguaagacaacaaagcuacuccaucauguguauaauaaaagaagaaguacuagcauacguaguucaacuaccacuuuacggcguaaucgacaccccuugcuggaaacuacacaccuccccucuaugcaccacaaacacaaaagaagguuccaacauaugccuuaccagaacagacagaggcugguauugcgacaacgcaggaucaguuucauuuuuuccacaagcugaaacaugcaaaguacaaucaaacagagucuucugcgacacaaugaacucaagaacucuacccucagaaguaaaccuauguaacguagacauuuucaaccccaaauacgacugcaaaauuaugacaucaaaaacagacguuucaucaucaguuaucaccucauuaggagcaauaguaagcugcuacggaaaaacaaaaugcaccgccucaaauaaaugcagaggaauaauaaaaacuuucuccaacggaugcgacuacguuucaaacaaagguguagacacuguaucaguaggaaacacacuauauuacguaaauaaacaagaaggaaaaucacuuuaugucaaaggagaaccaauaaucaauuucuacgacccauuaguauucccaucagacgaauuugaugcuucaauaucacaaguaaacgaaaaaauaaaucaaucacucgcauuuauacgaaaaucagacgaacuacuacacaauguaaacgcaggcaaaucaacaacaaacauaaugauaacaacaauaaucauuguaauaauaguaauacuucuaucucuaauagcaguaggauuacuccucuacugcaaagcaagaucaaccccuguaacacuaucaaaagaccaacuuucagguauaaauaauauagcuuuuuccaauuaaggacuaguguccaccugucccuccugggcugcuggauugucucguuuuccugccaaauaaacaggaucagcgcuuuacagaucuaaaaaaaaaaaaaaaaaaaaaaaaaaaaaaaaaaaaaaaaaaaaaaaaaaaaaaaaaaaaaaaaugcaucccccccccccccccccccccccccccccccaaaggcucuuuucagagccaccagaauu

SEQ ID NO: 5526 - RNA, 1946 nt, Artificial Sequence
  mRNA product Design e-4 comprising derived and/or modified sequence from HRSV(A2)__F_DSCav1_mut5 (opt11)
gggagacuccugucgggcggaaguaggaggaguagaguuuaaaaacaguacucuuuuuccgguucgggacguaguugaagcaacgacaagccggauaaccgcucuugagacaggaagcuuaccauggagcuccuaauccucaaagccaacgcgaucacuacaauccucacagccgucaccuucugcuucgccuccggccaaaacaucaccgaggaguucuaccaaucaaccugcuccgccguaucaaaaggauaccuaagcgcccuacggaccggcugguacacaucugucaucaccaucgaacuaucaaacaucaaagaaaacaaaugcaacggaaccgacgcaaaagucaaacugauuaaacaagaacuagacaaauacaaaaacgcagucaccgaacugcaauuacucaugcaaagcacaccggccaccggcucaggcagcgccaucgccuccggcgucgccgucugcaaaguucuccaccucgagggcgaagucaacaaaauaaaaucugcccuccucuccaccaacaaagccgucgucucccucagcggcugcggagucuccguccucaccuucaaaguucucgaucucaagaacuauauugacaaacaacuucuacccauacucaacaaacaaagcugcagcauauccaacaucgaaaccgucaucgaguuccaacaaaagaacaaccgccuccucgaaauaacccgcgaguucagcguuaacgccggagucacuaccccugucuccaccuacaugcucaccaacuccgaacuccuaucacuaaucaacgacaugcccauaaccaacgaccagaagaaacucauguccaacaacguccaaauuguccgacaacaaagcuacuccauaaugugcauaauaaaagaggaaguccucgccuacgucguacaacugccccuuuauggcguaaucgacacacccugcuggaaacuccacacgucaccccucugcaccaccaacacaaaagaaggcucgaacaucugccuaacacggacugaccgcggcugguacugcgacaacgccggcuccgucagcuucuucccacaagccgaaaccugcaaaguacaauccaaccgaguauucugcgacaccaugaacuccagaacccuccccucagaggucaaccugugcaacguagacaucuucaaccccaaauacgacugcaaaauaaugaccucaaaaacagacgucuccucuuccguaaucaccagccucggagccaucgucagcugcuacggcaaaaccaaaugcaccgccucaaacaaaugccgcggcaucaucaaaacauucucaaacggcugcgacuacgucuccaacaaaggcgucgacacaguaagcguaggcaacacacuguacuacgucaacaaacaagagggaaaaucacucuacgucaaaggagaacccauaaucaacuucuacgacccccucguuuuccccagcgacgaguucgacgccagcauaucccaagucaacgagaaaauuaaccaaucccuagcauucauccgaaaaucugacgaacugcuccacaacgucaacgcgggaaaaucaacaaccaacauaaugauaaccacaaucauaauagucaucaucguaauccuccucagccuaaucgcugucggccuccuccucuacugcaaagcccguuccaccccagucacacuuuccaaggaccaacuaagcggaauaaacaacaucgcguucucaaacuaaggacuaguguccaccugucccuccugggcugcuggauugucucguuuuccugccaaauaaacaggaucagcgcuuuacagaucuaaaaaaaaaaaaaaaaaaaaaaaaaaaaaaaaaaaaaaaaaaaaaaaaaaaaaaaaaaaaaaaaugcaucccccccccccccccccccccccccccccccaaaggcucuuuucagagccaccagaauu

SEQ ID NO: 5527 - RNA, 1913 nt, Artificial Sequence
  mRNA product Design e-5 comprising derived and/or modified sequence from HRSV(A2)__F_DSCav1_mut5 (opt1)
gggagagcggcucggccauuuugucccagucaguccggaggcugcggcugcagaaguaccgccugcggaguaacugcaaagaagcuuaccauggagcugcucauccugaaggccaacgccaucaccaccauccugacggcggugaccuucugcuucgccagcggccagaacaucaccgaggaguucuaccaguccacgugcagcgccgucuccaagggguaccucagcgcccugcggaccggcugguacaccuccgugaucaccaucgagcugagcaacaucaaggagaacaagugcaacgggaccgacgccaaggugaagcucaucaagcaggagcuggacaaguacaagaacgcggucacggagcugcagcuccugaugcaguccaccccggcaaccggcuccggcuccgccaucgcgagcggcgucgccgugugcaaggugcugcaccucgagggggaggucaacaagaucaagagcgcccugcuguccaccaacaaggccguggugagccucuccggcugcggcgucagcgugcugaccuucaaggugcuggaccucaagaacuacaucgacaagcagcugcugcccauccugaacaagcagagcugcuccaucagcaacaucgagacggugaucgaguuccagcagaagaacaaccggcuccuggagaucacccgcgaguucagcgugaacgccggggucaccacccccguguccacguacaugcugaccaacagcgagcuccugucccugaucaacgacaugccgaucaccaacgaccagaagaagcucaugagcaacaacgugcagaucguccggcagcaguccuacagcaucaugugcaucaucaaggaggaggugcuggcguacgugguccagcugccccucuacggcgugaucgacacccccugcuggaagcugcacacgagcccccugugcaccaccaacaccaaggagggguccaacaucugccucacgcgcaccgaccggggcugguacugcgacaacgccggcagcgucuccuucuucccgcaggccgagaccugcaaggugcagagcaaccgcguguucugcgacaccaugaacucccggacgcugcccagcgagguaaaccucugcaacgucgacaucuucaaccccaaguacgacugcaagaucaugaccuccaagaccgacgugagcuccagcgugaucaccucccugggggccaucgucagcugcuacggcaagacgaagugcaccgccagcaacaagugccgggggaucaucaagaccuucuccaacggcugcgacuacgugagcaacaagggcguggacaccguguccgucgggaacacccuguacuacgugaacaagcaggagggcaagagccucuacgugaagggggagcccaucaucaacuucuacgacccgcuggucuuccccuccgacgaguucgacgcgagcaucucccaggugaacgagaagaucaaccagagccuggccuucauccgcaaguccgacgagcugcuccacaacgugaacgccggcaagagcacgaccaacaucaugaucaccaccaucaucaucgucaucaucgugauccugcugucccucaucgccguggggcugcugcucuacugcaaggcccggagcacgcccgucacccuguccaaggaccagcugagcggcaucaacaacaucgcguucuccaacugaggacuaguguccaccugucccuccugggcugcuggauugucucguuuuccugccaaauaaacaggaucagcgcuuuacagaucuaaaaaaaaaaaaaaaaaaaaaaaaaaaaaaaaaaaaaaaaaaaaaaaaaaaaaaaaaaaaaaaaugcaucccccccccccccccccccccccccccccccaaaggcucuuuucagagccaccagaauu

SEQ ID NO: 5528 - RNA, 1913 nt, Artificial Sequence
  mRNA product Design e-5 comprising derived and/or modified sequence from HRSV(A2)__F_DSCav1_mut5 (opt1)
gggagagcggcucggccauuuugucccagucaguccggaggcugcggcugcagaaguaccgccugcggaguaacugcaaagaagcuuaccauggagcugcucauccugaaggccaacgccaucaccaccauccugacggcggugaccuucugcuucgccagcggccagaacaucaccgaggaguucuaccaguccacgugcagcgccgucuccaagggguaccucagcgcccugcgcaccggcugguacaccuccgugaucaccaucgagcugagcaacaucaaggagaacaagugcaacgggaccgacgccaaggugaagcucaucaagcaggagcuggacaaguacaagaacgcggucacggagcugcagcuccugaugcaguccacccccgccaccggcagcggguccgccaucgccagcggcguggcggugugcaagguccugcaccucgagggcgaggugaacaagaucaaguccgcccugcugagcaccaacaaggccguggucucccucagcgggugcggcguguccgugcugacguucaagguccuggaccucaagaacuacaucgacaagcagcugcugccgauccucaacaagcagagcugcuccaucagcaacaucgagaccgugaucgaguuccagcagaagaacaaccggcugcuggagaucacccgcgaguucuccgugaacgccggggucaccacgcccgugagcaccuacaugcucaccaacagcgagcugcugucccucaucaacgacaugcccaucaccaacgaccagaagaagcugaugagcaacaacgugcagaucguccggcagcaguccuacagcaucaugugcaucaucaaggaggaggugcuggccuacgugguccagcucccccuguacggcgugaucgacacgccgugcuggaagcugcacaccagcccccucugcaccaccaacacgaaggagggguccaacaucugccugacccgcaccgaccggggcugguacugcgacaacgcgggcuccgugagcuucuucccccaggccgagaccugcaagguccaguccaaccgcguguucugcgacacgaugaacagccggacccuccccuccgaggucaaccugugcaacguggacaucuucaacccgaaguacgacugcaagaucaugaccagcaagaccgacguguccagcuccgucaucacgagccugggggccaucguguccugcuacggcaagaccaagugcaccgccagcaacaagugccgggggaucaucaagaccuucuccaacggcugcgacuacgugagcaacaagggcgucgacacggugagcguggggaacacccucuacuacgucaacaagcaggagggcaagucccuguacgugaagggggagcccaucaucaacuucuacgacccccugguguuccccagcgacgaguucgacgccuccaucagccaggucaacgagaagaucaaccagucccucgcguucauccgcaagagcgacgagcugcugcacaacgugaacgccggcaaguccaccaccaacaucaugaucaccacgaucaucaucgugaucaucgucauccuccugagccugaucgccguggggcuccugcuguacugcaaggcccgguccaccccggugacccugagcaaggaccagcucuccggcaucaacaacaucgccuucagcaacugaggacuaguguccaccugucccuccugggcugcuggauugucucguuuuccugccaaauaaacaggaucagcgcuuuacagaucuaaaaaaaaaaaaaaaaaaaaaaaaaaaaaaaaaaaaaaaaaaaaaaaaaaaaaaaaaaaaaaaaugcaucccccccccccccccccccccccccccccccaaaggcucuuuucagagccaccagaauu

SEQ ID NO: 5529 - RNA, 1913 nt, Artificial Sequence
  mRNA product Design e-5 comprising derived and/or modified sequence from HRSV(A2)__F_DSCav1_mut5 (opt2)
gggagagcggcucggccauuuugucccagucaguccggaggcugcggcugcagaaguaccgccugcggaguaacugcaaagaagcuuaccauggagcuccucauccucaaggccaacgccaucaccaccauccucaccgccgucaccuucugcuucgccuccggccagaacaucaccgaggaguucuaccaguccaccugcuccgccgucuccaagggcuaccucuccgcccuccgcaccggcugguacaccuccgucaucaccaucgagcucuccaacaucaaggagaacaagugcaacggcaccgacgccaaggucaagcucaucaagcaggagcucgacaaguacaagaacgccgucaccgagcuccagcuccucaugcaguccacccccgccaccggcuccggcuccgccaucgccuccggcgucgccgucugcaagguccuccaccucgagggcgaggucaacaagaucaaguccgcccuccucuccaccaacaaggccgucgucucccucuccggcugcggcgucuccguccucaccuucaagguccucgaccucaagaacuacaucgacaagcagcuccuccccauccucaacaagcaguccugcuccaucuccaacaucgagaccgucaucgaguuccagcagaagaacaaccgccuccucgagaucacccgcgaguucuccgucaacgccggcgucaccacccccgucuccaccuacaugcucaccaacuccgagcuccucucccucaucaacgacaugcccaucaccaacgaccagaagaagcucauguccaacaacguccagaucguccgccagcaguccuacuccaucaugugcaucaucaaggaggagguccucgccuacgucguccagcucccccucuacggcgucaucgacacccccugcuggaagcuccacaccuccccccucugcaccaccaacaccaaggagggcuccaacaucugccucacccgcaccgaccgcggcugguacugcgacaacgccggcuccgucuccuucuucccccaggccgagaccugcaagguccaguccaaccgcgucuucugcgacaccaugaacucccgcacccuccccuccgaggucaaccucugcaacgucgacaucuucaaccccaaguacgacugcaagaucaugaccuccaagaccgacgucuccuccuccgucaucaccucccucggcgccaucgucuccugcuacggcaagaccaagugcaccgccuccaacaagugccgcggcaucaucaagaccuucuccaacggcugcgacuacgucuccaacaagggcgucgacaccgucuccgucggcaacacccucuacuacgucaacaagcaggagggcaagucccucuacgucaagggcgagcccaucaucaacuucuacgacccccucgucuuccccuccgacgaguucgacgccuccaucucccaggucaacgagaagaucaaccagucccucgccuucauccgcaaguccgacgagcuccuccacaacgucaacgccggcaaguccaccaccaacaucaugaucaccaccaucaucaucgucaucaucgucauccuccucucccucaucgccgucggccuccuccucuacugcaaggcccgcuccacccccgucacccucuccaaggaccagcucuccggcaucaacaacaucgccuucuccaacugaggacuaguguccaccugucccuccugggcugcuggauugucucguuuuccugccaaauaaacaggaucagcgcuuuacagaucuaaaaaaaaaaaaaaaaaaaaaaaaaaaaaaaaaaaaaaaaaaaaaaaaaaaaaaaaaaaaaaaaugcaucccccccccccccccccccccccccccccccaaaggcucuuuucagagccaccagaauu

SEQ ID NO: 5530 - RNA, 1913 nt, Artificial Sequence
  mRNA product Design e-5 comprising derived and/or modified sequence from HRSV(A2)__F_DSCav1_mut5 (opt3)
gggagagcggcucggccauuuugucccagucaguccggaggcugcggcugcagaaguaccgccugcggaguaacugcaaagaagcuuaccauggagcugcucauccuuaaggccaacgcuauuaccacaauacugacugcagugacguucugcuuugccagcggccagaauaucaccgaagaguucuaccaauccacauguucugcggucucaaaaggguauuugagugcuuuaagaacuggaugguacaccagcguuauuacaaucgaacuguccaacauuaaggagaauaaaugcaacgguaccgacgccaaggugaaacuaaucaagcaggaacucgauaaguauaaaaaugcaguaacugagcugcagcuucugaugcagucuacacccgccaccggcucggggucagcuauagcaagcggaguggccgucuguaagguguugcaccucgagggcgaaguuaacaaaaucaagagugcucugcuguccacgaauaaagccguggucucucucagcgguugcgggguguccguauuaacuuuuaagguucuggaccuuaagaacuacauugauaaacaauugcugccuauccuaaauaagcagucauguaguauuagcaacaucgagaccgugauagaguuccagcagaaaaauaacaggcuccuggaaauuacacgggaguuuucugucaaugcgggagugacuaccccaguguccacauauaugcuuaccaacucagaacuguugagccucaucaaugacaugccgauuacgaacgaucaaaagaaacugaugaguaacaauguccagaucguucgccagcagucuuacuccaucaugugcauuauaaaggaggaaguguuagcauauguagugcaacugccccucuacggcgucaucgacacuccuuguuggaaacuucauacaagcccacugugcaccacuaacacaaaggagggcucgaauauuuguuugacccgaacggaucgugggugguacugcgacaacgccggaucuguguccuucuuuccccaggcugaaaccuguaagguucagucaaauagaguguucugcgauacaaugaacaguagaacucugccuagcgaggucaaucucugcaacguggacaucuuuaauccaaaauaugauuguaagauaaugaccuccaaaacagacguaucuagcucaguuauuaccagucugggugccaucguguccugcuacggcaagacuaaauguacagcaagcaacaagugcagggggaucauuaagaccuucucuaauggaugugauuaugucucaaacaaaggcguggacacugucaguguggguaauacgcuuuacuauguuaacaagcaagaggggaaaagccuguacgugaagggagaacccaucauuaauuuuuaugacccuuugguauucccauccgaugaguuugacgcuucuauaucgcaggucaacgagaaaaucaaccagagccucgccuucauucggaaguccgaugaacuguuacacaaugugaacgcgggcaagucaacaaccaauaucaugaucacuaccauuauaaucguuauuaucgugauucugcuaagucucaucgccgucggccugcuuuuguacugcaaagcacgcucuacaccggugacccugagcaaggaccagcucuccgggauaaacaauaucgcuuucucaaacugaggacuaguguccaccugucccuccugggcugcuggauugucucguuuuccugccaaauaaacaggaucagcgcuuuacagaucuaaaaaaaaaaaaaaaaaaaaaaaaaaaaaaaaaaaaaaaaaaaaaaaaaaaaaaaaaaaaaaaaugcaucccccccccccccccccccccccccccccccaaaggcucuuuucagagccaccagaauu

SEQ ID NO: 5531 - RNA, 1913 nt, Artificial Sequence
  mRNA product Design e-5 comprising derived and/or modified sequence from HRSV(A2)__F_DSCav1_mut5 (opt4)
gggagagcggcucggccauuuugucccagucaguccggaggcugcggcugcagaaguaccgccugcggaguaacugcaaagaagcuuaccauggagcugcugauccugaaggccaacgccaucaccaccauccugaccgccgugaccuucugcuucgccagcggccagaacaucaccgaggaguucuaccagagcaccugcagcgccgugagcaagggcuaccugagcgcccugagaaccggcugguacaccagcgugaucaccaucgagcugagcaacaucaaggagaacaagugcaacggcaccgacgccaaggugaagcugaucaagcaggagcuggacaaguacaagaacgccgugaccgagcugcagcugcugaugcagagcacccccgccaccggcagcggcagcgccaucgccagcggcguggccgugugcaaggugcugcaccuggagggcgaggugaacaagaucaagagcgcccugcugagcaccaacaaggccguggugagccugagcggcugcggcgugagcgugcugaccuucaaggugcuggaccugaagaacuacaucgacaagcagcugcugcccauccugaacaagcagagcugcagcaucagcaacaucgagaccgugaucgaguuccagcagaagaacaacagacugcuggagaucaccagagaguucagcgugaacgccggcgugaccacccccgugagcaccuacaugcugaccaacagcgagcugcugagccugaucaacgacaugcccaucaccaacgaccagaagaagcugaugagcaacaacgugcagaucgugagacagcagagcuacagcaucaugugcaucaucaaggaggaggugcuggccuacguggugcagcugccccuguacggcgugaucgacacccccugcuggaagcugcacaccagcccccugugcaccaccaacaccaaggagggcagcaacaucugccugaccagaaccgacagaggcugguacugcgacaacgccggcagcgugagcuucuucccccaggccgagaccugcaaggugcagagcaacagaguguucugcgacaccaugaacagcagaacccugcccagcgaggugaaccugugcaacguggacaucuucaaccccaaguacgacugcaagaucaugaccagcaagaccgacgugagcagcagcgugaucaccagccugggcgccaucgugagcugcuacggcaagaccaagugcaccgccagcaacaagugcagaggcaucaucaagaccuucagcaacggcugcgacuacgugagcaacaagggcguggacaccgugagcgugggcaacacccuguacuacgugaacaagcaggagggcaagagccuguacgugaagggcgagcccaucaucaacuucuacgacccccugguguuccccagcgacgaguucgacgccagcaucagccaggugaacgagaagaucaaccagagccuggccuucaucagaaagagcgacgagcugcugcacaacgugaacgccggcaagagcaccaccaacaucaugaucaccaccaucaucaucgugaucaucgugauccugcugagccugaucgccgugggccugcugcuguacugcaaggccagaagcacccccgugacccugagcaaggaccagcugagcggcaucaacaacaucgccuucagcaacugaggacuaguguccaccugucccuccugggcugcuggauugucucguuuuccugccaaauaaacaggaucagcgcuuuacagaucuaaaaaaaaaaaaaaaaaaaaaaaaaaaaaaaaaaaaaaaaaaaaaaaaaaaaaaaaaaaaaaaaugcaucccccccccccccccccccccccccccccccaaaggcucuuuucagagccaccagaauu

SEQ ID NO: 5532 - RNA, 1913 nt, Artificial Sequence
  mRNA product Design e-5 comprising derived and/or modified sequence from HRSV(A2)__F_DSCav1_mut5 (opt5)
gggagagcggcucggccauuuugucccagucaguccggaggcugcggcugcagaaguaccgccugcggaguaacugcaaagaagcuuaccauggagcugcucauccugaaggccaacgcuauuaccacaauccuuacggccgugaccuucugcuuugcgagcggccagaauauuacagaagaguucuaccaauccaccuguucugcugucagcaaaggguaucuguccgcccucagaacaggaugguacaccucuguuaucacaauugaacugagcaacaucaaggagaauaaaugcaacggcaccgacgccaaggugaaacuuaucaagcaggaacuggauaaguauaaaaaugcugugacggagcuccagcugcugaugcaguccacccccgccacagggucuggaagcgcuauugccuccggcgucgcgguguguaagguucuccaccuggagggggaagugaacaaaaucaagagcgcccuucugucuaccaauaaagcugucgugucccucagcggaugcggcguuucugugcugacauuuaagguccuugaccugaagaacuacauugauaaacaacuccugccuauccugaauaagcaguccuguagcauuucuaacaucgagaccgugauugaguuccagcagaaaaauaaccggcuccuggaaaucacgcgcgaguuuuccgugaaugccggcgucacaaccccgguuagcacauauaugcuuaccaacuccgaacugcucucucugaucaaugacaugcccauuaccaacgaucaaaagaaacuuaugagcaacaaugugcagaucgugagacagcaguccuacagcauuaugugcaucauuaaggaggaaguccuggcuuaugugguucaacucccucuguacggggugaucgacacacccuguuggaaacugcauacgucuccucucugcaccacaaacaccaaggagggauccaauaucugucugacacggaccgaucgcggcugguacugcgacaacgccgggagcgucucuuucuuuccccaggcggaaacguguaaggugcagagcaauagaguuuucugcgauacaaugaacuccagaacccugccuucugaggugaaucucugcaacgucgacauuuuuaauccgaaauaugauuguaagaucaugaccagcaaaacagacguguccagcucugucauuaccucccugggagccaucgugagcugcuacggcaagacaaaauguacggcuucuaacaagugccgggggauuaucaagaccuucuccaauggaugugauuauguuagcaacaaaggcguggacacagucuccgugggcaauacccuuuacuauguuaacaagcaagaggggaaaucucuguacgugaagggagaacccaucauuaauuuuuaugacccucucgucuuccccagcgaugaguuugacgccuccaucucucaggugaacgagaaaauuaaccagagccuggcuuucauccgcaaguccgaugaacugcuccacaaugugaacgccggcaagagcacaaccaauauuaugaucacgaccauuaucaucguuauuaucgucauucugcuuucucugaucgccguggggcuccugcuguacugcaaagcuagauccacaccugugacccuuagcaaggaccagcucucuggaauuaacaauaucgcguucuccaacugaggacuaguguccaccugucccuccugggcugcuggauugucucguuuuccugccaaauaaacaggaucagcgcuuuacagaucuaaaaaaaaaaaaaaaaaaaaaaaaaaaaaaaaaaaaaaaaaaaaaaaaaaaaaaaaaaaaaaaaugcaucccccccccccccccccccccccccccccccaaaggcucuuuucagagccaccagaauu

SEQ ID NO: 5533 - RNA, 1913 nt, Artificial Sequence
  mRNA product Design e-5 comprising derived and/or modified sequence from HRSV(A2)__F_DSCav1_mut5 (opt6)
gggagagcggcucggccauuuugucccagucaguccggaggcugcggcugcagaaguaccgccugcggaguaacugcaaagaagcuuaccauggaacuauuaauacuuaaagccaacgcaauaacaacaauucucacugcugucaccuucugcuucgccucaggccaaaacauaacggaagaauuuuaccaaucaacaugcucugcaguauccaaaggcuaccuaucugcucuaagaacagguugguauacaucaguaauaaccauagaacuaucaaacauaaaagaaaauaaaugcaacggaacagacgcaaaaguuaaacucauaaaacaagaacuagacaaauauaaaaacgcaguuaccgaacuacaacuacuuaugcaauccacucccgccacuggaucaggaucagcaauagcaucaggagucgcaguauguaaagucuuacaccucgaaggcgaagucaauaaaaucaaauccgcauuacuauccacaaacaaagcagucguaucccuaagcggaugcggaguaucaguacuaacauuuaaaguacuagaccuaaaaaauuacaucgauaaacaacuauuaccuauauuaaacaaacaauccugcuccauuucaaauaucgaaaccguaauagaauuucaacaaaaaaacaacagauuacuagaaauaacaagagaauuuuccguaaaugcuggcguaacaacaccaguauccacauacaugcucacaaacuccgaacuacuaucacuaauaaaugacaugcccauaacaaacgaucaaaaaaaacuaaugucaaauaauguacaaauaguaagacaacaaagcuacuccaucauguguauaauaaaagaagaaguacuagcauacguaguucaacuaccacuuuacggcguaaucgacaccccuugcuggaaacuacacaccuccccucuaugcaccacaaacacaaaagaagguuccaacauaugccuuaccagaacagacagaggcugguauugcgacaacgcaggaucaguuucauuuuuuccacaagcugaaacaugcaaaguacaaucaaacagagucuucugcgacacaaugaacucaagaacucuacccucagaaguaaaccuauguaacguagacauuuucaaccccaaauacgacugcaaaauuaugacaucaaaaacagacguuucaucaucaguuaucaccucauuaggagcaauaguaagcugcuacggaaaaacaaaaugcaccgccucaaauaaaugcagaggaauaauaaaaacuuucuccaacggaugcgacuacguuucaaacaaagguguagacacuguaucaguaggaaacacacuauauuacguaaauaaacaagaaggaaaaucacuuuaugucaaaggagaaccaauaaucaauuucuacgacccauuaguauucccaucagacgaauuugaugcuucaauaucacaaguaaacgaaaaaauaaaucaaucacucgcauuuauacgaaaaucagacgaacuacuacacaauguaaacgcaggcaaaucaacaacaaacauaaugauaacaacaauaaucauuguaauaauaguaauacuucuaucucuaauagcaguaggauuacuccucuacugcaaagcaagaucaaccccuguaacacuaucaaaagaccaacuuucagguauaaauaauauagcuuuuuccaauuaaggacuaguguccaccugucccuccugggcugcuggauugucucguuuuccugccaaauaaacaggaucagcgcuuuacagaucuaaaaaaaaaaaaaaaaaaaaaaaaaaaaaaaaaaaaaaaaaaaaaaaaaaaaaaaaaaaaaaaaugcaucccccccccccccccccccccccccccccccaaaggcucuuuucagagccaccagaauu

SEQ ID NO: 5534 - RNA, 1913 nt, Artificial Sequence
  mRNA product Design e-5 comprising derived and/or modified sequence from HRSV(A2)__F_DSCav1_mut5 (opt11)
gggagagcggcucggccauuuugucccagucaguccggaggcugcggcugcagaaguaccgccugcggaguaacugcaaagaagcuuaccauggagcuccuaauccucaaagccaacgcgaucacuacaauccucacagccgucaccuucugcuucgccuccggccaaaacaucaccgaggaguucuaccaaucaaccugcuccgccguaucaaaaggauaccuaagcgcccuacggaccggcugguacacaucugucaucaccaucgaacuaucaaacaucaaagaaaacaaaugcaacggaaccgacgcaaaagucaaacugauuaaacaagaacuagacaaauacaaaaacgcagucaccgaacugcaauuacucaugcaaagcacaccggccaccggcucaggcagcgccaucgccuccggcgucgccgucugcaaaguucuccaccucgagggcgaagucaacaaaauaaaaucugcccuccucuccaccaacaaagccgucgucucccucagcggcugcggagucuccguccucaccuucaaaguucucgaucucaagaacuauauugacaaacaacuucuacccauacucaacaaacaaagcugcagcauauccaacaucgaaaccgucaucgaguuccaacaaaagaacaaccgccuccucgaaauaacccgcgaguucagcguuaacgccggagucacuaccccugucuccaccuacaugcucaccaacuccgaacuccuaucacuaaucaacgacaugcccauaaccaacgaccagaagaaacucauguccaacaacguccaaauuguccgacaacaaagcuacuccauaaugugcauaauaaaagaggaaguccucgccuacgucguacaacugccccuuuauggcguaaucgacacacccugcuggaaacuccacacgucaccccucugcaccaccaacacaaaagaaggcucgaacaucugccuaacacggacugaccgcggcugguacugcgacaacgccggcuccgucagcuucuucccacaagccgaaaccugcaaaguacaauccaaccgaguauucugcgacaccaugaacuccagaacccuccccucagaggucaaccugugcaacguagacaucuucaaccccaaauacgacugcaaaauaaugaccucaaaaacagacgucuccucuuccguaaucaccagccucggagccaucgucagcugcuacggcaaaaccaaaugcaccgccucaaacaaaugccgcggcaucaucaaaacauucucaaacggcugcgacuacgucuccaacaaaggcgucgacacaguaagcguaggcaacacacuguacuacgucaacaaacaagagggaaaaucacucuacgucaaaggagaacccauaaucaacuucuacgacccccucguuuuccccagcgacgaguucgacgccagcauaucccaagucaacgagaaaauuaaccaaucccuagcauucauccgaaaaucugacgaacugcuccacaacgucaacgcgggaaaaucaacaaccaacauaaugauaaccacaaucauaauagucaucaucguaauccuccucagccuaaucgcugucggccuccuccucuacugcaaagcccguuccaccccagucacacuuuccaaggaccaacuaagcggaauaaacaacaucgcguucucaaacuaaggacuaguguccaccugucccuccugggcugcuggauugucucguuuuccugccaaauaaacaggaucagcgcuuuacagaucuaaaaaaaaaaaaaaaaaaaaaaaaaaaaaaaaaaaaaaaaaaaaaaaaaaaaaaaaaaaaaaaaugcaucccccccccccccccccccccccccccccccaaaggcucuuuucagagccaccagaauu

SEQ ID NO: 5535 - RNA, 1980 nt, Artificial Sequence
  mRNA product Design e-6 comprising derived and/or modified sequence from HRSV(A2)__F_DSCav1_mut5 (opt1)
gggagagcggcucggccauuuugucccagucaguccggaggcugcggcugcagaaguaccgccugcggaguaacugcaaagaagcuuaccauggagcugcucauccugaaggccaacgccaucaccaccauccugacggcggugaccuucugcuucgccagcggccagaacaucaccgaggaguucuaccaguccacgugcagcgccgucuccaagggguaccucagcgcccugcggaccggcugguacaccuccgugaucaccaucgagcugagcaacaucaaggagaacaagugcaacgggaccgacgccaaggugaagcucaucaagcaggagcuggacaaguacaagaacgcggucacggagcugcagcuccugaugcaguccaccccggcaaccggcuccggcuccgccaucgcgagcggcgucgccgugugcaaggugcugcaccucgagggggaggucaacaagaucaagagcgcccugcuguccaccaacaaggccguggugagccucuccggcugcggcgucagcgugcugaccuucaaggugcuggaccucaagaacuacaucgacaagcagcugcugcccauccugaacaagcagagcugcuccaucagcaacaucgagacggugaucgaguuccagcagaagaacaaccggcuccuggagaucacccgcgaguucagcgugaacgccggggucaccacccccguguccacguacaugcugaccaacagcgagcuccugucccugaucaacgacaugccgaucaccaacgaccagaagaagcucaugagcaacaacgugcagaucguccggcagcaguccuacagcaucaugugcaucaucaaggaggaggugcuggcguacgugguccagcugccccucuacggcgugaucgacacccccugcuggaagcugcacacgagcccccugugcaccaccaacaccaaggagggguccaacaucugccucacgcgcaccgaccggggcugguacugcgacaacgccggcagcgucuccuucuucccgcaggccgagaccugcaaggugcagagcaaccgcguguucugcgacaccaugaacucccggacgcugcccagcgagguaaaccucugcaacgucgacaucuucaaccccaaguacgacugcaagaucaugaccuccaagaccgacgugagcuccagcgugaucaccucccugggggccaucgucagcugcuacggcaagacgaagugcaccgccagcaacaagugccgggggaucaucaagaccuucuccaacggcugcgacuacgugagcaacaagggcguggacaccguguccgucgggaacacccuguacuacgugaacaagcaggagggcaagagccucuacgugaagggggagcccaucaucaacuucuacgacccgcuggucuuccccuccgacgaguucgacgcgagcaucucccaggugaacgagaagaucaaccagagccuggccuucauccgcaaguccgacgagcugcuccacaacgugaacgccggcaagagcacgaccaacaucaugaucaccaccaucaucaucgucaucaucgugauccugcugucccucaucgccguggggcugcugcucuacugcaaggcccggagcacgcccgucacccuguccaaggaccagcugagcggcaucaacaacaucgcguucuccaacugaggacuaguacuggcugcaucucccuuuccucuguccuccauccuucucccaggauggugaagggggaccugguacccagugauccccaccccaggauccuaaaucaugacuuaccugcuaauaaaaacucauuggaaaagugagaagaucuaaaaaaaaaaaaaaaaaaaaaaaaaaaaaaaaaaaaaaaaaaaaaaaaaaaaaaaaaaaaaaaaugcaucccccccccccccccccccccccccccccccaaaggcucuuuucagagccaccagaauu

SEQ ID NO: 5536 - RNA, 1980 nt, Artificial Sequence
  mRNA product Design e-6 comprising derived and/or modified sequence from HRSV(A2)__F_DSCav1_mut5 (opt1)
gggagagcggcucggccauuuugucccagucaguccggaggcugcggcugcagaaguaccgccugcggaguaacugcaaagaagcuuaccauggagcugcucauccugaaggccaacgccaucaccaccauccugacggcggugaccuucugcuucgccagcggccagaacaucaccgaggaguucuaccaguccacgugcagcgccgucuccaagggguaccucagcgcccugcgcaccggcugguacaccuccgugaucaccaucgagcugagcaacaucaaggagaacaagugcaacgggaccgacgccaaggugaagcucaucaagcaggagcuggacaaguacaagaacgcggucacggagcugcagcuccugaugcaguccacccccgccaccggcagcggguccgccaucgccagcggcguggcggugugcaagguccugcaccucgagggcgaggugaacaagaucaaguccgcccugcugagcaccaacaaggccguggucucccucagcgggugcggcguguccgugcugacguucaagguccuggaccucaagaacuacaucgacaagcagcugcugccgauccucaacaagcagagcugcuccaucagcaacaucgagaccgugaucgaguuccagcagaagaacaaccggcugcuggagaucacccgcgaguucuccgugaacgccggggucaccacgcccgugagcaccuacaugcucaccaacagcgagcugcugucccucaucaacgacaugcccaucaccaacgaccagaagaagcugaugagcaacaacgugcagaucguccggcagcaguccuacagcaucaugugcaucaucaaggaggaggugcuggccuacgugguccagcucccccuguacggcgugaucgacacgccgugcuggaagcugcacaccagcccccucugcaccaccaacacgaaggagggguccaacaucugccugacccgcaccgaccggggcugguacugcgacaacgcgggcuccgugagcuucuucccccaggccgagaccugcaagguccaguccaaccgcguguucugcgacacgaugaacagccggacccuccccuccgaggucaaccugugcaacguggacaucuucaacccgaaguacgacugcaagaucaugaccagcaagaccgacguguccagcuccgucaucacgagccugggggccaucguguccugcuacggcaagaccaagugcaccgccagcaacaagugccgggggaucaucaagaccuucuccaacggcugcgacuacgugagcaacaagggcgucgacacggugagcguggggaacacccucuacuacgucaacaagcaggagggcaagucccuguacgugaagggggagcccaucaucaacuucuacgacccccugguguuccccagcgacgaguucgacgccuccaucagccaggucaacgagaagaucaaccagucccucgcguucauccgcaagagcgacgagcugcugcacaacgugaacgccggcaaguccaccaccaacaucaugaucaccacgaucaucaucgugaucaucgucauccuccugagccugaucgccguggggcuccugcuguacugcaaggcccgguccaccccggugacccugagcaaggaccagcucuccggcaucaacaacaucgccuucagcaacugaggacuaguacuggcugcaucucccuuuccucuguccuccauccuucucccaggauggugaagggggaccugguacccagugauccccaccccaggauccuaaaucaugacuuaccugcuaauaaaaacucauuggaaaagugagaagaucuaaaaaaaaaaaaaaaaaaaaaaaaaaaaaaaaaaaaaaaaaaaaaaaaaaaaaaaaaaaaaaaaugcaucccccccccccccccccccccccccccccccaaaggcucuuuucagagccaccagaauu

SEQ ID NO: 5537 - RNA, 1980 nt, Artificial Sequence
  mRNA product Design e-6 comprising derived and/or modified sequence from HRSV(A2)__F_DSCav1_mut5 (opt2)
gggagagcggcucggccauuuugucccagucaguccggaggcugcggcugcagaaguaccgccugcggaguaacugcaaagaagcuuaccauggagcuccucauccucaaggccaacgccaucaccaccauccucaccgccgucaccuucugcuucgccuccggccagaacaucaccgaggaguucuaccaguccaccugcuccgccgucuccaagggcuaccucuccgcccuccgcaccggcugguacaccuccgucaucaccaucgagcucuccaacaucaaggagaacaagugcaacggcaccgacgccaaggucaagcucaucaagcaggagcucgacaaguacaagaacgccgucaccgagcuccagcuccucaugcaguccacccccgccaccggcuccggcuccgccaucgccuccggcgucgccgucugcaagguccuccaccucgagggcgaggucaacaagaucaaguccgcccuccucuccaccaacaaggccgucgucucccucuccggcugcggcgucuccguccucaccuucaagguccucgaccucaagaacuacaucgacaagcagcuccuccccauccucaacaagcaguccugcuccaucuccaacaucgagaccgucaucgaguuccagcagaagaacaaccgccuccucgagaucacccgcgaguucuccgucaacgccggcgucaccacccccgucuccaccuacaugcucaccaacuccgagcuccucucccucaucaacgacaugcccaucaccaacgaccagaagaagcucauguccaacaacguccagaucguccgccagcaguccuacuccaucaugugcaucaucaaggaggagguccucgccuacgucguccagcucccccucuacggcgucaucgacacccccugcuggaagcuccacaccuccccccucugcaccaccaacaccaaggagggcuccaacaucugccucacccgcaccgaccgcggcugguacugcgacaacgccggcuccgucuccuucuucccccaggccgagaccugcaagguccaguccaaccgcgucuucugcgacaccaugaacucccgcacccuccccuccgaggucaaccucugcaacgucgacaucuucaaccccaaguacgacugcaagaucaugaccuccaagaccgacgucuccuccuccgucaucaccucccucggcgccaucgucuccugcuacggcaagaccaagugcaccgccuccaacaagugccgcggcaucaucaagaccuucuccaacggcugcgacuacgucuccaacaagggcgucgacaccgucuccgucggcaacacccucuacuacgucaacaagcaggagggcaagucccucuacgucaagggcgagcccaucaucaacuucuacgacccccucgucuuccccuccgacgaguucgacgccuccaucucccaggucaacgagaagaucaaccagucccucgccuucauccgcaaguccgacgagcuccuccacaacgucaacgccggcaaguccaccaccaacaucaugaucaccaccaucaucaucgucaucaucgucauccuccucucccucaucgccgucggccuccuccucuacugcaaggcccgcuccacccccgucacccucuccaaggaccagcucuccggcaucaacaacaucgccuucuccaacugaggacuaguacuggcugcaucucccuuuccucuguccuccauccuucucccaggauggugaagggggaccugguacccagugauccccaccccaggauccuaaaucaugacuuaccugcuaauaaaaacucauuggaaaagugagaagaucuaaaaaaaaaaaaaaaaaaaaaaaaaaaaaaaaaaaaaaaaaaaaaaaaaaaaaaaaaaaaaaaaugcaucccccccccccccccccccccccccccccccaaaggcucuuuucagagccaccagaauu

SEQ ID NO: 5538 - RNA, 1980 nt, Artificial Sequence
  mRNA product Design e-6 comprising derived and/or modified sequence from HRSV(A2)__F_DSCav1_mut5 (opt3)
gggagagcggcucggccauuuugucccagucaguccggaggcugcggcugcagaaguaccgccugcggaguaacugcaaagaagcuuaccauggagcugcucauccuuaaggccaacgcuauuaccacaauacugacugcagugacguucugcuuugccagcggccagaauaucaccgaagaguucuaccaauccacauguucugcggucucaaaaggguauuugagugcuuuaagaacuggaugguacaccagcguuauuacaaucgaacuguccaacauuaaggagaauaaaugcaacgguaccgacgccaaggugaaacuaaucaagcaggaacucgauaaguauaaaaaugcaguaacugagcugcagcuucugaugcagucuacacccgccaccggcucggggucagcuauagcaagcggaguggccgucuguaagguguugcaccucgagggcgaaguuaacaaaaucaagagugcucugcuguccacgaauaaagccguggucucucucagcgguugcgggguguccguauuaacuuuuaagguucuggaccuuaagaacuacauugauaaacaauugcugccuauccuaaauaagcagucauguaguauuagcaacaucgagaccgugauagaguuccagcagaaaaauaacaggcuccuggaaauuacacgggaguuuucugucaaugcgggagugacuaccccaguguccacauauaugcuuaccaacucagaacuguugagccucaucaaugacaugccgauuacgaacgaucaaaagaaacugaugaguaacaauguccagaucguucgccagcagucuuacuccaucaugugcauuauaaaggaggaaguguuagcauauguagugcaacugccccucuacggcgucaucgacacuccuuguuggaaacuucauacaagcccacugugcaccacuaacacaaaggagggcucgaauauuuguuugacccgaacggaucgugggugguacugcgacaacgccggaucuguguccuucuuuccccaggcugaaaccuguaagguucagucaaauagaguguucugcgauacaaugaacaguagaacucugccuagcgaggucaaucucugcaacguggacaucuuuaauccaaaauaugauuguaagauaaugaccuccaaaacagacguaucuagcucaguuauuaccagucugggugccaucguguccugcuacggcaagacuaaauguacagcaagcaacaagugcagggggaucauuaagaccuucucuaauggaugugauuaugucucaaacaaaggcguggacacugucaguguggguaauacgcuuuacuauguuaacaagcaagaggggaaaagccuguacgugaagggagaacccaucauuaauuuuuaugacccuuugguauucccauccgaugaguuugacgcuucuauaucgcaggucaacgagaaaaucaaccagagccucgccuucauucggaaguccgaugaacuguuacacaaugugaacgcgggcaagucaacaaccaauaucaugaucacuaccauuauaaucguuauuaucgugauucugcuaagucucaucgccgucggccugcuuuuguacugcaaagcacgcucuacaccggugacccugagcaaggaccagcucuccgggauaaacaauaucgcuuucucaaacugaggacuaguacuggcugcaucucccuuuccucuguccuccauccuucucccaggauggugaagggggaccugguacccagugauccccaccccaggauccuaaaucaugacuuaccugcuaauaaaaacucauuggaaaagugagaagaucuaaaaaaaaaaaaaaaaaaaaaaaaaaaaaaaaaaaaaaaaaaaaaaaaaaaaaaaaaaaaaaaaugcaucccccccccccccccccccccccccccccccaaaggcucuuuucagagccaccagaauu

SEQ ID NO: 5539 - RNA, 1980 nt, Artificial Sequence
  mRNA product Design e-6 comprising derived and/or modified sequence from HRSV(A2)__F_DSCav1_mut5 (opt4)
gggagagcggcucggccauuuugucccagucaguccggaggcugcggcugcagaaguaccgccugcggaguaacugcaaagaagcuuaccauggagcugcugauccugaaggccaacgccaucaccaccauccugaccgccgugaccuucugcuucgccagcggccagaacaucaccgaggaguucuaccagagcaccugcagcgccgugagcaagggcuaccugagcgcccugagaaccggcugguacaccagcgugaucaccaucgagcugagcaacaucaaggagaacaagugcaacggcaccgacgccaaggugaagcugaucaagcaggagcuggacaaguacaagaacgccgugaccgagcugcagcugcugaugcagagcacccccgccaccggcagcggcagcgccaucgccagcggcguggccgugugcaaggugcugcaccuggagggcgaggugaacaagaucaagagcgcccugcugagcaccaacaaggccguggugagccugagcggcugcggcgugagcgugcugaccuucaaggugcuggaccugaagaacuacaucgacaagcagcugcugcccauccugaacaagcagagcugcagcaucagcaacaucgagaccgugaucgaguuccagcagaagaacaacagacugcuggagaucaccagagaguucagcgugaacgccggcgugaccacccccgugagcaccuacaugcugaccaacagcgagcugcugagccugaucaacgacaugcccaucaccaacgaccagaagaagcugaugagcaacaacgugcagaucgugagacagcagagcuacagcaucaugugcaucaucaaggaggaggugcuggccuacguggugcagcugccccuguacggcgugaucgacacccccugcuggaagcugcacaccagcccccugugcaccaccaacaccaaggagggcagcaacaucugccugaccagaaccgacagaggcugguacugcgacaacgccggcagcgugagcuucuucccccaggccgagaccugcaaggugcagagcaacagaguguucugcgacaccaugaacagcagaacccugcccagcgaggugaaccugugcaacguggacaucuucaaccccaaguacgacugcaagaucaugaccagcaagaccgacgugagcagcagcgugaucaccagccugggcgccaucgugagcugcuacggcaagaccaagugcaccgccagcaacaagugcagaggcaucaucaagaccuucagcaacggcugcgacuacgugagcaacaagggcguggacaccgugagcgugggcaacacccuguacuacgugaacaagcaggagggcaagagccuguacgugaagggcgagcccaucaucaacuucuacgacccccugguguuccccagcgacgaguucgacgccagcaucagccaggugaacgagaagaucaaccagagccuggccuucaucagaaagagcgacgagcugcugcacaacgugaacgccggcaagagcaccaccaacaucaugaucaccaccaucaucaucgugaucaucgugauccugcugagccugaucgccgugggccugcugcuguacugcaaggccagaagcacccccgugacccugagcaaggaccagcugagcggcaucaacaacaucgccuucagcaacugaggacuaguacuggcugcaucucccuuuccucuguccuccauccuucucccaggauggugaagggggaccugguacccagugauccccaccccaggauccuaaaucaugacuuaccugcuaauaaaaacucauuggaaaagugagaagaucuaaaaaaaaaaaaaaaaaaaaaaaaaaaaaaaaaaaaaaaaaaaaaaaaaaaaaaaaaaaaaaaaugcaucccccccccccccccccccccccccccccccaaaggcucuuuucagagccaccagaauu

SEQ ID NO: 5540 - RNA, 1980 nt, Artificial Sequence
  mRNA product Design e-6 comprising derived and/or modified sequence from HRSV(A2)__F_DSCav1_mut5 (opt5)
gggagagcggcucggccauuuugucccagucaguccggaggcugcggcugcagaaguaccgccugcggaguaacugcaaagaagcuuaccauggagcugcucauccugaaggccaacgcuauuaccacaauccuuacggccgugaccuucugcuuugcgagcggccagaauauuacagaagaguucuaccaauccaccuguucugcugucagcaaaggguaucuguccgcccucagaacaggaugguacaccucuguuaucacaauugaacugagcaacaucaaggagaauaaaugcaacggcaccgacgccaaggugaaacuuaucaagcaggaacuggauaaguauaaaaaugcugugacggagcuccagcugcugaugcaguccacccccgccacagggucuggaagcgcuauugccuccggcgucgcgguguguaagguucuccaccuggagggggaagugaacaaaaucaagagcgcccuucugucuaccaauaaagcugucgugucccucagcggaugcggcguuucugugcugacauuuaagguccuugaccugaagaacuacauugauaaacaacuccugccuauccugaauaagcaguccuguagcauuucuaacaucgagaccgugauugaguuccagcagaaaaauaaccggcuccuggaaaucacgcgcgaguuuuccgugaaugccggcgucacaaccccgguuagcacauauaugcuuaccaacuccgaacugcucucucugaucaaugacaugcccauuaccaacgaucaaaagaaacuuaugagcaacaaugugcagaucgugagacagcaguccuacagcauuaugugcaucauuaaggaggaaguccuggcuuaugugguucaacucccucuguacggggugaucgacacacccuguuggaaacugcauacgucuccucucugcaccacaaacaccaaggagggauccaauaucugucugacacggaccgaucgcggcugguacugcgacaacgccgggagcgucucuuucuuuccccaggcggaaacguguaaggugcagagcaauagaguuuucugcgauacaaugaacuccagaacccugccuucugaggugaaucucugcaacgucgacauuuuuaauccgaaauaugauuguaagaucaugaccagcaaaacagacguguccagcucugucauuaccucccugggagccaucgugagcugcuacggcaagacaaaauguacggcuucuaacaagugccgggggauuaucaagaccuucuccaauggaugugauuauguuagcaacaaaggcguggacacagucuccgugggcaauacccuuuacuauguuaacaagcaagaggggaaaucucuguacgugaagggagaacccaucauuaauuuuuaugacccucucgucuuccccagcgaugaguuugacgccuccaucucucaggugaacgagaaaauuaaccagagccuggcuuucauccgcaaguccgaugaacugcuccacaaugugaacgccggcaagagcacaaccaauauuaugaucacgaccauuaucaucguuauuaucgucauucugcuuucucugaucgccguggggcuccugcuguacugcaaagcuagauccacaccugugacccuuagcaaggaccagcucucuggaauuaacaauaucgcguucuccaacugaggacuaguacuggcugcaucucccuuuccucuguccuccauccuucucccaggauggugaagggggaccugguacccagugauccccaccccaggauccuaaaucaugacuuaccugcuaauaaaaacucauuggaaaagugagaagaucuaaaaaaaaaaaaaaaaaaaaaaaaaaaaaaaaaaaaaaaaaaaaaaaaaaaaaaaaaaaaaaaaugcaucccccccccccccccccccccccccccccccaaaggcucuuuucagagccaccagaauu

SEQ ID NO: 5541 - RNA, 1980 nt, Artificial Sequence
  mRNA product Design e-6 comprising derived and/or modified sequence from HRSV(A2)__F_DSCav1_mut5 (opt6)
gggagagcggcucggccauuuugucccagucaguccggaggcugcggcugcagaaguaccgccugcggaguaacugcaaagaagcuuaccauggaacuauuaauacuuaaagccaacgcaauaacaacaauucucacugcugucaccuucugcuucgccucaggccaaaacauaacggaagaauuuuaccaaucaacaugcucugcaguauccaaaggcuaccuaucugcucuaagaacagguugguauacaucaguaauaaccauagaacuaucaaacauaaaagaaaauaaaugcaacggaacagacgcaaaaguuaaacucauaaaacaagaacuagacaaauauaaaaacgcaguuaccgaacuacaacuacuuaugcaauccacucccgccacuggaucaggaucagcaauagcaucaggagucgcaguauguaaagucuuacaccucgaaggcgaagucaauaaaaucaaauccgcauuacuauccacaaacaaagcagucguaucccuaagcggaugcggaguaucaguacuaacauuuaaaguacuagaccuaaaaaauuacaucgauaaacaacuauuaccuauauuaaacaaacaauccugcuccauuucaaauaucgaaaccguaauagaauuucaacaaaaaaacaacagauuacuagaaauaacaagagaauuuuccguaaaugcuggcguaacaacaccaguauccacauacaugcucacaaacuccgaacuacuaucacuaauaaaugacaugcccauaacaaacgaucaaaaaaaacuaaugucaaauaauguacaaauaguaagacaacaaagcuacuccaucauguguauaauaaaagaagaaguacuagcauacguaguucaacuaccacuuuacggcguaaucgacaccccuugcuggaaacuacacaccuccccucuaugcaccacaaacacaaaagaagguuccaacauaugccuuaccagaacagacagaggcugguauugcgacaacgcaggaucaguuucauuuuuuccacaagcugaaacaugcaaaguacaaucaaacagagucuucugcgacacaaugaacucaagaacucuacccucagaaguaaaccuauguaacguagacauuuucaaccccaaauacgacugcaaaauuaugacaucaaaaacagacguuucaucaucaguuaucaccucauuaggagcaauaguaagcugcuacggaaaaacaaaaugcaccgccucaaauaaaugcagaggaauaauaaaaacuuucuccaacggaugcgacuacguuucaaacaaagguguagacacuguaucaguaggaaacacacuauauuacguaaauaaacaagaaggaaaaucacuuuaugucaaaggagaaccaauaaucaauuucuacgacccauuaguauucccaucagacgaauuugaugcuucaauaucacaaguaaacgaaaaaauaaaucaaucacucgcauuuauacgaaaaucagacgaacuacuacacaauguaaacgcaggcaaaucaacaacaaacauaaugauaacaacaauaaucauuguaauaauaguaauacuucuaucucuaauagcaguaggauuacuccucuacugcaaagcaagaucaaccccuguaacacuaucaaaagaccaacuuucagguauaaauaauauagcuuuuuccaauuaaggacuaguacuggcugcaucucccuuuccucuguccuccauccuucucccaggauggugaagggggaccugguacccagugauccccaccccaggauccuaaaucaugacuuaccugcuaauaaaaacucauuggaaaagugagaagaucuaaaaaaaaaaaaaaaaaaaaaaaaaaaaaaaaaaaaaaaaaaaaaaaaaaaaaaaaaaaaaaaaugcaucccccccccccccccccccccccccccccccaaaggcucuuuucagagccaccagaauu

SEQ ID NO: 5542 - RNA, 1980 nt, Artificial Sequence
  mRNA product Design e-6 comprising derived and/or modified sequence from HRSV(A2)__F_DSCav1_mut5 (opt11)
gggagagcggcucggccauuuugucccagucaguccggaggcugcggcugcagaaguaccgccugcggaguaacugcaaagaagcuuaccauggagcuccuaauccucaaagccaacgcgaucacuacaauccucacagccgucaccuucugcuucgccuccggccaaaacaucaccgaggaguucuaccaaucaaccugcuccgccguaucaaaaggauaccuaagcgcccuacggaccggcugguacacaucugucaucaccaucgaacuaucaaacaucaaagaaaacaaaugcaacggaaccgacgcaaaagucaaacugauuaaacaagaacuagacaaauacaaaaacgcagucaccgaacugcaauuacucaugcaaagcacaccggccaccggcucaggcagcgccaucgccuccggcgucgccgucugcaaaguucuccaccucgagggcgaagucaacaaaauaaaaucugcccuccucuccaccaacaaagccgucgucucccucagcggcugcggagucuccguccucaccuucaaaguucucgaucucaagaacuauauugacaaacaacuucuacccauacucaacaaacaaagcugcagcauauccaacaucgaaaccgucaucgaguuccaacaaaagaacaaccgccuccucgaaauaacccgcgaguucagcguuaacgccggagucacuaccccugucuccaccuacaugcucaccaacuccgaacuccuaucacuaaucaacgacaugcccauaaccaacgaccagaagaaacucauguccaacaacguccaaauuguccgacaacaaagcuacuccauaaugugcauaauaaaagaggaaguccucgccuacgucguacaacugccccuuuauggcguaaucgacacacccugcuggaaacuccacacgucaccccucugcaccaccaacacaaaagaaggcucgaacaucugccuaacacggacugaccgcggcugguacugcgacaacgccggcuccgucagcuucuucccacaagccgaaaccugcaaaguacaauccaaccgaguauucugcgacaccaugaacuccagaacccuccccucagaggucaaccugugcaacguagacaucuucaaccccaaauacgacugcaaaauaaugaccucaaaaacagacgucuccucuuccguaaucaccagccucggagccaucgucagcugcuacggcaaaaccaaaugcaccgccucaaacaaaugccgcggcaucaucaaaacauucucaaacggcugcgacuacgucuccaacaaaggcgucgacacaguaagcguaggcaacacacuguacuacgucaacaaacaagagggaaaaucacucuacgucaaaggagaacccauaaucaacuucuacgacccccucguuuuccccagcgacgaguucgacgccagcauaucccaagucaacgagaaaauuaaccaaucccuagcauucauccgaaaaucugacgaacugcuccacaacgucaacgcgggaaaaucaacaaccaacauaaugauaaccacaaucauaauagucaucaucguaauccuccucagccuaaucgcugucggccuccuccucuacugcaaagcccguuccaccccagucacacuuuccaaggaccaacuaagcggaauaaacaacaucgcguucucaaacuaaggacuaguacuggcugcaucucccuuuccucuguccuccauccuucucccaggauggugaagggggaccugguacccagugauccccaccccaggauccuaaaucaugacuuaccugcuaauaaaaacucauuggaaaagugagaagaucuaaaaaaaaaaaaaaaaaaaaaaaaaaaaaaaaaaaaaaaaaaaaaaaaaaaaaaaaaaaaaaaaugcaucccccccccccccccccccccccccccccccaaaggcucuuuucagagccaccagaauu

SEQ ID NO: 5543 - RNA, 2196 nt, Artificial Sequence
  mRNA product Design f-1 comprising derived and/or modified sequence from HRSV(A2)__F_DSCav1_mut5 (opt1)
gggagagcggcucggccauuuugucccagucaguccggaggcugcggcugcagaaguaccgccugcggaguaacugcaaagaagcuuaccauggagcugcucauccugaaggccaacgccaucaccaccauccugacggcggugaccuucugcuucgccagcggccagaacaucaccgaggaguucuaccaguccacgugcagcgccgucuccaagggguaccucagcgcccugcggaccggcugguacaccuccgugaucaccaucgagcugagcaacaucaaggagaacaagugcaacgggaccgacgccaaggugaagcucaucaagcaggagcuggacaaguacaagaacgcggucacggagcugcagcuccugaugcaguccaccccggcaaccggcuccggcuccgccaucgcgagcggcgucgccgugugcaaggugcugcaccucgagggggaggucaacaagaucaagagcgcccugcuguccaccaacaaggccguggugagccucuccggcugcggcgucagcgugcugaccuucaaggugcuggaccucaagaacuacaucgacaagcagcugcugcccauccugaacaagcagagcugcuccaucagcaacaucgagacggugaucgaguuccagcagaagaacaaccggcuccuggagaucacccgcgaguucagcgugaacgccggggucaccacccccguguccacguacaugcugaccaacagcgagcuccugucccugaucaacgacaugccgaucaccaacgaccagaagaagcucaugagcaacaacgugcagaucguccggcagcaguccuacagcaucaugugcaucaucaaggaggaggugcuggcguacgugguccagcugccccucuacggcgugaucgacacccccugcuggaagcugcacacgagcccccugugcaccaccaacaccaaggagggguccaacaucugccucacgcgcaccgaccggggcugguacugcgacaacgccggcagcgucuccuucuucccgcaggccgagaccugcaaggugcagagcaaccgcguguucugcgacaccaugaacucccggacgcugcccagcgagguaaaccucugcaacgucgacaucuucaaccccaaguacgacugcaagaucaugaccuccaagaccgacgugagcuccagcgugaucaccucccugggggccaucgucagcugcuacggcaagacgaagugcaccgccagcaacaagugccgggggaucaucaagaccuucuccaacggcugcgacuacgugagcaacaagggcguggacaccguguccgucgggaacacccuguacuacgugaacaagcaggagggcaagagccucuacgugaagggggagcccaucaucaacuucuacgacccgcuggucuuccccuccgacgaguucgacgcgagcaucucccaggugaacgagaagaucaaccagagccuggccuucauccgcaaguccgacgagcugcuccacaacgugaacgccggcaagagcacgaccaacaucaugaucaccaccaucaucaucgucaucaucgugauccugcugucccucaucgccguggggcugcugcucuacugcaaggcccggagcacgcccgucacccuguccaaggaccagcugagcggcaucaacaacaucgcguucuccaacugaggacuagugaagggaacacccaaauuuaauucagccuuaagcacaauuaauuaagagugaaacguaauuguacaagcaguuggucacccaccauagggcaugaucaacaccgcaaccuuuccuuuuucccccagugauucugaaaaaccccucuucccuucagcuugcuuagauguuccaaauuuaguaagcuuaaggcggccuacagaagaaaaagaaaaaaaaggccacaaaaguucccucucacuuucaguaaauaaaauaaaagcagcaacagaaauaaagaaauaaaugaaauucaaaaugaaauaaauauuguguugugcagcauuaaaaaaucaauaaaaauuaaaaaugagcaagaucuaaaaaaaaaaaaaaaaaaaaaaaaaaaaaaaaaaaaaaaaaaaaaaaaaaaaaaaaaaaaaaaaugcaucccccccccccccccccccccccccccccccaaaggcucuuuucagagccaccagaauu

SEQ ID NO: 5544 - RNA, 2196 nt, Artificial Sequence
  mRNA product Design f-1 comprising derived and/or modified sequence from HRSV(A2)__F_DSCav1_mut5 (opt1)
gggagagcggcucggccauuuugucccagucaguccggaggcugcggcugcagaaguaccgccugcggaguaacugcaaagaagcuuaccauggagcugcucauccugaaggccaacgccaucaccaccauccugacggcggugaccuucugcuucgccagcggccagaacaucaccgaggaguucuaccaguccacgugcagcgccgucuccaagggguaccucagcgcccugcgcaccggcugguacaccuccgugaucaccaucgagcugagcaacaucaaggagaacaagugcaacgggaccgacgccaaggugaagcucaucaagcaggagcuggacaaguacaagaacgcggucacggagcugcagcuccugaugcaguccacccccgccaccggcagcggguccgccaucgccagcggcguggcggugugcaagguccugcaccucgagggcgaggugaacaagaucaaguccgcccugcugagcaccaacaaggccguggucucccucagcgggugcggcguguccgugcugacguucaagguccuggaccucaagaacuacaucgacaagcagcugcugccgauccucaacaagcagagcugcuccaucagcaacaucgagaccgugaucgaguuccagcagaagaacaaccggcugcuggagaucacccgcgaguucuccgugaacgccggggucaccacgcccgugagcaccuacaugcucaccaacagcgagcugcugucccucaucaacgacaugcccaucaccaacgaccagaagaagcugaugagcaacaacgugcagaucguccggcagcaguccuacagcaucaugugcaucaucaaggaggaggugcuggccuacgugguccagcucccccuguacggcgugaucgacacgccgugcuggaagcugcacaccagcccccucugcaccaccaacacgaaggagggguccaacaucugccugacccgcaccgaccggggcugguacugcgacaacgcgggcuccgugagcuucuucccccaggccgagaccugcaagguccaguccaaccgcguguucugcgacacgaugaacagccggacccuccccuccgaggucaaccugugcaacguggacaucuucaacccgaaguacgacugcaagaucaugaccagcaagaccgacguguccagcuccgucaucacgagccugggggccaucguguccugcuacggcaagaccaagugcaccgccagcaacaagugccgggggaucaucaagaccuucuccaacggcugcgacuacgugagcaacaagggcgucgacacggugagcguggggaacacccucuacuacgucaacaagcaggagggcaagucccuguacgugaagggggagcccaucaucaacuucuacgacccccugguguuccccagcgacgaguucgacgccuccaucagccaggucaacgagaagaucaaccagucccucgcguucauccgcaagagcgacgagcugcugcacaacgugaacgccggcaaguccaccaccaacaucaugaucaccacgaucaucaucgugaucaucgucauccuccugagccugaucgccguggggcuccugcuguacugcaaggcccgguccaccccggugacccugagcaaggaccagcucuccggcaucaacaacaucgccuucagcaacugaggacuagugaagggaacacccaaauuuaauucagccuuaagcacaauuaauuaagagugaaacguaauuguacaagcaguuggucacccaccauagggcaugaucaacaccgcaaccuuuccuuuuucccccagugauucugaaaaaccccucuucccuucagcuugcuuagauguuccaaauuuaguaagcuuaaggcggccuacagaagaaaaagaaaaaaaaggccacaaaaguucccucucacuuucaguaaauaaaauaaaagcagcaacagaaauaaagaaauaaaugaaauucaaaaugaaauaaauauuguguugugcagcauuaaaaaaucaauaaaaauuaaaaaugagcaagaucuaaaaaaaaaaaaaaaaaaaaaaaaaaaaaaaaaaaaaaaaaaaaaaaaaaaaaaaaaaaaaaaaugcaucccccccccccccccccccccccccccccccaaaggcucuuuucagagccaccagaauu

SEQ ID NO: 5545 - RNA, 2196 nt, Artificial Sequence
  mRNA product Design f-1 comprising derived and/or modified sequence from HRSV(A2)__F_DSCav1_mut5 (opt2)
gggagagcggcucggccauuuugucccagucaguccggaggcugcggcugcagaaguaccgccugcggaguaacugcaaagaagcuuaccauggagcuccucauccucaaggccaacgccaucaccaccauccucaccgccgucaccuucugcuucgccuccggccagaacaucaccgaggaguucuaccaguccaccugcuccgccgucuccaagggcuaccucuccgcccuccgcaccggcugguacaccuccgucaucaccaucgagcucuccaacaucaaggagaacaagugcaacggcaccgacgccaaggucaagcucaucaagcaggagcucgacaaguacaagaacgccgucaccgagcuccagcuccucaugcaguccacccccgccaccggcuccggcuccgccaucgccuccggcgucgccgucugcaagguccuccaccucgagggcgaggucaacaagaucaaguccgcccuccucuccaccaacaaggccgucgucucccucuccggcugcggcgucuccguccucaccuucaagguccucgaccucaagaacuacaucgacaagcagcuccuccccauccucaacaagcaguccugcuccaucuccaacaucgagaccgucaucgaguuccagcagaagaacaaccgccuccucgagaucacccgcgaguucuccgucaacgccggcgucaccacccccgucuccaccuacaugcucaccaacuccgagcuccucucccucaucaacgacaugcccaucaccaacgaccagaagaagcucauguccaacaacguccagaucguccgccagcaguccuacuccaucaugugcaucaucaaggaggagguccucgccuacgucguccagcucccccucuacggcgucaucgacacccccugcuggaagcuccacaccuccccccucugcaccaccaacaccaaggagggcuccaacaucugccucacccgcaccgaccgcggcugguacugcgacaacgccggcuccgucuccuucuucccccaggccgagaccugcaagguccaguccaaccgcgucuucugcgacaccaugaacucccgcacccuccccuccgaggucaaccucugcaacgucgacaucuucaaccccaaguacgacugcaagaucaugaccuccaagaccgacgucuccuccuccgucaucaccucccucggcgccaucgucuccugcuacggcaagaccaagugcaccgccuccaacaagugccgcggcaucaucaagaccuucuccaacggcugcgacuacgucuccaacaagggcgucgacaccgucuccgucggcaacacccucuacuacgucaacaagcaggagggcaagucccucuacgucaagggcgagcccaucaucaacuucuacgacccccucgucuuccccuccgacgaguucgacgccuccaucucccaggucaacgagaagaucaaccagucccucgccuucauccgcaaguccgacgagcuccuccacaacgucaacgccggcaaguccaccaccaacaucaugaucaccaccaucaucaucgucaucaucgucauccuccucucccucaucgccgucggccuccuccucuacugcaaggcccgcuccacccccgucacccucuccaaggaccagcucuccggcaucaacaacaucgccuucuccaacugaggacuagugaagggaacacccaaauuuaauucagccuuaagcacaauuaauuaagagugaaacguaauuguacaagcaguuggucacccaccauagggcaugaucaacaccgcaaccuuuccuuuuucccccagugauucugaaaaaccccucuucccuucagcuugcuuagauguuccaaauuuaguaagcuuaaggcggccuacagaagaaaaagaaaaaaaaggccacaaaaguucccucucacuuucaguaaauaaaauaaaagcagcaacagaaauaaagaaauaaaugaaauucaaaaugaaauaaauauuguguugugcagcauuaaaaaaucaauaaaaauuaaaaaugagcaagaucuaaaaaaaaaaaaaaaaaaaaaaaaaaaaaaaaaaaaaaaaaaaaaaaaaaaaaaaaaaaaaaaaugcaucccccccccccccccccccccccccccccccaaaggcucuuuucagagccaccagaauu

SEQ ID NO: 5546 - RNA, 2196 nt, Artificial Sequence
  mRNA product Design f-1 comprising derived and/or modified sequence from HRSV(A2)__F_DSCav1_mut5 (opt3)
gggagagcggcucggccauuuugucccagucaguccggaggcugcggcugcagaaguaccgccugcggaguaacugcaaagaagcuuaccauggagcugcucauccuuaaggccaacgcuauuaccacaauacugacugcagugacguucugcuuugccagcggccagaauaucaccgaagaguucuaccaauccacauguucugcggucucaaaaggguauuugagugcuuuaagaacuggaugguacaccagcguuauuacaaucgaacuguccaacauuaaggagaauaaaugcaacgguaccgacgccaaggugaaacuaaucaagcaggaacucgauaaguauaaaaaugcaguaacugagcugcagcuucugaugcagucuacacccgccaccggcucggggucagcuauagcaagcggaguggccgucuguaagguguugcaccucgagggcgaaguuaacaaaaucaagagugcucugcuguccacgaauaaagccguggucucucucagcgguugcgggguguccguauuaacuuuuaagguucuggaccuuaagaacuacauugauaaacaauugcugccuauccuaaauaagcagucauguaguauuagcaacaucgagaccgugauagaguuccagcagaaaaauaacaggcuccuggaaauuacacgggaguuuucugucaaugcgggagugacuaccccaguguccacauauaugcuuaccaacucagaacuguugagccucaucaaugacaugccgauuacgaacgaucaaaagaaacugaugaguaacaauguccagaucguucgccagcagucuuacuccaucaugugcauuauaaaggaggaaguguuagcauauguagugcaacugccccucuacggcgucaucgacacuccuuguuggaaacuucauacaagcccacugugcaccacuaacacaaaggagggcucgaauauuuguuugacccgaacggaucgugggugguacugcgacaacgccggaucuguguccuucuuuccccaggcugaaaccuguaagguucagucaaauagaguguucugcgauacaaugaacaguagaacucugccuagcgaggucaaucucugcaacguggacaucuuuaauccaaaauaugauuguaagauaaugaccuccaaaacagacguaucuagcucaguuauuaccagucugggugccaucguguccugcuacggcaagacuaaauguacagcaagcaacaagugcagggggaucauuaagaccuucucuaauggaugugauuaugucucaaacaaaggcguggacacugucaguguggguaauacgcuuuacuauguuaacaagcaagaggggaaaagccuguacgugaagggagaacccaucauuaauuuuuaugacccuuugguauucccauccgaugaguuugacgcuucuauaucgcaggucaacgagaaaaucaaccagagccucgccuucauucggaaguccgaugaacuguuacacaaugugaacgcgggcaagucaacaaccaauaucaugaucacuaccauuauaaucguuauuaucgugauucugcuaagucucaucgccgucggccugcuuuuguacugcaaagcacgcucuacaccggugacccugagcaaggaccagcucuccgggauaaacaauaucgcuuucucaaacugaggacuagugaagggaacacccaaauuuaauucagccuuaagcacaauuaauuaagagugaaacguaauuguacaagcaguuggucacccaccauagggcaugaucaacaccgcaaccuuuccuuuuucccccagugauucugaaaaaccccucuucccuucagcuugcuuagauguuccaaauuuaguaagcuuaaggcggccuacagaagaaaaagaaaaaaaaggccacaaaaguucccucucacuuucaguaaauaaaauaaaagcagcaacagaaauaaagaaauaaaugaaauucaaaaugaaauaaauauuguguugugcagcauuaaaaaaucaauaaaaauuaaaaaugagcaagaucuaaaaaaaaaaaaaaaaaaaaaaaaaaaaaaaaaaaaaaaaaaaaaaaaaaaaaaaaaaaaaaaaugcaucccccccccccccccccccccccccccccccaaaggcucuuuucagagccaccagaauu

SEQ ID NO: 5547 - RNA, 2196 nt, Artificial Sequence
  mRNA product Design f-1 comprising derived and/or modified sequence from HRSV(A2)__F_DSCav1_mut5 (opt4)
gggagagcggcucggccauuuugucccagucaguccggaggcugcggcugcagaaguaccgccugcggaguaacugcaaagaagcuuaccauggagcugcugauccugaaggccaacgccaucaccaccauccugaccgccgugaccuucugcuucgccagcggccagaacaucaccgaggaguucuaccagagcaccugcagcgccgugagcaagggcuaccugagcgcccugagaaccggcugguacaccagcgugaucaccaucgagcugagcaacaucaaggagaacaagugcaacggcaccgacgccaaggugaagcugaucaagcaggagcuggacaaguacaagaacgccgugaccgagcugcagcugcugaugcagagcacccccgccaccggcagcggcagcgccaucgccagcggcguggccgugugcaaggugcugcaccuggagggcgaggugaacaagaucaagagcgcccugcugagcaccaacaaggccguggugagccugagcggcugcggcgugagcgugcugaccuucaaggugcuggaccugaagaacuacaucgacaagcagcugcugcccauccugaacaagcagagcugcagcaucagcaacaucgagaccgugaucgaguuccagcagaagaacaacagacugcuggagaucaccagagaguucagcgugaacgccggcgugaccacccccgugagcaccuacaugcugaccaacagcgagcugcugagccugaucaacgacaugcccaucaccaacgaccagaagaagcugaugagcaacaacgugcagaucgugagacagcagagcuacagcaucaugugcaucaucaaggaggaggugcuggccuacguggugcagcugccccuguacggcgugaucgacacccccugcuggaagcugcacaccagcccccugugcaccaccaacaccaaggagggcagcaacaucugccugaccagaaccgacagaggcugguacugcgacaacgccggcagcgugagcuucuucccccaggccgagaccugcaaggugcagagcaacagaguguucugcgacaccaugaacagcagaacccugcccagcgaggugaaccugugcaacguggacaucuucaaccccaaguacgacugcaagaucaugaccagcaagaccgacgugagcagcagcgugaucaccagccugggcgccaucgugagcugcuacggcaagaccaagugcaccgccagcaacaagugcagaggcaucaucaagaccuucagcaacggcugcgacuacgugagcaacaagggcguggacaccgugagcgugggcaacacccuguacuacgugaacaagcaggagggcaagagccuguacgugaagggcgagcccaucaucaacuucuacgacccccugguguuccccagcgacgaguucgacgccagcaucagccaggugaacgagaagaucaaccagagccuggccuucaucagaaagagcgacgagcugcugcacaacgugaacgccggcaagagcaccaccaacaucaugaucaccaccaucaucaucgugaucaucgugauccugcugagccugaucgccgugggccugcugcuguacugcaaggccagaagcacccccgugacccugagcaaggaccagcugagcggcaucaacaacaucgccuucagcaacugaggacuagugaagggaacacccaaauuuaauucagccuuaagcacaauuaauuaagagugaaacguaauuguacaagcaguuggucacccaccauagggcaugaucaacaccgcaaccuuuccuuuuucccccagugauucugaaaaaccccucuucccuucagcuugcuuagauguuccaaauuuaguaagcuuaaggcggccuacagaagaaaaagaaaaaaaaggccacaaaaguucccucucacuuucaguaaauaaaauaaaagcagcaacagaaauaaagaaauaaaugaaauucaaaaugaaauaaauauuguguugugcagcauuaaaaaaucaauaaaaauuaaaaaugagcaagaucuaaaaaaaaaaaaaaaaaaaaaaaaaaaaaaaaaaaaaaaaaaaaaaaaaaaaaaaaaaaaaaaaugcaucccccccccccccccccccccccccccccccaaaggcucuuuucagagccaccagaauu

SEQ ID NO: 5548 - RNA, 2196 nt, Artificial Sequence
  mRNA product Design f-1 comprising derived and/or modified sequence from HRSV(A2)__F_DSCav1_mut5 (opt5)
gggagagcggcucggccauuuugucccagucaguccggaggcugcggcugcagaaguaccgccugcggaguaacugcaaagaagcuuaccauggagcugcucauccugaaggccaacgcuauuaccacaauccuuacggccgugaccuucugcuuugcgagcggccagaauauuacagaagaguucuaccaauccaccuguucugcugucagcaaaggguaucuguccgcccucagaacaggaugguacaccucuguuaucacaauugaacugagcaacaucaaggagaauaaaugcaacggcaccgacgccaaggugaaacuuaucaagcaggaacuggauaaguauaaaaaugcugugacggagcuccagcugcugaugcaguccacccccgccacagggucuggaagcgcuauugccuccggcgucgcgguguguaagguucuccaccuggagggggaagugaacaaaaucaagagcgcccuucugucuaccaauaaagcugucgugucccucagcggaugcggcguuucugugcugacauuuaagguccuugaccugaagaacuacauugauaaacaacuccugccuauccugaauaagcaguccuguagcauuucuaacaucgagaccgugauugaguuccagcagaaaaauaaccggcuccuggaaaucacgcgcgaguuuuccgugaaugccggcgucacaaccccgguuagcacauauaugcuuaccaacuccgaacugcucucucugaucaaugacaugcccauuaccaacgaucaaaagaaacuuaugagcaacaaugugcagaucgugagacagcaguccuacagcauuaugugcaucauuaaggaggaaguccuggcuuaugugguucaacucccucuguacggggugaucgacacacccuguuggaaacugcauacgucuccucucugcaccacaaacaccaaggagggauccaauaucugucugacacggaccgaucgcggcugguacugcgacaacgccgggagcgucucuuucuuuccccaggcggaaacguguaaggugcagagcaauagaguuuucugcgauacaaugaacuccagaacccugccuucugaggugaaucucugcaacgucgacauuuuuaauccgaaauaugauuguaagaucaugaccagcaaaacagacguguccagcucugucauuaccucccugggagccaucgugagcugcuacggcaagacaaaauguacggcuucuaacaagugccgggggauuaucaagaccuucuccaauggaugugauuauguuagcaacaaaggcguggacacagucuccgugggcaauacccuuuacuauguuaacaagcaagaggggaaaucucuguacgugaagggagaacccaucauuaauuuuuaugacccucucgucuuccccagcgaugaguuugacgccuccaucucucaggugaacgagaaaauuaaccagagccuggcuuucauccgcaaguccgaugaacugcuccacaaugugaacgccggcaagagcacaaccaauauuaugaucacgaccauuaucaucguuauuaucgucauucugcuuucucugaucgccguggggcuccugcuguacugcaaagcuagauccacaccugugacccuuagcaaggaccagcucucuggaauuaacaauaucgcguucuccaacugaggacuagugaagggaacacccaaauuuaauucagccuuaagcacaauuaauuaagagugaaacguaauuguacaagcaguuggucacccaccauagggcaugaucaacaccgcaaccuuuccuuuuucccccagugauucugaaaaaccccucuucccuucagcuugcuuagauguuccaaauuuaguaagcuuaaggcggccuacagaagaaaaagaaaaaaaaggccacaaaaguucccucucacuuucaguaaauaaaauaaaagcagcaacagaaauaaagaaauaaaugaaauucaaaaugaaauaaauauuguguugugcagcauuaaaaaaucaauaaaaauuaaaaaugagcaagaucuaaaaaaaaaaaaaaaaaaaaaaaaaaaaaaaaaaaaaaaaaaaaaaaaaaaaaaaaaaaaaaaaugcaucccccccccccccccccccccccccccccccaaaggcucuuuucagagccaccagaauu

SEQ ID NO: 5549 - RNA, 2196 nt, Artificial Sequence
  mRNA product Design f-1 comprising derived and/or modified sequence from HRSV(A2)__F_DSCav1_mut5 (opt6)
gggagagcggcucggccauuuugucccagucaguccggaggcugcggcugcagaaguaccgccugcggaguaacugcaaagaagcuuaccauggaacuauuaauacuuaaagccaacgcaauaacaacaauucucacugcugucaccuucugcuucgccucaggccaaaacauaacggaagaauuuuaccaaucaacaugcucugcaguauccaaaggcuaccuaucugcucuaagaacagguugguauacaucaguaauaaccauagaacuaucaaacauaaaagaaaauaaaugcaacggaacagacgcaaaaguuaaacucauaaaacaagaacuagacaaauauaaaaacgcaguuaccgaacuacaacuacuuaugcaauccacucccgccacuggaucaggaucagcaauagcaucaggagucgcaguauguaaagucuuacaccucgaaggcgaagucaauaaaaucaaauccgcauuacuauccacaaacaaagcagucguaucccuaagcggaugcggaguaucaguacuaacauuuaaaguacuagaccuaaaaaauuacaucgauaaacaacuauuaccuauauuaaacaaacaauccugcuccauuucaaauaucgaaaccguaauagaauuucaacaaaaaaacaacagauuacuagaaauaacaagagaauuuuccguaaaugcuggcguaacaacaccaguauccacauacaugcucacaaacuccgaacuacuaucacuaauaaaugacaugcccauaacaaacgaucaaaaaaaacuaaugucaaauaauguacaaauaguaagacaacaaagcuacuccaucauguguauaauaaaagaagaaguacuagcauacguaguucaacuaccacuuuacggcguaaucgacaccccuugcuggaaacuacacaccuccccucuaugcaccacaaacacaaaagaagguuccaacauaugccuuaccagaacagacagaggcugguauugcgacaacgcaggaucaguuucauuuuuuccacaagcugaaacaugcaaaguacaaucaaacagagucuucugcgacacaaugaacucaagaacucuacccucagaaguaaaccuauguaacguagacauuuucaaccccaaauacgacugcaaaauuaugacaucaaaaacagacguuucaucaucaguuaucaccucauuaggagcaauaguaagcugcuacggaaaaacaaaaugcaccgccucaaauaaaugcagaggaauaauaaaaacuuucuccaacggaugcgacuacguuucaaacaaagguguagacacuguaucaguaggaaacacacuauauuacguaaauaaacaagaaggaaaaucacuuuaugucaaaggagaaccaauaaucaauuucuacgacccauuaguauucccaucagacgaauuugaugcuucaauaucacaaguaaacgaaaaaauaaaucaaucacucgcauuuauacgaaaaucagacgaacuacuacacaauguaaacgcaggcaaaucaacaacaaacauaaugauaacaacaauaaucauuguaauaauaguaauacuucuaucucuaauagcaguaggauuacuccucuacugcaaagcaagaucaaccccuguaacacuaucaaaagaccaacuuucagguauaaauaauauagcuuuuuccaauuaaggacuagugaagggaacacccaaauuuaauucagccuuaagcacaauuaauuaagagugaaacguaauuguacaagcaguuggucacccaccauagggcaugaucaacaccgcaaccuuuccuuuuucccccagugauucugaaaaaccccucuucccuucagcuugcuuagauguuccaaauuuaguaagcuuaaggcggccuacagaagaaaaagaaaaaaaaggccacaaaaguucccucucacuuucaguaaauaaaauaaaagcagcaacagaaauaaagaaauaaaugaaauucaaaaugaaauaaauauuguguugugcagcauuaaaaaaucaauaaaaauuaaaaaugagcaagaucuaaaaaaaaaaaaaaaaaaaaaaaaaaaaaaaaaaaaaaaaaaaaaaaaaaaaaaaaaaaaaaaaugcaucccccccccccccccccccccccccccccccaaaggcucuuuucagagccaccagaauu

SEQ ID NO: 5550 - RNA, 2196 nt, Artificial Sequence
  mRNA product Design f-1 comprising derived and/or modified sequence from HRSV(A2)__F_DSCav1_mut5 (opt11)
gggagagcggcucggccauuuugucccagucaguccggaggcugcggcugcagaaguaccgccugcggaguaacugcaaagaagcuuaccauggagcuccuaauccucaaagccaacgcgaucacuacaauccucacagccgucaccuucugcuucgccuccggccaaaacaucaccgaggaguucuaccaaucaaccugcuccgccguaucaaaaggauaccuaagcgcccuacggaccggcugguacacaucugucaucaccaucgaacuaucaaacaucaaagaaaacaaaugcaacggaaccgacgcaaaagucaaacugauuaaacaagaacuagacaaauacaaaaacgcagucaccgaacugcaauuacucaugcaaagcacaccggccaccggcucaggcagcgccaucgccuccggcgucgccgucugcaaaguucuccaccucgagggcgaagucaacaaaauaaaaucugcccuccucuccaccaacaaagccgucgucucccucagcggcugcggagucuccguccucaccuucaaaguucucgaucucaagaacuauauugacaaacaacuucuacccauacucaacaaacaaagcugcagcauauccaacaucgaaaccgucaucgaguuccaacaaaagaacaaccgccuccucgaaauaacccgcgaguucagcguuaacgccggagucacuaccccugucuccaccuacaugcucaccaacuccgaacuccuaucacuaaucaacgacaugcccauaaccaacgaccagaagaaacucauguccaacaacguccaaauuguccgacaacaaagcuacuccauaaugugcauaauaaaagaggaaguccucgccuacgucguacaacugccccuuuauggcguaaucgacacacccugcuggaaacuccacacgucaccccucugcaccaccaacacaaaagaaggcucgaacaucugccuaacacggacugaccgcggcugguacugcgacaacgccggcuccgucagcuucuucccacaagccgaaaccugcaaaguacaauccaaccgaguauucugcgacaccaugaacuccagaacccuccccucagaggucaaccugugcaacguagacaucuucaaccccaaauacgacugcaaaauaaugaccucaaaaacagacgucuccucuuccguaaucaccagccucggagccaucgucagcugcuacggcaaaaccaaaugcaccgccucaaacaaaugccgcggcaucaucaaaacauucucaaacggcugcgacuacgucuccaacaaaggcgucgacacaguaagcguaggcaacacacuguacuacgucaacaaacaagagggaaaaucacucuacgucaaaggagaacccauaaucaacuucuacgacccccucguuuuccccagcgacgaguucgacgccagcauaucccaagucaacgagaaaauuaaccaaucccuagcauucauccgaaaaucugacgaacugcuccacaacgucaacgcgggaaaaucaacaaccaacauaaugauaaccacaaucauaauagucaucaucguaauccuccucagccuaaucgcugucggccuccuccucuacugcaaagcccguuccaccccagucacacuuuccaaggaccaacuaagcggaauaaacaacaucgcguucucaaacuaaggacuagugaagggaacacccaaauuuaauucagccuuaagcacaauuaauuaagagugaaacguaauuguacaagcaguuggucacccaccauagggcaugaucaacaccgcaaccuuuccuuuuucccccagugauucugaaaaaccccucuucccuucagcuugcuuagauguuccaaauuuaguaagcuuaaggcggccuacagaagaaaaagaaaaaaaaggccacaaaaguucccucucacuuucaguaaauaaaauaaaagcagcaacagaaauaaagaaauaaaugaaauucaaaaugaaauaaauauuguguugugcagcauuaaaaaaucaauaaaaauuaaaaaugagcaagaucuaaaaaaaaaaaaaaaaaaaaaaaaaaaaaaaaaaaaaaaaaaaaaaaaaaaaaaaaaaaaaaaaugcaucccccccccccccccccccccccccccccccaaaggcucuuuucagagccaccagaauu

SEQ ID NO: 5551 - RNA, 1976 nt, Artificial Sequence
  mRNA product Design f-2 comprising derived and/or modified sequence from HRSV(A2)__F_DSCav1_mut5 (opt1)
gggagagcggcucggccauuuugucccagucaguccggaggcugcggcugcagaaguaccgccugcggaguaacugcaaagaagcuuaccauggagcugcucauccugaaggccaacgccaucaccaccauccugacggcggugaccuucugcuucgccagcggccagaacaucaccgaggaguucuaccaguccacgugcagcgccgucuccaagggguaccucagcgcccugcggaccggcugguacaccuccgugaucaccaucgagcugagcaacaucaaggagaacaagugcaacgggaccgacgccaaggugaagcucaucaagcaggagcuggacaaguacaagaacgcggucacggagcugcagcuccugaugcaguccaccccggcaaccggcuccggcuccgccaucgcgagcggcgucgccgugugcaaggugcugcaccucgagggggaggucaacaagaucaagagcgcccugcuguccaccaacaaggccguggugagccucuccggcugcggcgucagcgugcugaccuucaaggugcuggaccucaagaacuacaucgacaagcagcugcugcccauccugaacaagcagagcugcuccaucagcaacaucgagacggugaucgaguuccagcagaagaacaaccggcuccuggagaucacccgcgaguucagcgugaacgccggggucaccacccccguguccacguacaugcugaccaacagcgagcuccugucccugaucaacgacaugccgaucaccaacgaccagaagaagcucaugagcaacaacgugcagaucguccggcagcaguccuacagcaucaugugcaucaucaaggaggaggugcuggcguacgugguccagcugccccucuacggcgugaucgacacccccugcuggaagcugcacacgagcccccugugcaccaccaacaccaaggagggguccaacaucugccucacgcgcaccgaccggggcugguacugcgacaacgccggcagcgucuccuucuucccgcaggccgagaccugcaaggugcagagcaaccgcguguucugcgacaccaugaacucccggacgcugcccagcgagguaaaccucugcaacgucgacaucuucaaccccaaguacgacugcaagaucaugaccuccaagaccgacgugagcuccagcgugaucaccucccugggggccaucgucagcugcuacggcaagacgaagugcaccgccagcaacaagugccgggggaucaucaagaccuucuccaacggcugcgacuacgugagcaacaagggcguggacaccguguccgucgggaacacccuguacuacgugaacaagcaggagggcaagagccucuacgugaagggggagcccaucaucaacuucuacgacccgcuggucuuccccuccgacgaguucgacgcgagcaucucccaggugaacgagaagaucaaccagagccuggccuucauccgcaaguccgacgagcugcuccacaacgugaacgccggcaagagcacgaccaacaucaugaucaccaccaucaucaucgucaucaucgugauccugcugucccucaucgccguggggcugcugcucuacugcaaggcccggagcacgcccgucacccuguccaaggaccagcugagcggcaucaacaacaucgcguucuccaacugaggacuaguggaagcauuuuccuggcugauuaaaagaaauuacucagcuauggucaucuguuccuguuagaaggcuaugcagcauauuauauacuaugcgcauguuaugaaaugcauaauaaaaaauuuuaaaaaaucuaaaagaucuaaaaaaaaaaaaaaaaaaaaaaaaaaaaaaaaaaaaaaaaaaaaaaaaaaaaaaaaaaaaaaaaugcaucccccccccccccccccccccccccccccccaaaggcucuuuucagagccaccagaauu

SEQ ID NO: 5552 - RNA, 1976 nt, Artificial Sequence
  mRNA product Design f-2 comprising derived and/or modified sequence from HRSV(A2)__F_DSCav1_mut5 (opt1)
gggagagcggcucggccauuuugucccagucaguccggaggcugcggcugcagaaguaccgccugcggaguaacugcaaagaagcuuaccauggagcugcucauccugaaggccaacgccaucaccaccauccugacggcggugaccuucugcuucgccagcggccagaacaucaccgaggaguucuaccaguccacgugcagcgccgucuccaagggguaccucagcgcccugcgcaccggcugguacaccuccgugaucaccaucgagcugagcaacaucaaggagaacaagugcaacgggaccgacgccaaggugaagcucaucaagcaggagcuggacaaguacaagaacgcggucacggagcugcagcuccugaugcaguccacccccgccaccggcagcggguccgccaucgccagcggcguggcggugugcaagguccugcaccucgagggcgaggugaacaagaucaaguccgcccugcugagcaccaacaaggccguggucucccucagcgggugcggcguguccgugcugacguucaagguccuggaccucaagaacuacaucgacaagcagcugcugccgauccucaacaagcagagcugcuccaucagcaacaucgagaccgugaucgaguuccagcagaagaacaaccggcugcuggagaucacccgcgaguucuccgugaacgccggggucaccacgcccgugagcaccuacaugcucaccaacagcgagcugcugucccucaucaacgacaugcccaucaccaacgaccagaagaagcugaugagcaacaacgugcagaucguccggcagcaguccuacagcaucaugugcaucaucaaggaggaggugcuggccuacgugguccagcucccccuguacggcgugaucgacacgccgugcuggaagcugcacaccagcccccucugcaccaccaacacgaaggagggguccaacaucugccugacccgcaccgaccggggcugguacugcgacaacgcgggcuccgugagcuucuucccccaggccgagaccugcaagguccaguccaaccgcguguucugcgacacgaugaacagccggacccuccccuccgaggucaaccugugcaacguggacaucuucaacccgaaguacgacugcaagaucaugaccagcaagaccgacguguccagcuccgucaucacgagccugggggccaucguguccugcuacggcaagaccaagugcaccgccagcaacaagugccgggggaucaucaagaccuucuccaacggcugcgacuacgugagcaacaagggcgucgacacggugagcguggggaacacccucuacuacgucaacaagcaggagggcaagucccuguacgugaagggggagcccaucaucaacuucuacgacccccugguguuccccagcgacgaguucgacgccuccaucagccaggucaacgagaagaucaaccagucccucgcguucauccgcaagagcgacgagcugcugcacaacgugaacgccggcaaguccaccaccaacaucaugaucaccacgaucaucaucgugaucaucgucauccuccugagccugaucgccguggggcuccugcuguacugcaaggcccgguccaccccggugacccugagcaaggaccagcucuccggcaucaacaacaucgccuucagcaacugaggacuaguggaagcauuuuccuggcugauuaaaagaaauuacucagcuauggucaucuguuccuguuagaaggcuaugcagcauauuauauacuaugcgcauguuaugaaaugcauaauaaaaaauuuuaaaaaaucuaaaagaucuaaaaaaaaaaaaaaaaaaaaaaaaaaaaaaaaaaaaaaaaaaaaaaaaaaaaaaaaaaaaaaaaugcaucccccccccccccccccccccccccccccccaaaggcucuuuucagagccaccagaauu

SEQ ID NO: 5553 - RNA, 1976 nt, Artificial Sequence
  mRNA product Design f-2 comprising derived and/or modified sequence from HRSV(A2)__F_DSCav1_mut5 (opt2)
gggagagcggcucggccauuuugucccagucaguccggaggcugcggcugcagaaguaccgccugcggaguaacugcaaagaagcuuaccauggagcuccucauccucaaggccaacgccaucaccaccauccucaccgccgucaccuucugcuucgccuccggccagaacaucaccgaggaguucuaccaguccaccugcuccgccgucuccaagggcuaccucuccgcccuccgcaccggcugguacaccuccgucaucaccaucgagcucuccaacaucaaggagaacaagugcaacggcaccgacgccaaggucaagcucaucaagcaggagcucgacaaguacaagaacgccgucaccgagcuccagcuccucaugcaguccacccccgccaccggcuccggcuccgccaucgccuccggcgucgccgucugcaagguccuccaccucgagggcgaggucaacaagaucaaguccgcccuccucuccaccaacaaggccgucgucucccucuccggcugcggcgucuccguccucaccuucaagguccucgaccucaagaacuacaucgacaagcagcuccuccccauccucaacaagcaguccugcuccaucuccaacaucgagaccgucaucgaguuccagcagaagaacaaccgccuccucgagaucacccgcgaguucuccgucaacgccggcgucaccacccccgucuccaccuacaugcucaccaacuccgagcuccucucccucaucaacgacaugcccaucaccaacgaccagaagaagcucauguccaacaacguccagaucguccgccagcaguccuacuccaucaugugcaucaucaaggaggagguccucgccuacgucguccagcucccccucuacggcgucaucgacacccccugcuggaagcuccacaccuccccccucugcaccaccaacaccaaggagggcuccaacaucugccucacccgcaccgaccgcggcugguacugcgacaacgccggcuccgucuccuucuucccccaggccgagaccugcaagguccaguccaaccgcgucuucugcgacaccaugaacucccgcacccuccccuccgaggucaaccucugcaacgucgacaucuucaaccccaaguacgacugcaagaucaugaccuccaagaccgacgucuccuccuccgucaucaccucccucggcgccaucgucuccugcuacggcaagaccaagugcaccgccuccaacaagugccgcggcaucaucaagaccuucuccaacggcugcgacuacgucuccaacaagggcgucgacaccgucuccgucggcaacacccucuacuacgucaacaagcaggagggcaagucccucuacgucaagggcgagcccaucaucaacuucuacgacccccucgucuuccccuccgacgaguucgacgccuccaucucccaggucaacgagaagaucaaccagucccucgccuucauccgcaaguccgacgagcuccuccacaacgucaacgccggcaaguccaccaccaacaucaugaucaccaccaucaucaucgucaucaucgucauccuccucucccucaucgccgucggccuccuccucuacugcaaggcccgcuccacccccgucacccucuccaaggaccagcucuccggcaucaacaacaucgccuucuccaacugaggacuaguggaagcauuuuccuggcugauuaaaagaaauuacucagcuauggucaucuguuccuguuagaaggcuaugcagcauauuauauacuaugcgcauguuaugaaaugcauaauaaaaaauuuuaaaaaaucuaaaagaucuaaaaaaaaaaaaaaaaaaaaaaaaaaaaaaaaaaaaaaaaaaaaaaaaaaaaaaaaaaaaaaaaugcaucccccccccccccccccccccccccccccccaaaggcucuuuucagagccaccagaauu

SEQ ID NO: 5554 - RNA, 1976 nt, Artificial Sequence
  mRNA product Design f-2 comprising derived and/or modified sequence from HRSV(A2)__F_DSCav1_mut5 (opt3)
gggagagcggcucggccauuuugucccagucaguccggaggcugcggcugcagaaguaccgccugcggaguaacugcaaagaagcuuaccauggagcugcucauccuuaaggccaacgcuauuaccacaauacugacugcagugacguucugcuuugccagcggccagaauaucaccgaagaguucuaccaauccacauguucugcggucucaaaaggguauuugagugcuuuaagaacuggaugguacaccagcguuauuacaaucgaacuguccaacauuaaggagaauaaaugcaacgguaccgacgccaaggugaaacuaaucaagcaggaacucgauaaguauaaaaaugcaguaacugagcugcagcuucugaugcagucuacacccgccaccggcucggggucagcuauagcaagcggaguggccgucuguaagguguugcaccucgagggcgaaguuaacaaaaucaagagugcucugcuguccacgaauaaagccguggucucucucagcgguugcgggguguccguauuaacuuuuaagguucuggaccuuaagaacuacauugauaaacaauugcugccuauccuaaauaagcagucauguaguauuagcaacaucgagaccgugauagaguuccagcagaaaaauaacaggcuccuggaaauuacacgggaguuuucugucaaugcgggagugacuaccccaguguccacauauaugcuuaccaacucagaacuguugagccucaucaaugacaugccgauuacgaacgaucaaaagaaacugaugaguaacaauguccagaucguucgccagcagucuuacuccaucaugugcauuauaaaggaggaaguguuagcauauguagugcaacugccccucuacggcgucaucgacacuccuuguuggaaacuucauacaagcccacugugcaccacuaacacaaaggagggcucgaauauuuguuugacccgaacggaucgugggugguacugcgacaacgccggaucuguguccuucuuuccccaggcugaaaccuguaagguucagucaaauagaguguucugcgauacaaugaacaguagaacucugccuagcgaggucaaucucugcaacguggacaucuuuaauccaaaauaugauuguaagauaaugaccuccaaaacagacguaucuagcucaguuauuaccagucugggugccaucguguccugcuacggcaagacuaaauguacagcaagcaacaagugcagggggaucauuaagaccuucucuaauggaugugauuaugucucaaacaaaggcguggacacugucaguguggguaauacgcuuuacuauguuaacaagcaagaggggaaaagccuguacgugaagggagaacccaucauuaauuuuuaugacccuuugguauucccauccgaugaguuugacgcuucuauaucgcaggucaacgagaaaaucaaccagagccucgccuucauucggaaguccgaugaacuguuacacaaugugaacgcgggcaagucaacaaccaauaucaugaucacuaccauuauaaucguuauuaucgugauucugcuaagucucaucgccgucggccugcuuuuguacugcaaagcacgcucuacaccggugacccugagcaaggaccagcucuccgggauaaacaauaucgcuuucucaaacugaggacuaguggaagcauuuuccuggcugauuaaaagaaauuacucagcuauggucaucuguuccuguuagaaggcuaugcagcauauuauauacuaugcgcauguuaugaaaugcauaauaaaaaauuuuaaaaaaucuaaaagaucuaaaaaaaaaaaaaaaaaaaaaaaaaaaaaaaaaaaaaaaaaaaaaaaaaaaaaaaaaaaaaaaaugcaucccccccccccccccccccccccccccccccaaaggcucuuuucagagccaccagaauu

SEQ ID NO: 5555 - RNA, 1976 nt, Artificial Sequence
  mRNA product Design f-2 comprising derived and/or modified sequence from HRSV(A2)__F_DSCav1_mut5 (opt4)
gggagagcggcucggccauuuugucccagucaguccggaggcugcggcugcagaaguaccgccugcggaguaacugcaaagaagcuuaccauggagcugcugauccugaaggccaacgccaucaccaccauccugaccgccgugaccuucugcuucgccagcggccagaacaucaccgaggaguucuaccagagcaccugcagcgccgugagcaagggcuaccugagcgcccugagaaccggcugguacaccagcgugaucaccaucgagcugagcaacaucaaggagaacaagugcaacggcaccgacgccaaggugaagcugaucaagcaggagcuggacaaguacaagaacgccgugaccgagcugcagcugcugaugcagagcacccccgccaccggcagcggcagcgccaucgccagcggcguggccgugugcaaggugcugcaccuggagggcgaggugaacaagaucaagagcgcccugcugagcaccaacaaggccguggugagccugagcggcugcggcgugagcgugcugaccuucaaggugcuggaccugaagaacuacaucgacaagcagcugcugcccauccugaacaagcagagcugcagcaucagcaacaucgagaccgugaucgaguuccagcagaagaacaacagacugcuggagaucaccagagaguucagcgugaacgccggcgugaccacccccgugagcaccuacaugcugaccaacagcgagcugcugagccugaucaacgacaugcccaucaccaacgaccagaagaagcugaugagcaacaacgugcagaucgugagacagcagagcuacagcaucaugugcaucaucaaggaggaggugcuggccuacguggugcagcugccccuguacggcgugaucgacacccccugcuggaagcugcacaccagcccccugugcaccaccaacaccaaggagggcagcaacaucugccugaccagaaccgacagaggcugguacugcgacaacgccggcagcgugagcuucuucccccaggccgagaccugcaaggugcagagcaacagaguguucugcgacaccaugaacagcagaacccugcccagcgaggugaaccugugcaacguggacaucuucaaccccaaguacgacugcaagaucaugaccagcaagaccgacgugagcagcagcgugaucaccagccugggcgccaucgugagcugcuacggcaagaccaagugcaccgccagcaacaagugcagaggcaucaucaagaccuucagcaacggcugcgacuacgugagcaacaagggcguggacaccgugagcgugggcaacacccuguacuacgugaacaagcaggagggcaagagccuguacgugaagggcgagcccaucaucaacuucuacgacccccugguguuccccagcgacgaguucgacgccagcaucagccaggugaacgagaagaucaaccagagccuggccuucaucagaaagagcgacgagcugcugcacaacgugaacgccggcaagagcaccaccaacaucaugaucaccaccaucaucaucgugaucaucgugauccugcugagccugaucgccgugggccugcugcuguacugcaaggccagaagcacccccgugacccugagcaaggaccagcugagcggcaucaacaacaucgccuucagcaacugaggacuaguggaagcauuuuccuggcugauuaaaagaaauuacucagcuauggucaucuguuccuguuagaaggcuaugcagcauauuauauacuaugcgcauguuaugaaaugcauaauaaaaaauuuuaaaaaaucuaaaagaucuaaaaaaaaaaaaaaaaaaaaaaaaaaaaaaaaaaaaaaaaaaaaaaaaaaaaaaaaaaaaaaaaugcaucccccccccccccccccccccccccccccccaaaggcucuuuucagagccaccagaauu

SEQ ID NO: 5556 - RNA, 1976 nt, Artificial Sequence
  mRNA product Design f-2 comprising derived and/or modified sequence from HRSV(A2)__F_DSCav1_mut5 (opt5)
gggagagcggcucggccauuuugucccagucaguccggaggcugcggcugcagaaguaccgccugcggaguaacugcaaagaagcuuaccauggagcugcucauccugaaggccaacgcuauuaccacaauccuuacggccgugaccuucugcuuugcgagcggccagaauauuacagaagaguucuaccaauccaccuguucugcugucagcaaaggguaucuguccgcccucagaacaggaugguacaccucuguuaucacaauugaacugagcaacaucaaggagaauaaaugcaacggcaccgacgccaaggugaaacuuaucaagcaggaacuggauaaguauaaaaaugcugugacggagcuccagcugcugaugcaguccacccccgccacagggucuggaagcgcuauugccuccggcgucgcgguguguaagguucuccaccuggagggggaagugaacaaaaucaagagcgcccuucugucuaccaauaaagcugucgugucccucagcggaugcggcguuucugugcugacauuuaagguccuugaccugaagaacuacauugauaaacaacuccugccuauccugaauaagcaguccuguagcauuucuaacaucgagaccgugauugaguuccagcagaaaaauaaccggcuccuggaaaucacgcgcgaguuuuccgugaaugccggcgucacaaccccgguuagcacauauaugcuuaccaacuccgaacugcucucucugaucaaugacaugcccauuaccaacgaucaaaagaaacuuaugagcaacaaugugcagaucgugagacagcaguccuacagcauuaugugcaucauuaaggaggaaguccuggcuuaugugguucaacucccucuguacggggugaucgacacacccuguuggaaacugcauacgucuccucucugcaccacaaacaccaaggagggauccaauaucugucugacacggaccgaucgcggcugguacugcgacaacgccgggagcgucucuuucuuuccccaggcggaaacguguaaggugcagagcaauagaguuuucugcgauacaaugaacuccagaacccugccuucugaggugaaucucugcaacgucgacauuuuuaauccgaaauaugauuguaagaucaugaccagcaaaacagacguguccagcucugucauuaccucccugggagccaucgugagcugcuacggcaagacaaaauguacggcuucuaacaagugccgggggauuaucaagaccuucuccaauggaugugauuauguuagcaacaaaggcguggacacagucuccgugggcaauacccuuuacuauguuaacaagcaagaggggaaaucucuguacgugaagggagaacccaucauuaauuuuuaugacccucucgucuuccccagcgaugaguuugacgccuccaucucucaggugaacgagaaaauuaaccagagccuggcuuucauccgcaaguccgaugaacugcuccacaaugugaacgccggcaagagcacaaccaauauuaugaucacgaccauuaucaucguuauuaucgucauucugcuuucucugaucgccguggggcuccugcuguacugcaaagcuagauccacaccugugacccuuagcaaggaccagcucucuggaauuaacaauaucgcguucuccaacugaggacuaguggaagcauuuuccuggcugauuaaaagaaauuacucagcuauggucaucuguuccuguuagaaggcuaugcagcauauuauauacuaugcgcauguuaugaaaugcauaauaaaaaauuuuaaaaaaucuaaaagaucuaaaaaaaaaaaaaaaaaaaaaaaaaaaaaaaaaaaaaaaaaaaaaaaaaaaaaaaaaaaaaaaaugcaucccccccccccccccccccccccccccccccaaaggcucuuuucagagccaccagaauu

SEQ ID NO: 5557 - RNA, 1976 nt, Artificial Sequence
  mRNA product Design f-2 comprising derived and/or modified sequence from HRSV(A2)__F_DSCav1_mut5 (opt6)
gggagagcggcucggccauuuugucccagucaguccggaggcugcggcugcagaaguaccgccugcggaguaacugcaaagaagcuuaccauggaacuauuaauacuuaaagccaacgcaauaacaacaauucucacugcugucaccuucugcuucgccucaggccaaaacauaacggaagaauuuuaccaaucaacaugcucugcaguauccaaaggcuaccuaucugcucuaagaacagguugguauacaucaguaauaaccauagaacuaucaaacauaaaagaaaauaaaugcaacggaacagacgcaaaaguuaaacucauaaaacaagaacuagacaaauauaaaaacgcaguuaccgaacuacaacuacuuaugcaauccacucccgccacuggaucaggaucagcaauagcaucaggagucgcaguauguaaagucuuacaccucgaaggcgaagucaauaaaaucaaauccgcauuacuauccacaaacaaagcagucguaucccuaagcggaugcggaguaucaguacuaacauuuaaaguacuagaccuaaaaaauuacaucgauaaacaacuauuaccuauauuaaacaaacaauccugcuccauuucaaauaucgaaaccguaauagaauuucaacaaaaaaacaacagauuacuagaaauaacaagagaauuuuccguaaaugcuggcguaacaacaccaguauccacauacaugcucacaaacuccgaacuacuaucacuaauaaaugacaugcccauaacaaacgaucaaaaaaaacuaaugucaaauaauguacaaauaguaagacaacaaagcuacuccaucauguguauaauaaaagaagaaguacuagcauacguaguucaacuaccacuuuacggcguaaucgacaccccuugcuggaaacuacacaccuccccucuaugcaccacaaacacaaaagaagguuccaacauaugccuuaccagaacagacagaggcugguauugcgacaacgcaggaucaguuucauuuuuuccacaagcugaaacaugcaaaguacaaucaaacagagucuucugcgacacaaugaacucaagaacucuacccucagaaguaaaccuauguaacguagacauuuucaaccccaaauacgacugcaaaauuaugacaucaaaaacagacguuucaucaucaguuaucaccucauuaggagcaauaguaagcugcuacggaaaaacaaaaugcaccgccucaaauaaaugcagaggaauaauaaaaacuuucuccaacggaugcgacuacguuucaaacaaagguguagacacuguaucaguaggaaacacacuauauuacguaaauaaacaagaaggaaaaucacuuuaugucaaaggagaaccaauaaucaauuucuacgacccauuaguauucccaucagacgaauuugaugcuucaauaucacaaguaaacgaaaaaauaaaucaaucacucgcauuuauacgaaaaucagacgaacuacuacacaauguaaacgcaggcaaaucaacaacaaacauaaugauaacaacaauaaucauuguaauaauaguaauacuucuaucucuaauagcaguaggauuacuccucuacugcaaagcaagaucaaccccuguaacacuaucaaaagaccaacuuucagguauaaauaauauagcuuuuuccaauuaaggacuaguggaagcauuuuccuggcugauuaaaagaaauuacucagcuauggucaucuguuccuguuagaaggcuaugcagcauauuauauacuaugcgcauguuaugaaaugcauaauaaaaaauuuuaaaaaaucuaaaagaucuaaaaaaaaaaaaaaaaaaaaaaaaaaaaaaaaaaaaaaaaaaaaaaaaaaaaaaaaaaaaaaaaugcaucccccccccccccccccccccccccccccccaaaggcucuuuucagagccaccagaauu

SEQ ID NO: 5558 - RNA, 1976 nt, Artificial Sequence
  mRNA product Design f-2 comprising derived and/or modified sequence from HRSV(A2)__F_DSCav1_mut5 (opt11)
gggagagcggcucggccauuuugucccagucaguccggaggcugcggcugcagaaguaccgccugcggaguaacugcaaagaagcuuaccauggagcuccuaauccucaaagccaacgcgaucacuacaauccucacagccgucaccuucugcuucgccuccggccaaaacaucaccgaggaguucuaccaaucaaccugcuccgccguaucaaaaggauaccuaagcgcccuacggaccggcugguacacaucugucaucaccaucgaacuaucaaacaucaaagaaaacaaaugcaacggaaccgacgcaaaagucaaacugauuaaacaagaacuagacaaauacaaaaacgcagucaccgaacugcaauuacucaugcaaagcacaccggccaccggcucaggcagcgccaucgccuccggcgucgccgucugcaaaguucuccaccucgagggcgaagucaacaaaauaaaaucugcccuccucuccaccaacaaagccgucgucucccucagcggcugcggagucuccguccucaccuucaaaguucucgaucucaagaacuauauugacaaacaacuucuacccauacucaacaaacaaagcugcagcauauccaacaucgaaaccgucaucgaguuccaacaaaagaacaaccgccuccucgaaauaacccgcgaguucagcguuaacgccggagucacuaccccugucuccaccuacaugcucaccaacuccgaacuccuaucacuaaucaacgacaugcccauaaccaacgaccagaagaaacucauguccaacaacguccaaauuguccgacaacaaagcuacuccauaaugugcauaauaaaagaggaaguccucgccuacgucguacaacugccccuuuauggcguaaucgacacacccugcuggaaacuccacacgucaccccucugcaccaccaacacaaaagaaggcucgaacaucugccuaacacggacugaccgcggcugguacugcgacaacgccggcuccgucagcuucuucccacaagccgaaaccugcaaaguacaauccaaccgaguauucugcgacaccaugaacuccagaacccuccccucagaggucaaccugugcaacguagacaucuucaaccccaaauacgacugcaaaauaaugaccucaaaaacagacgucuccucuuccguaaucaccagccucggagccaucgucagcugcuacggcaaaaccaaaugcaccgccucaaacaaaugccgcggcaucaucaaaacauucucaaacggcugcgacuacgucuccaacaaaggcgucgacacaguaagcguaggcaacacacuguacuacgucaacaaacaagagggaaaaucacucuacgucaaaggagaacccauaaucaacuucuacgacccccucguuuuccccagcgacgaguucgacgccagcauaucccaagucaacgagaaaauuaaccaaucccuagcauucauccgaaaaucugacgaacugcuccacaacgucaacgcgggaaaaucaacaaccaacauaaugauaaccacaaucauaauagucaucaucguaauccuccucagccuaaucgcugucggccuccuccucuacugcaaagcccguuccaccccagucacacuuuccaaggaccaacuaagcggaauaaacaacaucgcguucucaaacuaaggacuaguggaagcauuuuccuggcugauuaaaagaaauuacucagcuauggucaucuguuccuguuagaaggcuaugcagcauauuauauacuaugcgcauguuaugaaaugcauaauaaaaaauuuuaaaaaaucuaaaagaucuaaaaaaaaaaaaaaaaaaaaaaaaaaaaaaaaaaaaaaaaaaaaaaaaaaaaaaaaaaaaaaaaugcaucccccccccccccccccccccccccccccccaaaggcucuuuucagagccaccagaauu

SEQ ID NO: 5559 - RNA, 1967 nt, Artificial Sequence
  mRNA product Design f-3 comprising derived and/or modified sequence from HRSV(A2)__F_DSCav1_mut5 (opt1)
gggagagucccgcagucggcguccagcggcucugcuuguucgugugugugucguugcaggccuuauucaagcuuaccauggagcugcucauccugaaggccaacgccaucaccaccauccugacggcggugaccuucugcuucgccagcggccagaacaucaccgaggaguucuaccaguccacgugcagcgccgucuccaagggguaccucagcgcccugcggaccggcugguacaccuccgugaucaccaucgagcugagcaacaucaaggagaacaagugcaacgggaccgacgccaaggugaagcucaucaagcaggagcuggacaaguacaagaacgcggucacggagcugcagcuccugaugcaguccaccccggcaaccggcuccggcuccgccaucgcgagcggcgucgccgugugcaaggugcugcaccucgagggggaggucaacaagaucaagagcgcccugcuguccaccaacaaggccguggugagccucuccggcugcggcgucagcgugcugaccuucaaggugcuggaccucaagaacuacaucgacaagcagcugcugcccauccugaacaagcagagcugcuccaucagcaacaucgagacggugaucgaguuccagcagaagaacaaccggcuccuggagaucacccgcgaguucagcgugaacgccggggucaccacccccguguccacguacaugcugaccaacagcgagcuccugucccugaucaacgacaugccgaucaccaacgaccagaagaagcucaugagcaacaacgugcagaucguccggcagcaguccuacagcaucaugugcaucaucaaggaggaggugcuggcguacgugguccagcugccccucuacggcgugaucgacacccccugcuggaagcugcacacgagcccccugugcaccaccaacaccaaggagggguccaacaucugccucacgcgcaccgaccggggcugguacugcgacaacgccggcagcgucuccuucuucccgcaggccgagaccugcaaggugcagagcaaccgcguguucugcgacaccaugaacucccggacgcugcccagcgagguaaaccucugcaacgucgacaucuucaaccccaaguacgacugcaagaucaugaccuccaagaccgacgugagcuccagcgugaucaccucccugggggccaucgucagcugcuacggcaagacgaagugcaccgccagcaacaagugccgggggaucaucaagaccuucuccaacggcugcgacuacgugagcaacaagggcguggacaccguguccgucgggaacacccuguacuacgugaacaagcaggagggcaagagccucuacgugaagggggagcccaucaucaacuucuacgacccgcuggucuuccccuccgacgaguucgacgcgagcaucucccaggugaacgagaagaucaaccagagccuggccuucauccgcaaguccgacgagcugcuccacaacgugaacgccggcaagagcacgaccaacaucaugaucaccaccaucaucaucgucaucaucgugauccugcugucccucaucgccguggggcugcugcucuacugcaaggcccggagcacgcccgucacccuguccaaggaccagcugagcggcaucaacaacaucgcguucuccaacugaggacuaguacuggcugcaucucccuuuccucuguccuccauccuucucccaggauggugaagggggaccugguacccagugauccccaccccaggauccuaaaucaugacuuaccugcuaauaaaaacucauuggaaaagugagaagaucuaaaaaaaaaaaaaaaaaaaaaaaaaaaaaaaaaaaaaaaaaaaaaaaaaaaaaaaaaaaaaaaaugcaucccccccccccccccccccccccccccccccaaaggcucuuuucagagccaccagaauu

SEQ ID NO: 5560 - RNA, 1967 nt, Artificial Sequence
  mRNA product Design f-3 comprising derived and/or modified sequence from HRSV(A2)__F_DSCav1_mut5 (opt1)
gggagagucccgcagucggcguccagcggcucugcuuguucgugugugugucguugcaggccuuauucaagcuuaccauggagcugcucauccugaaggccaacgccaucaccaccauccugacggcggugaccuucugcuucgccagcggccagaacaucaccgaggaguucuaccaguccacgugcagcgccgucuccaagggguaccucagcgcccugcgcaccggcugguacaccuccgugaucaccaucgagcugagcaacaucaaggagaacaagugcaacgggaccgacgccaaggugaagcucaucaagcaggagcuggacaaguacaagaacgcggucacggagcugcagcuccugaugcaguccacccccgccaccggcagcggguccgccaucgccagcggcguggcggugugcaagguccugcaccucgagggcgaggugaacaagaucaaguccgcccugcugagcaccaacaaggccguggucucccucagcgggugcggcguguccgugcugacguucaagguccuggaccucaagaacuacaucgacaagcagcugcugccgauccucaacaagcagagcugcuccaucagcaacaucgagaccgugaucgaguuccagcagaagaacaaccggcugcuggagaucacccgcgaguucuccgugaacgccggggucaccacgcccgugagcaccuacaugcucaccaacagcgagcugcugucccucaucaacgacaugcccaucaccaacgaccagaagaagcugaugagcaacaacgugcagaucguccggcagcaguccuacagcaucaugugcaucaucaaggaggaggugcuggccuacgugguccagcucccccuguacggcgugaucgacacgccgugcuggaagcugcacaccagcccccucugcaccaccaacacgaaggagggguccaacaucugccugacccgcaccgaccggggcugguacugcgacaacgcgggcuccgugagcuucuucccccaggccgagaccugcaagguccaguccaaccgcguguucugcgacacgaugaacagccggacccuccccuccgaggucaaccugugcaacguggacaucuucaacccgaaguacgacugcaagaucaugaccagcaagaccgacguguccagcuccgucaucacgagccugggggccaucguguccugcuacggcaagaccaagugcaccgccagcaacaagugccgggggaucaucaagaccuucuccaacggcugcgacuacgugagcaacaagggcgucgacacggugagcguggggaacacccucuacuacgucaacaagcaggagggcaagucccuguacgugaagggggagcccaucaucaacuucuacgacccccugguguuccccagcgacgaguucgacgccuccaucagccaggucaacgagaagaucaaccagucccucgcguucauccgcaagagcgacgagcugcugcacaacgugaacgccggcaaguccaccaccaacaucaugaucaccacgaucaucaucgugaucaucgucauccuccugagccugaucgccguggggcuccugcuguacugcaaggcccgguccaccccggugacccugagcaaggaccagcucuccggcaucaacaacaucgccuucagcaacugaggacuaguacuggcugcaucucccuuuccucuguccuccauccuucucccaggauggugaagggggaccugguacccagugauccccaccccaggauccuaaaucaugacuuaccugcuaauaaaaacucauuggaaaagugagaagaucuaaaaaaaaaaaaaaaaaaaaaaaaaaaaaaaaaaaaaaaaaaaaaaaaaaaaaaaaaaaaaaaaugcaucccccccccccccccccccccccccccccccaaaggcucuuuucagagccaccagaauu

SEQ ID NO: 5561 - RNA, 1967 nt, Artificial Sequence
  mRNA product Design f-3 comprising derived and/or modified sequence from HRSV(A2)__F_DSCav1_mut5 (opt2)
gggagagucccgcagucggcguccagcggcucugcuuguucgugugugugucguugcaggccuuauucaagcuuaccauggagcuccucauccucaaggccaacgccaucaccaccauccucaccgccgucaccuucugcuucgccuccggccagaacaucaccgaggaguucuaccaguccaccugcuccgccgucuccaagggcuaccucuccgcccuccgcaccggcugguacaccuccgucaucaccaucgagcucuccaacaucaaggagaacaagugcaacggcaccgacgccaaggucaagcucaucaagcaggagcucgacaaguacaagaacgccgucaccgagcuccagcuccucaugcaguccacccccgccaccggcuccggcuccgccaucgccuccggcgucgccgucugcaagguccuccaccucgagggcgaggucaacaagaucaaguccgcccuccucuccaccaacaaggccgucgucucccucuccggcugcggcgucuccguccucaccuucaagguccucgaccucaagaacuacaucgacaagcagcuccuccccauccucaacaagcaguccugcuccaucuccaacaucgagaccgucaucgaguuccagcagaagaacaaccgccuccucgagaucacccgcgaguucuccgucaacgccggcgucaccacccccgucuccaccuacaugcucaccaacuccgagcuccucucccucaucaacgacaugcccaucaccaacgaccagaagaagcucauguccaacaacguccagaucguccgccagcaguccuacuccaucaugugcaucaucaaggaggagguccucgccuacgucguccagcucccccucuacggcgucaucgacacccccugcuggaagcuccacaccuccccccucugcaccaccaacaccaaggagggcuccaacaucugccucacccgcaccgaccgcggcugguacugcgacaacgccggcuccgucuccuucuucccccaggccgagaccugcaagguccaguccaaccgcgucuucugcgacaccaugaacucccgcacccuccccuccgaggucaaccucugcaacgucgacaucuucaaccccaaguacgacugcaagaucaugaccuccaagaccgacgucuccuccuccgucaucaccucccucggcgccaucgucuccugcuacggcaagaccaagugcaccgccuccaacaagugccgcggcaucaucaagaccuucuccaacggcugcgacuacgucuccaacaagggcgucgacaccgucuccgucggcaacacccucuacuacgucaacaagcaggagggcaagucccucuacgucaagggcgagcccaucaucaacuucuacgacccccucgucuuccccuccgacgaguucgacgccuccaucucccaggucaacgagaagaucaaccagucccucgccuucauccgcaaguccgacgagcuccuccacaacgucaacgccggcaaguccaccaccaacaucaugaucaccaccaucaucaucgucaucaucgucauccuccucucccucaucgccgucggccuccuccucuacugcaaggcccgcuccacccccgucacccucuccaaggaccagcucuccggcaucaacaacaucgccuucuccaacugaggacuaguacuggcugcaucucccuuuccucuguccuccauccuucucccaggauggugaagggggaccugguacccagugauccccaccccaggauccuaaaucaugacuuaccugcuaauaaaaacucauuggaaaagugagaagaucuaaaaaaaaaaaaaaaaaaaaaaaaaaaaaaaaaaaaaaaaaaaaaaaaaaaaaaaaaaaaaaaaugcaucccccccccccccccccccccccccccccccaaaggcucuuuucagagccaccagaauu

SEQ ID NO: 5562 - RNA, 1967 nt, Artificial Sequence
  mRNA product Design f-3 comprising derived and/or modified sequence from HRSV(A2)__F_DSCav1_mut5 (opt3)
gggagagucccgcagucggcguccagcggcucugcuuguucgugugugugucguugcaggccuuauucaagcuuaccauggagcugcucauccuuaaggccaacgcuauuaccacaauacugacugcagugacguucugcuuugccagcggccagaauaucaccgaagaguucuaccaauccacauguucugcggucucaaaaggguauuugagugcuuuaagaacuggaugguacaccagcguuauuacaaucgaacuguccaacauuaaggagaauaaaugcaacgguaccgacgccaaggugaaacuaaucaagcaggaacucgauaaguauaaaaaugcaguaacugagcugcagcuucugaugcagucuacacccgccaccggcucggggucagcuauagcaagcggaguggccgucuguaagguguugcaccucgagggcgaaguuaacaaaaucaagagugcucugcuguccacgaauaaagccguggucucucucagcgguugcgggguguccguauuaacuuuuaagguucuggaccuuaagaacuacauugauaaacaauugcugccuauccuaaauaagcagucauguaguauuagcaacaucgagaccgugauagaguuccagcagaaaaauaacaggcuccuggaaauuacacgggaguuuucugucaaugcgggagugacuaccccaguguccacauauaugcuuaccaacucagaacuguugagccucaucaaugacaugccgauuacgaacgaucaaaagaaacugaugaguaacaauguccagaucguucgccagcagucuuacuccaucaugugcauuauaaaggaggaaguguuagcauauguagugcaacugccccucuacggcgucaucgacacuccuuguuggaaacuucauacaagcccacugugcaccacuaacacaaaggagggcucgaauauuuguuugacccgaacggaucgugggugguacugcgacaacgccggaucuguguccuucuuuccccaggcugaaaccuguaagguucagucaaauagaguguucugcgauacaaugaacaguagaacucugccuagcgaggucaaucucugcaacguggacaucuuuaauccaaaauaugauuguaagauaaugaccuccaaaacagacguaucuagcucaguuauuaccagucugggugccaucguguccugcuacggcaagacuaaauguacagcaagcaacaagugcagggggaucauuaagaccuucucuaauggaugugauuaugucucaaacaaaggcguggacacugucaguguggguaauacgcuuuacuauguuaacaagcaagaggggaaaagccuguacgugaagggagaacccaucauuaauuuuuaugacccuuugguauucccauccgaugaguuugacgcuucuauaucgcaggucaacgagaaaaucaaccagagccucgccuucauucggaaguccgaugaacuguuacacaaugugaacgcgggcaagucaacaaccaauaucaugaucacuaccauuauaaucguuauuaucgugauucugcuaagucucaucgccgucggccugcuuuuguacugcaaagcacgcucuacaccggugacccugagcaaggaccagcucuccgggauaaacaauaucgcuuucucaaacugaggacuaguacuggcugcaucucccuuuccucuguccuccauccuucucccaggauggugaagggggaccugguacccagugauccccaccccaggauccuaaaucaugacuuaccugcuaauaaaaacucauuggaaaagugagaagaucuaaaaaaaaaaaaaaaaaaaaaaaaaaaaaaaaaaaaaaaaaaaaaaaaaaaaaaaaaaaaaaaaugcaucccccccccccccccccccccccccccccccaaaggcucuuuucagagccaccagaauu

SEQ ID NO: 5563 - RNA, 1967 nt, Artificial Sequence
  mRNA product Design f-3 comprising derived and/or modified sequence from HRSV(A2)__F_DSCav1_mut5 (opt4)
gggagagucccgcagucggcguccagcggcucugcuuguucgugugugugucguugcaggccuuauucaagcuuaccauggagcugcugauccugaaggccaacgccaucaccaccauccugaccgccgugaccuucugcuucgccagcggccagaacaucaccgaggaguucuaccagagcaccugcagcgccgugagcaagggcuaccugagcgcccugagaaccggcugguacaccagcgugaucaccaucgagcugagcaacaucaaggagaacaagugcaacggcaccgacgccaaggugaagcugaucaagcaggagcuggacaaguacaagaacgccgugaccgagcugcagcugcugaugcagagcacccccgccaccggcagcggcagcgccaucgccagcggcguggccgugugcaaggugcugcaccuggagggcgaggugaacaagaucaagagcgcccugcugagcaccaacaaggccguggugagccugagcggcugcggcgugagcgugcugaccuucaaggugcuggaccugaagaacuacaucgacaagcagcugcugcccauccugaacaagcagagcugcagcaucagcaacaucgagaccgugaucgaguuccagcagaagaacaacagacugcuggagaucaccagagaguucagcgugaacgccggcgugaccacccccgugagcaccuacaugcugaccaacagcgagcugcugagccugaucaacgacaugcccaucaccaacgaccagaagaagcugaugagcaacaacgugcagaucgugagacagcagagcuacagcaucaugugcaucaucaaggaggaggugcuggccuacguggugcagcugccccuguacggcgugaucgacacccccugcuggaagcugcacaccagcccccugugcaccaccaacaccaaggagggcagcaacaucugccugaccagaaccgacagaggcugguacugcgacaacgccggcagcgugagcuucuucccccaggccgagaccugcaaggugcagagcaacagaguguucugcgacaccaugaacagcagaacccugcccagcgaggugaaccugugcaacguggacaucuucaaccccaaguacgacugcaagaucaugaccagcaagaccgacgugagcagcagcgugaucaccagccugggcgccaucgugagcugcuacggcaagaccaagugcaccgccagcaacaagugcagaggcaucaucaagaccuucagcaacggcugcgacuacgugagcaacaagggcguggacaccgugagcgugggcaacacccuguacuacgugaacaagcaggagggcaagagccuguacgugaagggcgagcccaucaucaacuucuacgacccccugguguuccccagcgacgaguucgacgccagcaucagccaggugaacgagaagaucaaccagagccuggccuucaucagaaagagcgacgagcugcugcacaacgugaacgccggcaagagcaccaccaacaucaugaucaccaccaucaucaucgugaucaucgugauccugcugagccugaucgccgugggccugcugcuguacugcaaggccagaagcacccccgugacccugagcaaggaccagcugagcggcaucaacaacaucgccuucagcaacugaggacuaguacuggcugcaucucccuuuccucuguccuccauccuucucccaggauggugaagggggaccugguacccagugauccccaccccaggauccuaaaucaugacuuaccugcuaauaaaaacucauuggaaaagugagaagaucuaaaaaaaaaaaaaaaaaaaaaaaaaaaaaaaaaaaaaaaaaaaaaaaaaaaaaaaaaaaaaaaaugcaucccccccccccccccccccccccccccccccaaaggcucuuuucagagccaccagaauu

SEQ ID NO: 5564 - RNA, 1967 nt, Artificial Sequence
  mRNA product Design f-3 comprising derived and/or modified sequence from HRSV(A2)__F_DSCav1_mut5 (opt5)
gggagagucccgcagucggcguccagcggcucugcuuguucgugugugugucguugcaggccuuauucaagcuuaccauggagcugcucauccugaaggccaacgcuauuaccacaauccuuacggccgugaccuucugcuuugcgagcggccagaauauuacagaagaguucuaccaauccaccuguucugcugucagcaaaggguaucuguccgcccucagaacaggaugguacaccucuguuaucacaauugaacugagcaacaucaaggagaauaaaugcaacggcaccgacgccaaggugaaacuuaucaagcaggaacuggauaaguauaaaaaugcugugacggagcuccagcugcugaugcaguccacccccgccacagggucuggaagcgcuauugccuccggcgucgcgguguguaagguucuccaccuggagggggaagugaacaaaaucaagagcgcccuucugucuaccaauaaagcugucgugucccucagcggaugcggcguuucugugcugacauuuaagguccuugaccugaagaacuacauugauaaacaacuccugccuauccugaauaagcaguccuguagcauuucuaacaucgagaccgugauugaguuccagcagaaaaauaaccggcuccuggaaaucacgcgcgaguuuuccgugaaugccggcgucacaaccccgguuagcacauauaugcuuaccaacuccgaacugcucucucugaucaaugacaugcccauuaccaacgaucaaaagaaacuuaugagcaacaaugugcagaucgugagacagcaguccuacagcauuaugugcaucauuaaggaggaaguccuggcuuaugugguucaacucccucuguacggggugaucgacacacccuguuggaaacugcauacgucuccucucugcaccacaaacaccaaggagggauccaauaucugucugacacggaccgaucgcggcugguacugcgacaacgccgggagcgucucuuucuuuccccaggcggaaacguguaaggugcagagcaauagaguuuucugcgauacaaugaacuccagaacccugccuucugaggugaaucucugcaacgucgacauuuuuaauccgaaauaugauuguaagaucaugaccagcaaaacagacguguccagcucugucauuaccucccugggagccaucgugagcugcuacggcaagacaaaauguacggcuucuaacaagugccgggggauuaucaagaccuucuccaauggaugugauuauguuagcaacaaaggcguggacacagucuccgugggcaauacccuuuacuauguuaacaagcaagaggggaaaucucuguacgugaagggagaacccaucauuaauuuuuaugacccucucgucuuccccagcgaugaguuugacgccuccaucucucaggugaacgagaaaauuaaccagagccuggcuuucauccgcaaguccgaugaacugcuccacaaugugaacgccggcaagagcacaaccaauauuaugaucacgaccauuaucaucguuauuaucgucauucugcuuucucugaucgccguggggcuccugcuguacugcaaagcuagauccacaccugugacccuuagcaaggaccagcucucuggaauuaacaauaucgcguucuccaacugaggacuaguacuggcugcaucucccuuuccucuguccuccauccuucucccaggauggugaagggggaccugguacccagugauccccaccccaggauccuaaaucaugacuuaccugcuaauaaaaacucauuggaaaagugagaagaucuaaaaaaaaaaaaaaaaaaaaaaaaaaaaaaaaaaaaaaaaaaaaaaaaaaaaaaaaaaaaaaaaugcaucccccccccccccccccccccccccccccccaaaggcucuuuucagagccaccagaauu

SEQ ID NO: 5565 - RNA, 1967 nt, Artificial Sequence
  mRNA product Design f-3 comprising derived and/or modified sequence from HRSV(A2)__F_DSCav1_mut5 (opt6)
gggagagucccgcagucggcguccagcggcucugcuuguucgugugugugucguugcaggccuuauucaagcuuaccauggaacuauuaauacuuaaagccaacgcaauaacaacaauucucacugcugucaccuucugcuucgccucaggccaaaacauaacggaagaauuuuaccaaucaacaugcucugcaguauccaaaggcuaccuaucugcucuaagaacagguugguauacaucaguaauaaccauagaacuaucaaacauaaaagaaaauaaaugcaacggaacagacgcaaaaguuaaacucauaaaacaagaacuagacaaauauaaaaacgcaguuaccgaacuacaacuacuuaugcaauccacucccgccacuggaucaggaucagcaauagcaucaggagucgcaguauguaaagucuuacaccucgaaggcgaagucaauaaaaucaaauccgcauuacuauccacaaacaaagcagucguaucccuaagcggaugcggaguaucaguacuaacauuuaaaguacuagaccuaaaaaauuacaucgauaaacaacuauuaccuauauuaaacaaacaauccugcuccauuucaaauaucgaaaccguaauagaauuucaacaaaaaaacaacagauuacuagaaauaacaagagaauuuuccguaaaugcuggcguaacaacaccaguauccacauacaugcucacaaacuccgaacuacuaucacuaauaaaugacaugcccauaacaaacgaucaaaaaaaacuaaugucaaauaauguacaaauaguaagacaacaaagcuacuccaucauguguauaauaaaagaagaaguacuagcauacguaguucaacuaccacuuuacggcguaaucgacaccccuugcuggaaacuacacaccuccccucuaugcaccacaaacacaaaagaagguuccaacauaugccuuaccagaacagacagaggcugguauugcgacaacgcaggaucaguuucauuuuuuccacaagcugaaacaugcaaaguacaaucaaacagagucuucugcgacacaaugaacucaagaacucuacccucagaaguaaaccuauguaacguagacauuuucaaccccaaauacgacugcaaaauuaugacaucaaaaacagacguuucaucaucaguuaucaccucauuaggagcaauaguaagcugcuacggaaaaacaaaaugcaccgccucaaauaaaugcagaggaauaauaaaaacuuucuccaacggaugcgacuacguuucaaacaaagguguagacacuguaucaguaggaaacacacuauauuacguaaauaaacaagaaggaaaaucacuuuaugucaaaggagaaccaauaaucaauuucuacgacccauuaguauucccaucagacgaauuugaugcuucaauaucacaaguaaacgaaaaaauaaaucaaucacucgcauuuauacgaaaaucagacgaacuacuacacaauguaaacgcaggcaaaucaacaacaaacauaaugauaacaacaauaaucauuguaauaauaguaauacuucuaucucuaauagcaguaggauuacuccucuacugcaaagcaagaucaaccccuguaacacuaucaaaagaccaacuuucagguauaaauaauauagcuuuuuccaauuaaggacuaguacuggcugcaucucccuuuccucuguccuccauccuucucccaggauggugaagggggaccugguacccagugauccccaccccaggauccuaaaucaugacuuaccugcuaauaaaaacucauuggaaaagugagaagaucuaaaaaaaaaaaaaaaaaaaaaaaaaaaaaaaaaaaaaaaaaaaaaaaaaaaaaaaaaaaaaaaaugcaucccccccccccccccccccccccccccccccaaaggcucuuuucagagccaccagaauu

SEQ ID NO: 5566 - RNA, 1967 nt, Artificial Sequence
  mRNA product Design f-3 comprising derived and/or modified sequence from HRSV(A2)__F_DSCav1_mut5 (opt11)
gggagagucccgcagucggcguccagcggcucugcuuguucgugugugugucguugcaggccuuauucaagcuuaccauggagcuccuaauccucaaagccaacgcgaucacuacaauccucacagccgucaccuucugcuucgccuccggccaaaacaucaccgaggaguucuaccaaucaaccugcuccgccguaucaaaaggauaccuaagcgcccuacggaccggcugguacacaucugucaucaccaucgaacuaucaaacaucaaagaaaacaaaugcaacggaaccgacgcaaaagucaaacugauuaaacaagaacuagacaaauacaaaaacgcagucaccgaacugcaauuacucaugcaaagcacaccggccaccggcucaggcagcgccaucgccuccggcgucgccgucugcaaaguucuccaccucgagggcgaagucaacaaaauaaaaucugcccuccucuccaccaacaaagccgucgucucccucagcggcugcggagucuccguccucaccuucaaaguucucgaucucaagaacuauauugacaaacaacuucuacccauacucaacaaacaaagcugcagcauauccaacaucgaaaccgucaucgaguuccaacaaaagaacaaccgccuccucgaaauaacccgcgaguucagcguuaacgccggagucacuaccccugucuccaccuacaugcucaccaacuccgaacuccuaucacuaaucaacgacaugcccauaaccaacgaccagaagaaacucauguccaacaacguccaaauuguccgacaacaaagcuacuccauaaugugcauaauaaaagaggaaguccucgccuacgucguacaacugccccuuuauggcguaaucgacacacccugcuggaaacuccacacgucaccccucugcaccaccaacacaaaagaaggcucgaacaucugccuaacacggacugaccgcggcugguacugcgacaacgccggcuccgucagcuucuucccacaagccgaaaccugcaaaguacaauccaaccgaguauucugcgacaccaugaacuccagaacccuccccucagaggucaaccugugcaacguagacaucuucaaccccaaauacgacugcaaaauaaugaccucaaaaacagacgucuccucuuccguaaucaccagccucggagccaucgucagcugcuacggcaaaaccaaaugcaccgccucaaacaaaugccgcggcaucaucaaaacauucucaaacggcugcgacuacgucuccaacaaaggcgucgacacaguaagcguaggcaacacacuguacuacgucaacaaacaagagggaaaaucacucuacgucaaaggagaacccauaaucaacuucuacgacccccucguuuuccccagcgacgaguucgacgccagcauaucccaagucaacgagaaaauuaaccaaucccuagcauucauccgaaaaucugacgaacugcuccacaacgucaacgcgggaaaaucaacaaccaacauaaugauaaccacaaucauaauagucaucaucguaauccuccucagccuaaucgcugucggccuccuccucuacugcaaagcccguuccaccccagucacacuuuccaaggaccaacuaagcggaauaaacaacaucgcguucucaaacuaaggacuaguacuggcugcaucucccuuuccucuguccuccauccuucucccaggauggugaagggggaccugguacccagugauccccaccccaggauccuaaaucaugacuuaccugcuaauaaaaacucauuggaaaagugagaagaucuaaaaaaaaaaaaaaaaaaaaaaaaaaaaaaaaaaaaaaaaaaaaaaaaaaaaaaaaaaaaaaaaugcaucccccccccccccccccccccccccccccccaaaggcucuuuucagagccaccagaauu

SEQ ID NO: 5567 - RNA, 2183 nt, Artificial Sequence
  mRNA product Design f-4 comprising derived and/or modified sequence from HRSV(A2)__F_DSCav1_mut5 (opt1)
gggagagucccgcagucggcguccagcggcucugcuuguucgugugugugucguugcaggccuuauucaagcuuaccauggagcugcucauccugaaggccaacgccaucaccaccauccugacggcggugaccuucugcuucgccagcggccagaacaucaccgaggaguucuaccaguccacgugcagcgccgucuccaagggguaccucagcgcccugcggaccggcugguacaccuccgugaucaccaucgagcugagcaacaucaaggagaacaagugcaacgggaccgacgccaaggugaagcucaucaagcaggagcuggacaaguacaagaacgcggucacggagcugcagcuccugaugcaguccaccccggcaaccggcuccggcuccgccaucgcgagcggcgucgccgugugcaaggugcugcaccucgagggggaggucaacaagaucaagagcgcccugcuguccaccaacaaggccguggugagccucuccggcugcggcgucagcgugcugaccuucaaggugcuggaccucaagaacuacaucgacaagcagcugcugcccauccugaacaagcagagcugcuccaucagcaacaucgagacggugaucgaguuccagcagaagaacaaccggcuccuggagaucacccgcgaguucagcgugaacgccggggucaccacccccguguccacguacaugcugaccaacagcgagcuccugucccugaucaacgacaugccgaucaccaacgaccagaagaagcucaugagcaacaacgugcagaucguccggcagcaguccuacagcaucaugugcaucaucaaggaggaggugcuggcguacgugguccagcugccccucuacggcgugaucgacacccccugcuggaagcugcacacgagcccccugugcaccaccaacaccaaggagggguccaacaucugccucacgcgcaccgaccggggcugguacugcgacaacgccggcagcgucuccuucuucccgcaggccgagaccugcaaggugcagagcaaccgcguguucugcgacaccaugaacucccggacgcugcccagcgagguaaaccucugcaacgucgacaucuucaaccccaaguacgacugcaagaucaugaccuccaagaccgacgugagcuccagcgugaucaccucccugggggccaucgucagcugcuacggcaagacgaagugcaccgccagcaacaagugccgggggaucaucaagaccuucuccaacggcugcgacuacgugagcaacaagggcguggacaccguguccgucgggaacacccuguacuacgugaacaagcaggagggcaagagccucuacgugaagggggagcccaucaucaacuucuacgacccgcuggucuuccccuccgacgaguucgacgcgagcaucucccaggugaacgagaagaucaaccagagccuggccuucauccgcaaguccgacgagcugcuccacaacgugaacgccggcaagagcacgaccaacaucaugaucaccaccaucaucaucgucaucaucgugauccugcugucccucaucgccguggggcugcugcucuacugcaaggcccggagcacgcccgucacccuguccaaggaccagcugagcggcaucaacaacaucgcguucuccaacugaggacuagugaagggaacacccaaauuuaauucagccuuaagcacaauuaauuaagagugaaacguaauuguacaagcaguuggucacccaccauagggcaugaucaacaccgcaaccuuuccuuuuucccccagugauucugaaaaaccccucuucccuucagcuugcuuagauguuccaaauuuaguaagcuuaaggcggccuacagaagaaaaagaaaaaaaaggccacaaaaguucccucucacuuucaguaaauaaaauaaaagcagcaacagaaauaaagaaauaaaugaaauucaaaaugaaauaaauauuguguugugcagcauuaaaaaaucaauaaaaauuaaaaaugagcaagaucuaaaaaaaaaaaaaaaaaaaaaaaaaaaaaaaaaaaaaaaaaaaaaaaaaaaaaaaaaaaaaaaaugcaucccccccccccccccccccccccccccccccaaaggcucuuuucagagccaccagaauu

SEQ ID NO: 5568 - RNA, 2183 nt, Artificial Sequence
  mRNA product Design f-4 comprising derived and/or modified sequence from HRSV(A2)__F_DSCav1_mut5 (opt1)
gggagagucccgcagucggcguccagcggcucugcuuguucgugugugugucguugcaggccuuauucaagcuuaccauggagcugcucauccugaaggccaacgccaucaccaccauccugacggcggugaccuucugcuucgccagcggccagaacaucaccgaggaguucuaccaguccacgugcagcgccgucuccaagggguaccucagcgcccugcgcaccggcugguacaccuccgugaucaccaucgagcugagcaacaucaaggagaacaagugcaacgggaccgacgccaaggugaagcucaucaagcaggagcuggacaaguacaagaacgcggucacggagcugcagcuccugaugcaguccacccccgccaccggcagcggguccgccaucgccagcggcguggcggugugcaagguccugcaccucgagggcgaggugaacaagaucaaguccgcccugcugagcaccaacaaggccguggucucccucagcgggugcggcguguccgugcugacguucaagguccuggaccucaagaacuacaucgacaagcagcugcugccgauccucaacaagcagagcugcuccaucagcaacaucgagaccgugaucgaguuccagcagaagaacaaccggcugcuggagaucacccgcgaguucuccgugaacgccggggucaccacgcccgugagcaccuacaugcucaccaacagcgagcugcugucccucaucaacgacaugcccaucaccaacgaccagaagaagcugaugagcaacaacgugcagaucguccggcagcaguccuacagcaucaugugcaucaucaaggaggaggugcuggccuacgugguccagcucccccuguacggcgugaucgacacgccgugcuggaagcugcacaccagcccccucugcaccaccaacacgaaggagggguccaacaucugccugacccgcaccgaccggggcugguacugcgacaacgcgggcuccgugagcuucuucccccaggccgagaccugcaagguccaguccaaccgcguguucugcgacacgaugaacagccggacccuccccuccgaggucaaccugugcaacguggacaucuucaacccgaaguacgacugcaagaucaugaccagcaagaccgacguguccagcuccgucaucacgagccugggggccaucguguccugcuacggcaagaccaagugcaccgccagcaacaagugccgggggaucaucaagaccuucuccaacggcugcgacuacgugagcaacaagggcgucgacacggugagcguggggaacacccucuacuacgucaacaagcaggagggcaagucccuguacgugaagggggagcccaucaucaacuucuacgacccccugguguuccccagcgacgaguucgacgccuccaucagccaggucaacgagaagaucaaccagucccucgcguucauccgcaagagcgacgagcugcugcacaacgugaacgccggcaaguccaccaccaacaucaugaucaccacgaucaucaucgugaucaucgucauccuccugagccugaucgccguggggcuccugcuguacugcaaggcccgguccaccccggugacccugagcaaggaccagcucuccggcaucaacaacaucgccuucagcaacugaggacuagugaagggaacacccaaauuuaauucagccuuaagcacaauuaauuaagagugaaacguaauuguacaagcaguuggucacccaccauagggcaugaucaacaccgcaaccuuuccuuuuucccccagugauucugaaaaaccccucuucccuucagcuugcuuagauguuccaaauuuaguaagcuuaaggcggccuacagaagaaaaagaaaaaaaaggccacaaaaguucccucucacuuucaguaaauaaaauaaaagcagcaacagaaauaaagaaauaaaugaaauucaaaaugaaauaaauauuguguugugcagcauuaaaaaaucaauaaaaauuaaaaaugagcaagaucuaaaaaaaaaaaaaaaaaaaaaaaaaaaaaaaaaaaaaaaaaaaaaaaaaaaaaaaaaaaaaaaaugcaucccccccccccccccccccccccccccccccaaaggcucuuuucagagccaccagaauu

SEQ ID NO: 5569 - RNA, 2183 nt, Artificial Sequence
  mRNA product Design f-4 comprising derived and/or modified sequence from HRSV(A2)__F_DSCav1_mut5 (opt2)
gggagagucccgcagucggcguccagcggcucugcuuguucgugugugugucguugcaggccuuauucaagcuuaccauggagcuccucauccucaaggccaacgccaucaccaccauccucaccgccgucaccuucugcuucgccuccggccagaacaucaccgaggaguucuaccaguccaccugcuccgccgucuccaagggcuaccucuccgcccuccgcaccggcugguacaccuccgucaucaccaucgagcucuccaacaucaaggagaacaagugcaacggcaccgacgccaaggucaagcucaucaagcaggagcucgacaaguacaagaacgccgucaccgagcuccagcuccucaugcaguccacccccgccaccggcuccggcuccgccaucgccuccggcgucgccgucugcaagguccuccaccucgagggcgaggucaacaagaucaaguccgcccuccucuccaccaacaaggccgucgucucccucuccggcugcggcgucuccguccucaccuucaagguccucgaccucaagaacuacaucgacaagcagcuccuccccauccucaacaagcaguccugcuccaucuccaacaucgagaccgucaucgaguuccagcagaagaacaaccgccuccucgagaucacccgcgaguucuccgucaacgccggcgucaccacccccgucuccaccuacaugcucaccaacuccgagcuccucucccucaucaacgacaugcccaucaccaacgaccagaagaagcucauguccaacaacguccagaucguccgccagcaguccuacuccaucaugugcaucaucaaggaggagguccucgccuacgucguccagcucccccucuacggcgucaucgacacccccugcuggaagcuccacaccuccccccucugcaccaccaacaccaaggagggcuccaacaucugccucacccgcaccgaccgcggcugguacugcgacaacgccggcuccgucuccuucuucccccaggccgagaccugcaagguccaguccaaccgcgucuucugcgacaccaugaacucccgcacccuccccuccgaggucaaccucugcaacgucgacaucuucaaccccaaguacgacugcaagaucaugaccuccaagaccgacgucuccuccuccgucaucaccucccucggcgccaucgucuccugcuacggcaagaccaagugcaccgccuccaacaagugccgcggcaucaucaagaccuucuccaacggcugcgacuacgucuccaacaagggcgucgacaccgucuccgucggcaacacccucuacuacgucaacaagcaggagggcaagucccucuacgucaagggcgagcccaucaucaacuucuacgacccccucgucuuccccuccgacgaguucgacgccuccaucucccaggucaacgagaagaucaaccagucccucgccuucauccgcaaguccgacgagcuccuccacaacgucaacgccggcaaguccaccaccaacaucaugaucaccaccaucaucaucgucaucaucgucauccuccucucccucaucgccgucggccuccuccucuacugcaaggcccgcuccacccccgucacccucuccaaggaccagcucuccggcaucaacaacaucgccuucuccaacugaggacuagugaagggaacacccaaauuuaauucagccuuaagcacaauuaauuaagagugaaacguaauuguacaagcaguuggucacccaccauagggcaugaucaacaccgcaaccuuuccuuuuucccccagugauucugaaaaaccccucuucccuucagcuugcuuagauguuccaaauuuaguaagcuuaaggcggccuacagaagaaaaagaaaaaaaaggccacaaaaguucccucucacuuucaguaaauaaaauaaaagcagcaacagaaauaaagaaauaaaugaaauucaaaaugaaauaaauauuguguugugcagcauuaaaaaaucaauaaaaauuaaaaaugagcaagaucuaaaaaaaaaaaaaaaaaaaaaaaaaaaaaaaaaaaaaaaaaaaaaaaaaaaaaaaaaaaaaaaaugcaucccccccccccccccccccccccccccccccaaaggcucuuuucagagccaccagaauu

SEQ ID NO: 5570 - RNA, 2183 nt, Artificial Sequence
  mRNA product Design f-4 comprising derived and/or modified sequence from HRSV(A2)__F_DSCav1_mut5 (opt3)
gggagagucccgcagucggcguccagcggcucugcuuguucgugugugugucguugcaggccuuauucaagcuuaccauggagcugcucauccuuaaggccaacgcuauuaccacaauacugacugcagugacguucugcuuugccagcggccagaauaucaccgaagaguucuaccaauccacauguucugcggucucaaaaggguauuugagugcuuuaagaacuggaugguacaccagcguuauuacaaucgaacuguccaacauuaaggagaauaaaugcaacgguaccgacgccaaggugaaacuaaucaagcaggaacucgauaaguauaaaaaugcaguaacugagcugcagcuucugaugcagucuacacccgccaccggcucggggucagcuauagcaagcggaguggccgucuguaagguguugcaccucgagggcgaaguuaacaaaaucaagagugcucugcuguccacgaauaaagccguggucucucucagcgguugcgggguguccguauuaacuuuuaagguucuggaccuuaagaacuacauugauaaacaauugcugccuauccuaaauaagcagucauguaguauuagcaacaucgagaccgugauagaguuccagcagaaaaauaacaggcuccuggaaauuacacgggaguuuucugucaaugcgggagugacuaccccaguguccacauauaugcuuaccaacucagaacuguugagccucaucaaugacaugccgauuacgaacgaucaaaagaaacugaugaguaacaauguccagaucguucgccagcagucuuacuccaucaugugcauuauaaaggaggaaguguuagcauauguagugcaacugccccucuacggcgucaucgacacuccuuguuggaaacuucauacaagcccacugugcaccacuaacacaaaggagggcucgaauauuuguuugacccgaacggaucgugggugguacugcgacaacgccggaucuguguccuucuuuccccaggcugaaaccuguaagguucagucaaauagaguguucugcgauacaaugaacaguagaacucugccuagcgaggucaaucucugcaacguggacaucuuuaauccaaaauaugauuguaagauaaugaccuccaaaacagacguaucuagcucaguuauuaccagucugggugccaucguguccugcuacggcaagacuaaauguacagcaagcaacaagugcagggggaucauuaagaccuucucuaauggaugugauuaugucucaaacaaaggcguggacacugucaguguggguaauacgcuuuacuauguuaacaagcaagaggggaaaagccuguacgugaagggagaacccaucauuaauuuuuaugacccuuugguauucccauccgaugaguuugacgcuucuauaucgcaggucaacgagaaaaucaaccagagccucgccuucauucggaaguccgaugaacuguuacacaaugugaacgcgggcaagucaacaaccaauaucaugaucacuaccauuauaaucguuauuaucgugauucugcuaagucucaucgccgucggccugcuuuuguacugcaaagcacgcucuacaccggugacccugagcaaggaccagcucuccgggauaaacaauaucgcuuucucaaacugaggacuagugaagggaacacccaaauuuaauucagccuuaagcacaauuaauuaagagugaaacguaauuguacaagcaguuggucacccaccauagggcaugaucaacaccgcaaccuuuccuuuuucccccagugauucugaaaaaccccucuucccuucagcuugcuuagauguuccaaauuuaguaagcuuaaggcggccuacagaagaaaaagaaaaaaaaggccacaaaaguucccucucacuuucaguaaauaaaauaaaagcagcaacagaaauaaagaaauaaaugaaauucaaaaugaaauaaauauuguguugugcagcauuaaaaaaucaauaaaaauuaaaaaugagcaagaucuaaaaaaaaaaaaaaaaaaaaaaaaaaaaaaaaaaaaaaaaaaaaaaaaaaaaaaaaaaaaaaaaugcaucccccccccccccccccccccccccccccccaaaggcucuuuucagagccaccagaauu

SEQ ID NO: 5571 - RNA, 2183 nt, Artificial Sequence
  mRNA product Design f-4 comprising derived and/or modified sequence from HRSV(A2)__F_DSCav1_mut5 (opt4)
gggagagucccgcagucggcguccagcggcucugcuuguucgugugugugucguugcaggccuuauucaagcuuaccauggagcugcugauccugaaggccaacgccaucaccaccauccugaccgccgugaccuucugcuucgccagcggccagaacaucaccgaggaguucuaccagagcaccugcagcgccgugagcaagggcuaccugagcgcccugagaaccggcugguacaccagcgugaucaccaucgagcugagcaacaucaaggagaacaagugcaacggcaccgacgccaaggugaagcugaucaagcaggagcuggacaaguacaagaacgccgugaccgagcugcagcugcugaugcagagcacccccgccaccggcagcggcagcgccaucgccagcggcguggccgugugcaaggugcugcaccuggagggcgaggugaacaagaucaagagcgcccugcugagcaccaacaaggccguggugagccugagcggcugcggcgugagcgugcugaccuucaaggugcuggaccugaagaacuacaucgacaagcagcugcugcccauccugaacaagcagagcugcagcaucagcaacaucgagaccgugaucgaguuccagcagaagaacaacagacugcuggagaucaccagagaguucagcgugaacgccggcgugaccacccccgugagcaccuacaugcugaccaacagcgagcugcugagccugaucaacgacaugcccaucaccaacgaccagaagaagcugaugagcaacaacgugcagaucgugagacagcagagcuacagcaucaugugcaucaucaaggaggaggugcuggccuacguggugcagcugccccuguacggcgugaucgacacccccugcuggaagcugcacaccagcccccugugcaccaccaacaccaaggagggcagcaacaucugccugaccagaaccgacagaggcugguacugcgacaacgccggcagcgugagcuucuucccccaggccgagaccugcaaggugcagagcaacagaguguucugcgacaccaugaacagcagaacccugcccagcgaggugaaccugugcaacguggacaucuucaaccccaaguacgacugcaagaucaugaccagcaagaccgacgugagcagcagcgugaucaccagccugggcgccaucgugagcugcuacggcaagaccaagugcaccgccagcaacaagugcagaggcaucaucaagaccuucagcaacggcugcgacuacgugagcaacaagggcguggacaccgugagcgugggcaacacccuguacuacgugaacaagcaggagggcaagagccuguacgugaagggcgagcccaucaucaacuucuacgacccccugguguuccccagcgacgaguucgacgccagcaucagccaggugaacgagaagaucaaccagagccuggccuucaucagaaagagcgacgagcugcugcacaacgugaacgccggcaagagcaccaccaacaucaugaucaccaccaucaucaucgugaucaucgugauccugcugagccugaucgccgugggccugcugcuguacugcaaggccagaagcacccccgugacccugagcaaggaccagcugagcggcaucaacaacaucgccuucagcaacugaggacuagugaagggaacacccaaauuuaauucagccuuaagcacaauuaauuaagagugaaacguaauuguacaagcaguuggucacccaccauagggcaugaucaacaccgcaaccuuuccuuuuucccccagugauucugaaaaaccccucuucccuucagcuugcuuagauguuccaaauuuaguaagcuuaaggcggccuacagaagaaaaagaaaaaaaaggccacaaaaguucccucucacuuucaguaaauaaaauaaaagcagcaacagaaauaaagaaauaaaugaaauucaaaaugaaauaaauauuguguugugcagcauuaaaaaaucaauaaaaauuaaaaaugagcaagaucuaaaaaaaaaaaaaaaaaaaaaaaaaaaaaaaaaaaaaaaaaaaaaaaaaaaaaaaaaaaaaaaaugcaucccccccccccccccccccccccccccccccaaaggcucuuuucagagccaccagaauu

SEQ ID NO: 5572 - RNA, 2183 nt, Artificial Sequence
  mRNA product Design f-4 comprising derived and/or modified sequence from HRSV(A2)__F_DSCav1_mut5 (opt5)
gggagagucccgcagucggcguccagcggcucugcuuguucgugugugugucguugcaggccuuauucaagcuuaccauggagcugcucauccugaaggccaacgcuauuaccacaauccuuacggccgugaccuucugcuuugcgagcggccagaauauuacagaagaguucuaccaauccaccuguucugcugucagcaaaggguaucuguccgcccucagaacaggaugguacaccucuguuaucacaauugaacugagcaacaucaaggagaauaaaugcaacggcaccgacgccaaggugaaacuuaucaagcaggaacuggauaaguauaaaaaugcugugacggagcuccagcugcugaugcaguccacccccgccacagggucuggaagcgcuauugccuccggcgucgcgguguguaagguucuccaccuggagggggaagugaacaaaaucaagagcgcccuucugucuaccaauaaagcugucgugucccucagcggaugcggcguuucugugcugacauuuaagguccuugaccugaagaacuacauugauaaacaacuccugccuauccugaauaagcaguccuguagcauuucuaacaucgagaccgugauugaguuccagcagaaaaauaaccggcuccuggaaaucacgcgcgaguuuuccgugaaugccggcgucacaaccccgguuagcacauauaugcuuaccaacuccgaacugcucucucugaucaaugacaugcccauuaccaacgaucaaaagaaacuuaugagcaacaaugugcagaucgugagacagcaguccuacagcauuaugugcaucauuaaggaggaaguccuggcuuaugugguucaacucccucuguacggggugaucgacacacccuguuggaaacugcauacgucuccucucugcaccacaaacaccaaggagggauccaauaucugucugacacggaccgaucgcggcugguacugcgacaacgccgggagcgucucuuucuuuccccaggcggaaacguguaaggugcagagcaauagaguuuucugcgauacaaugaacuccagaacccugccuucugaggugaaucucugcaacgucgacauuuuuaauccgaaauaugauuguaagaucaugaccagcaaaacagacguguccagcucugucauuaccucccugggagccaucgugagcugcuacggcaagacaaaauguacggcuucuaacaagugccgggggauuaucaagaccuucuccaauggaugugauuauguuagcaacaaaggcguggacacagucuccgugggcaauacccuuuacuauguuaacaagcaagaggggaaaucucuguacgugaagggagaacccaucauuaauuuuuaugacccucucgucuuccccagcgaugaguuugacgccuccaucucucaggugaacgagaaaauuaaccagagccuggcuuucauccgcaaguccgaugaacugcuccacaaugugaacgccggcaagagcacaaccaauauuaugaucacgaccauuaucaucguuauuaucgucauucugcuuucucugaucgccguggggcuccugcuguacugcaaagcuagauccacaccugugacccuuagcaaggaccagcucucuggaauuaacaauaucgcguucuccaacugaggacuagugaagggaacacccaaauuuaauucagccuuaagcacaauuaauuaagagugaaacguaauuguacaagcaguuggucacccaccauagggcaugaucaacaccgcaaccuuuccuuuuucccccagugauucugaaaaaccccucuucccuucagcuugcuuagauguuccaaauuuaguaagcuuaaggcggccuacagaagaaaaagaaaaaaaaggccacaaaaguucccucucacuuucaguaaauaaaauaaaagcagcaacagaaauaaagaaauaaaugaaauucaaaaugaaauaaauauuguguugugcagcauuaaaaaaucaauaaaaauuaaaaaugagcaagaucuaaaaaaaaaaaaaaaaaaaaaaaaaaaaaaaaaaaaaaaaaaaaaaaaaaaaaaaaaaaaaaaaugcaucccccccccccccccccccccccccccccccaaaggcucuuuucagagccaccagaauu

SEQ ID NO: 5573 - RNA, 2183 nt, Artificial Sequence
  mRNA product Design f-4 comprising derived and/or modified sequence from HRSV(A2)__F_DSCav1_mut5 (opt6)
gggagagucccgcagucggcguccagcggcucugcuuguucgugugugugucguugcaggccuuauucaagcuuaccauggaacuauuaauacuuaaagccaacgcaauaacaacaauucucacugcugucaccuucugcuucgccucaggccaaaacauaacggaagaauuuuaccaaucaacaugcucugcaguauccaaaggcuaccuaucugcucuaagaacagguugguauacaucaguaauaaccauagaacuaucaaacauaaaagaaaauaaaugcaacggaacagacgcaaaaguuaaacucauaaaacaagaacuagacaaauauaaaaacgcaguuaccgaacuacaacuacuuaugcaauccacucccgccacuggaucaggaucagcaauagcaucaggagucgcaguauguaaagucuuacaccucgaaggcgaagucaauaaaaucaaauccgcauuacuauccacaaacaaagcagucguaucccuaagcggaugcggaguaucaguacuaacauuuaaaguacuagaccuaaaaaauuacaucgauaaacaacuauuaccuauauuaaacaaacaauccugcuccauuucaaauaucgaaaccguaauagaauuucaacaaaaaaacaacagauuacuagaaauaacaagagaauuuuccguaaaugcuggcguaacaacaccaguauccacauacaugcucacaaacuccgaacuacuaucacuaauaaaugacaugcccauaacaaacgaucaaaaaaaacuaaugucaaauaauguacaaauaguaagacaacaaagcuacuccaucauguguauaauaaaagaagaaguacuagcauacguaguucaacuaccacuuuacggcguaaucgacaccccuugcuggaaacuacacaccuccccucuaugcaccacaaacacaaaagaagguuccaacauaugccuuaccagaacagacagaggcugguauugcgacaacgcaggaucaguuucauuuuuuccacaagcugaaacaugcaaaguacaaucaaacagagucuucugcgacacaaugaacucaagaacucuacccucagaaguaaaccuauguaacguagacauuuucaaccccaaauacgacugcaaaauuaugacaucaaaaacagacguuucaucaucaguuaucaccucauuaggagcaauaguaagcugcuacggaaaaacaaaaugcaccgccucaaauaaaugcagaggaauaauaaaaacuuucuccaacggaugcgacuacguuucaaacaaagguguagacacuguaucaguaggaaacacacuauauuacguaaauaaacaagaaggaaaaucacuuuaugucaaaggagaaccaauaaucaauuucuacgacccauuaguauucccaucagacgaauuugaugcuucaauaucacaaguaaacgaaaaaauaaaucaaucacucgcauuuauacgaaaaucagacgaacuacuacacaauguaaacgcaggcaaaucaacaacaaacauaaugauaacaacaauaaucauuguaauaauaguaauacuucuaucucuaauagcaguaggauuacuccucuacugcaaagcaagaucaaccccuguaacacuaucaaaagaccaacuuucagguauaaauaauauagcuuuuuccaauuaaggacuagugaagggaacacccaaauuuaauucagccuuaagcacaauuaauuaagagugaaacguaauuguacaagcaguuggucacccaccauagggcaugaucaacaccgcaaccuuuccuuuuucccccagugauucugaaaaaccccucuucccuucagcuugcuuagauguuccaaauuuaguaagcuuaaggcggccuacagaagaaaaagaaaaaaaaggccacaaaaguucccucucacuuucaguaaauaaaauaaaagcagcaacagaaauaaagaaauaaaugaaauucaaaaugaaauaaauauuguguugugcagcauuaaaaaaucaauaaaaauuaaaaaugagcaagaucuaaaaaaaaaaaaaaaaaaaaaaaaaaaaaaaaaaaaaaaaaaaaaaaaaaaaaaaaaaaaaaaaugcaucccccccccccccccccccccccccccccccaaaggcucuuuucagagccaccagaauu

SEQ ID NO: 5574 - RNA, 2183 nt, Artificial Sequence
  mRNA product Design f-4 comprising derived and/or modified sequence from HRSV(A2)__F_DSCav1_mut5 (opt11)
gggagagucccgcagucggcguccagcggcucugcuuguucgugugugugucguugcaggccuuauucaagcuuaccauggagcuccuaauccucaaagccaacgcgaucacuacaauccucacagccgucaccuucugcuucgccuccggccaaaacaucaccgaggaguucuaccaaucaaccugcuccgccguaucaaaaggauaccuaagcgcccuacggaccggcugguacacaucugucaucaccaucgaacuaucaaacaucaaagaaaacaaaugcaacggaaccgacgcaaaagucaaacugauuaaacaagaacuagacaaauacaaaaacgcagucaccgaacugcaauuacucaugcaaagcacaccggccaccggcucaggcagcgccaucgccuccggcgucgccgucugcaaaguucuccaccucgagggcgaagucaacaaaauaaaaucugcccuccucuccaccaacaaagccgucgucucccucagcggcugcggagucuccguccucaccuucaaaguucucgaucucaagaacuauauugacaaacaacuucuacccauacucaacaaacaaagcugcagcauauccaacaucgaaaccgucaucgaguuccaacaaaagaacaaccgccuccucgaaauaacccgcgaguucagcguuaacgccggagucacuaccccugucuccaccuacaugcucaccaacuccgaacuccuaucacuaaucaacgacaugcccauaaccaacgaccagaagaaacucauguccaacaacguccaaauuguccgacaacaaagcuacuccauaaugugcauaauaaaagaggaaguccucgccuacgucguacaacugccccuuuauggcguaaucgacacacccugcuggaaacuccacacgucaccccucugcaccaccaacacaaaagaaggcucgaacaucugccuaacacggacugaccgcggcugguacugcgacaacgccggcuccgucagcuucuucccacaagccgaaaccugcaaaguacaauccaaccgaguauucugcgacaccaugaacuccagaacccuccccucagaggucaaccugugcaacguagacaucuucaaccccaaauacgacugcaaaauaaugaccucaaaaacagacgucuccucuuccguaaucaccagccucggagccaucgucagcugcuacggcaaaaccaaaugcaccgccucaaacaaaugccgcggcaucaucaaaacauucucaaacggcugcgacuacgucuccaacaaaggcgucgacacaguaagcguaggcaacacacuguacuacgucaacaaacaagagggaaaaucacucuacgucaaaggagaacccauaaucaacuucuacgacccccucguuuuccccagcgacgaguucgacgccagcauaucccaagucaacgagaaaauuaaccaaucccuagcauucauccgaaaaucugacgaacugcuccacaacgucaacgcgggaaaaucaacaaccaacauaaugauaaccacaaucauaauagucaucaucguaauccuccucagccuaaucgcugucggccuccuccucuacugcaaagcccguuccaccccagucacacuuuccaaggaccaacuaagcggaauaaacaacaucgcguucucaaacuaaggacuagugaagggaacacccaaauuuaauucagccuuaagcacaauuaauuaagagugaaacguaauuguacaagcaguuggucacccaccauagggcaugaucaacaccgcaaccuuuccuuuuucccccagugauucugaaaaaccccucuucccuucagcuugcuuagauguuccaaauuuaguaagcuuaaggcggccuacagaagaaaaagaaaaaaaaggccacaaaaguucccucucacuuucaguaaauaaaauaaaagcagcaacagaaauaaagaaauaaaugaaauucaaaaugaaauaaauauuguguugugcagcauuaaaaaaucaauaaaaauuaaaaaugagcaagaucuaaaaaaaaaaaaaaaaaaaaaaaaaaaaaaaaaaaaaaaaaaaaaaaaaaaaaaaaaaaaaaaaugcaucccccccccccccccccccccccccccccccaaaggcucuuuucagagccaccagaauu

SEQ ID NO: 5575 - RNA, 1959 nt, Artificial Sequence
  mRNA product Design f-5 comprising derived and/or modified sequence from HRSV(A2)__F_DSCav1_mut5 (opt1)
gggagacuuucccauucuguagcagaauuugguguugccuguggucuuggucccgcggagaagcuuaccauggagcugcucauccugaaggccaacgccaucaccaccauccugacggcggugaccuucugcuucgccagcggccagaacaucaccgaggaguucuaccaguccacgugcagcgccgucuccaagggguaccucagcgcccugcggaccggcugguacaccuccgugaucaccaucgagcugagcaacaucaaggagaacaagugcaacgggaccgacgccaaggugaagcucaucaagcaggagcuggacaaguacaagaacgcggucacggagcugcagcuccugaugcaguccaccccggcaaccggcuccggcuccgccaucgcgagcggcgucgccgugugcaaggugcugcaccucgagggggaggucaacaagaucaagagcgcccugcuguccaccaacaaggccguggugagccucuccggcugcggcgucagcgugcugaccuucaaggugcuggaccucaagaacuacaucgacaagcagcugcugcccauccugaacaagcagagcugcuccaucagcaacaucgagacggugaucgaguuccagcagaagaacaaccggcuccuggagaucacccgcgaguucagcgugaacgccggggucaccacccccguguccacguacaugcugaccaacagcgagcuccugucccugaucaacgacaugccgaucaccaacgaccagaagaagcucaugagcaacaacgugcagaucguccggcagcaguccuacagcaucaugugcaucaucaaggaggaggugcuggcguacgugguccagcugccccucuacggcgugaucgacacccccugcuggaagcugcacacgagcccccugugcaccaccaacaccaaggagggguccaacaucugccucacgcgcaccgaccggggcugguacugcgacaacgccggcagcgucuccuucuucccgcaggccgagaccugcaaggugcagagcaaccgcguguucugcgacaccaugaacucccggacgcugcccagcgagguaaaccucugcaacgucgacaucuucaaccccaaguacgacugcaagaucaugaccuccaagaccgacgugagcuccagcgugaucaccucccugggggccaucgucagcugcuacggcaagacgaagugcaccgccagcaacaagugccgggggaucaucaagaccuucuccaacggcugcgacuacgugagcaacaagggcguggacaccguguccgucgggaacacccuguacuacgugaacaagcaggagggcaagagccucuacgugaagggggagcccaucaucaacuucuacgacccgcuggucuuccccuccgacgaguucgacgcgagcaucucccaggugaacgagaagaucaaccagagccuggccuucauccgcaaguccgacgagcugcuccacaacgugaacgccggcaagagcacgaccaacaucaugaucaccaccaucaucaucgucaucaucgugauccugcugucccucaucgccguggggcugcugcucuacugcaaggcccggagcacgcccgucacccuguccaaggaccagcugagcggcaucaacaacaucgcguucuccaacugaggacuaguacuggcugcaucucccuuuccucuguccuccauccuucucccaggauggugaagggggaccugguacccagugauccccaccccaggauccuaaaucaugacuuaccugcuaauaaaaacucauuggaaaagugagaagaucuaaaaaaaaaaaaaaaaaaaaaaaaaaaaaaaaaaaaaaaaaaaaaaaaaaaaaaaaaaaaaaaaugcaucccccccccccccccccccccccccccccccaaaggcucuuuucagagccaccagaauu

SEQ ID NO: 5576 - RNA, 1959 nt, Artificial Sequence
  mRNA product Design f-5 comprising derived and/or modified sequence from HRSV(A2)__F_DSCav1_mut5 (opt1)
gggagacuuucccauucuguagcagaauuugguguugccuguggucuuggucccgcggagaagcuuaccauggagcugcucauccugaaggccaacgccaucaccaccauccugacggcggugaccuucugcuucgccagcggccagaacaucaccgaggaguucuaccaguccacgugcagcgccgucuccaagggguaccucagcgcccugcgcaccggcugguacaccuccgugaucaccaucgagcugagcaacaucaaggagaacaagugcaacgggaccgacgccaaggugaagcucaucaagcaggagcuggacaaguacaagaacgcggucacggagcugcagcuccugaugcaguccacccccgccaccggcagcggguccgccaucgccagcggcguggcggugugcaagguccugcaccucgagggcgaggugaacaagaucaaguccgcccugcugagcaccaacaaggccguggucucccucagcgggugcggcguguccgugcugacguucaagguccuggaccucaagaacuacaucgacaagcagcugcugccgauccucaacaagcagagcugcuccaucagcaacaucgagaccgugaucgaguuccagcagaagaacaaccggcugcuggagaucacccgcgaguucuccgugaacgccggggucaccacgcccgugagcaccuacaugcucaccaacagcgagcugcugucccucaucaacgacaugcccaucaccaacgaccagaagaagcugaugagcaacaacgugcagaucguccggcagcaguccuacagcaucaugugcaucaucaaggaggaggugcuggccuacgugguccagcucccccuguacggcgugaucgacacgccgugcuggaagcugcacaccagcccccucugcaccaccaacacgaaggagggguccaacaucugccugacccgcaccgaccggggcugguacugcgacaacgcgggcuccgugagcuucuucccccaggccgagaccugcaagguccaguccaaccgcguguucugcgacacgaugaacagccggacccuccccuccgaggucaaccugugcaacguggacaucuucaacccgaaguacgacugcaagaucaugaccagcaagaccgacguguccagcuccgucaucacgagccugggggccaucguguccugcuacggcaagaccaagugcaccgccagcaacaagugccgggggaucaucaagaccuucuccaacggcugcgacuacgugagcaacaagggcgucgacacggugagcguggggaacacccucuacuacgucaacaagcaggagggcaagucccuguacgugaagggggagcccaucaucaacuucuacgacccccugguguuccccagcgacgaguucgacgccuccaucagccaggucaacgagaagaucaaccagucccucgcguucauccgcaagagcgacgagcugcugcacaacgugaacgccggcaaguccaccaccaacaucaugaucaccacgaucaucaucgugaucaucgucauccuccugagccugaucgccguggggcuccugcuguacugcaaggcccgguccaccccggugacccugagcaaggaccagcucuccggcaucaacaacaucgccuucagcaacugaggacuaguacuggcugcaucucccuuuccucuguccuccauccuucucccaggauggugaagggggaccugguacccagugauccccaccccaggauccuaaaucaugacuuaccugcuaauaaaaacucauuggaaaagugagaagaucuaaaaaaaaaaaaaaaaaaaaaaaaaaaaaaaaaaaaaaaaaaaaaaaaaaaaaaaaaaaaaaaaugcaucccccccccccccccccccccccccccccccaaaggcucuuuucagagccaccagaauu

SEQ ID NO: 5577 - RNA, 1959 nt, Artificial Sequence
  mRNA product Design f-5 comprising derived and/or modified sequence from HRSV(A2)__F_DSCav1_mut5 (opt2)
gggagacuuucccauucuguagcagaauuugguguugccuguggucuuggucccgcggagaagcuuaccauggagcuccucauccucaaggccaacgccaucaccaccauccucaccgccgucaccuucugcuucgccuccggccagaacaucaccgaggaguucuaccaguccaccugcuccgccgucuccaagggcuaccucuccgcccuccgcaccggcugguacaccuccgucaucaccaucgagcucuccaacaucaaggagaacaagugcaacggcaccgacgccaaggucaagcucaucaagcaggagcucgacaaguacaagaacgccgucaccgagcuccagcuccucaugcaguccacccccgccaccggcuccggcuccgccaucgccuccggcgucgccgucugcaagguccuccaccucgagggcgaggucaacaagaucaaguccgcccuccucuccaccaacaaggccgucgucucccucuccggcugcggcgucuccguccucaccuucaagguccucgaccucaagaacuacaucgacaagcagcuccuccccauccucaacaagcaguccugcuccaucuccaacaucgagaccgucaucgaguuccagcagaagaacaaccgccuccucgagaucacccgcgaguucuccgucaacgccggcgucaccacccccgucuccaccuacaugcucaccaacuccgagcuccucucccucaucaacgacaugcccaucaccaacgaccagaagaagcucauguccaacaacguccagaucguccgccagcaguccuacuccaucaugugcaucaucaaggaggagguccucgccuacgucguccagcucccccucuacggcgucaucgacacccccugcuggaagcuccacaccuccccccucugcaccaccaacaccaaggagggcuccaacaucugccucacccgcaccgaccgcggcugguacugcgacaacgccggcuccgucuccuucuucccccaggccgagaccugcaagguccaguccaaccgcgucuucugcgacaccaugaacucccgcacccuccccuccgaggucaaccucugcaacgucgacaucuucaaccccaaguacgacugcaagaucaugaccuccaagaccgacgucuccuccuccgucaucaccucccucggcgccaucgucuccugcuacggcaagaccaagugcaccgccuccaacaagugccgcggcaucaucaagaccuucuccaacggcugcgacuacgucuccaacaagggcgucgacaccgucuccgucggcaacacccucuacuacgucaacaagcaggagggcaagucccucuacgucaagggcgagcccaucaucaacuucuacgacccccucgucuuccccuccgacgaguucgacgccuccaucucccaggucaacgagaagaucaaccagucccucgccuucauccgcaaguccgacgagcuccuccacaacgucaacgccggcaaguccaccaccaacaucaugaucaccaccaucaucaucgucaucaucgucauccuccucucccucaucgccgucggccuccuccucuacugcaaggcccgcuccacccccgucacccucuccaaggaccagcucuccggcaucaacaacaucgccuucuccaacugaggacuaguacuggcugcaucucccuuuccucuguccuccauccuucucccaggauggugaagggggaccugguacccagugauccccaccccaggauccuaaaucaugacuuaccugcuaauaaaaacucauuggaaaagugagaagaucuaaaaaaaaaaaaaaaaaaaaaaaaaaaaaaaaaaaaaaaaaaaaaaaaaaaaaaaaaaaaaaaaugcaucccccccccccccccccccccccccccccccaaaggcucuuuucagagccaccagaauu

SEQ ID NO: 5578 - RNA, 1959 nt, Artificial Sequence
  mRNA product Design f-5 comprising derived and/or modified sequence from HRSV(A2)__F_DSCav1_mut5 (opt3)
gggagacuuucccauucuguagcagaauuugguguugccuguggucuuggucccgcggagaagcuuaccauggagcugcucauccuuaaggccaacgcuauuaccacaauacugacugcagugacguucugcuuugccagcggccagaauaucaccgaagaguucuaccaauccacauguucugcggucucaaaaggguauuugagugcuuuaagaacuggaugguacaccagcguuauuacaaucgaacuguccaacauuaaggagaauaaaugcaacgguaccgacgccaaggugaaacuaaucaagcaggaacucgauaaguauaaaaaugcaguaacugagcugcagcuucugaugcagucuacacccgccaccggcucggggucagcuauagcaagcggaguggccgucuguaagguguugcaccucgagggcgaaguuaacaaaaucaagagugcucugcuguccacgaauaaagccguggucucucucagcgguugcgggguguccguauuaacuuuuaagguucuggaccuuaagaacuacauugauaaacaauugcugccuauccuaaauaagcagucauguaguauuagcaacaucgagaccgugauagaguuccagcagaaaaauaacaggcuccuggaaauuacacgggaguuuucugucaaugcgggagugacuaccccaguguccacauauaugcuuaccaacucagaacuguugagccucaucaaugacaugccgauuacgaacgaucaaaagaaacugaugaguaacaauguccagaucguucgccagcagucuuacuccaucaugugcauuauaaaggaggaaguguuagcauauguagugcaacugccccucuacggcgucaucgacacuccuuguuggaaacuucauacaagcccacugugcaccacuaacacaaaggagggcucgaauauuuguuugacccgaacggaucgugggugguacugcgacaacgccggaucuguguccuucuuuccccaggcugaaaccuguaagguucagucaaauagaguguucugcgauacaaugaacaguagaacucugccuagcgaggucaaucucugcaacguggacaucuuuaauccaaaauaugauuguaagauaaugaccuccaaaacagacguaucuagcucaguuauuaccagucugggugccaucguguccugcuacggcaagacuaaauguacagcaagcaacaagugcagggggaucauuaagaccuucucuaauggaugugauuaugucucaaacaaaggcguggacacugucaguguggguaauacgcuuuacuauguuaacaagcaagaggggaaaagccuguacgugaagggagaacccaucauuaauuuuuaugacccuuugguauucccauccgaugaguuugacgcuucuauaucgcaggucaacgagaaaaucaaccagagccucgccuucauucggaaguccgaugaacuguuacacaaugugaacgcgggcaagucaacaaccaauaucaugaucacuaccauuauaaucguuauuaucgugauucugcuaagucucaucgccgucggccugcuuuuguacugcaaagcacgcucuacaccggugacccugagcaaggaccagcucuccgggauaaacaauaucgcuuucucaaacugaggacuaguacuggcugcaucucccuuuccucuguccuccauccuucucccaggauggugaagggggaccugguacccagugauccccaccccaggauccuaaaucaugacuuaccugcuaauaaaaacucauuggaaaagugagaagaucuaaaaaaaaaaaaaaaaaaaaaaaaaaaaaaaaaaaaaaaaaaaaaaaaaaaaaaaaaaaaaaaaugcaucccccccccccccccccccccccccccccccaaaggcucuuuucagagccaccagaauu

SEQ ID NO: 5579 - RNA, 1959 nt, Artificial Sequence
  mRNA product Design f-5 comprising derived and/or modified sequence from HRSV(A2)__F_DSCav1_mut5 (opt4)
gggagacuuucccauucuguagcagaauuugguguugccuguggucuuggucccgcggagaagcuuaccauggagcugcugauccugaaggccaacgccaucaccaccauccugaccgccgugaccuucugcuucgccagcggccagaacaucaccgaggaguucuaccagagcaccugcagcgccgugagcaagggcuaccugagcgcccugagaaccggcugguacaccagcgugaucaccaucgagcugagcaacaucaaggagaacaagugcaacggcaccgacgccaaggugaagcugaucaagcaggagcuggacaaguacaagaacgccgugaccgagcugcagcugcugaugcagagcacccccgccaccggcagcggcagcgccaucgccagcggcguggccgugugcaaggugcugcaccuggagggcgaggugaacaagaucaagagcgcccugcugagcaccaacaaggccguggugagccugagcggcugcggcgugagcgugcugaccuucaaggugcuggaccugaagaacuacaucgacaagcagcugcugcccauccugaacaagcagagcugcagcaucagcaacaucgagaccgugaucgaguuccagcagaagaacaacagacugcuggagaucaccagagaguucagcgugaacgccggcgugaccacccccgugagcaccuacaugcugaccaacagcgagcugcugagccugaucaacgacaugcccaucaccaacgaccagaagaagcugaugagcaacaacgugcagaucgugagacagcagagcuacagcaucaugugcaucaucaaggaggaggugcuggccuacguggugcagcugccccuguacggcgugaucgacacccccugcuggaagcugcacaccagcccccugugcaccaccaacaccaaggagggcagcaacaucugccugaccagaaccgacagaggcugguacugcgacaacgccggcagcgugagcuucuucccccaggccgagaccugcaaggugcagagcaacagaguguucugcgacaccaugaacagcagaacccugcccagcgaggugaaccugugcaacguggacaucuucaaccccaaguacgacugcaagaucaugaccagcaagaccgacgugagcagcagcgugaucaccagccugggcgccaucgugagcugcuacggcaagaccaagugcaccgccagcaacaagugcagaggcaucaucaagaccuucagcaacggcugcgacuacgugagcaacaagggcguggacaccgugagcgugggcaacacccuguacuacgugaacaagcaggagggcaagagccuguacgugaagggcgagcccaucaucaacuucuacgacccccugguguuccccagcgacgaguucgacgccagcaucagccaggugaacgagaagaucaaccagagccuggccuucaucagaaagagcgacgagcugcugcacaacgugaacgccggcaagagcaccaccaacaucaugaucaccaccaucaucaucgugaucaucgugauccugcugagccugaucgccgugggccugcugcuguacugcaaggccagaagcacccccgugacccugagcaaggaccagcugagcggcaucaacaacaucgccuucagcaacugaggacuaguacuggcugcaucucccuuuccucuguccuccauccuucucccaggauggugaagggggaccugguacccagugauccccaccccaggauccuaaaucaugacuuaccugcuaauaaaaacucauuggaaaagugagaagaucuaaaaaaaaaaaaaaaaaaaaaaaaaaaaaaaaaaaaaaaaaaaaaaaaaaaaaaaaaaaaaaaaugcaucccccccccccccccccccccccccccccccaaaggcucuuuucagagccaccagaauu

SEQ ID NO: 5580 - RNA, 1959 nt, Artificial Sequence
  mRNA product Design f-5 comprising derived and/or modified sequence from HRSV(A2)__F_DSCav1_mut5 (opt5)
gggagacuuucccauucuguagcagaauuugguguugccuguggucuuggucccgcggagaagcuuaccauggagcugcucauccugaaggccaacgcuauuaccacaauccuuacggccgugaccuucugcuuugcgagcggccagaauauuacagaagaguucuaccaauccaccuguucugcugucagcaaaggguaucuguccgcccucagaacaggaugguacaccucuguuaucacaauugaacugagcaacaucaaggagaauaaaugcaacggcaccgacgccaaggugaaacuuaucaagcaggaacuggauaaguauaaaaaugcugugacggagcuccagcugcugaugcaguccacccccgccacagggucuggaagcgcuauugccuccggcgucgcgguguguaagguucuccaccuggagggggaagugaacaaaaucaagagcgcccuucugucuaccaauaaagcugucgugucccucagcggaugcggcguuucugugcugacauuuaagguccuugaccugaagaacuacauugauaaacaacuccugccuauccugaauaagcaguccuguagcauuucuaacaucgagaccgugauugaguuccagcagaaaaauaaccggcuccuggaaaucacgcgcgaguuuuccgugaaugccggcgucacaaccccgguuagcacauauaugcuuaccaacuccgaacugcucucucugaucaaugacaugcccauuaccaacgaucaaaagaaacuuaugagcaacaaugugcagaucgugagacagcaguccuacagcauuaugugcaucauuaaggaggaaguccuggcuuaugugguucaacucccucuguacggggugaucgacacacccuguuggaaacugcauacgucuccucucugcaccacaaacaccaaggagggauccaauaucugucugacacggaccgaucgcggcugguacugcgacaacgccgggagcgucucuuucuuuccccaggcggaaacguguaaggugcagagcaauagaguuuucugcgauacaaugaacuccagaacccugccuucugaggugaaucucugcaacgucgacauuuuuaauccgaaauaugauuguaagaucaugaccagcaaaacagacguguccagcucugucauuaccucccugggagccaucgugagcugcuacggcaagacaaaauguacggcuucuaacaagugccgggggauuaucaagaccuucuccaauggaugugauuauguuagcaacaaaggcguggacacagucuccgugggcaauacccuuuacuauguuaacaagcaagaggggaaaucucuguacgugaagggagaacccaucauuaauuuuuaugacccucucgucuuccccagcgaugaguuugacgccuccaucucucaggugaacgagaaaauuaaccagagccuggcuuucauccgcaaguccgaugaacugcuccacaaugugaacgccggcaagagcacaaccaauauuaugaucacgaccauuaucaucguuauuaucgucauucugcuuucucugaucgccguggggcuccugcuguacugcaaagcuagauccacaccugugacccuuagcaaggaccagcucucuggaauuaacaauaucgcguucuccaacugaggacuaguacuggcugcaucucccuuuccucuguccuccauccuucucccaggauggugaagggggaccugguacccagugauccccaccccaggauccuaaaucaugacuuaccugcuaauaaaaacucauuggaaaagugagaagaucuaaaaaaaaaaaaaaaaaaaaaaaaaaaaaaaaaaaaaaaaaaaaaaaaaaaaaaaaaaaaaaaaugcaucccccccccccccccccccccccccccccccaaaggcucuuuucagagccaccagaauu

SEQ ID NO: 5581 - RNA, 1959 nt, Artificial Sequence
  mRNA product Design f-5 comprising derived and/or modified sequence from HRSV(A2)__F_DSCav1_mut5 (opt6)
gggagacuuucccauucuguagcagaauuugguguugccuguggucuuggucccgcggagaagcuuaccauggaacuauuaauacuuaaagccaacgcaauaacaacaauucucacugcugucaccuucugcuucgccucaggccaaaacauaacggaagaauuuuaccaaucaacaugcucugcaguauccaaaggcuaccuaucugcucuaagaacagguugguauacaucaguaauaaccauagaacuaucaaacauaaaagaaaauaaaugcaacggaacagacgcaaaaguuaaacucauaaaacaagaacuagacaaauauaaaaacgcaguuaccgaacuacaacuacuuaugcaauccacucccgccacuggaucaggaucagcaauagcaucaggagucgcaguauguaaagucuuacaccucgaaggcgaagucaauaaaaucaaauccgcauuacuauccacaaacaaagcagucguaucccuaagcggaugcggaguaucaguacuaacauuuaaaguacuagaccuaaaaaauuacaucgauaaacaacuauuaccuauauuaaacaaacaauccugcuccauuucaaauaucgaaaccguaauagaauuucaacaaaaaaacaacagauuacuagaaauaacaagagaauuuuccguaaaugcuggcguaacaacaccaguauccacauacaugcucacaaacuccgaacuacuaucacuaauaaaugacaugcccauaacaaacgaucaaaaaaaacuaaugucaaauaauguacaaauaguaagacaacaaagcuacuccaucauguguauaauaaaagaagaaguacuagcauacguaguucaacuaccacuuuacggcguaaucgacaccccuugcuggaaacuacacaccuccccucuaugcaccacaaacacaaaagaagguuccaacauaugccuuaccagaacagacagaggcugguauugcgacaacgcaggaucaguuucauuuuuuccacaagcugaaacaugcaaaguacaaucaaacagagucuucugcgacacaaugaacucaagaacucuacccucagaaguaaaccuauguaacguagacauuuucaaccccaaauacgacugcaaaauuaugacaucaaaaacagacguuucaucaucaguuaucaccucauuaggagcaauaguaagcugcuacggaaaaacaaaaugcaccgccucaaauaaaugcagaggaauaauaaaaacuuucuccaacggaugcgacuacguuucaaacaaagguguagacacuguaucaguaggaaacacacuauauuacguaaauaaacaagaaggaaaaucacuuuaugucaaaggagaaccaauaaucaauuucuacgacccauuaguauucccaucagacgaauuugaugcuucaauaucacaaguaaacgaaaaaauaaaucaaucacucgcauuuauacgaaaaucagacgaacuacuacacaauguaaacgcaggcaaaucaacaacaaacauaaugauaacaacaauaaucauuguaauaauaguaauacuucuaucucuaauagcaguaggauuacuccucuacugcaaagcaagaucaaccccuguaacacuaucaaaagaccaacuuucagguauaaauaauauagcuuuuuccaauuaaggacuaguacuggcugcaucucccuuuccucuguccuccauccuucucccaggauggugaagggggaccugguacccagugauccccaccccaggauccuaaaucaugacuuaccugcuaauaaaaacucauuggaaaagugagaagaucuaaaaaaaaaaaaaaaaaaaaaaaaaaaaaaaaaaaaaaaaaaaaaaaaaaaaaaaaaaaaaaaaugcaucccccccccccccccccccccccccccccccaaaggcucuuuucagagccaccagaauu

SEQ ID NO: 5582 - RNA, 1959 nt, Artificial Sequence
  mRNA product Design f-5 comprising derived and/or modified sequence from HRSV(A2)__F_DSCav1_mut5 (opt11)
gggagacuuucccauucuguagcagaauuugguguugccuguggucuuggucccgcggagaagcuuaccauggagcuccuaauccucaaagccaacgcgaucacuacaauccucacagccgucaccuucugcuucgccuccggccaaaacaucaccgaggaguucuaccaaucaaccugcuccgccguaucaaaaggauaccuaagcgcccuacggaccggcugguacacaucugucaucaccaucgaacuaucaaacaucaaagaaaacaaaugcaacggaaccgacgcaaaagucaaacugauuaaacaagaacuagacaaauacaaaaacgcagucaccgaacugcaauuacucaugcaaagcacaccggccaccggcucaggcagcgccaucgccuccggcgucgccgucugcaaaguucuccaccucgagggcgaagucaacaaaauaaaaucugcccuccucuccaccaacaaagccgucgucucccucagcggcugcggagucuccguccucaccuucaaaguucucgaucucaagaacuauauugacaaacaacuucuacccauacucaacaaacaaagcugcagcauauccaacaucgaaaccgucaucgaguuccaacaaaagaacaaccgccuccucgaaauaacccgcgaguucagcguuaacgccggagucacuaccccugucuccaccuacaugcucaccaacuccgaacuccuaucacuaaucaacgacaugcccauaaccaacgaccagaagaaacucauguccaacaacguccaaauuguccgacaacaaagcuacuccauaaugugcauaauaaaagaggaaguccucgccuacgucguacaacugccccuuuauggcguaaucgacacacccugcuggaaacuccacacgucaccccucugcaccaccaacacaaaagaaggcucgaacaucugccuaacacggacugaccgcggcugguacugcgacaacgccggcuccgucagcuucuucccacaagccgaaaccugcaaaguacaauccaaccgaguauucugcgacaccaugaacuccagaacccuccccucagaggucaaccugugcaacguagacaucuucaaccccaaauacgacugcaaaauaaugaccucaaaaacagacgucuccucuuccguaaucaccagccucggagccaucgucagcugcuacggcaaaaccaaaugcaccgccucaaacaaaugccgcggcaucaucaaaacauucucaaacggcugcgacuacgucuccaacaaaggcgucgacacaguaagcguaggcaacacacuguacuacgucaacaaacaagagggaaaaucacucuacgucaaaggagaacccauaaucaacuucuacgacccccucguuuuccccagcgacgaguucgacgccagcauaucccaagucaacgagaaaauuaaccaaucccuagcauucauccgaaaaucugacgaacugcuccacaacgucaacgcgggaaaaucaacaaccaacauaaugauaaccacaaucauaauagucaucaucguaauccuccucagccuaaucgcugucggccuccuccucuacugcaaagcccguuccaccccagucacacuuuccaaggaccaacuaagcggaauaaacaacaucgcguucucaaacuaaggacuaguacuggcugcaucucccuuuccucuguccuccauccuucucccaggauggugaagggggaccugguacccagugauccccaccccaggauccuaaaucaugacuuaccugcuaauaaaaacucauuggaaaagugagaagaucuaaaaaaaaaaaaaaaaaaaaaaaaaaaaaaaaaaaaaaaaaaaaaaaaaaaaaaaaaaaaaaaaugcaucccccccccccccccccccccccccccccccaaaggcucuuuucagagccaccagaauu

SEQ ID NO: 5583 - RNA, 1955 nt, Artificial Sequence
  mRNA product Design g-1 comprising derived and/or modified sequence from HRSV(A2)__F_DSCav1_mut5 (opt1)
gggagacuuucccauucuguagcagaauuugguguugccuguggucuuggucccgcggagaagcuuaccauggagcugcucauccugaaggccaacgccaucaccaccauccugacggcggugaccuucugcuucgccagcggccagaacaucaccgaggaguucuaccaguccacgugcagcgccgucuccaagggguaccucagcgcccugcggaccggcugguacaccuccgugaucaccaucgagcugagcaacaucaaggagaacaagugcaacgggaccgacgccaaggugaagcucaucaagcaggagcuggacaaguacaagaacgcggucacggagcugcagcuccugaugcaguccaccccggcaaccggcuccggcuccgccaucgcgagcggcgucgccgugugcaaggugcugcaccucgagggggaggucaacaagaucaagagcgcccugcuguccaccaacaaggccguggugagccucuccggcugcggcgucagcgugcugaccuucaaggugcuggaccucaagaacuacaucgacaagcagcugcugcccauccugaacaagcagagcugcuccaucagcaacaucgagacggugaucgaguuccagcagaagaacaaccggcuccuggagaucacccgcgaguucagcgugaacgccggggucaccacccccguguccacguacaugcugaccaacagcgagcuccugucccugaucaacgacaugccgaucaccaacgaccagaagaagcucaugagcaacaacgugcagaucguccggcagcaguccuacagcaucaugugcaucaucaaggaggaggugcuggcguacgugguccagcugccccucuacggcgugaucgacacccccugcuggaagcugcacacgagcccccugugcaccaccaacaccaaggagggguccaacaucugccucacgcgcaccgaccggggcugguacugcgacaacgccggcagcgucuccuucuucccgcaggccgagaccugcaaggugcagagcaaccgcguguucugcgacaccaugaacucccggacgcugcccagcgagguaaaccucugcaacgucgacaucuucaaccccaaguacgacugcaagaucaugaccuccaagaccgacgugagcuccagcgugaucaccucccugggggccaucgucagcugcuacggcaagacgaagugcaccgccagcaacaagugccgggggaucaucaagaccuucuccaacggcugcgacuacgugagcaacaagggcguggacaccguguccgucgggaacacccuguacuacgugaacaagcaggagggcaagagccucuacgugaagggggagcccaucaucaacuucuacgacccgcuggucuuccccuccgacgaguucgacgcgagcaucucccaggugaacgagaagaucaaccagagccuggccuucauccgcaaguccgacgagcugcuccacaacgugaacgccggcaagagcacgaccaacaucaugaucaccaccaucaucaucgucaucaucgugauccugcugucccucaucgccguggggcugcugcucuacugcaaggcccggagcacgcccgucacccuguccaaggaccagcugagcggcaucaacaacaucgcguucuccaacugaggacuaguggaagcauuuuccuggcugauuaaaagaaauuacucagcuauggucaucuguuccuguuagaaggcuaugcagcauauuauauacuaugcgcauguuaugaaaugcauaauaaaaaauuuuaaaaaaucuaaaagaucuaaaaaaaaaaaaaaaaaaaaaaaaaaaaaaaaaaaaaaaaaaaaaaaaaaaaaaaaaaaaaaaaugcaucccccccccccccccccccccccccccccccaaaggcucuuuucagagccaccagaauu

SEQ ID NO: 5584 - RNA, 1955 nt, Artificial Sequence
  mRNA product Design g-1 comprising derived and/or modified sequence from HRSV(A2)__F_DSCav1_mut5 (opt1)
gggagacuuucccauucuguagcagaauuugguguugccuguggucuuggucccgcggagaagcuuaccauggagcugcucauccugaaggccaacgccaucaccaccauccugacggcggugaccuucugcuucgccagcggccagaacaucaccgaggaguucuaccaguccacgugcagcgccgucuccaagggguaccucagcgcccugcgcaccggcugguacaccuccgugaucaccaucgagcugagcaacaucaaggagaacaagugcaacgggaccgacgccaaggugaagcucaucaagcaggagcuggacaaguacaagaacgcggucacggagcugcagcuccugaugcaguccacccccgccaccggcagcggguccgccaucgccagcggcguggcggugugcaagguccugcaccucgagggcgaggugaacaagaucaaguccgcccugcugagcaccaacaaggccguggucucccucagcgggugcggcguguccgugcugacguucaagguccuggaccucaagaacuacaucgacaagcagcugcugccgauccucaacaagcagagcugcuccaucagcaacaucgagaccgugaucgaguuccagcagaagaacaaccggcugcuggagaucacccgcgaguucuccgugaacgccggggucaccacgcccgugagcaccuacaugcucaccaacagcgagcugcugucccucaucaacgacaugcccaucaccaacgaccagaagaagcugaugagcaacaacgugcagaucguccggcagcaguccuacagcaucaugugcaucaucaaggaggaggugcuggccuacgugguccagcucccccuguacggcgugaucgacacgccgugcuggaagcugcacaccagcccccucugcaccaccaacacgaaggagggguccaacaucugccugacccgcaccgaccggggcugguacugcgacaacgcgggcuccgugagcuucuucccccaggccgagaccugcaagguccaguccaaccgcguguucugcgacacgaugaacagccggacccuccccuccgaggucaaccugugcaacguggacaucuucaacccgaaguacgacugcaagaucaugaccagcaagaccgacguguccagcuccgucaucacgagccugggggccaucguguccugcuacggcaagaccaagugcaccgccagcaacaagugccgggggaucaucaagaccuucuccaacggcugcgacuacgugagcaacaagggcgucgacacggugagcguggggaacacccucuacuacgucaacaagcaggagggcaagucccuguacgugaagggggagcccaucaucaacuucuacgacccccugguguuccccagcgacgaguucgacgccuccaucagccaggucaacgagaagaucaaccagucccucgcguucauccgcaagagcgacgagcugcugcacaacgugaacgccggcaaguccaccaccaacaucaugaucaccacgaucaucaucgugaucaucgucauccuccugagccugaucgccguggggcuccugcuguacugcaaggcccgguccaccccggugacccugagcaaggaccagcucuccggcaucaacaacaucgccuucagcaacugaggacuaguggaagcauuuuccuggcugauuaaaagaaauuacucagcuauggucaucuguuccuguuagaaggcuaugcagcauauuauauacuaugcgcauguuaugaaaugcauaauaaaaaauuuuaaaaaaucuaaaagaucuaaaaaaaaaaaaaaaaaaaaaaaaaaaaaaaaaaaaaaaaaaaaaaaaaaaaaaaaaaaaaaaaugcaucccccccccccccccccccccccccccccccaaaggcucuuuucagagccaccagaauu

SEQ ID NO: 5585 - RNA, 1955 nt, Artificial Sequence
  mRNA product Design g-1 comprising derived and/or modified sequence from HRSV(A2)__F_DSCav1_mut5 (opt2)
gggagacuuucccauucuguagcagaauuugguguugccuguggucuuggucccgcggagaagcuuaccauggagcuccucauccucaaggccaacgccaucaccaccauccucaccgccgucaccuucugcuucgccuccggccagaacaucaccgaggaguucuaccaguccaccugcuccgccgucuccaagggcuaccucuccgcccuccgcaccggcugguacaccuccgucaucaccaucgagcucuccaacaucaaggagaacaagugcaacggcaccgacgccaaggucaagcucaucaagcaggagcucgacaaguacaagaacgccgucaccgagcuccagcuccucaugcaguccacccccgccaccggcuccggcuccgccaucgccuccggcgucgccgucugcaagguccuccaccucgagggcgaggucaacaagaucaaguccgcccuccucuccaccaacaaggccgucgucucccucuccggcugcggcgucuccguccucaccuucaagguccucgaccucaagaacuacaucgacaagcagcuccuccccauccucaacaagcaguccugcuccaucuccaacaucgagaccgucaucgaguuccagcagaagaacaaccgccuccucgagaucacccgcgaguucuccgucaacgccggcgucaccacccccgucuccaccuacaugcucaccaacuccgagcuccucucccucaucaacgacaugcccaucaccaacgaccagaagaagcucauguccaacaacguccagaucguccgccagcaguccuacuccaucaugugcaucaucaaggaggagguccucgccuacgucguccagcucccccucuacggcgucaucgacacccccugcuggaagcuccacaccuccccccucugcaccaccaacaccaaggagggcuccaacaucugccucacccgcaccgaccgcggcugguacugcgacaacgccggcuccgucuccuucuucccccaggccgagaccugcaagguccaguccaaccgcgucuucugcgacaccaugaacucccgcacccuccccuccgaggucaaccucugcaacgucgacaucuucaaccccaaguacgacugcaagaucaugaccuccaagaccgacgucuccuccuccgucaucaccucccucggcgccaucgucuccugcuacggcaagaccaagugcaccgccuccaacaagugccgcggcaucaucaagaccuucuccaacggcugcgacuacgucuccaacaagggcgucgacaccgucuccgucggcaacacccucuacuacgucaacaagcaggagggcaagucccucuacgucaagggcgagcccaucaucaacuucuacgacccccucgucuuccccuccgacgaguucgacgccuccaucucccaggucaacgagaagaucaaccagucccucgccuucauccgcaaguccgacgagcuccuccacaacgucaacgccggcaaguccaccaccaacaucaugaucaccaccaucaucaucgucaucaucgucauccuccucucccucaucgccgucggccuccuccucuacugcaaggcccgcuccacccccgucacccucuccaaggaccagcucuccggcaucaacaacaucgccuucuccaacugaggacuaguggaagcauuuuccuggcugauuaaaagaaauuacucagcuauggucaucuguuccuguuagaaggcuaugcagcauauuauauacuaugcgcauguuaugaaaugcauaauaaaaaauuuuaaaaaaucuaaaagaucuaaaaaaaaaaaaaaaaaaaaaaaaaaaaaaaaaaaaaaaaaaaaaaaaaaaaaaaaaaaaaaaaugcaucccccccccccccccccccccccccccccccaaaggcucuuuucagagccaccagaauu

SEQ ID NO: 5586 - RNA, 1955 nt, Artificial Sequence
  mRNA product Design g-1 comprising derived and/or modified sequence from HRSV(A2)__F_DSCav1_mut5 (opt3)
gggagacuuucccauucuguagcagaauuugguguugccuguggucuuggucccgcggagaagcuuaccauggagcugcucauccuuaaggccaacgcuauuaccacaauacugacugcagugacguucugcuuugccagcggccagaauaucaccgaagaguucuaccaauccacauguucugcggucucaaaaggguauuugagugcuuuaagaacuggaugguacaccagcguuauuacaaucgaacuguccaacauuaaggagaauaaaugcaacgguaccgacgccaaggugaaacuaaucaagcaggaacucgauaaguauaaaaaugcaguaacugagcugcagcuucugaugcagucuacacccgccaccggcucggggucagcuauagcaagcggaguggccgucuguaagguguugcaccucgagggcgaaguuaacaaaaucaagagugcucugcuguccacgaauaaagccguggucucucucagcgguugcgggguguccguauuaacuuuuaagguucuggaccuuaagaacuacauugauaaacaauugcugccuauccuaaauaagcagucauguaguauuagcaacaucgagaccgugauagaguuccagcagaaaaauaacaggcuccuggaaauuacacgggaguuuucugucaaugcgggagugacuaccccaguguccacauauaugcuuaccaacucagaacuguugagccucaucaaugacaugccgauuacgaacgaucaaaagaaacugaugaguaacaauguccagaucguucgccagcagucuuacuccaucaugugcauuauaaaggaggaaguguuagcauauguagugcaacugccccucuacggcgucaucgacacuccuuguuggaaacuucauacaagcccacugugcaccacuaacacaaaggagggcucgaauauuuguuugacccgaacggaucgugggugguacugcgacaacgccggaucuguguccuucuuuccccaggcugaaaccuguaagguucagucaaauagaguguucugcgauacaaugaacaguagaacucugccuagcgaggucaaucucugcaacguggacaucuuuaauccaaaauaugauuguaagauaaugaccuccaaaacagacguaucuagcucaguuauuaccagucugggugccaucguguccugcuacggcaagacuaaauguacagcaagcaacaagugcagggggaucauuaagaccuucucuaauggaugugauuaugucucaaacaaaggcguggacacugucaguguggguaauacgcuuuacuauguuaacaagcaagaggggaaaagccuguacgugaagggagaacccaucauuaauuuuuaugacccuuugguauucccauccgaugaguuugacgcuucuauaucgcaggucaacgagaaaaucaaccagagccucgccuucauucggaaguccgaugaacuguuacacaaugugaacgcgggcaagucaacaaccaauaucaugaucacuaccauuauaaucguuauuaucgugauucugcuaagucucaucgccgucggccugcuuuuguacugcaaagcacgcucuacaccggugacccugagcaaggaccagcucuccgggauaaacaauaucgcuuucucaaacugaggacuaguggaagcauuuuccuggcugauuaaaagaaauuacucagcuauggucaucuguuccuguuagaaggcuaugcagcauauuauauacuaugcgcauguuaugaaaugcauaauaaaaaauuuuaaaaaaucuaaaagaucuaaaaaaaaaaaaaaaaaaaaaaaaaaaaaaaaaaaaaaaaaaaaaaaaaaaaaaaaaaaaaaaaugcaucccccccccccccccccccccccccccccccaaaggcucuuuucagagccaccagaauu

SEQ ID NO: 5587 - RNA, 1955 nt, Artificial Sequence
  mRNA product Design g-1 comprising derived and/or modified sequence from HRSV(A2)__F_DSCav1_mut5 (opt4)
gggagacuuucccauucuguagcagaauuugguguugccuguggucuuggucccgcggagaagcuuaccauggagcugcugauccugaaggccaacgccaucaccaccauccugaccgccgugaccuucugcuucgccagcggccagaacaucaccgaggaguucuaccagagcaccugcagcgccgugagcaagggcuaccugagcgcccugagaaccggcugguacaccagcgugaucaccaucgagcugagcaacaucaaggagaacaagugcaacggcaccgacgccaaggugaagcugaucaagcaggagcuggacaaguacaagaacgccgugaccgagcugcagcugcugaugcagagcacccccgccaccggcagcggcagcgccaucgccagcggcguggccgugugcaaggugcugcaccuggagggcgaggugaacaagaucaagagcgcccugcugagcaccaacaaggccguggugagccugagcggcugcggcgugagcgugcugaccuucaaggugcuggaccugaagaacuacaucgacaagcagcugcugcccauccugaacaagcagagcugcagcaucagcaacaucgagaccgugaucgaguuccagcagaagaacaacagacugcuggagaucaccagagaguucagcgugaacgccggcgugaccacccccgugagcaccuacaugcugaccaacagcgagcugcugagccugaucaacgacaugcccaucaccaacgaccagaagaagcugaugagcaacaacgugcagaucgugagacagcagagcuacagcaucaugugcaucaucaaggaggaggugcuggccuacguggugcagcugccccuguacggcgugaucgacacccccugcuggaagcugcacaccagcccccugugcaccaccaacaccaaggagggcagcaacaucugccugaccagaaccgacagaggcugguacugcgacaacgccggcagcgugagcuucuucccccaggccgagaccugcaaggugcagagcaacagaguguucugcgacaccaugaacagcagaacccugcccagcgaggugaaccugugcaacguggacaucuucaaccccaaguacgacugcaagaucaugaccagcaagaccgacgugagcagcagcgugaucaccagccugggcgccaucgugagcugcuacggcaagaccaagugcaccgccagcaacaagugcagaggcaucaucaagaccuucagcaacggcugcgacuacgugagcaacaagggcguggacaccgugagcgugggcaacacccuguacuacgugaacaagcaggagggcaagagccuguacgugaagggcgagcccaucaucaacuucuacgacccccugguguuccccagcgacgaguucgacgccagcaucagccaggugaacgagaagaucaaccagagccuggccuucaucagaaagagcgacgagcugcugcacaacgugaacgccggcaagagcaccaccaacaucaugaucaccaccaucaucaucgugaucaucgugauccugcugagccugaucgccgugggccugcugcuguacugcaaggccagaagcacccccgugacccugagcaaggaccagcugagcggcaucaacaacaucgccuucagcaacugaggacuaguggaagcauuuuccuggcugauuaaaagaaauuacucagcuauggucaucuguuccuguuagaaggcuaugcagcauauuauauacuaugcgcauguuaugaaaugcauaauaaaaaauuuuaaaaaaucuaaaagaucuaaaaaaaaaaaaaaaaaaaaaaaaaaaaaaaaaaaaaaaaaaaaaaaaaaaaaaaaaaaaaaaaugcaucccccccccccccccccccccccccccccccaaaggcucuuuucagagccaccagaauu

SEQ ID NO: 5588 - RNA, 1955 nt, Artificial Sequence
  mRNA product Design g-1 comprising derived and/or modified sequence from HRSV(A2)__F_DSCav1_mut5 (opt5)
gggagacuuucccauucuguagcagaauuugguguugccuguggucuuggucccgcggagaagcuuaccauggagcugcucauccugaaggccaacgcuauuaccacaauccuuacggccgugaccuucugcuuugcgagcggccagaauauuacagaagaguucuaccaauccaccuguucugcugucagcaaaggguaucuguccgcccucagaacaggaugguacaccucuguuaucacaauugaacugagcaacaucaaggagaauaaaugcaacggcaccgacgccaaggugaaacuuaucaagcaggaacuggauaaguauaaaaaugcugugacggagcuccagcugcugaugcaguccacccccgccacagggucuggaagcgcuauugccuccggcgucgcgguguguaagguucuccaccuggagggggaagugaacaaaaucaagagcgcccuucugucuaccaauaaagcugucgugucccucagcggaugcggcguuucugugcugacauuuaagguccuugaccugaagaacuacauugauaaacaacuccugccuauccugaauaagcaguccuguagcauuucuaacaucgagaccgugauugaguuccagcagaaaaauaaccggcuccuggaaaucacgcgcgaguuuuccgugaaugccggcgucacaaccccgguuagcacauauaugcuuaccaacuccgaacugcucucucugaucaaugacaugcccauuaccaacgaucaaaagaaacuuaugagcaacaaugugcagaucgugagacagcaguccuacagcauuaugugcaucauuaaggaggaaguccuggcuuaugugguucaacucccucuguacggggugaucgacacacccuguuggaaacugcauacgucuccucucugcaccacaaacaccaaggagggauccaauaucugucugacacggaccgaucgcggcugguacugcgacaacgccgggagcgucucuuucuuuccccaggcggaaacguguaaggugcagagcaauagaguuuucugcgauacaaugaacuccagaacccugccuucugaggugaaucucugcaacgucgacauuuuuaauccgaaauaugauuguaagaucaugaccagcaaaacagacguguccagcucugucauuaccucccugggagccaucgugagcugcuacggcaagacaaaauguacggcuucuaacaagugccgggggauuaucaagaccuucuccaauggaugugauuauguuagcaacaaaggcguggacacagucuccgugggcaauacccuuuacuauguuaacaagcaagaggggaaaucucuguacgugaagggagaacccaucauuaauuuuuaugacccucucgucuuccccagcgaugaguuugacgccuccaucucucaggugaacgagaaaauuaaccagagccuggcuuucauccgcaaguccgaugaacugcuccacaaugugaacgccggcaagagcacaaccaauauuaugaucacgaccauuaucaucguuauuaucgucauucugcuuucucugaucgccguggggcuccugcuguacugcaaagcuagauccacaccugugacccuuagcaaggaccagcucucuggaauuaacaauaucgcguucuccaacugaggacuaguggaagcauuuuccuggcugauuaaaagaaauuacucagcuauggucaucuguuccuguuagaaggcuaugcagcauauuauauacuaugcgcauguuaugaaaugcauaauaaaaaauuuuaaaaaaucuaaaagaucuaaaaaaaaaaaaaaaaaaaaaaaaaaaaaaaaaaaaaaaaaaaaaaaaaaaaaaaaaaaaaaaaugcaucccccccccccccccccccccccccccccccaaaggcucuuuucagagccaccagaauu

SEQ ID NO: 5589 - RNA, 1955 nt, Artificial Sequence
  mRNA product Design g-1 comprising derived and/or modified sequence from HRSV(A2)__F_DSCav1_mut5 (opt6)
gggagacuuucccauucuguagcagaauuugguguugccuguggucuuggucccgcggagaagcuuaccauggaacuauuaauacuuaaagccaacgcaauaacaacaauucucacugcugucaccuucugcuucgccucaggccaaaacauaacggaagaauuuuaccaaucaacaugcucugcaguauccaaaggcuaccuaucugcucuaagaacagguugguauacaucaguaauaaccauagaacuaucaaacauaaaagaaaauaaaugcaacggaacagacgcaaaaguuaaacucauaaaacaagaacuagacaaauauaaaaacgcaguuaccgaacuacaacuacuuaugcaauccacucccgccacuggaucaggaucagcaauagcaucaggagucgcaguauguaaagucuuacaccucgaaggcgaagucaauaaaaucaaauccgcauuacuauccacaaacaaagcagucguaucccuaagcggaugcggaguaucaguacuaacauuuaaaguacuagaccuaaaaaauuacaucgauaaacaacuauuaccuauauuaaacaaacaauccugcuccauuucaaauaucgaaaccguaauagaauuucaacaaaaaaacaacagauuacuagaaauaacaagagaauuuuccguaaaugcuggcguaacaacaccaguauccacauacaugcucacaaacuccgaacuacuaucacuaauaaaugacaugcccauaacaaacgaucaaaaaaaacuaaugucaaauaauguacaaauaguaagacaacaaagcuacuccaucauguguauaauaaaagaagaaguacuagcauacguaguucaacuaccacuuuacggcguaaucgacaccccuugcuggaaacuacacaccuccccucuaugcaccacaaacacaaaagaagguuccaacauaugccuuaccagaacagacagaggcugguauugcgacaacgcaggaucaguuucauuuuuuccacaagcugaaacaugcaaaguacaaucaaacagagucuucugcgacacaaugaacucaagaacucuacccucagaaguaaaccuauguaacguagacauuuucaaccccaaauacgacugcaaaauuaugacaucaaaaacagacguuucaucaucaguuaucaccucauuaggagcaauaguaagcugcuacggaaaaacaaaaugcaccgccucaaauaaaugcagaggaauaauaaaaacuuucuccaacggaugcgacuacguuucaaacaaagguguagacacuguaucaguaggaaacacacuauauuacguaaauaaacaagaaggaaaaucacuuuaugucaaaggagaaccaauaaucaauuucuacgacccauuaguauucccaucagacgaauuugaugcuucaauaucacaaguaaacgaaaaaauaaaucaaucacucgcauuuauacgaaaaucagacgaacuacuacacaauguaaacgcaggcaaaucaacaacaaacauaaugauaacaacaauaaucauuguaauaauaguaauacuucuaucucuaauagcaguaggauuacuccucuacugcaaagcaagaucaaccccuguaacacuaucaaaagaccaacuuucagguauaaauaauauagcuuuuuccaauuaaggacuaguggaagcauuuuccuggcugauuaaaagaaauuacucagcuauggucaucuguuccuguuagaaggcuaugcagcauauuauauacuaugcgcauguuaugaaaugcauaauaaaaaauuuuaaaaaaucuaaaagaucuaaaaaaaaaaaaaaaaaaaaaaaaaaaaaaaaaaaaaaaaaaaaaaaaaaaaaaaaaaaaaaaaugcaucccccccccccccccccccccccccccccccaaaggcucuuuucagagccaccagaauu

SEQ ID NO: 5590 - RNA, 1955 nt, Artificial Sequence
  mRNA product Design g-1 comprising derived and/or modified sequence from HRSV(A2)__F_DSCav1_mut5 (opt11)
gggagacuuucccauucuguagcagaauuugguguugccuguggucuuggucccgcggagaagcuuaccauggagcuccuaauccucaaagccaacgcgaucacuacaauccucacagccgucaccuucugcuucgccuccggccaaaacaucaccgaggaguucuaccaaucaaccugcuccgccguaucaaaaggauaccuaagcgcccuacggaccggcugguacacaucugucaucaccaucgaacuaucaaacaucaaagaaaacaaaugcaacggaaccgacgcaaaagucaaacugauuaaacaagaacuagacaaauacaaaaacgcagucaccgaacugcaauuacucaugcaaagcacaccggccaccggcucaggcagcgccaucgccuccggcgucgccgucugcaaaguucuccaccucgagggcgaagucaacaaaauaaaaucugcccuccucuccaccaacaaagccgucgucucccucagcggcugcggagucuccguccucaccuucaaaguucucgaucucaagaacuauauugacaaacaacuucuacccauacucaacaaacaaagcugcagcauauccaacaucgaaaccgucaucgaguuccaacaaaagaacaaccgccuccucgaaauaacccgcgaguucagcguuaacgccggagucacuaccccugucuccaccuacaugcucaccaacuccgaacuccuaucacuaaucaacgacaugcccauaaccaacgaccagaagaaacucauguccaacaacguccaaauuguccgacaacaaagcuacuccauaaugugcauaauaaaagaggaaguccucgccuacgucguacaacugccccuuuauggcguaaucgacacacccugcuggaaacuccacacgucaccccucugcaccaccaacacaaaagaaggcucgaacaucugccuaacacggacugaccgcggcugguacugcgacaacgccggcuccgucagcuucuucccacaagccgaaaccugcaaaguacaauccaaccgaguauucugcgacaccaugaacuccagaacccuccccucagaggucaaccugugcaacguagacaucuucaaccccaaauacgacugcaaaauaaugaccucaaaaacagacgucuccucuuccguaaucaccagccucggagccaucgucagcugcuacggcaaaaccaaaugcaccgccucaaacaaaugccgcggcaucaucaaaacauucucaaacggcugcgacuacgucuccaacaaaggcgucgacacaguaagcguaggcaacacacuguacuacgucaacaaacaagagggaaaaucacucuacgucaaaggagaacccauaaucaacuucuacgacccccucguuuuccccagcgacgaguucgacgccagcauaucccaagucaacgagaaaauuaaccaaucccuagcauucauccgaaaaucugacgaacugcuccacaacgucaacgcgggaaaaucaacaaccaacauaaugauaaccacaaucauaauagucaucaucguaauccuccucagccuaaucgcugucggccuccuccucuacugcaaagcccguuccaccccagucacacuuuccaaggaccaacuaagcggaauaaacaacaucgcguucucaaacuaaggacuaguggaagcauuuuccuggcugauuaaaagaaauuacucagcuauggucaucuguuccuguuagaaggcuaugcagcauauuauauacuaugcgcauguuaugaaaugcauaauaaaaaauuuuaaaaaaucuaaaagaucuaaaaaaaaaaaaaaaaaaaaaaaaaaaaaaaaaaaaaaaaaaaaaaaaaaaaaaaaaaaaaaaaugcaucccccccccccccccccccccccccccccccaaaggcucuuuucagagccaccagaauu

SEQ ID NO: 5591 - RNA, 1970 nt, Artificial Sequence
  mRNA product Design g-2 comprising derived and/or modified sequence from HRSV(A2)__F_DSCav1_mut5 (opt1)
gggagaguccgcucagccagguugcagaagcggcuuagcguguguccuaaucuucucucugcguguagguaggccugugccgcaaacaagcuuaccauggagcugcucauccugaaggccaacgccaucaccaccauccugacggcggugaccuucugcuucgccagcggccagaacaucaccgaggaguucuaccaguccacgugcagcgccgucuccaagggguaccucagcgcccugcggaccggcugguacaccuccgugaucaccaucgagcugagcaacaucaaggagaacaagugcaacgggaccgacgccaaggugaagcucaucaagcaggagcuggacaaguacaagaacgcggucacggagcugcagcuccugaugcaguccaccccggcaaccggcuccggcuccgccaucgcgagcggcgucgccgugugcaaggugcugcaccucgagggggaggucaacaagaucaagagcgcccugcuguccaccaacaaggccguggugagccucuccggcugcggcgucagcgugcugaccuucaaggugcuggaccucaagaacuacaucgacaagcagcugcugcccauccugaacaagcagagcugcuccaucagcaacaucgagacggugaucgaguuccagcagaagaacaaccggcuccuggagaucacccgcgaguucagcgugaacgccggggucaccacccccguguccacguacaugcugaccaacagcgagcuccugucccugaucaacgacaugccgaucaccaacgaccagaagaagcucaugagcaacaacgugcagaucguccggcagcaguccuacagcaucaugugcaucaucaaggaggaggugcuggcguacgugguccagcugccccucuacggcgugaucgacacccccugcuggaagcugcacacgagcccccugugcaccaccaacaccaaggagggguccaacaucugccucacgcgcaccgaccggggcugguacugcgacaacgccggcagcgucuccuucuucccgcaggccgagaccugcaaggugcagagcaaccgcguguucugcgacaccaugaacucccggacgcugcccagcgagguaaaccucugcaacgucgacaucuucaaccccaaguacgacugcaagaucaugaccuccaagaccgacgugagcuccagcgugaucaccucccugggggccaucgucagcugcuacggcaagacgaagugcaccgccagcaacaagugccgggggaucaucaagaccuucuccaacggcugcgacuacgugagcaacaagggcguggacaccguguccgucgggaacacccuguacuacgugaacaagcaggagggcaagagccucuacgugaagggggagcccaucaucaacuucuacgacccgcuggucuuccccuccgacgaguucgacgcgagcaucucccaggugaacgagaagaucaaccagagccuggccuucauccgcaaguccgacgagcugcuccacaacgugaacgccggcaagagcacgaccaacaucaugaucaccaccaucaucaucgucaucaucgugauccugcugucccucaucgccguggggcugcugcucuacugcaaggcccggagcacgcccgucacccuguccaaggaccagcugagcggcaucaacaacaucgcguucuccaacugaggacuaguaauaaggaaacuguaugaaugucugugggcaggaagugaagagauccuucuguaaagguuuuuggaauuaugucugcugaauaauaaacuuuuuugaaauaauaaaucugguagaaaaaugagaucuaaaaaaaaaaaaaaaaaaaaaaaaaaaaaaaaaaaaaaaaaaaaaaaaaaaaaaaaaaaaaaaaugcaucccccccccccccccccccccccccccccccaaaggcucuuuucagagccaccagaauu

SEQ ID NO: 5592 - RNA, 1970 nt, Artificial Sequence
  mRNA product Design g-2 comprising derived and/or modified sequence from HRSV(A2)__F_DSCav1_mut5 (opt1)
gggagaguccgcucagccagguugcagaagcggcuuagcguguguccuaaucuucucucugcguguagguaggccugugccgcaaacaagcuuaccauggagcugcucauccugaaggccaacgccaucaccaccauccugacggcggugaccuucugcuucgccagcggccagaacaucaccgaggaguucuaccaguccacgugcagcgccgucuccaagggguaccucagcgcccugcgcaccggcugguacaccuccgugaucaccaucgagcugagcaacaucaaggagaacaagugcaacgggaccgacgccaaggugaagcucaucaagcaggagcuggacaaguacaagaacgcggucacggagcugcagcuccugaugcaguccacccccgccaccggcagcggguccgccaucgccagcggcguggcggugugcaagguccugcaccucgagggcgaggugaacaagaucaaguccgcccugcugagcaccaacaaggccguggucucccucagcgggugcggcguguccgugcugacguucaagguccuggaccucaagaacuacaucgacaagcagcugcugccgauccucaacaagcagagcugcuccaucagcaacaucgagaccgugaucgaguuccagcagaagaacaaccggcugcuggagaucacccgcgaguucuccgugaacgccggggucaccacgcccgugagcaccuacaugcucaccaacagcgagcugcugucccucaucaacgacaugcccaucaccaacgaccagaagaagcugaugagcaacaacgugcagaucguccggcagcaguccuacagcaucaugugcaucaucaaggaggaggugcuggccuacgugguccagcucccccuguacggcgugaucgacacgccgugcuggaagcugcacaccagcccccucugcaccaccaacacgaaggagggguccaacaucugccugacccgcaccgaccggggcugguacugcgacaacgcgggcuccgugagcuucuucccccaggccgagaccugcaagguccaguccaaccgcguguucugcgacacgaugaacagccggacccuccccuccgaggucaaccugugcaacguggacaucuucaacccgaaguacgacugcaagaucaugaccagcaagaccgacguguccagcuccgucaucacgagccugggggccaucguguccugcuacggcaagaccaagugcaccgccagcaacaagugccgggggaucaucaagaccuucuccaacggcugcgacuacgugagcaacaagggcgucgacacggugagcguggggaacacccucuacuacgucaacaagcaggagggcaagucccuguacgugaagggggagcccaucaucaacuucuacgacccccugguguuccccagcgacgaguucgacgccuccaucagccaggucaacgagaagaucaaccagucccucgcguucauccgcaagagcgacgagcugcugcacaacgugaacgccggcaaguccaccaccaacaucaugaucaccacgaucaucaucgugaucaucgucauccuccugagccugaucgccguggggcuccugcuguacugcaaggcccgguccaccccggugacccugagcaaggaccagcucuccggcaucaacaacaucgccuucagcaacugaggacuaguaauaaggaaacuguaugaaugucugugggcaggaagugaagagauccuucuguaaagguuuuuggaauuaugucugcugaauaauaaacuuuuuugaaauaauaaaucugguagaaaaaugagaucuaaaaaaaaaaaaaaaaaaaaaaaaaaaaaaaaaaaaaaaaaaaaaaaaaaaaaaaaaaaaaaaaugcaucccccccccccccccccccccccccccccccaaaggcucuuuucagagccaccagaauu

SEQ ID NO: 5593 - RNA, 1970 nt, Artificial Sequence
  mRNA product Design g-2 comprising derived and/or modified sequence from HRSV(A2)__F_DSCav1_mut5 (opt2)
gggagaguccgcucagccagguugcagaagcggcuuagcguguguccuaaucuucucucugcguguagguaggccugugccgcaaacaagcuuaccauggagcuccucauccucaaggccaacgccaucaccaccauccucaccgccgucaccuucugcuucgccuccggccagaacaucaccgaggaguucuaccaguccaccugcuccgccgucuccaagggcuaccucuccgcccuccgcaccggcugguacaccuccgucaucaccaucgagcucuccaacaucaaggagaacaagugcaacggcaccgacgccaaggucaagcucaucaagcaggagcucgacaaguacaagaacgccgucaccgagcuccagcuccucaugcaguccacccccgccaccggcuccggcuccgccaucgccuccggcgucgccgucugcaagguccuccaccucgagggcgaggucaacaagaucaaguccgcccuccucuccaccaacaaggccgucgucucccucuccggcugcggcgucuccguccucaccuucaagguccucgaccucaagaacuacaucgacaagcagcuccuccccauccucaacaagcaguccugcuccaucuccaacaucgagaccgucaucgaguuccagcagaagaacaaccgccuccucgagaucacccgcgaguucuccgucaacgccggcgucaccacccccgucuccaccuacaugcucaccaacuccgagcuccucucccucaucaacgacaugcccaucaccaacgaccagaagaagcucauguccaacaacguccagaucguccgccagcaguccuacuccaucaugugcaucaucaaggaggagguccucgccuacgucguccagcucccccucuacggcgucaucgacacccccugcuggaagcuccacaccuccccccucugcaccaccaacaccaaggagggcuccaacaucugccucacccgcaccgaccgcggcugguacugcgacaacgccggcuccgucuccuucuucccccaggccgagaccugcaagguccaguccaaccgcgucuucugcgacaccaugaacucccgcacccuccccuccgaggucaaccucugcaacgucgacaucuucaaccccaaguacgacugcaagaucaugaccuccaagaccgacgucuccuccuccgucaucaccucccucggcgccaucgucuccugcuacggcaagaccaagugcaccgccuccaacaagugccgcggcaucaucaagaccuucuccaacggcugcgacuacgucuccaacaagggcgucgacaccgucuccgucggcaacacccucuacuacgucaacaagcaggagggcaagucccucuacgucaagggcgagcccaucaucaacuucuacgacccccucgucuuccccuccgacgaguucgacgccuccaucucccaggucaacgagaagaucaaccagucccucgccuucauccgcaaguccgacgagcuccuccacaacgucaacgccggcaaguccaccaccaacaucaugaucaccaccaucaucaucgucaucaucgucauccuccucucccucaucgccgucggccuccuccucuacugcaaggcccgcuccacccccgucacccucuccaaggaccagcucuccggcaucaacaacaucgccuucuccaacugaggacuaguaauaaggaaacuguaugaaugucugugggcaggaagugaagagauccuucuguaaagguuuuuggaauuaugucugcugaauaauaaacuuuuuugaaauaauaaaucugguagaaaaaugagaucuaaaaaaaaaaaaaaaaaaaaaaaaaaaaaaaaaaaaaaaaaaaaaaaaaaaaaaaaaaaaaaaaugcaucccccccccccccccccccccccccccccccaaaggcucuuuucagagccaccagaauu

SEQ ID NO: 5594 - RNA, 1970 nt, Artificial Sequence
  mRNA product Design g-2 comprising derived and/or modified sequence from HRSV(A2)__F_DSCav1_mut5 (opt3)
gggagaguccgcucagccagguugcagaagcggcuuagcguguguccuaaucuucucucugcguguagguaggccugugccgcaaacaagcuuaccauggagcugcucauccuuaaggccaacgcuauuaccacaauacugacugcagugacguucugcuuugccagcggccagaauaucaccgaagaguucuaccaauccacauguucugcggucucaaaaggguauuugagugcuuuaagaacuggaugguacaccagcguuauuacaaucgaacuguccaacauuaaggagaauaaaugcaacgguaccgacgccaaggugaaacuaaucaagcaggaacucgauaaguauaaaaaugcaguaacugagcugcagcuucugaugcagucuacacccgccaccggcucggggucagcuauagcaagcggaguggccgucuguaagguguugcaccucgagggcgaaguuaacaaaaucaagagugcucugcuguccacgaauaaagccguggucucucucagcgguugcgggguguccguauuaacuuuuaagguucuggaccuuaagaacuacauugauaaacaauugcugccuauccuaaauaagcagucauguaguauuagcaacaucgagaccgugauagaguuccagcagaaaaauaacaggcuccuggaaauuacacgggaguuuucugucaaugcgggagugacuaccccaguguccacauauaugcuuaccaacucagaacuguugagccucaucaaugacaugccgauuacgaacgaucaaaagaaacugaugaguaacaauguccagaucguucgccagcagucuuacuccaucaugugcauuauaaaggaggaaguguuagcauauguagugcaacugccccucuacggcgucaucgacacuccuuguuggaaacuucauacaagcccacugugcaccacuaacacaaaggagggcucgaauauuuguuugacccgaacggaucgugggugguacugcgacaacgccggaucuguguccuucuuuccccaggcugaaaccuguaagguucagucaaauagaguguucugcgauacaaugaacaguagaacucugccuagcgaggucaaucucugcaacguggacaucuuuaauccaaaauaugauuguaagauaaugaccuccaaaacagacguaucuagcucaguuauuaccagucugggugccaucguguccugcuacggcaagacuaaauguacagcaagcaacaagugcagggggaucauuaagaccuucucuaauggaugugauuaugucucaaacaaaggcguggacacugucaguguggguaauacgcuuuacuauguuaacaagcaagaggggaaaagccuguacgugaagggagaacccaucauuaauuuuuaugacccuuugguauucccauccgaugaguuugacgcuucuauaucgcaggucaacgagaaaaucaaccagagccucgccuucauucggaaguccgaugaacuguuacacaaugugaacgcgggcaagucaacaaccaauaucaugaucacuaccauuauaaucguuauuaucgugauucugcuaagucucaucgccgucggccugcuuuuguacugcaaagcacgcucuacaccggugacccugagcaaggaccagcucuccgggauaaacaauaucgcuuucucaaacugaggacuaguaauaaggaaacuguaugaaugucugugggcaggaagugaagagauccuucuguaaagguuuuuggaauuaugucugcugaauaauaaacuuuuuugaaauaauaaaucugguagaaaaaugagaucuaaaaaaaaaaaaaaaaaaaaaaaaaaaaaaaaaaaaaaaaaaaaaaaaaaaaaaaaaaaaaaaaugcaucccccccccccccccccccccccccccccccaaaggcucuuuucagagccaccagaauu

SEQ ID NO: 5595 - RNA, 1970 nt, Artificial Sequence
  mRNA product Design g-2 comprising derived and/or modified sequence from HRSV(A2)__F_DSCav1_mut5 (opt4)
gggagaguccgcucagccagguugcagaagcggcuuagcguguguccuaaucuucucucugcguguagguaggccugugccgcaaacaagcuuaccauggagcugcugauccugaaggccaacgccaucaccaccauccugaccgccgugaccuucugcuucgccagcggccagaacaucaccgaggaguucuaccagagcaccugcagcgccgugagcaagggcuaccugagcgcccugagaaccggcugguacaccagcgugaucaccaucgagcugagcaacaucaaggagaacaagugcaacggcaccgacgccaaggugaagcugaucaagcaggagcuggacaaguacaagaacgccgugaccgagcugcagcugcugaugcagagcacccccgccaccggcagcggcagcgccaucgccagcggcguggccgugugcaaggugcugcaccuggagggcgaggugaacaagaucaagagcgcccugcugagcaccaacaaggccguggugagccugagcggcugcggcgugagcgugcugaccuucaaggugcuggaccugaagaacuacaucgacaagcagcugcugcccauccugaacaagcagagcugcagcaucagcaacaucgagaccgugaucgaguuccagcagaagaacaacagacugcuggagaucaccagagaguucagcgugaacgccggcgugaccacccccgugagcaccuacaugcugaccaacagcgagcugcugagccugaucaacgacaugcccaucaccaacgaccagaagaagcugaugagcaacaacgugcagaucgugagacagcagagcuacagcaucaugugcaucaucaaggaggaggugcuggccuacguggugcagcugccccuguacggcgugaucgacacccccugcuggaagcugcacaccagcccccugugcaccaccaacaccaaggagggcagcaacaucugccugaccagaaccgacagaggcugguacugcgacaacgccggcagcgugagcuucuucccccaggccgagaccugcaaggugcagagcaacagaguguucugcgacaccaugaacagcagaacccugcccagcgaggugaaccugugcaacguggacaucuucaaccccaaguacgacugcaagaucaugaccagcaagaccgacgugagcagcagcgugaucaccagccugggcgccaucgugagcugcuacggcaagaccaagugcaccgccagcaacaagugcagaggcaucaucaagaccuucagcaacggcugcgacuacgugagcaacaagggcguggacaccgugagcgugggcaacacccuguacuacgugaacaagcaggagggcaagagccuguacgugaagggcgagcccaucaucaacuucuacgacccccugguguuccccagcgacgaguucgacgccagcaucagccaggugaacgagaagaucaaccagagccuggccuucaucagaaagagcgacgagcugcugcacaacgugaacgccggcaagagcaccaccaacaucaugaucaccaccaucaucaucgugaucaucgugauccugcugagccugaucgccgugggccugcugcuguacugcaaggccagaagcacccccgugacccugagcaaggaccagcugagcggcaucaacaacaucgccuucagcaacugaggacuaguaauaaggaaacuguaugaaugucugugggcaggaagugaagagauccuucuguaaagguuuuuggaauuaugucugcugaauaauaaacuuuuuugaaauaauaaaucugguagaaaaaugagaucuaaaaaaaaaaaaaaaaaaaaaaaaaaaaaaaaaaaaaaaaaaaaaaaaaaaaaaaaaaaaaaaaugcaucccccccccccccccccccccccccccccccaaaggcucuuuucagagccaccagaauu

SEQ ID NO: 5596 - RNA, 1970 nt, Artificial Sequence
  mRNA product Design g-2 comprising derived and/or modified sequence from HRSV(A2)__F_DSCav1_mut5 (opt5)
gggagaguccgcucagccagguugcagaagcggcuuagcguguguccuaaucuucucucugcguguagguaggccugugccgcaaacaagcuuaccauggagcugcucauccugaaggccaacgcuauuaccacaauccuuacggccgugaccuucugcuuugcgagcggccagaauauuacagaagaguucuaccaauccaccuguucugcugucagcaaaggguaucuguccgcccucagaacaggaugguacaccucuguuaucacaauugaacugagcaacaucaaggagaauaaaugcaacggcaccgacgccaaggugaaacuuaucaagcaggaacuggauaaguauaaaaaugcugugacggagcuccagcugcugaugcaguccacccccgccacagggucuggaagcgcuauugccuccggcgucgcgguguguaagguucuccaccuggagggggaagugaacaaaaucaagagcgcccuucugucuaccaauaaagcugucgugucccucagcggaugcggcguuucugugcugacauuuaagguccuugaccugaagaacuacauugauaaacaacuccugccuauccugaauaagcaguccuguagcauuucuaacaucgagaccgugauugaguuccagcagaaaaauaaccggcuccuggaaaucacgcgcgaguuuuccgugaaugccggcgucacaaccccgguuagcacauauaugcuuaccaacuccgaacugcucucucugaucaaugacaugcccauuaccaacgaucaaaagaaacuuaugagcaacaaugugcagaucgugagacagcaguccuacagcauuaugugcaucauuaaggaggaaguccuggcuuaugugguucaacucccucuguacggggugaucgacacacccuguuggaaacugcauacgucuccucucugcaccacaaacaccaaggagggauccaauaucugucugacacggaccgaucgcggcugguacugcgacaacgccgggagcgucucuuucuuuccccaggcggaaacguguaaggugcagagcaauagaguuuucugcgauacaaugaacuccagaacccugccuucugaggugaaucucugcaacgucgacauuuuuaauccgaaauaugauuguaagaucaugaccagcaaaacagacguguccagcucugucauuaccucccugggagccaucgugagcugcuacggcaagacaaaauguacggcuucuaacaagugccgggggauuaucaagaccuucuccaauggaugugauuauguuagcaacaaaggcguggacacagucuccgugggcaauacccuuuacuauguuaacaagcaagaggggaaaucucuguacgugaagggagaacccaucauuaauuuuuaugacccucucgucuuccccagcgaugaguuugacgccuccaucucucaggugaacgagaaaauuaaccagagccuggcuuucauccgcaaguccgaugaacugcuccacaaugugaacgccggcaagagcacaaccaauauuaugaucacgaccauuaucaucguuauuaucgucauucugcuuucucugaucgccguggggcuccugcuguacugcaaagcuagauccacaccugugacccuuagcaaggaccagcucucuggaauuaacaauaucgcguucuccaacugaggacuaguaauaaggaaacuguaugaaugucugugggcaggaagugaagagauccuucuguaaagguuuuuggaauuaugucugcugaauaauaaacuuuuuugaaauaauaaaucugguagaaaaaugagaucuaaaaaaaaaaaaaaaaaaaaaaaaaaaaaaaaaaaaaaaaaaaaaaaaaaaaaaaaaaaaaaaaugcaucccccccccccccccccccccccccccccccaaaggcucuuuucagagccaccagaauu

SEQ ID NO: 5597 - RNA, 1970 nt, Artificial Sequence
  mRNA product Design g-2 comprising derived and/or modified sequence from HRSV(A2)__F_DSCav1_mut5 (opt6)
gggagaguccgcucagccagguugcagaagcggcuuagcguguguccuaaucuucucucugcguguagguaggccugugccgcaaacaagcuuaccauggaacuauuaauacuuaaagccaacgcaauaacaacaauucucacugcugucaccuucugcuucgccucaggccaaaacauaacggaagaauuuuaccaaucaacaugcucugcaguauccaaaggcuaccuaucugcucuaagaacagguugguauacaucaguaauaaccauagaacuaucaaacauaaaagaaaauaaaugcaacggaacagacgcaaaaguuaaacucauaaaacaagaacuagacaaauauaaaaacgcaguuaccgaacuacaacuacuuaugcaauccacucccgccacuggaucaggaucagcaauagcaucaggagucgcaguauguaaagucuuacaccucgaaggcgaagucaauaaaaucaaauccgcauuacuauccacaaacaaagcagucguaucccuaagcggaugcggaguaucaguacuaacauuuaaaguacuagaccuaaaaaauuacaucgauaaacaacuauuaccuauauuaaacaaacaauccugcuccauuucaaauaucgaaaccguaauagaauuucaacaaaaaaacaacagauuacuagaaauaacaagagaauuuuccguaaaugcuggcguaacaacaccaguauccacauacaugcucacaaacuccgaacuacuaucacuaauaaaugacaugcccauaacaaacgaucaaaaaaaacuaaugucaaauaauguacaaauaguaagacaacaaagcuacuccaucauguguauaauaaaagaagaaguacuagcauacguaguucaacuaccacuuuacggcguaaucgacaccccuugcuggaaacuacacaccuccccucuaugcaccacaaacacaaaagaagguuccaacauaugccuuaccagaacagacagaggcugguauugcgacaacgcaggaucaguuucauuuuuuccacaagcugaaacaugcaaaguacaaucaaacagagucuucugcgacacaaugaacucaagaacucuacccucagaaguaaaccuauguaacguagacauuuucaaccccaaauacgacugcaaaauuaugacaucaaaaacagacguuucaucaucaguuaucaccucauuaggagcaauaguaagcugcuacggaaaaacaaaaugcaccgccucaaauaaaugcagaggaauaauaaaaacuuucuccaacggaugcgacuacguuucaaacaaagguguagacacuguaucaguaggaaacacacuauauuacguaaauaaacaagaaggaaaaucacuuuaugucaaaggagaaccaauaaucaauuucuacgacccauuaguauucccaucagacgaauuugaugcuucaauaucacaaguaaacgaaaaaauaaaucaaucacucgcauuuauacgaaaaucagacgaacuacuacacaauguaaacgcaggcaaaucaacaacaaacauaaugauaacaacaauaaucauuguaauaauaguaauacuucuaucucuaauagcaguaggauuacuccucuacugcaaagcaagaucaaccccuguaacacuaucaaaagaccaacuuucagguauaaauaauauagcuuuuuccaauuaaggacuaguaauaaggaaacuguaugaaugucugugggcaggaagugaagagauccuucuguaaagguuuuuggaauuaugucugcugaauaauaaacuuuuuugaaauaauaaaucugguagaaaaaugagaucuaaaaaaaaaaaaaaaaaaaaaaaaaaaaaaaaaaaaaaaaaaaaaaaaaaaaaaaaaaaaaaaaugcaucccccccccccccccccccccccccccccccaaaggcucuuuucagagccaccagaauu

SEQ ID NO: 5598 - RNA, 1970 nt, Artificial Sequence
  mRNA product Design g-2 comprising derived and/or modified sequence from HRSV(A2)__F_DSCav1_mut5 (opt11)
gggagaguccgcucagccagguugcagaagcggcuuagcguguguccuaaucuucucucugcguguagguaggccugugccgcaaacaagcuuaccauggagcuccuaauccucaaagccaacgcgaucacuacaauccucacagccgucaccuucugcuucgccuccggccaaaacaucaccgaggaguucuaccaaucaaccugcuccgccguaucaaaaggauaccuaagcgcccuacggaccggcugguacacaucugucaucaccaucgaacuaucaaacaucaaagaaaacaaaugcaacggaaccgacgcaaaagucaaacugauuaaacaagaacuagacaaauacaaaaacgcagucaccgaacugcaauuacucaugcaaagcacaccggccaccggcucaggcagcgccaucgccuccggcgucgccgucugcaaaguucuccaccucgagggcgaagucaacaaaauaaaaucugcccuccucuccaccaacaaagccgucgucucccucagcggcugcggagucuccguccucaccuucaaaguucucgaucucaagaacuauauugacaaacaacuucuacccauacucaacaaacaaagcugcagcauauccaacaucgaaaccgucaucgaguuccaacaaaagaacaaccgccuccucgaaauaacccgcgaguucagcguuaacgccggagucacuaccccugucuccaccuacaugcucaccaacuccgaacuccuaucacuaaucaacgacaugcccauaaccaacgaccagaagaaacucauguccaacaacguccaaauuguccgacaacaaagcuacuccauaaugugcauaauaaaagaggaaguccucgccuacgucguacaacugccccuuuauggcguaaucgacacacccugcuggaaacuccacacgucaccccucugcaccaccaacacaaaagaaggcucgaacaucugccuaacacggacugaccgcggcugguacugcgacaacgccggcuccgucagcuucuucccacaagccgaaaccugcaaaguacaauccaaccgaguauucugcgacaccaugaacuccagaacccuccccucagaggucaaccugugcaacguagacaucuucaaccccaaauacgacugcaaaauaaugaccucaaaaacagacgucuccucuuccguaaucaccagccucggagccaucgucagcugcuacggcaaaaccaaaugcaccgccucaaacaaaugccgcggcaucaucaaaacauucucaaacggcugcgacuacgucuccaacaaaggcgucgacacaguaagcguaggcaacacacuguacuacgucaacaaacaagagggaaaaucacucuacgucaaaggagaacccauaaucaacuucuacgacccccucguuuuccccagcgacgaguucgacgccagcauaucccaagucaacgagaaaauuaaccaaucccuagcauucauccgaaaaucugacgaacugcuccacaacgucaacgcgggaaaaucaacaaccaacauaaugauaaccacaaucauaauagucaucaucguaauccuccucagccuaaucgcugucggccuccuccucuacugcaaagcccguuccaccccagucacacuuuccaaggaccaacuaagcggaauaaacaacaucgcguucucaaacuaaggacuaguaauaaggaaacuguaugaaugucugugggcaggaagugaagagauccuucuguaaagguuuuuggaauuaugucugcugaauaauaaacuuuuuugaaauaauaaaucugguagaaaaaugagaucuaaaaaaaaaaaaaaaaaaaaaaaaaaaaaaaaaaaaaaaaaaaaaaaaaaaaaaaaaaaaaaaaugcaucccccccccccccccccccccccccccccccaaaggcucuuuucagagccaccagaauu

SEQ ID NO: 5599 - RNA, 2202 nt, Artificial Sequence
  mRNA product Design g-3 comprising derived and/or modified sequence from HRSV(A2)__F_DSCav1_mut5 (opt1)
gggagaguccgcucagccagguugcagaagcggcuuagcguguguccuaaucuucucucugcguguagguaggccugugccgcaaacaagcuuaccauggagcugcucauccugaaggccaacgccaucaccaccauccugacggcggugaccuucugcuucgccagcggccagaacaucaccgaggaguucuaccaguccacgugcagcgccgucuccaagggguaccucagcgcccugcggaccggcugguacaccuccgugaucaccaucgagcugagcaacaucaaggagaacaagugcaacgggaccgacgccaaggugaagcucaucaagcaggagcuggacaaguacaagaacgcggucacggagcugcagcuccugaugcaguccaccccggcaaccggcuccggcuccgccaucgcgagcggcgucgccgugugcaaggugcugcaccucgagggggaggucaacaagaucaagagcgcccugcuguccaccaacaaggccguggugagccucuccggcugcggcgucagcgugcugaccuucaaggugcuggaccucaagaacuacaucgacaagcagcugcugcccauccugaacaagcagagcugcuccaucagcaacaucgagacggugaucgaguuccagcagaagaacaaccggcuccuggagaucacccgcgaguucagcgugaacgccggggucaccacccccguguccacguacaugcugaccaacagcgagcuccugucccugaucaacgacaugccgaucaccaacgaccagaagaagcucaugagcaacaacgugcagaucguccggcagcaguccuacagcaucaugugcaucaucaaggaggaggugcuggcguacgugguccagcugccccucuacggcgugaucgacacccccugcuggaagcugcacacgagcccccugugcaccaccaacaccaaggagggguccaacaucugccucacgcgcaccgaccggggcugguacugcgacaacgccggcagcgucuccuucuucccgcaggccgagaccugcaaggugcagagcaaccgcguguucugcgacaccaugaacucccggacgcugcccagcgagguaaaccucugcaacgucgacaucuucaaccccaaguacgacugcaagaucaugaccuccaagaccgacgugagcuccagcgugaucaccucccugggggccaucgucagcugcuacggcaagacgaagugcaccgccagcaacaagugccgggggaucaucaagaccuucuccaacggcugcgacuacgugagcaacaagggcguggacaccguguccgucgggaacacccuguacuacgugaacaagcaggagggcaagagccucuacgugaagggggagcccaucaucaacuucuacgacccgcuggucuuccccuccgacgaguucgacgcgagcaucucccaggugaacgagaagaucaaccagagccuggccuucauccgcaaguccgacgagcugcuccacaacgugaacgccggcaagagcacgaccaacaucaugaucaccaccaucaucaucgucaucaucgugauccugcugucccucaucgccguggggcugcugcucuacugcaaggcccggagcacgcccgucacccuguccaaggaccagcugagcggcaucaacaacaucgcguucuccaacugaggacuagugaagggaacacccaaauuuaauucagccuuaagcacaauuaauuaagagugaaacguaauuguacaagcaguuggucacccaccauagggcaugaucaacaccgcaaccuuuccuuuuucccccagugauucugaaaaaccccucuucccuucagcuugcuuagauguuccaaauuuaguaagcuuaaggcggccuacagaagaaaaagaaaaaaaaggccacaaaaguucccucucacuuucaguaaauaaaauaaaagcagcaacagaaauaaagaaauaaaugaaauucaaaaugaaauaaauauuguguugugcagcauuaaaaaaucaauaaaaauuaaaaaugagcaagaucuaaaaaaaaaaaaaaaaaaaaaaaaaaaaaaaaaaaaaaaaaaaaaaaaaaaaaaaaaaaaaaaaugcaucccccccccccccccccccccccccccccccaaaggcucuuuucagagccaccagaauu

SEQ ID NO: 5600 - RNA, 2202 nt, Artificial Sequence
  mRNA product Design g-3 comprising derived and/or modified sequence from HRSV(A2)__F_DSCav1_mut5 (opt1)
gggagaguccgcucagccagguugcagaagcggcuuagcguguguccuaaucuucucucugcguguagguaggccugugccgcaaacaagcuuaccauggagcugcucauccugaaggccaacgccaucaccaccauccugacggcggugaccuucugcuucgccagcggccagaacaucaccgaggaguucuaccaguccacgugcagcgccgucuccaagggguaccucagcgcccugcgcaccggcugguacaccuccgugaucaccaucgagcugagcaacaucaaggagaacaagugcaacgggaccgacgccaaggugaagcucaucaagcaggagcuggacaaguacaagaacgcggucacggagcugcagcuccugaugcaguccacccccgccaccggcagcggguccgccaucgccagcggcguggcggugugcaagguccugcaccucgagggcgaggugaacaagaucaaguccgcccugcugagcaccaacaaggccguggucucccucagcgggugcggcguguccgugcugacguucaagguccuggaccucaagaacuacaucgacaagcagcugcugccgauccucaacaagcagagcugcuccaucagcaacaucgagaccgugaucgaguuccagcagaagaacaaccggcugcuggagaucacccgcgaguucuccgugaacgccggggucaccacgcccgugagcaccuacaugcucaccaacagcgagcugcugucccucaucaacgacaugcccaucaccaacgaccagaagaagcugaugagcaacaacgugcagaucguccggcagcaguccuacagcaucaugugcaucaucaaggaggaggugcuggccuacgugguccagcucccccuguacggcgugaucgacacgccgugcuggaagcugcacaccagcccccucugcaccaccaacacgaaggagggguccaacaucugccugacccgcaccgaccggggcugguacugcgacaacgcgggcuccgugagcuucuucccccaggccgagaccugcaagguccaguccaaccgcguguucugcgacacgaugaacagccggacccuccccuccgaggucaaccugugcaacguggacaucuucaacccgaaguacgacugcaagaucaugaccagcaagaccgacguguccagcuccgucaucacgagccugggggccaucguguccugcuacggcaagaccaagugcaccgccagcaacaagugccgggggaucaucaagaccuucuccaacggcugcgacuacgugagcaacaagggcgucgacacggugagcguggggaacacccucuacuacgucaacaagcaggagggcaagucccuguacgugaagggggagcccaucaucaacuucuacgacccccugguguuccccagcgacgaguucgacgccuccaucagccaggucaacgagaagaucaaccagucccucgcguucauccgcaagagcgacgagcugcugcacaacgugaacgccggcaaguccaccaccaacaucaugaucaccacgaucaucaucgugaucaucgucauccuccugagccugaucgccguggggcuccugcuguacugcaaggcccgguccaccccggugacccugagcaaggaccagcucuccggcaucaacaacaucgccuucagcaacugaggacuagugaagggaacacccaaauuuaauucagccuuaagcacaauuaauuaagagugaaacguaauuguacaagcaguuggucacccaccauagggcaugaucaacaccgcaaccuuuccuuuuucccccagugauucugaaaaaccccucuucccuucagcuugcuuagauguuccaaauuuaguaagcuuaaggcggccuacagaagaaaaagaaaaaaaaggccacaaaaguucccucucacuuucaguaaauaaaauaaaagcagcaacagaaauaaagaaauaaaugaaauucaaaaugaaauaaauauuguguugugcagcauuaaaaaaucaauaaaaauuaaaaaugagcaagaucuaaaaaaaaaaaaaaaaaaaaaaaaaaaaaaaaaaaaaaaaaaaaaaaaaaaaaaaaaaaaaaaaugcaucccccccccccccccccccccccccccccccaaaggcucuuuucagagccaccagaauu

SEQ ID NO: 5601 - RNA, 2202 nt, Artificial Sequence
  mRNA product Design g-3 comprising derived and/or modified sequence from HRSV(A2)__F_DSCav1_mut5 (opt2)
gggagaguccgcucagccagguugcagaagcggcuuagcguguguccuaaucuucucucugcguguagguaggccugugccgcaaacaagcuuaccauggagcuccucauccucaaggccaacgccaucaccaccauccucaccgccgucaccuucugcuucgccuccggccagaacaucaccgaggaguucuaccaguccaccugcuccgccgucuccaagggcuaccucuccgcccuccgcaccggcugguacaccuccgucaucaccaucgagcucuccaacaucaaggagaacaagugcaacggcaccgacgccaaggucaagcucaucaagcaggagcucgacaaguacaagaacgccgucaccgagcuccagcuccucaugcaguccacccccgccaccggcuccggcuccgccaucgccuccggcgucgccgucugcaagguccuccaccucgagggcgaggucaacaagaucaaguccgcccuccucuccaccaacaaggccgucgucucccucuccggcugcggcgucuccguccucaccuucaagguccucgaccucaagaacuacaucgacaagcagcuccuccccauccucaacaagcaguccugcuccaucuccaacaucgagaccgucaucgaguuccagcagaagaacaaccgccuccucgagaucacccgcgaguucuccgucaacgccggcgucaccacccccgucuccaccuacaugcucaccaacuccgagcuccucucccucaucaacgacaugcccaucaccaacgaccagaagaagcucauguccaacaacguccagaucguccgccagcaguccuacuccaucaugugcaucaucaaggaggagguccucgccuacgucguccagcucccccucuacggcgucaucgacacccccugcuggaagcuccacaccuccccccucugcaccaccaacaccaaggagggcuccaacaucugccucacccgcaccgaccgcggcugguacugcgacaacgccggcuccgucuccuucuucccccaggccgagaccugcaagguccaguccaaccgcgucuucugcgacaccaugaacucccgcacccuccccuccgaggucaaccucugcaacgucgacaucuucaaccccaaguacgacugcaagaucaugaccuccaagaccgacgucuccuccuccgucaucaccucccucggcgccaucgucuccugcuacggcaagaccaagugcaccgccuccaacaagugccgcggcaucaucaagaccuucuccaacggcugcgacuacgucuccaacaagggcgucgacaccgucuccgucggcaacacccucuacuacgucaacaagcaggagggcaagucccucuacgucaagggcgagcccaucaucaacuucuacgacccccucgucuuccccuccgacgaguucgacgccuccaucucccaggucaacgagaagaucaaccagucccucgccuucauccgcaaguccgacgagcuccuccacaacgucaacgccggcaaguccaccaccaacaucaugaucaccaccaucaucaucgucaucaucgucauccuccucucccucaucgccgucggccuccuccucuacugcaaggcccgcuccacccccgucacccucuccaaggaccagcucuccggcaucaacaacaucgccuucuccaacugaggacuagugaagggaacacccaaauuuaauucagccuuaagcacaauuaauuaagagugaaacguaauuguacaagcaguuggucacccaccauagggcaugaucaacaccgcaaccuuuccuuuuucccccagugauucugaaaaaccccucuucccuucagcuugcuuagauguuccaaauuuaguaagcuuaaggcggccuacagaagaaaaagaaaaaaaaggccacaaaaguucccucucacuuucaguaaauaaaauaaaagcagcaacagaaauaaagaaauaaaugaaauucaaaaugaaauaaauauuguguugugcagcauuaaaaaaucaauaaaaauuaaaaaugagcaagaucuaaaaaaaaaaaaaaaaaaaaaaaaaaaaaaaaaaaaaaaaaaaaaaaaaaaaaaaaaaaaaaaaugcaucccccccccccccccccccccccccccccccaaaggcucuuuucagagccaccagaauu

SEQ ID NO: 5602 - RNA, 2202 nt, Artificial Sequence
  mRNA product Design g-3 comprising derived and/or modified sequence from HRSV(A2)__F_DSCav1_mut5 (opt3)
gggagaguccgcucagccagguugcagaagcggcuuagcguguguccuaaucuucucucugcguguagguaggccugugccgcaaacaagcuuaccauggagcugcucauccuuaaggccaacgcuauuaccacaauacugacugcagugacguucugcuuugccagcggccagaauaucaccgaagaguucuaccaauccacauguucugcggucucaaaaggguauuugagugcuuuaagaacuggaugguacaccagcguuauuacaaucgaacuguccaacauuaaggagaauaaaugcaacgguaccgacgccaaggugaaacuaaucaagcaggaacucgauaaguauaaaaaugcaguaacugagcugcagcuucugaugcagucuacacccgccaccggcucggggucagcuauagcaagcggaguggccgucuguaagguguugcaccucgagggcgaaguuaacaaaaucaagagugcucugcuguccacgaauaaagccguggucucucucagcgguugcgggguguccguauuaacuuuuaagguucuggaccuuaagaacuacauugauaaacaauugcugccuauccuaaauaagcagucauguaguauuagcaacaucgagaccgugauagaguuccagcagaaaaauaacaggcuccuggaaauuacacgggaguuuucugucaaugcgggagugacuaccccaguguccacauauaugcuuaccaacucagaacuguugagccucaucaaugacaugccgauuacgaacgaucaaaagaaacugaugaguaacaauguccagaucguucgccagcagucuuacuccaucaugugcauuauaaaggaggaaguguuagcauauguagugcaacugccccucuacggcgucaucgacacuccuuguuggaaacuucauacaagcccacugugcaccacuaacacaaaggagggcucgaauauuuguuugacccgaacggaucgugggugguacugcgacaacgccggaucuguguccuucuuuccccaggcugaaaccuguaagguucagucaaauagaguguucugcgauacaaugaacaguagaacucugccuagcgaggucaaucucugcaacguggacaucuuuaauccaaaauaugauuguaagauaaugaccuccaaaacagacguaucuagcucaguuauuaccagucugggugccaucguguccugcuacggcaagacuaaauguacagcaagcaacaagugcagggggaucauuaagaccuucucuaauggaugugauuaugucucaaacaaaggcguggacacugucaguguggguaauacgcuuuacuauguuaacaagcaagaggggaaaagccuguacgugaagggagaacccaucauuaauuuuuaugacccuuugguauucccauccgaugaguuugacgcuucuauaucgcaggucaacgagaaaaucaaccagagccucgccuucauucggaaguccgaugaacuguuacacaaugugaacgcgggcaagucaacaaccaauaucaugaucacuaccauuauaaucguuauuaucgugauucugcuaagucucaucgccgucggccugcuuuuguacugcaaagcacgcucuacaccggugacccugagcaaggaccagcucuccgggauaaacaauaucgcuuucucaaacugaggacuagugaagggaacacccaaauuuaauucagccuuaagcacaauuaauuaagagugaaacguaauuguacaagcaguuggucacccaccauagggcaugaucaacaccgcaaccuuuccuuuuucccccagugauucugaaaaaccccucuucccuucagcuugcuuagauguuccaaauuuaguaagcuuaaggcggccuacagaagaaaaagaaaaaaaaggccacaaaaguucccucucacuuucaguaaauaaaauaaaagcagcaacagaaauaaagaaauaaaugaaauucaaaaugaaauaaauauuguguugugcagcauuaaaaaaucaauaaaaauuaaaaaugagcaagaucuaaaaaaaaaaaaaaaaaaaaaaaaaaaaaaaaaaaaaaaaaaaaaaaaaaaaaaaaaaaaaaaaugcaucccccccccccccccccccccccccccccccaaaggcucuuuucagagccaccagaauu

SEQ ID NO: 5603 - RNA, 2202 nt, Artificial Sequence
  mRNA product Design g-3 comprising derived and/or modified sequence from HRSV(A2)__F_DSCav1_mut5 (opt4)
gggagaguccgcucagccagguugcagaagcggcuuagcguguguccuaaucuucucucugcguguagguaggccugugccgcaaacaagcuuaccauggagcugcugauccugaaggccaacgccaucaccaccauccugaccgccgugaccuucugcuucgccagcggccagaacaucaccgaggaguucuaccagagcaccugcagcgccgugagcaagggcuaccugagcgcccugagaaccggcugguacaccagcgugaucaccaucgagcugagcaacaucaaggagaacaagugcaacggcaccgacgccaaggugaagcugaucaagcaggagcuggacaaguacaagaacgccgugaccgagcugcagcugcugaugcagagcacccccgccaccggcagcggcagcgccaucgccagcggcguggccgugugcaaggugcugcaccuggagggcgaggugaacaagaucaagagcgcccugcugagcaccaacaaggccguggugagccugagcggcugcggcgugagcgugcugaccuucaaggugcuggaccugaagaacuacaucgacaagcagcugcugcccauccugaacaagcagagcugcagcaucagcaacaucgagaccgugaucgaguuccagcagaagaacaacagacugcuggagaucaccagagaguucagcgugaacgccggcgugaccacccccgugagcaccuacaugcugaccaacagcgagcugcugagccugaucaacgacaugcccaucaccaacgaccagaagaagcugaugagcaacaacgugcagaucgugagacagcagagcuacagcaucaugugcaucaucaaggaggaggugcuggccuacguggugcagcugccccuguacggcgugaucgacacccccugcuggaagcugcacaccagcccccugugcaccaccaacaccaaggagggcagcaacaucugccugaccagaaccgacagaggcugguacugcgacaacgccggcagcgugagcuucuucccccaggccgagaccugcaaggugcagagcaacagaguguucugcgacaccaugaacagcagaacccugcccagcgaggugaaccugugcaacguggacaucuucaaccccaaguacgacugcaagaucaugaccagcaagaccgacgugagcagcagcgugaucaccagccugggcgccaucgugagcugcuacggcaagaccaagugcaccgccagcaacaagugcagaggcaucaucaagaccuucagcaacggcugcgacuacgugagcaacaagggcguggacaccgugagcgugggcaacacccuguacuacgugaacaagcaggagggcaagagccuguacgugaagggcgagcccaucaucaacuucuacgacccccugguguuccccagcgacgaguucgacgccagcaucagccaggugaacgagaagaucaaccagagccuggccuucaucagaaagagcgacgagcugcugcacaacgugaacgccggcaagagcaccaccaacaucaugaucaccaccaucaucaucgugaucaucgugauccugcugagccugaucgccgugggccugcugcuguacugcaaggccagaagcacccccgugacccugagcaaggaccagcugagcggcaucaacaacaucgccuucagcaacugaggacuagugaagggaacacccaaauuuaauucagccuuaagcacaauuaauuaagagugaaacguaauuguacaagcaguuggucacccaccauagggcaugaucaacaccgcaaccuuuccuuuuucccccagugauucugaaaaaccccucuucccuucagcuugcuuagauguuccaaauuuaguaagcuuaaggcggccuacagaagaaaaagaaaaaaaaggccacaaaaguucccucucacuuucaguaaauaaaauaaaagcagcaacagaaauaaagaaauaaaugaaauucaaaaugaaauaaauauuguguugugcagcauuaaaaaaucaauaaaaauuaaaaaugagcaagaucuaaaaaaaaaaaaaaaaaaaaaaaaaaaaaaaaaaaaaaaaaaaaaaaaaaaaaaaaaaaaaaaaugcaucccccccccccccccccccccccccccccccaaaggcucuuuucagagccaccagaauu

SEQ ID NO: 5604 - RNA, 2202 nt, Artificial Sequence
  mRNA product Design g-3 comprising derived and/or modified sequence from HRSV(A2)__F_DSCav1_mut5 (opt5)
gggagaguccgcucagccagguugcagaagcggcuuagcguguguccuaaucuucucucugcguguagguaggccugugccgcaaacaagcuuaccauggagcugcucauccugaaggccaacgcuauuaccacaauccuuacggccgugaccuucugcuuugcgagcggccagaauauuacagaagaguucuaccaauccaccuguucugcugucagcaaaggguaucuguccgcccucagaacaggaugguacaccucuguuaucacaauugaacugagcaacaucaaggagaauaaaugcaacggcaccgacgccaaggugaaacuuaucaagcaggaacuggauaaguauaaaaaugcugugacggagcuccagcugcugaugcaguccacccccgccacagggucuggaagcgcuauugccuccggcgucgcgguguguaagguucuccaccuggagggggaagugaacaaaaucaagagcgcccuucugucuaccaauaaagcugucgugucccucagcggaugcggcguuucugugcugacauuuaagguccuugaccugaagaacuacauugauaaacaacuccugccuauccugaauaagcaguccuguagcauuucuaacaucgagaccgugauugaguuccagcagaaaaauaaccggcuccuggaaaucacgcgcgaguuuuccgugaaugccggcgucacaaccccgguuagcacauauaugcuuaccaacuccgaacugcucucucugaucaaugacaugcccauuaccaacgaucaaaagaaacuuaugagcaacaaugugcagaucgugagacagcaguccuacagcauuaugugcaucauuaaggaggaaguccuggcuuaugugguucaacucccucuguacggggugaucgacacacccuguuggaaacugcauacgucuccucucugcaccacaaacaccaaggagggauccaauaucugucugacacggaccgaucgcggcugguacugcgacaacgccgggagcgucucuuucuuuccccaggcggaaacguguaaggugcagagcaauagaguuuucugcgauacaaugaacuccagaacccugccuucugaggugaaucucugcaacgucgacauuuuuaauccgaaauaugauuguaagaucaugaccagcaaaacagacguguccagcucugucauuaccucccugggagccaucgugagcugcuacggcaagacaaaauguacggcuucuaacaagugccgggggauuaucaagaccuucuccaauggaugugauuauguuagcaacaaaggcguggacacagucuccgugggcaauacccuuuacuauguuaacaagcaagaggggaaaucucuguacgugaagggagaacccaucauuaauuuuuaugacccucucgucuuccccagcgaugaguuugacgccuccaucucucaggugaacgagaaaauuaaccagagccuggcuuucauccgcaaguccgaugaacugcuccacaaugugaacgccggcaagagcacaaccaauauuaugaucacgaccauuaucaucguuauuaucgucauucugcuuucucugaucgccguggggcuccugcuguacugcaaagcuagauccacaccugugacccuuagcaaggaccagcucucuggaauuaacaauaucgcguucuccaacugaggacuagugaagggaacacccaaauuuaauucagccuuaagcacaauuaauuaagagugaaacguaauuguacaagcaguuggucacccaccauagggcaugaucaacaccgcaaccuuuccuuuuucccccagugauucugaaaaaccccucuucccuucagcuugcuuagauguuccaaauuuaguaagcuuaaggcggccuacagaagaaaaagaaaaaaaaggccacaaaaguucccucucacuuucaguaaauaaaauaaaagcagcaacagaaauaaagaaauaaaugaaauucaaaaugaaauaaauauuguguugugcagcauuaaaaaaucaauaaaaauuaaaaaugagcaagaucuaaaaaaaaaaaaaaaaaaaaaaaaaaaaaaaaaaaaaaaaaaaaaaaaaaaaaaaaaaaaaaaaugcaucccccccccccccccccccccccccccccccaaaggcucuuuucagagccaccagaauu

SEQ ID NO: 5605 - RNA, 2202 nt, Artificial Sequence
  mRNA product Design g-3 comprising derived and/or modified sequence from HRSV(A2)__F_DSCav1_mut5 (opt6)
gggagaguccgcucagccagguugcagaagcggcuuagcguguguccuaaucuucucucugcguguagguaggccugugccgcaaacaagcuuaccauggaacuauuaauacuuaaagccaacgcaauaacaacaauucucacugcugucaccuucugcuucgccucaggccaaaacauaacggaagaauuuuaccaaucaacaugcucugcaguauccaaaggcuaccuaucugcucuaagaacagguugguauacaucaguaauaaccauagaacuaucaaacauaaaagaaaauaaaugcaacggaacagacgcaaaaguuaaacucauaaaacaagaacuagacaaauauaaaaacgcaguuaccgaacuacaacuacuuaugcaauccacucccgccacuggaucaggaucagcaauagcaucaggagucgcaguauguaaagucuuacaccucgaaggcgaagucaauaaaaucaaauccgcauuacuauccacaaacaaagcagucguaucccuaagcggaugcggaguaucaguacuaacauuuaaaguacuagaccuaaaaaauuacaucgauaaacaacuauuaccuauauuaaacaaacaauccugcuccauuucaaauaucgaaaccguaauagaauuucaacaaaaaaacaacagauuacuagaaauaacaagagaauuuuccguaaaugcuggcguaacaacaccaguauccacauacaugcucacaaacuccgaacuacuaucacuaauaaaugacaugcccauaacaaacgaucaaaaaaaacuaaugucaaauaauguacaaauaguaagacaacaaagcuacuccaucauguguauaauaaaagaagaaguacuagcauacguaguucaacuaccacuuuacggcguaaucgacaccccuugcuggaaacuacacaccuccccucuaugcaccacaaacacaaaagaagguuccaacauaugccuuaccagaacagacagaggcugguauugcgacaacgcaggaucaguuucauuuuuuccacaagcugaaacaugcaaaguacaaucaaacagagucuucugcgacacaaugaacucaagaacucuacccucagaaguaaaccuauguaacguagacauuuucaaccccaaauacgacugcaaaauuaugacaucaaaaacagacguuucaucaucaguuaucaccucauuaggagcaauaguaagcugcuacggaaaaacaaaaugcaccgccucaaauaaaugcagaggaauaauaaaaacuuucuccaacggaugcgacuacguuucaaacaaagguguagacacuguaucaguaggaaacacacuauauuacguaaauaaacaagaaggaaaaucacuuuaugucaaaggagaaccaauaaucaauuucuacgacccauuaguauucccaucagacgaauuugaugcuucaauaucacaaguaaacgaaaaaauaaaucaaucacucgcauuuauacgaaaaucagacgaacuacuacacaauguaaacgcaggcaaaucaacaacaaacauaaugauaacaacaauaaucauuguaauaauaguaauacuucuaucucuaauagcaguaggauuacuccucuacugcaaagcaagaucaaccccuguaacacuaucaaaagaccaacuuucagguauaaauaauauagcuuuuuccaauuaaggacuagugaagggaacacccaaauuuaauucagccuuaagcacaauuaauuaagagugaaacguaauuguacaagcaguuggucacccaccauagggcaugaucaacaccgcaaccuuuccuuuuucccccagugauucugaaaaaccccucuucccuucagcuugcuuagauguuccaaauuuaguaagcuuaaggcggccuacagaagaaaaagaaaaaaaaggccacaaaaguucccucucacuuucaguaaauaaaauaaaagcagcaacagaaauaaagaaauaaaugaaauucaaaaugaaauaaauauuguguugugcagcauuaaaaaaucaauaaaaauuaaaaaugagcaagaucuaaaaaaaaaaaaaaaaaaaaaaaaaaaaaaaaaaaaaaaaaaaaaaaaaaaaaaaaaaaaaaaaugcaucccccccccccccccccccccccccccccccaaaggcucuuuucagagccaccagaauu

SEQ ID NO: 5606 - RNA, 2202 nt, Artificial Sequence
  mRNA product Design g-3 comprising derived and/or modified sequence from HRSV(A2)__F_DSCav1_mut5 (opt11)
gggagaguccgcucagccagguugcagaagcggcuuagcguguguccuaaucuucucucugcguguagguaggccugugccgcaaacaagcuuaccauggagcuccuaauccucaaagccaacgcgaucacuacaauccucacagccgucaccuucugcuucgccuccggccaaaacaucaccgaggaguucuaccaaucaaccugcuccgccguaucaaaaggauaccuaagcgcccuacggaccggcugguacacaucugucaucaccaucgaacuaucaaacaucaaagaaaacaaaugcaacggaaccgacgcaaaagucaaacugauuaaacaagaacuagacaaauacaaaaacgcagucaccgaacugcaauuacucaugcaaagcacaccggccaccggcucaggcagcgccaucgccuccggcgucgccgucugcaaaguucuccaccucgagggcgaagucaacaaaauaaaaucugcccuccucuccaccaacaaagccgucgucucccucagcggcugcggagucuccguccucaccuucaaaguucucgaucucaagaacuauauugacaaacaacuucuacccauacucaacaaacaaagcugcagcauauccaacaucgaaaccgucaucgaguuccaacaaaagaacaaccgccuccucgaaauaacccgcgaguucagcguuaacgccggagucacuaccccugucuccaccuacaugcucaccaacuccgaacuccuaucacuaaucaacgacaugcccauaaccaacgaccagaagaaacucauguccaacaacguccaaauuguccgacaacaaagcuacuccauaaugugcauaauaaaagaggaaguccucgccuacgucguacaacugccccuuuauggcguaaucgacacacccugcuggaaacuccacacgucaccccucugcaccaccaacacaaaagaaggcucgaacaucugccuaacacggacugaccgcggcugguacugcgacaacgccggcuccgucagcuucuucccacaagccgaaaccugcaaaguacaauccaaccgaguauucugcgacaccaugaacuccagaacccuccccucagaggucaaccugugcaacguagacaucuucaaccccaaauacgacugcaaaauaaugaccucaaaaacagacgucuccucuuccguaaucaccagccucggagccaucgucagcugcuacggcaaaaccaaaugcaccgccucaaacaaaugccgcggcaucaucaaaacauucucaaacggcugcgacuacgucuccaacaaaggcgucgacacaguaagcguaggcaacacacuguacuacgucaacaaacaagagggaaaaucacucuacgucaaaggagaacccauaaucaacuucuacgacccccucguuuuccccagcgacgaguucgacgccagcauaucccaagucaacgagaaaauuaaccaaucccuagcauucauccgaaaaucugacgaacugcuccacaacgucaacgcgggaaaaucaacaaccaacauaaugauaaccacaaucauaauagucaucaucguaauccuccucagccuaaucgcugucggccuccuccucuacugcaaagcccguuccaccccagucacacuuuccaaggaccaacuaagcggaauaaacaacaucgcguucucaaacuaaggacuagugaagggaacacccaaauuuaauucagccuuaagcacaauuaauuaagagugaaacguaauuguacaagcaguuggucacccaccauagggcaugaucaacaccgcaaccuuuccuuuuucccccagugauucugaaaaaccccucuucccuucagcuugcuuagauguuccaaauuuaguaagcuuaaggcggccuacagaagaaaaagaaaaaaaaggccacaaaaguucccucucacuuucaguaaauaaaauaaaagcagcaacagaaauaaagaaauaaaugaaauucaaaaugaaauaaauauuguguugugcagcauuaaaaaaucaauaaaaauuaaaaaugagcaagaucuaaaaaaaaaaaaaaaaaaaaaaaaaaaaaaaaaaaaaaaaaaaaaaaaaaaaaaaaaaaaaaaaugcaucccccccccccccccccccccccccccccccaaaggcucuuuucagagccaccagaauu

SEQ ID NO: 5607 - RNA, 1997 nt, Artificial Sequence
  mRNA product Design g-4 comprising derived and/or modified sequence from HRSV(A2)__F_DSCav1_mut5 (opt1)
gggagacuccugucgggcggaaguaggaggaguagaguuuaaaaacaguacucuuuuuccgguucgggacguaguugaagcaacgacaagccggauaaccgcucuugagacaggaagcuuaccauggagcugcucauccugaaggccaacgccaucaccaccauccugacggcggugaccuucugcuucgccagcggccagaacaucaccgaggaguucuaccaguccacgugcagcgccgucuccaagggguaccucagcgcccugcggaccggcugguacaccuccgugaucaccaucgagcugagcaacaucaaggagaacaagugcaacgggaccgacgccaaggugaagcucaucaagcaggagcuggacaaguacaagaacgcggucacggagcugcagcuccugaugcaguccaccccggcaaccggcuccggcuccgccaucgcgagcggcgucgccgugugcaaggugcugcaccucgagggggaggucaacaagaucaagagcgcccugcuguccaccaacaaggccguggugagccucuccggcugcggcgucagcgugcugaccuucaaggugcuggaccucaagaacuacaucgacaagcagcugcugcccauccugaacaagcagagcugcuccaucagcaacaucgagacggugaucgaguuccagcagaagaacaaccggcuccuggagaucacccgcgaguucagcgugaacgccggggucaccacccccguguccacguacaugcugaccaacagcgagcuccugucccugaucaacgacaugccgaucaccaacgaccagaagaagcucaugagcaacaacgugcagaucguccggcagcaguccuacagcaucaugugcaucaucaaggaggaggugcuggcguacgugguccagcugccccucuacggcgugaucgacacccccugcuggaagcugcacacgagcccccugugcaccaccaacaccaaggagggguccaacaucugccucacgcgcaccgaccggggcugguacugcgacaacgccggcagcgucuccuucuucccgcaggccgagaccugcaaggugcagagcaaccgcguguucugcgacaccaugaacucccggacgcugcccagcgagguaaaccucugcaacgucgacaucuucaaccccaaguacgacugcaagaucaugaccuccaagaccgacgugagcuccagcgugaucaccucccugggggccaucgucagcugcuacggcaagacgaagugcaccgccagcaacaagugccgggggaucaucaagaccuucuccaacggcugcgacuacgugagcaacaagggcguggacaccguguccgucgggaacacccuguacuacgugaacaagcaggagggcaagagccucuacgugaagggggagcccaucaucaacuucuacgacccgcuggucuuccccuccgacgaguucgacgcgagcaucucccaggugaacgagaagaucaaccagagccuggccuucauccgcaaguccgacgagcugcuccacaacgugaacgccggcaagagcacgaccaacaucaugaucaccaccaucaucaucgucaucaucgugauccugcugucccucaucgccguggggcugcugcucuacugcaaggcccggagcacgcccgucacccuguccaaggaccagcugagcggcaucaacaacaucgcguucuccaacugaggacuaguaauaaggaaacuguaugaaugucugugggcaggaagugaagagauccuucuguaaagguuuuuggaauuaugucugcugaauaauaaacuuuuuugaaauaauaaaucugguagaaaaaugagaucuaaaaaaaaaaaaaaaaaaaaaaaaaaaaaaaaaaaaaaaaaaaaaaaaaaaaaaaaaaaaaaaaugcaucccccccccccccccccccccccccccccccaaaggcucuuuucagagccaccagaauu

SEQ ID NO: 5608 - RNA, 1997 nt, Artificial Sequence
  mRNA product Design g-4 comprising derived and/or modified sequence from HRSV(A2)__F_DSCav1_mut5 (opt1)
gggagacuccugucgggcggaaguaggaggaguagaguuuaaaaacaguacucuuuuuccgguucgggacguaguugaagcaacgacaagccggauaaccgcucuugagacaggaagcuuaccauggagcugcucauccugaaggccaacgccaucaccaccauccugacggcggugaccuucugcuucgccagcggccagaacaucaccgaggaguucuaccaguccacgugcagcgccgucuccaagggguaccucagcgcccugcgcaccggcugguacaccuccgugaucaccaucgagcugagcaacaucaaggagaacaagugcaacgggaccgacgccaaggugaagcucaucaagcaggagcuggacaaguacaagaacgcggucacggagcugcagcuccugaugcaguccacccccgccaccggcagcggguccgccaucgccagcggcguggcggugugcaagguccugcaccucgagggcgaggugaacaagaucaaguccgcccugcugagcaccaacaaggccguggucucccucagcgggugcggcguguccgugcugacguucaagguccuggaccucaagaacuacaucgacaagcagcugcugccgauccucaacaagcagagcugcuccaucagcaacaucgagaccgugaucgaguuccagcagaagaacaaccggcugcuggagaucacccgcgaguucuccgugaacgccggggucaccacgcccgugagcaccuacaugcucaccaacagcgagcugcugucccucaucaacgacaugcccaucaccaacgaccagaagaagcugaugagcaacaacgugcagaucguccggcagcaguccuacagcaucaugugcaucaucaaggaggaggugcuggccuacgugguccagcucccccuguacggcgugaucgacacgccgugcuggaagcugcacaccagcccccucugcaccaccaacacgaaggagggguccaacaucugccugacccgcaccgaccggggcugguacugcgacaacgcgggcuccgugagcuucuucccccaggccgagaccugcaagguccaguccaaccgcguguucugcgacacgaugaacagccggacccuccccuccgaggucaaccugugcaacguggacaucuucaacccgaaguacgacugcaagaucaugaccagcaagaccgacguguccagcuccgucaucacgagccugggggccaucguguccugcuacggcaagaccaagugcaccgccagcaacaagugccgggggaucaucaagaccuucuccaacggcugcgacuacgugagcaacaagggcgucgacacggugagcguggggaacacccucuacuacgucaacaagcaggagggcaagucccuguacgugaagggggagcccaucaucaacuucuacgacccccugguguuccccagcgacgaguucgacgccuccaucagccaggucaacgagaagaucaaccagucccucgcguucauccgcaagagcgacgagcugcugcacaacgugaacgccggcaaguccaccaccaacaucaugaucaccacgaucaucaucgugaucaucgucauccuccugagccugaucgccguggggcuccugcuguacugcaaggcccgguccaccccggugacccugagcaaggaccagcucuccggcaucaacaacaucgccuucagcaacugaggacuaguaauaaggaaacuguaugaaugucugugggcaggaagugaagagauccuucuguaaagguuuuuggaauuaugucugcugaauaauaaacuuuuuugaaauaauaaaucugguagaaaaaugagaucuaaaaaaaaaaaaaaaaaaaaaaaaaaaaaaaaaaaaaaaaaaaaaaaaaaaaaaaaaaaaaaaaugcaucccccccccccccccccccccccccccccccaaaggcucuuuucagagccaccagaauu

SEQ ID NO: 5609 - RNA, 1997 nt, Artificial Sequence
  mRNA product Design g-4 comprising derived and/or modified sequence from HRSV(A2)__F_DSCav1_mut5 (opt2)
gggagacuccugucgggcggaaguaggaggaguagaguuuaaaaacaguacucuuuuuccgguucgggacguaguugaagcaacgacaagccggauaaccgcucuugagacaggaagcuuaccauggagcuccucauccucaaggccaacgccaucaccaccauccucaccgccgucaccuucugcuucgccuccggccagaacaucaccgaggaguucuaccaguccaccugcuccgccgucuccaagggcuaccucuccgcccuccgcaccggcugguacaccuccgucaucaccaucgagcucuccaacaucaaggagaacaagugcaacggcaccgacgccaaggucaagcucaucaagcaggagcucgacaaguacaagaacgccgucaccgagcuccagcuccucaugcaguccacccccgccaccggcuccggcuccgccaucgccuccggcgucgccgucugcaagguccuccaccucgagggcgaggucaacaagaucaaguccgcccuccucuccaccaacaaggccgucgucucccucuccggcugcggcgucuccguccucaccuucaagguccucgaccucaagaacuacaucgacaagcagcuccuccccauccucaacaagcaguccugcuccaucuccaacaucgagaccgucaucgaguuccagcagaagaacaaccgccuccucgagaucacccgcgaguucuccgucaacgccggcgucaccacccccgucuccaccuacaugcucaccaacuccgagcuccucucccucaucaacgacaugcccaucaccaacgaccagaagaagcucauguccaacaacguccagaucguccgccagcaguccuacuccaucaugugcaucaucaaggaggagguccucgccuacgucguccagcucccccucuacggcgucaucgacacccccugcuggaagcuccacaccuccccccucugcaccaccaacaccaaggagggcuccaacaucugccucacccgcaccgaccgcggcugguacugcgacaacgccggcuccgucuccuucuucccccaggccgagaccugcaagguccaguccaaccgcgucuucugcgacaccaugaacucccgcacccuccccuccgaggucaaccucugcaacgucgacaucuucaaccccaaguacgacugcaagaucaugaccuccaagaccgacgucuccuccuccgucaucaccucccucggcgccaucgucuccugcuacggcaagaccaagugcaccgccuccaacaagugccgcggcaucaucaagaccuucuccaacggcugcgacuacgucuccaacaagggcgucgacaccgucuccgucggcaacacccucuacuacgucaacaagcaggagggcaagucccucuacgucaagggcgagcccaucaucaacuucuacgacccccucgucuuccccuccgacgaguucgacgccuccaucucccaggucaacgagaagaucaaccagucccucgccuucauccgcaaguccgacgagcuccuccacaacgucaacgccggcaaguccaccaccaacaucaugaucaccaccaucaucaucgucaucaucgucauccuccucucccucaucgccgucggccuccuccucuacugcaaggcccgcuccacccccgucacccucuccaaggaccagcucuccggcaucaacaacaucgccuucuccaacugaggacuaguaauaaggaaacuguaugaaugucugugggcaggaagugaagagauccuucuguaaagguuuuuggaauuaugucugcugaauaauaaacuuuuuugaaauaauaaaucugguagaaaaaugagaucuaaaaaaaaaaaaaaaaaaaaaaaaaaaaaaaaaaaaaaaaaaaaaaaaaaaaaaaaaaaaaaaaugcaucccccccccccccccccccccccccccccccaaaggcucuuuucagagccaccagaauu

SEQ ID NO: 5610 - RNA, 1997 nt, Artificial Sequence
  mRNA product Design g-4 comprising derived and/or modified sequence from HRSV(A2)__F_DSCav1_mut5 (opt3)
gggagacuccugucgggcggaaguaggaggaguagaguuuaaaaacaguacucuuuuuccgguucgggacguaguugaagcaacgacaagccggauaaccgcucuugagacaggaagcuuaccauggagcugcucauccuuaaggccaacgcuauuaccacaauacugacugcagugacguucugcuuugccagcggccagaauaucaccgaagaguucuaccaauccacauguucugcggucucaaaaggguauuugagugcuuuaagaacuggaugguacaccagcguuauuacaaucgaacuguccaacauuaaggagaauaaaugcaacgguaccgacgccaaggugaaacuaaucaagcaggaacucgauaaguauaaaaaugcaguaacugagcugcagcuucugaugcagucuacacccgccaccggcucggggucagcuauagcaagcggaguggccgucuguaagguguugcaccucgagggcgaaguuaacaaaaucaagagugcucugcuguccacgaauaaagccguggucucucucagcgguugcgggguguccguauuaacuuuuaagguucuggaccuuaagaacuacauugauaaacaauugcugccuauccuaaauaagcagucauguaguauuagcaacaucgagaccgugauagaguuccagcagaaaaauaacaggcuccuggaaauuacacgggaguuuucugucaaugcgggagugacuaccccaguguccacauauaugcuuaccaacucagaacuguugagccucaucaaugacaugccgauuacgaacgaucaaaagaaacugaugaguaacaauguccagaucguucgccagcagucuuacuccaucaugugcauuauaaaggaggaaguguuagcauauguagugcaacugccccucuacggcgucaucgacacuccuuguuggaaacuucauacaagcccacugugcaccacuaacacaaaggagggcucgaauauuuguuugacccgaacggaucgugggugguacugcgacaacgccggaucuguguccuucuuuccccaggcugaaaccuguaagguucagucaaauagaguguucugcgauacaaugaacaguagaacucugccuagcgaggucaaucucugcaacguggacaucuuuaauccaaaauaugauuguaagauaaugaccuccaaaacagacguaucuagcucaguuauuaccagucugggugccaucguguccugcuacggcaagacuaaauguacagcaagcaacaagugcagggggaucauuaagaccuucucuaauggaugugauuaugucucaaacaaaggcguggacacugucaguguggguaauacgcuuuacuauguuaacaagcaagaggggaaaagccuguacgugaagggagaacccaucauuaauuuuuaugacccuuugguauucccauccgaugaguuugacgcuucuauaucgcaggucaacgagaaaaucaaccagagccucgccuucauucggaaguccgaugaacuguuacacaaugugaacgcgggcaagucaacaaccaauaucaugaucacuaccauuauaaucguuauuaucgugauucugcuaagucucaucgccgucggccugcuuuuguacugcaaagcacgcucuacaccggugacccugagcaaggaccagcucuccgggauaaacaauaucgcuuucucaaacugaggacuaguaauaaggaaacuguaugaaugucugugggcaggaagugaagagauccuucuguaaagguuuuuggaauuaugucugcugaauaauaaacuuuuuugaaauaauaaaucugguagaaaaaugagaucuaaaaaaaaaaaaaaaaaaaaaaaaaaaaaaaaaaaaaaaaaaaaaaaaaaaaaaaaaaaaaaaaugcaucccccccccccccccccccccccccccccccaaaggcucuuuucagagccaccagaauu

SEQ ID NO: 5611 - RNA, 1997 nt, Artificial Sequence
  mRNA product Design g-4 comprising derived and/or modified sequence from HRSV(A2)__F_DSCav1_mut5 (opt4)
gggagacuccugucgggcggaaguaggaggaguagaguuuaaaaacaguacucuuuuuccgguucgggacguaguugaagcaacgacaagccggauaaccgcucuugagacaggaagcuuaccauggagcugcugauccugaaggccaacgccaucaccaccauccugaccgccgugaccuucugcuucgccagcggccagaacaucaccgaggaguucuaccagagcaccugcagcgccgugagcaagggcuaccugagcgcccugagaaccggcugguacaccagcgugaucaccaucgagcugagcaacaucaaggagaacaagugcaacggcaccgacgccaaggugaagcugaucaagcaggagcuggacaaguacaagaacgccgugaccgagcugcagcugcugaugcagagcacccccgccaccggcagcggcagcgccaucgccagcggcguggccgugugcaaggugcugcaccuggagggcgaggugaacaagaucaagagcgcccugcugagcaccaacaaggccguggugagccugagcggcugcggcgugagcgugcugaccuucaaggugcuggaccugaagaacuacaucgacaagcagcugcugcccauccugaacaagcagagcugcagcaucagcaacaucgagaccgugaucgaguuccagcagaagaacaacagacugcuggagaucaccagagaguucagcgugaacgccggcgugaccacccccgugagcaccuacaugcugaccaacagcgagcugcugagccugaucaacgacaugcccaucaccaacgaccagaagaagcugaugagcaacaacgugcagaucgugagacagcagagcuacagcaucaugugcaucaucaaggaggaggugcuggccuacguggugcagcugccccuguacggcgugaucgacacccccugcuggaagcugcacaccagcccccugugcaccaccaacaccaaggagggcagcaacaucugccugaccagaaccgacagaggcugguacugcgacaacgccggcagcgugagcuucuucccccaggccgagaccugcaaggugcagagcaacagaguguucugcgacaccaugaacagcagaacccugcccagcgaggugaaccugugcaacguggacaucuucaaccccaaguacgacugcaagaucaugaccagcaagaccgacgugagcagcagcgugaucaccagccugggcgccaucgugagcugcuacggcaagaccaagugcaccgccagcaacaagugcagaggcaucaucaagaccuucagcaacggcugcgacuacgugagcaacaagggcguggacaccgugagcgugggcaacacccuguacuacgugaacaagcaggagggcaagagccuguacgugaagggcgagcccaucaucaacuucuacgacccccugguguuccccagcgacgaguucgacgccagcaucagccaggugaacgagaagaucaaccagagccuggccuucaucagaaagagcgacgagcugcugcacaacgugaacgccggcaagagcaccaccaacaucaugaucaccaccaucaucaucgugaucaucgugauccugcugagccugaucgccgugggccugcugcuguacugcaaggccagaagcacccccgugacccugagcaaggaccagcugagcggcaucaacaacaucgccuucagcaacugaggacuaguaauaaggaaacuguaugaaugucugugggcaggaagugaagagauccuucuguaaagguuuuuggaauuaugucugcugaauaauaaacuuuuuugaaauaauaaaucugguagaaaaaugagaucuaaaaaaaaaaaaaaaaaaaaaaaaaaaaaaaaaaaaaaaaaaaaaaaaaaaaaaaaaaaaaaaaugcaucccccccccccccccccccccccccccccccaaaggcucuuuucagagccaccagaauu

SEQ ID NO: 5612 - RNA, 1997 nt, Artificial Sequence
  mRNA product Design g-4 comprising derived and/or modified sequence from HRSV(A2)__F_DSCav1_mut5 (opt5)
gggagacuccugucgggcggaaguaggaggaguagaguuuaaaaacaguacucuuuuuccgguucgggacguaguugaagcaacgacaagccggauaaccgcucuugagacaggaagcuuaccauggagcugcucauccugaaggccaacgcuauuaccacaauccuuacggccgugaccuucugcuuugcgagcggccagaauauuacagaagaguucuaccaauccaccuguucugcugucagcaaaggguaucuguccgcccucagaacaggaugguacaccucuguuaucacaauugaacugagcaacaucaaggagaauaaaugcaacggcaccgacgccaaggugaaacuuaucaagcaggaacuggauaaguauaaaaaugcugugacggagcuccagcugcugaugcaguccacccccgccacagggucuggaagcgcuauugccuccggcgucgcgguguguaagguucuccaccuggagggggaagugaacaaaaucaagagcgcccuucugucuaccaauaaagcugucgugucccucagcggaugcggcguuucugugcugacauuuaagguccuugaccugaagaacuacauugauaaacaacuccugccuauccugaauaagcaguccuguagcauuucuaacaucgagaccgugauugaguuccagcagaaaaauaaccggcuccuggaaaucacgcgcgaguuuuccgugaaugccggcgucacaaccccgguuagcacauauaugcuuaccaacuccgaacugcucucucugaucaaugacaugcccauuaccaacgaucaaaagaaacuuaugagcaacaaugugcagaucgugagacagcaguccuacagcauuaugugcaucauuaaggaggaaguccuggcuuaugugguucaacucccucuguacggggugaucgacacacccuguuggaaacugcauacgucuccucucugcaccacaaacaccaaggagggauccaauaucugucugacacggaccgaucgcggcugguacugcgacaacgccgggagcgucucuuucuuuccccaggcggaaacguguaaggugcagagcaauagaguuuucugcgauacaaugaacuccagaacccugccuucugaggugaaucucugcaacgucgacauuuuuaauccgaaauaugauuguaagaucaugaccagcaaaacagacguguccagcucugucauuaccucccugggagccaucgugagcugcuacggcaagacaaaauguacggcuucuaacaagugccgggggauuaucaagaccuucuccaauggaugugauuauguuagcaacaaaggcguggacacagucuccgugggcaauacccuuuacuauguuaacaagcaagaggggaaaucucuguacgugaagggagaacccaucauuaauuuuuaugacccucucgucuuccccagcgaugaguuugacgccuccaucucucaggugaacgagaaaauuaaccagagccuggcuuucauccgcaaguccgaugaacugcuccacaaugugaacgccggcaagagcacaaccaauauuaugaucacgaccauuaucaucguuauuaucgucauucugcuuucucugaucgccguggggcuccugcuguacugcaaagcuagauccacaccugugacccuuagcaaggaccagcucucuggaauuaacaauaucgcguucuccaacugaggacuaguaauaaggaaacuguaugaaugucugugggcaggaagugaagagauccuucuguaaagguuuuuggaauuaugucugcugaauaauaaacuuuuuugaaauaauaaaucugguagaaaaaugagaucuaaaaaaaaaaaaaaaaaaaaaaaaaaaaaaaaaaaaaaaaaaaaaaaaaaaaaaaaaaaaaaaaugcaucccccccccccccccccccccccccccccccaaaggcucuuuucagagccaccagaauu

SEQ ID NO: 5613 - RNA, 1997 nt, Artificial Sequence
  mRNA product Design g-4 comprising derived and/or modified sequence from HRSV(A2)__F_DSCav1_mut5 (opt6)
gggagacuccugucgggcggaaguaggaggaguagaguuuaaaaacaguacucuuuuuccgguucgggacguaguugaagcaacgacaagccggauaaccgcucuugagacaggaagcuuaccauggaacuauuaauacuuaaagccaacgcaauaacaacaauucucacugcugucaccuucugcuucgccucaggccaaaacauaacggaagaauuuuaccaaucaacaugcucugcaguauccaaaggcuaccuaucugcucuaagaacagguugguauacaucaguaauaaccauagaacuaucaaacauaaaagaaaauaaaugcaacggaacagacgcaaaaguuaaacucauaaaacaagaacuagacaaauauaaaaacgcaguuaccgaacuacaacuacuuaugcaauccacucccgccacuggaucaggaucagcaauagcaucaggagucgcaguauguaaagucuuacaccucgaaggcgaagucaauaaaaucaaauccgcauuacuauccacaaacaaagcagucguaucccuaagcggaugcggaguaucaguacuaacauuuaaaguacuagaccuaaaaaauuacaucgauaaacaacuauuaccuauauuaaacaaacaauccugcuccauuucaaauaucgaaaccguaauagaauuucaacaaaaaaacaacagauuacuagaaauaacaagagaauuuuccguaaaugcuggcguaacaacaccaguauccacauacaugcucacaaacuccgaacuacuaucacuaauaaaugacaugcccauaacaaacgaucaaaaaaaacuaaugucaaauaauguacaaauaguaagacaacaaagcuacuccaucauguguauaauaaaagaagaaguacuagcauacguaguucaacuaccacuuuacggcguaaucgacaccccuugcuggaaacuacacaccuccccucuaugcaccacaaacacaaaagaagguuccaacauaugccuuaccagaacagacagaggcugguauugcgacaacgcaggaucaguuucauuuuuuccacaagcugaaacaugcaaaguacaaucaaacagagucuucugcgacacaaugaacucaagaacucuacccucagaaguaaaccuauguaacguagacauuuucaaccccaaauacgacugcaaaauuaugacaucaaaaacagacguuucaucaucaguuaucaccucauuaggagcaauaguaagcugcuacggaaaaacaaaaugcaccgccucaaauaaaugcagaggaauaauaaaaacuuucuccaacggaugcgacuacguuucaaacaaagguguagacacuguaucaguaggaaacacacuauauuacguaaauaaacaagaaggaaaaucacuuuaugucaaaggagaaccaauaaucaauuucuacgacccauuaguauucccaucagacgaauuugaugcuucaauaucacaaguaaacgaaaaaauaaaucaaucacucgcauuuauacgaaaaucagacgaacuacuacacaauguaaacgcaggcaaaucaacaacaaacauaaugauaacaacaauaaucauuguaauaauaguaauacuucuaucucuaauagcaguaggauuacuccucuacugcaaagcaagaucaaccccuguaacacuaucaaaagaccaacuuucagguauaaauaauauagcuuuuuccaauuaaggacuaguaauaaggaaacuguaugaaugucugugggcaggaagugaagagauccuucuguaaagguuuuuggaauuaugucugcugaauaauaaacuuuuuugaaauaauaaaucugguagaaaaaugagaucuaaaaaaaaaaaaaaaaaaaaaaaaaaaaaaaaaaaaaaaaaaaaaaaaaaaaaaaaaaaaaaaaugcaucccccccccccccccccccccccccccccccaaaggcucuuuucagagccaccagaauu

SEQ ID NO: 5614 - RNA, 1997 nt, Artificial Sequence
  mRNA product Design g-4 comprising derived and/or modified sequence from HRSV(A2)__F_DSCav1_mut5 (opt11)
gggagacuccugucgggcggaaguaggaggaguagaguuuaaaaacaguacucuuuuuccgguucgggacguaguugaagcaacgacaagccggauaaccgcucuugagacaggaagcuuaccauggagcuccuaauccucaaagccaacgcgaucacuacaauccucacagccgucaccuucugcuucgccuccggccaaaacaucaccgaggaguucuaccaaucaaccugcuccgccguaucaaaaggauaccuaagcgcccuacggaccggcugguacacaucugucaucaccaucgaacuaucaaacaucaaagaaaacaaaugcaacggaaccgacgcaaaagucaaacugauuaaacaagaacuagacaaauacaaaaacgcagucaccgaacugcaauuacucaugcaaagcacaccggccaccggcucaggcagcgccaucgccuccggcgucgccgucugcaaaguucuccaccucgagggcgaagucaacaaaauaaaaucugcccuccucuccaccaacaaagccgucgucucccucagcggcugcggagucuccguccucaccuucaaaguucucgaucucaagaacuauauugacaaacaacuucuacccauacucaacaaacaaagcugcagcauauccaacaucgaaaccgucaucgaguuccaacaaaagaacaaccgccuccucgaaauaacccgcgaguucagcguuaacgccggagucacuaccccugucuccaccuacaugcucaccaacuccgaacuccuaucacuaaucaacgacaugcccauaaccaacgaccagaagaaacucauguccaacaacguccaaauuguccgacaacaaagcuacuccauaaugugcauaauaaaagaggaaguccucgccuacgucguacaacugccccuuuauggcguaaucgacacacccugcuggaaacuccacacgucaccccucugcaccaccaacacaaaagaaggcucgaacaucugccuaacacggacugaccgcggcugguacugcgacaacgccggcuccgucagcuucuucccacaagccgaaaccugcaaaguacaauccaaccgaguauucugcgacaccaugaacuccagaacccuccccucagaggucaaccugugcaacguagacaucuucaaccccaaauacgacugcaaaauaaugaccucaaaaacagacgucuccucuuccguaaucaccagccucggagccaucgucagcugcuacggcaaaaccaaaugcaccgccucaaacaaaugccgcggcaucaucaaaacauucucaaacggcugcgacuacgucuccaacaaaggcgucgacacaguaagcguaggcaacacacuguacuacgucaacaaacaagagggaaaaucacucuacgucaaaggagaacccauaaucaacuucuacgacccccucguuuuccccagcgacgaguucgacgccagcauaucccaagucaacgagaaaauuaaccaaucccuagcauucauccgaaaaucugacgaacugcuccacaacgucaacgcgggaaaaucaacaaccaacauaaugauaaccacaaucauaauagucaucaucguaauccuccucagccuaaucgcugucggccuccuccucuacugcaaagcccguuccaccccagucacacuuuccaaggaccaacuaagcggaauaaacaacaucgcguucucaaacuaaggacuaguaauaaggaaacuguaugaaugucugugggcaggaagugaagagauccuucuguaaagguuuuuggaauuaugucugcugaauaauaaacuuuuuugaaauaauaaaucugguagaaaaaugagaucuaaaaaaaaaaaaaaaaaaaaaaaaaaaaaaaaaaaaaaaaaaaaaaaaaaaaaaaaaaaaaaaaugcaucccccccccccccccccccccccccccccccaaaggcucuuuucagagccaccagaauu

SEQ ID NO: 5615 - RNA, 1973 nt, Artificial Sequence
  mRNA product Design g-5 comprising derived and/or modified sequence from HRSV(A2)__F_DSCav1_mut5 (opt1)
gggagacccgugacccggaaguuguacggcuacgcgacuuucccucccacaaacccucgcgcccuuccuuuccuacuugggcccggcagaaagcuuaccauggagcugcucauccugaaggccaacgccaucaccaccauccugacggcggugaccuucugcuucgccagcggccagaacaucaccgaggaguucuaccaguccacgugcagcgccgucuccaagggguaccucagcgcccugcggaccggcugguacaccuccgugaucaccaucgagcugagcaacaucaaggagaacaagugcaacgggaccgacgccaaggugaagcucaucaagcaggagcuggacaaguacaagaacgcggucacggagcugcagcuccugaugcaguccaccccggcaaccggcuccggcuccgccaucgcgagcggcgucgccgugugcaaggugcugcaccucgagggggaggucaacaagaucaagagcgcccugcuguccaccaacaaggccguggugagccucuccggcugcggcgucagcgugcugaccuucaaggugcuggaccucaagaacuacaucgacaagcagcugcugcccauccugaacaagcagagcugcuccaucagcaacaucgagacggugaucgaguuccagcagaagaacaaccggcuccuggagaucacccgcgaguucagcgugaacgccggggucaccacccccguguccacguacaugcugaccaacagcgagcuccugucccugaucaacgacaugccgaucaccaacgaccagaagaagcucaugagcaacaacgugcagaucguccggcagcaguccuacagcaucaugugcaucaucaaggaggaggugcuggcguacgugguccagcugccccucuacggcgugaucgacacccccugcuggaagcugcacacgagcccccugugcaccaccaacaccaaggagggguccaacaucugccucacgcgcaccgaccggggcugguacugcgacaacgccggcagcgucuccuucuucccgcaggccgagaccugcaaggugcagagcaaccgcguguucugcgacaccaugaacucccggacgcugcccagcgagguaaaccucugcaacgucgacaucuucaaccccaaguacgacugcaagaucaugaccuccaagaccgacgugagcuccagcgugaucaccucccugggggccaucgucagcugcuacggcaagacgaagugcaccgccagcaacaagugccgggggaucaucaagaccuucuccaacggcugcgacuacgugagcaacaagggcguggacaccguguccgucgggaacacccuguacuacgugaacaagcaggagggcaagagccucuacgugaagggggagcccaucaucaacuucuacgacccgcuggucuuccccuccgacgaguucgacgcgagcaucucccaggugaacgagaagaucaaccagagccuggccuucauccgcaaguccgacgagcugcuccacaacgugaacgccggcaagagcacgaccaacaucaugaucaccaccaucaucaucgucaucaucgugauccugcugucccucaucgccguggggcugcugcucuacugcaaggcccggagcacgcccgucacccuguccaaggaccagcugagcggcaucaacaacaucgcguucuccaacugaggacuaguaauaaggaaacuguaugaaugucugugggcaggaagugaagagauccuucuguaaagguuuuuggaauuaugucugcugaauaauaaacuuuuuugaaauaauaaaucugguagaaaaaugagaucuaaaaaaaaaaaaaaaaaaaaaaaaaaaaaaaaaaaaaaaaaaaaaaaaaaaaaaaaaaaaaaaaugcaucccccccccccccccccccccccccccccccaaaggcucuuuucagagccaccagaauu

SEQ ID NO: 5616 - RNA, 1973 nt, Artificial Sequence
  mRNA product Design g-5 comprising derived and/or modified sequence from HRSV(A2)__F_DSCav1_mut5 (opt1)
gggagacccgugacccggaaguuguacggcuacgcgacuuucccucccacaaacccucgcgcccuuccuuuccuacuugggcccggcagaaagcuuaccauggagcugcucauccugaaggccaacgccaucaccaccauccugacggcggugaccuucugcuucgccagcggccagaacaucaccgaggaguucuaccaguccacgugcagcgccgucuccaagggguaccucagcgcccugcgcaccggcugguacaccuccgugaucaccaucgagcugagcaacaucaaggagaacaagugcaacgggaccgacgccaaggugaagcucaucaagcaggagcuggacaaguacaagaacgcggucacggagcugcagcuccugaugcaguccacccccgccaccggcagcggguccgccaucgccagcggcguggcggugugcaagguccugcaccucgagggcgaggugaacaagaucaaguccgcccugcugagcaccaacaaggccguggucucccucagcgggugcggcguguccgugcugacguucaagguccuggaccucaagaacuacaucgacaagcagcugcugccgauccucaacaagcagagcugcuccaucagcaacaucgagaccgugaucgaguuccagcagaagaacaaccggcugcuggagaucacccgcgaguucuccgugaacgccggggucaccacgcccgugagcaccuacaugcucaccaacagcgagcugcugucccucaucaacgacaugcccaucaccaacgaccagaagaagcugaugagcaacaacgugcagaucguccggcagcaguccuacagcaucaugugcaucaucaaggaggaggugcuggccuacgugguccagcucccccuguacggcgugaucgacacgccgugcuggaagcugcacaccagcccccucugcaccaccaacacgaaggagggguccaacaucugccugacccgcaccgaccggggcugguacugcgacaacgcgggcuccgugagcuucuucccccaggccgagaccugcaagguccaguccaaccgcguguucugcgacacgaugaacagccggacccuccccuccgaggucaaccugugcaacguggacaucuucaacccgaaguacgacugcaagaucaugaccagcaagaccgacguguccagcuccgucaucacgagccugggggccaucguguccugcuacggcaagaccaagugcaccgccagcaacaagugccgggggaucaucaagaccuucuccaacggcugcgacuacgugagcaacaagggcgucgacacggugagcguggggaacacccucuacuacgucaacaagcaggagggcaagucccuguacgugaagggggagcccaucaucaacuucuacgacccccugguguuccccagcgacgaguucgacgccuccaucagccaggucaacgagaagaucaaccagucccucgcguucauccgcaagagcgacgagcugcugcacaacgugaacgccggcaaguccaccaccaacaucaugaucaccacgaucaucaucgugaucaucgucauccuccugagccugaucgccguggggcuccugcuguacugcaaggcccgguccaccccggugacccugagcaaggaccagcucuccggcaucaacaacaucgccuucagcaacugaggacuaguaauaaggaaacuguaugaaugucugugggcaggaagugaagagauccuucuguaaagguuuuuggaauuaugucugcugaauaauaaacuuuuuugaaauaauaaaucugguagaaaaaugagaucuaaaaaaaaaaaaaaaaaaaaaaaaaaaaaaaaaaaaaaaaaaaaaaaaaaaaaaaaaaaaaaaaugcaucccccccccccccccccccccccccccccccaaaggcucuuuucagagccaccagaauu

SEQ ID NO: 5617 - RNA, 1973 nt, Artificial Sequence
  mRNA product Design g-5 comprising derived and/or modified sequence from HRSV(A2)__F_DSCav1_mut5 (opt2)
gggagacccgugacccggaaguuguacggcuacgcgacuuucccucccacaaacccucgcgcccuuccuuuccuacuugggcccggcagaaagcuuaccauggagcuccucauccucaaggccaacgccaucaccaccauccucaccgccgucaccuucugcuucgccuccggccagaacaucaccgaggaguucuaccaguccaccugcuccgccgucuccaagggcuaccucuccgcccuccgcaccggcugguacaccuccgucaucaccaucgagcucuccaacaucaaggagaacaagugcaacggcaccgacgccaaggucaagcucaucaagcaggagcucgacaaguacaagaacgccgucaccgagcuccagcuccucaugcaguccacccccgccaccggcuccggcuccgccaucgccuccggcgucgccgucugcaagguccuccaccucgagggcgaggucaacaagaucaaguccgcccuccucuccaccaacaaggccgucgucucccucuccggcugcggcgucuccguccucaccuucaagguccucgaccucaagaacuacaucgacaagcagcuccuccccauccucaacaagcaguccugcuccaucuccaacaucgagaccgucaucgaguuccagcagaagaacaaccgccuccucgagaucacccgcgaguucuccgucaacgccggcgucaccacccccgucuccaccuacaugcucaccaacuccgagcuccucucccucaucaacgacaugcccaucaccaacgaccagaagaagcucauguccaacaacguccagaucguccgccagcaguccuacuccaucaugugcaucaucaaggaggagguccucgccuacgucguccagcucccccucuacggcgucaucgacacccccugcuggaagcuccacaccuccccccucugcaccaccaacaccaaggagggcuccaacaucugccucacccgcaccgaccgcggcugguacugcgacaacgccggcuccgucuccuucuucccccaggccgagaccugcaagguccaguccaaccgcgucuucugcgacaccaugaacucccgcacccuccccuccgaggucaaccucugcaacgucgacaucuucaaccccaaguacgacugcaagaucaugaccuccaagaccgacgucuccuccuccgucaucaccucccucggcgccaucgucuccugcuacggcaagaccaagugcaccgccuccaacaagugccgcggcaucaucaagaccuucuccaacggcugcgacuacgucuccaacaagggcgucgacaccgucuccgucggcaacacccucuacuacgucaacaagcaggagggcaagucccucuacgucaagggcgagcccaucaucaacuucuacgacccccucgucuuccccuccgacgaguucgacgccuccaucucccaggucaacgagaagaucaaccagucccucgccuucauccgcaaguccgacgagcuccuccacaacgucaacgccggcaaguccaccaccaacaucaugaucaccaccaucaucaucgucaucaucgucauccuccucucccucaucgccgucggccuccuccucuacugcaaggcccgcuccacccccgucacccucuccaaggaccagcucuccggcaucaacaacaucgccuucuccaacugaggacuaguaauaaggaaacuguaugaaugucugugggcaggaagugaagagauccuucuguaaagguuuuuggaauuaugucugcugaauaauaaacuuuuuugaaauaauaaaucugguagaaaaaugagaucuaaaaaaaaaaaaaaaaaaaaaaaaaaaaaaaaaaaaaaaaaaaaaaaaaaaaaaaaaaaaaaaaugcaucccccccccccccccccccccccccccccccaaaggcucuuuucagagccaccagaauu

SEQ ID NO: 5618 - RNA, 1973 nt, Artificial Sequence
  mRNA product Design g-5 comprising derived and/or modified sequence from HRSV(A2)__F_DSCav1_mut5 (opt3)
gggagacccgugacccggaaguuguacggcuacgcgacuuucccucccacaaacccucgcgcccuuccuuuccuacuugggcccggcagaaagcuuaccauggagcugcucauccuuaaggccaacgcuauuaccacaauacugacugcagugacguucugcuuugccagcggccagaauaucaccgaagaguucuaccaauccacauguucugcggucucaaaaggguauuugagugcuuuaagaacuggaugguacaccagcguuauuacaaucgaacuguccaacauuaaggagaauaaaugcaacgguaccgacgccaaggugaaacuaaucaagcaggaacucgauaaguauaaaaaugcaguaacugagcugcagcuucugaugcagucuacacccgccaccggcucggggucagcuauagcaagcggaguggccgucuguaagguguugcaccucgagggcgaaguuaacaaaaucaagagugcucugcuguccacgaauaaagccguggucucucucagcgguugcgggguguccguauuaacuuuuaagguucuggaccuuaagaacuacauugauaaacaauugcugccuauccuaaauaagcagucauguaguauuagcaacaucgagaccgugauagaguuccagcagaaaaauaacaggcuccuggaaauuacacgggaguuuucugucaaugcgggagugacuaccccaguguccacauauaugcuuaccaacucagaacuguugagccucaucaaugacaugccgauuacgaacgaucaaaagaaacugaugaguaacaauguccagaucguucgccagcagucuuacuccaucaugugcauuauaaaggaggaaguguuagcauauguagugcaacugccccucuacggcgucaucgacacuccuuguuggaaacuucauacaagcccacugugcaccacuaacacaaaggagggcucgaauauuuguuugacccgaacggaucgugggugguacugcgacaacgccggaucuguguccuucuuuccccaggcugaaaccuguaagguucagucaaauagaguguucugcgauacaaugaacaguagaacucugccuagcgaggucaaucucugcaacguggacaucuuuaauccaaaauaugauuguaagauaaugaccuccaaaacagacguaucuagcucaguuauuaccagucugggugccaucguguccugcuacggcaagacuaaauguacagcaagcaacaagugcagggggaucauuaagaccuucucuaauggaugugauuaugucucaaacaaaggcguggacacugucaguguggguaauacgcuuuacuauguuaacaagcaagaggggaaaagccuguacgugaagggagaacccaucauuaauuuuuaugacccuuugguauucccauccgaugaguuugacgcuucuauaucgcaggucaacgagaaaaucaaccagagccucgccuucauucggaaguccgaugaacuguuacacaaugugaacgcgggcaagucaacaaccaauaucaugaucacuaccauuauaaucguuauuaucgugauucugcuaagucucaucgccgucggccugcuuuuguacugcaaagcacgcucuacaccggugacccugagcaaggaccagcucuccgggauaaacaauaucgcuuucucaaacugaggacuaguaauaaggaaacuguaugaaugucugugggcaggaagugaagagauccuucuguaaagguuuuuggaauuaugucugcugaauaauaaacuuuuuugaaauaauaaaucugguagaaaaaugagaucuaaaaaaaaaaaaaaaaaaaaaaaaaaaaaaaaaaaaaaaaaaaaaaaaaaaaaaaaaaaaaaaaugcaucccccccccccccccccccccccccccccccaaaggcucuuuucagagccaccagaauu

SEQ ID NO: 5619 - RNA, 1973 nt, Artificial Sequence
  mRNA product Design g-5 comprising derived and/or modified sequence from HRSV(A2)__F_DSCav1_mut5 (opt4)
gggagacccgugacccggaaguuguacggcuacgcgacuuucccucccacaaacccucgcgcccuuccuuuccuacuugggcccggcagaaagcuuaccauggagcugcugauccugaaggccaacgccaucaccaccauccugaccgccgugaccuucugcuucgccagcggccagaacaucaccgaggaguucuaccagagcaccugcagcgccgugagcaagggcuaccugagcgcccugagaaccggcugguacaccagcgugaucaccaucgagcugagcaacaucaaggagaacaagugcaacggcaccgacgccaaggugaagcugaucaagcaggagcuggacaaguacaagaacgccgugaccgagcugcagcugcugaugcagagcacccccgccaccggcagcggcagcgccaucgccagcggcguggccgugugcaaggugcugcaccuggagggcgaggugaacaagaucaagagcgcccugcugagcaccaacaaggccguggugagccugagcggcugcggcgugagcgugcugaccuucaaggugcuggaccugaagaacuacaucgacaagcagcugcugcccauccugaacaagcagagcugcagcaucagcaacaucgagaccgugaucgaguuccagcagaagaacaacagacugcuggagaucaccagagaguucagcgugaacgccggcgugaccacccccgugagcaccuacaugcugaccaacagcgagcugcugagccugaucaacgacaugcccaucaccaacgaccagaagaagcugaugagcaacaacgugcagaucgugagacagcagagcuacagcaucaugugcaucaucaaggaggaggugcuggccuacguggugcagcugccccuguacggcgugaucgacacccccugcuggaagcugcacaccagcccccugugcaccaccaacaccaaggagggcagcaacaucugccugaccagaaccgacagaggcugguacugcgacaacgccggcagcgugagcuucuucccccaggccgagaccugcaaggugcagagcaacagaguguucugcgacaccaugaacagcagaacccugcccagcgaggugaaccugugcaacguggacaucuucaaccccaaguacgacugcaagaucaugaccagcaagaccgacgugagcagcagcgugaucaccagccugggcgccaucgugagcugcuacggcaagaccaagugcaccgccagcaacaagugcagaggcaucaucaagaccuucagcaacggcugcgacuacgugagcaacaagggcguggacaccgugagcgugggcaacacccuguacuacgugaacaagcaggagggcaagagccuguacgugaagggcgagcccaucaucaacuucuacgacccccugguguuccccagcgacgaguucgacgccagcaucagccaggugaacgagaagaucaaccagagccuggccuucaucagaaagagcgacgagcugcugcacaacgugaacgccggcaagagcaccaccaacaucaugaucaccaccaucaucaucgugaucaucgugauccugcugagccugaucgccgugggccugcugcuguacugcaaggccagaagcacccccgugacccugagcaaggaccagcugagcggcaucaacaacaucgccuucagcaacugaggacuaguaauaaggaaacuguaugaaugucugugggcaggaagugaagagauccuucuguaaagguuuuuggaauuaugucugcugaauaauaaacuuuuuugaaauaauaaaucugguagaaaaaugagaucuaaaaaaaaaaaaaaaaaaaaaaaaaaaaaaaaaaaaaaaaaaaaaaaaaaaaaaaaaaaaaaaaugcaucccccccccccccccccccccccccccccccaaaggcucuuuucagagccaccagaauu

SEQ ID NO: 5620 - RNA, 1973 nt, Artificial Sequence
  mRNA product Design g-5 comprising derived and/or modified sequence from HRSV(A2)__F_DSCav1_mut5 (opt5)
gggagacccgugacccggaaguuguacggcuacgcgacuuucccucccacaaacccucgcgcccuuccuuuccuacuugggcccggcagaaagcuuaccauggagcugcucauccugaaggccaacgcuauuaccacaauccuuacggccgugaccuucugcuuugcgagcggccagaauauuacagaagaguucuaccaauccaccuguucugcugucagcaaaggguaucuguccgcccucagaacaggaugguacaccucuguuaucacaauugaacugagcaacaucaaggagaauaaaugcaacggcaccgacgccaaggugaaacuuaucaagcaggaacuggauaaguauaaaaaugcugugacggagcuccagcugcugaugcaguccacccccgccacagggucuggaagcgcuauugccuccggcgucgcgguguguaagguucuccaccuggagggggaagugaacaaaaucaagagcgcccuucugucuaccaauaaagcugucgugucccucagcggaugcggcguuucugugcugacauuuaagguccuugaccugaagaacuacauugauaaacaacuccugccuauccugaauaagcaguccuguagcauuucuaacaucgagaccgugauugaguuccagcagaaaaauaaccggcuccuggaaaucacgcgcgaguuuuccgugaaugccggcgucacaaccccgguuagcacauauaugcuuaccaacuccgaacugcucucucugaucaaugacaugcccauuaccaacgaucaaaagaaacuuaugagcaacaaugugcagaucgugagacagcaguccuacagcauuaugugcaucauuaaggaggaaguccuggcuuaugugguucaacucccucuguacggggugaucgacacacccuguuggaaacugcauacgucuccucucugcaccacaaacaccaaggagggauccaauaucugucugacacggaccgaucgcggcugguacugcgacaacgccgggagcgucucuuucuuuccccaggcggaaacguguaaggugcagagcaauagaguuuucugcgauacaaugaacuccagaacccugccuucugaggugaaucucugcaacgucgacauuuuuaauccgaaauaugauuguaagaucaugaccagcaaaacagacguguccagcucugucauuaccucccugggagccaucgugagcugcuacggcaagacaaaauguacggcuucuaacaagugccgggggauuaucaagaccuucuccaauggaugugauuauguuagcaacaaaggcguggacacagucuccgugggcaauacccuuuacuauguuaacaagcaagaggggaaaucucuguacgugaagggagaacccaucauuaauuuuuaugacccucucgucuuccccagcgaugaguuugacgccuccaucucucaggugaacgagaaaauuaaccagagccuggcuuucauccgcaaguccgaugaacugcuccacaaugugaacgccggcaagagcacaaccaauauuaugaucacgaccauuaucaucguuauuaucgucauucugcuuucucugaucgccguggggcuccugcuguacugcaaagcuagauccacaccugugacccuuagcaaggaccagcucucuggaauuaacaauaucgcguucuccaacugaggacuaguaauaaggaaacuguaugaaugucugugggcaggaagugaagagauccuucuguaaagguuuuuggaauuaugucugcugaauaauaaacuuuuuugaaauaauaaaucugguagaaaaaugagaucuaaaaaaaaaaaaaaaaaaaaaaaaaaaaaaaaaaaaaaaaaaaaaaaaaaaaaaaaaaaaaaaaugcaucccccccccccccccccccccccccccccccaaaggcucuuuucagagccaccagaauu

SEQ ID NO: 5621 - RNA, 1973 nt, Artificial Sequence
  mRNA product Design g-5 comprising derived and/or modified sequence from HRSV(A2)__F_DSCav1_mut5 (opt6)
gggagacccgugacccggaaguuguacggcuacgcgacuuucccucccacaaacccucgcgcccuuccuuuccuacuugggcccggcagaaagcuuaccauggaacuauuaauacuuaaagccaacgcaauaacaacaauucucacugcugucaccuucugcuucgccucaggccaaaacauaacggaagaauuuuaccaaucaacaugcucugcaguauccaaaggcuaccuaucugcucuaagaacagguugguauacaucaguaauaaccauagaacuaucaaacauaaaagaaaauaaaugcaacggaacagacgcaaaaguuaaacucauaaaacaagaacuagacaaauauaaaaacgcaguuaccgaacuacaacuacuuaugcaauccacucccgccacuggaucaggaucagcaauagcaucaggagucgcaguauguaaagucuuacaccucgaaggcgaagucaauaaaaucaaauccgcauuacuauccacaaacaaagcagucguaucccuaagcggaugcggaguaucaguacuaacauuuaaaguacuagaccuaaaaaauuacaucgauaaacaacuauuaccuauauuaaacaaacaauccugcuccauuucaaauaucgaaaccguaauagaauuucaacaaaaaaacaacagauuacuagaaauaacaagagaauuuuccguaaaugcuggcguaacaacaccaguauccacauacaugcucacaaacuccgaacuacuaucacuaauaaaugacaugcccauaacaaacgaucaaaaaaaacuaaugucaaauaauguacaaauaguaagacaacaaagcuacuccaucauguguauaauaaaagaagaaguacuagcauacguaguucaacuaccacuuuacggcguaaucgacaccccuugcuggaaacuacacaccuccccucuaugcaccacaaacacaaaagaagguuccaacauaugccuuaccagaacagacagaggcugguauugcgacaacgcaggaucaguuucauuuuuuccacaagcugaaacaugcaaaguacaaucaaacagagucuucugcgacacaaugaacucaagaacucuacccucagaaguaaaccuauguaacguagacauuuucaaccccaaauacgacugcaaaauuaugacaucaaaaacagacguuucaucaucaguuaucaccucauuaggagcaauaguaagcugcuacggaaaaacaaaaugcaccgccucaaauaaaugcagaggaauaauaaaaacuuucuccaacggaugcgacuacguuucaaacaaagguguagacacuguaucaguaggaaacacacuauauuacguaaauaaacaagaaggaaaaucacuuuaugucaaaggagaaccaauaaucaauuucuacgacccauuaguauucccaucagacgaauuugaugcuucaauaucacaaguaaacgaaaaaauaaaucaaucacucgcauuuauacgaaaaucagacgaacuacuacacaauguaaacgcaggcaaaucaacaacaaacauaaugauaacaacaauaaucauuguaauaauaguaauacuucuaucucuaauagcaguaggauuacuccucuacugcaaagcaagaucaaccccuguaacacuaucaaaagaccaacuuucagguauaaauaauauagcuuuuuccaauuaaggacuaguaauaaggaaacuguaugaaugucugugggcaggaagugaagagauccuucuguaaagguuuuuggaauuaugucugcugaauaauaaacuuuuuugaaauaauaaaucugguagaaaaaugagaucuaaaaaaaaaaaaaaaaaaaaaaaaaaaaaaaaaaaaaaaaaaaaaaaaaaaaaaaaaaaaaaaaugcaucccccccccccccccccccccccccccccccaaaggcucuuuucagagccaccagaauu

SEQ ID NO: 5622 - RNA, 1973 nt, Artificial Sequence
  mRNA product Design g-5 comprising derived and/or modified sequence from HRSV(A2)__F_DSCav1_mut5 (opt11)
gggagacccgugacccggaaguuguacggcuacgcgacuuucccucccacaaacccucgcgcccuuccuuuccuacuugggcccggcagaaagcuuaccauggagcuccuaauccucaaagccaacgcgaucacuacaauccucacagccgucaccuucugcuucgccuccggccaaaacaucaccgaggaguucuaccaaucaaccugcuccgccguaucaaaaggauaccuaagcgcccuacggaccggcugguacacaucugucaucaccaucgaacuaucaaacaucaaagaaaacaaaugcaacggaaccgacgcaaaagucaaacugauuaaacaagaacuagacaaauacaaaaacgcagucaccgaacugcaauuacucaugcaaagcacaccggccaccggcucaggcagcgccaucgccuccggcgucgccgucugcaaaguucuccaccucgagggcgaagucaacaaaauaaaaucugcccuccucuccaccaacaaagccgucgucucccucagcggcugcggagucuccguccucaccuucaaaguucucgaucucaagaacuauauugacaaacaacuucuacccauacucaacaaacaaagcugcagcauauccaacaucgaaaccgucaucgaguuccaacaaaagaacaaccgccuccucgaaauaacccgcgaguucagcguuaacgccggagucacuaccccugucuccaccuacaugcucaccaacuccgaacuccuaucacuaaucaacgacaugcccauaaccaacgaccagaagaaacucauguccaacaacguccaaauuguccgacaacaaagcuacuccauaaugugcauaauaaaagaggaaguccucgccuacgucguacaacugccccuuuauggcguaaucgacacacccugcuggaaacuccacacgucaccccucugcaccaccaacacaaaagaaggcucgaacaucugccuaacacggacugaccgcggcugguacugcgacaacgccggcuccgucagcuucuucccacaagccgaaaccugcaaaguacaauccaaccgaguauucugcgacaccaugaacuccagaacccuccccucagaggucaaccugugcaacguagacaucuucaaccccaaauacgacugcaaaauaaugaccucaaaaacagacgucuccucuuccguaaucaccagccucggagccaucgucagcugcuacggcaaaaccaaaugcaccgccucaaacaaaugccgcggcaucaucaaaacauucucaaacggcugcgacuacgucuccaacaaaggcgucgacacaguaagcguaggcaacacacuguacuacgucaacaaacaagagggaaaaucacucuacgucaaaggagaacccauaaucaacuucuacgacccccucguuuuccccagcgacgaguucgacgccagcauaucccaagucaacgagaaaauuaaccaaucccuagcauucauccgaaaaucugacgaacugcuccacaacgucaacgcgggaaaaucaacaaccaacauaaugauaaccacaaucauaauagucaucaucguaauccuccucagccuaaucgcugucggccuccuccucuacugcaaagcccguuccaccccagucacacuuuccaaggaccaacuaagcggaauaaacaacaucgcguucucaaacuaaggacuaguaauaaggaaacuguaugaaugucugugggcaggaagugaagagauccuucuguaaagguuuuuggaauuaugucugcugaauaauaaacuuuuuugaaauaauaaaucugguagaaaaaugagaucuaaaaaaaaaaaaaaaaaaaaaaaaaaaaaaaaaaaaaaaaaaaaaaaaaaaaaaaaaaaaaaaaugcaucccccccccccccccccccccccccccccccaaaggcucuuuucagagccaccagaauu

SEQ ID NO: 5623 - RNA, 1989 nt, Artificial Sequence
  mRNA product Design h-1 comprising derived and/or modified sequence from HRSV(A2)__F_DSCav1_mut5 (opt1)
gggagacccgugacccggaaguuguacggcuacgcgacuuucccucccacaaacccucgcgcccuuccuuuccuacuugggcccggcagaaagcuuaccauggagcugcucauccugaaggccaacgccaucaccaccauccugacggcggugaccuucugcuucgccagcggccagaacaucaccgaggaguucuaccaguccacgugcagcgccgucuccaagggguaccucagcgcccugcggaccggcugguacaccuccgugaucaccaucgagcugagcaacaucaaggagaacaagugcaacgggaccgacgccaaggugaagcucaucaagcaggagcuggacaaguacaagaacgcggucacggagcugcagcuccugaugcaguccaccccggcaaccggcuccggcuccgccaucgcgagcggcgucgccgugugcaaggugcugcaccucgagggggaggucaacaagaucaagagcgcccugcuguccaccaacaaggccguggugagccucuccggcugcggcgucagcgugcugaccuucaaggugcuggaccucaagaacuacaucgacaagcagcugcugcccauccugaacaagcagagcugcuccaucagcaacaucgagacggugaucgaguuccagcagaagaacaaccggcuccuggagaucacccgcgaguucagcgugaacgccggggucaccacccccguguccacguacaugcugaccaacagcgagcuccugucccugaucaacgacaugccgaucaccaacgaccagaagaagcucaugagcaacaacgugcagaucguccggcagcaguccuacagcaucaugugcaucaucaaggaggaggugcuggcguacgugguccagcugccccucuacggcgugaucgacacccccugcuggaagcugcacacgagcccccugugcaccaccaacaccaaggagggguccaacaucugccucacgcgcaccgaccggggcugguacugcgacaacgccggcagcgucuccuucuucccgcaggccgagaccugcaaggugcagagcaaccgcguguucugcgacaccaugaacucccggacgcugcccagcgagguaaaccucugcaacgucgacaucuucaaccccaaguacgacugcaagaucaugaccuccaagaccgacgugagcuccagcgugaucaccucccugggggccaucgucagcugcuacggcaagacgaagugcaccgccagcaacaagugccgggggaucaucaagaccuucuccaacggcugcgacuacgugagcaacaagggcguggacaccguguccgucgggaacacccuguacuacgugaacaagcaggagggcaagagccucuacgugaagggggagcccaucaucaacuucuacgacccgcuggucuuccccuccgacgaguucgacgcgagcaucucccaggugaacgagaagaucaaccagagccuggccuucauccgcaaguccgacgagcugcuccacaacgugaacgccggcaagagcacgaccaacaucaugaucaccaccaucaucaucgucaucaucgugauccugcugucccucaucgccguggggcugcugcucuacugcaaggcccggagcacgcccgucacccuguccaaggaccagcugagcggcaucaacaacaucgcguucuccaacugaggacuaguacuggcugcaucucccuuuccucuguccuccauccuucucccaggauggugaagggggaccugguacccagugauccccaccccaggauccuaaaucaugacuuaccugcuaauaaaaacucauuggaaaagugagaagaucuaaaaaaaaaaaaaaaaaaaaaaaaaaaaaaaaaaaaaaaaaaaaaaaaaaaaaaaaaaaaaaaaugcaucccccccccccccccccccccccccccccccaaaggcucuuuucagagccaccagaauu

SEQ ID NO: 5624 - RNA, 1989 nt, Artificial Sequence
  mRNA product Design h-1 comprising derived and/or modified sequence from HRSV(A2)__F_DSCav1_mut5 (opt1)
gggagacccgugacccggaaguuguacggcuacgcgacuuucccucccacaaacccucgcgcccuuccuuuccuacuugggcccggcagaaagcuuaccauggagcugcucauccugaaggccaacgccaucaccaccauccugacggcggugaccuucugcuucgccagcggccagaacaucaccgaggaguucuaccaguccacgugcagcgccgucuccaagggguaccucagcgcccugcgcaccggcugguacaccuccgugaucaccaucgagcugagcaacaucaaggagaacaagugcaacgggaccgacgccaaggugaagcucaucaagcaggagcuggacaaguacaagaacgcggucacggagcugcagcuccugaugcaguccacccccgccaccggcagcggguccgccaucgccagcggcguggcggugugcaagguccugcaccucgagggcgaggugaacaagaucaaguccgcccugcugagcaccaacaaggccguggucucccucagcgggugcggcguguccgugcugacguucaagguccuggaccucaagaacuacaucgacaagcagcugcugccgauccucaacaagcagagcugcuccaucagcaacaucgagaccgugaucgaguuccagcagaagaacaaccggcugcuggagaucacccgcgaguucuccgugaacgccggggucaccacgcccgugagcaccuacaugcucaccaacagcgagcugcugucccucaucaacgacaugcccaucaccaacgaccagaagaagcugaugagcaacaacgugcagaucguccggcagcaguccuacagcaucaugugcaucaucaaggaggaggugcuggccuacgugguccagcucccccuguacggcgugaucgacacgccgugcuggaagcugcacaccagcccccucugcaccaccaacacgaaggagggguccaacaucugccugacccgcaccgaccggggcugguacugcgacaacgcgggcuccgugagcuucuucccccaggccgagaccugcaagguccaguccaaccgcguguucugcgacacgaugaacagccggacccuccccuccgaggucaaccugugcaacguggacaucuucaacccgaaguacgacugcaagaucaugaccagcaagaccgacguguccagcuccgucaucacgagccugggggccaucguguccugcuacggcaagaccaagugcaccgccagcaacaagugccgggggaucaucaagaccuucuccaacggcugcgacuacgugagcaacaagggcgucgacacggugagcguggggaacacccucuacuacgucaacaagcaggagggcaagucccuguacgugaagggggagcccaucaucaacuucuacgacccccugguguuccccagcgacgaguucgacgccuccaucagccaggucaacgagaagaucaaccagucccucgcguucauccgcaagagcgacgagcugcugcacaacgugaacgccggcaaguccaccaccaacaucaugaucaccacgaucaucaucgugaucaucgucauccuccugagccugaucgccguggggcuccugcuguacugcaaggcccgguccaccccggugacccugagcaaggaccagcucuccggcaucaacaacaucgccuucagcaacugaggacuaguacuggcugcaucucccuuuccucuguccuccauccuucucccaggauggugaagggggaccugguacccagugauccccaccccaggauccuaaaucaugacuuaccugcuaauaaaaacucauuggaaaagugagaagaucuaaaaaaaaaaaaaaaaaaaaaaaaaaaaaaaaaaaaaaaaaaaaaaaaaaaaaaaaaaaaaaaaugcaucccccccccccccccccccccccccccccccaaaggcucuuuucagagccaccagaauu

SEQ ID NO: 5625 - RNA, 1989 nt, Artificial Sequence
  mRNA product Design h-1 comprising derived and/or modified sequence from HRSV(A2)__F_DSCav1_mut5 (opt2)
gggagacccgugacccggaaguuguacggcuacgcgacuuucccucccacaaacccucgcgcccuuccuuuccuacuugggcccggcagaaagcuuaccauggagcuccucauccucaaggccaacgccaucaccaccauccucaccgccgucaccuucugcuucgccuccggccagaacaucaccgaggaguucuaccaguccaccugcuccgccgucuccaagggcuaccucuccgcccuccgcaccggcugguacaccuccgucaucaccaucgagcucuccaacaucaaggagaacaagugcaacggcaccgacgccaaggucaagcucaucaagcaggagcucgacaaguacaagaacgccgucaccgagcuccagcuccucaugcaguccacccccgccaccggcuccggcuccgccaucgccuccggcgucgccgucugcaagguccuccaccucgagggcgaggucaacaagaucaaguccgcccuccucuccaccaacaaggccgucgucucccucuccggcugcggcgucuccguccucaccuucaagguccucgaccucaagaacuacaucgacaagcagcuccuccccauccucaacaagcaguccugcuccaucuccaacaucgagaccgucaucgaguuccagcagaagaacaaccgccuccucgagaucacccgcgaguucuccgucaacgccggcgucaccacccccgucuccaccuacaugcucaccaacuccgagcuccucucccucaucaacgacaugcccaucaccaacgaccagaagaagcucauguccaacaacguccagaucguccgccagcaguccuacuccaucaugugcaucaucaaggaggagguccucgccuacgucguccagcucccccucuacggcgucaucgacacccccugcuggaagcuccacaccuccccccucugcaccaccaacaccaaggagggcuccaacaucugccucacccgcaccgaccgcggcugguacugcgacaacgccggcuccgucuccuucuucccccaggccgagaccugcaagguccaguccaaccgcgucuucugcgacaccaugaacucccgcacccuccccuccgaggucaaccucugcaacgucgacaucuucaaccccaaguacgacugcaagaucaugaccuccaagaccgacgucuccuccuccgucaucaccucccucggcgccaucgucuccugcuacggcaagaccaagugcaccgccuccaacaagugccgcggcaucaucaagaccuucuccaacggcugcgacuacgucuccaacaagggcgucgacaccgucuccgucggcaacacccucuacuacgucaacaagcaggagggcaagucccucuacgucaagggcgagcccaucaucaacuucuacgacccccucgucuuccccuccgacgaguucgacgccuccaucucccaggucaacgagaagaucaaccagucccucgccuucauccgcaaguccgacgagcuccuccacaacgucaacgccggcaaguccaccaccaacaucaugaucaccaccaucaucaucgucaucaucgucauccuccucucccucaucgccgucggccuccuccucuacugcaaggcccgcuccacccccgucacccucuccaaggaccagcucuccggcaucaacaacaucgccuucuccaacugaggacuaguacuggcugcaucucccuuuccucuguccuccauccuucucccaggauggugaagggggaccugguacccagugauccccaccccaggauccuaaaucaugacuuaccugcuaauaaaaacucauuggaaaagugagaagaucuaaaaaaaaaaaaaaaaaaaaaaaaaaaaaaaaaaaaaaaaaaaaaaaaaaaaaaaaaaaaaaaaugcaucccccccccccccccccccccccccccccccaaaggcucuuuucagagccaccagaauu

SEQ ID NO: 5626 - RNA, 1989 nt, Artificial Sequence
  mRNA product Design h-1 comprising derived and/or modified sequence from HRSV(A2)__F_DSCav1_mut5 (opt3)
gggagacccgugacccggaaguuguacggcuacgcgacuuucccucccacaaacccucgcgcccuuccuuuccuacuugggcccggcagaaagcuuaccauggagcugcucauccuuaaggccaacgcuauuaccacaauacugacugcagugacguucugcuuugccagcggccagaauaucaccgaagaguucuaccaauccacauguucugcggucucaaaaggguauuugagugcuuuaagaacuggaugguacaccagcguuauuacaaucgaacuguccaacauuaaggagaauaaaugcaacgguaccgacgccaaggugaaacuaaucaagcaggaacucgauaaguauaaaaaugcaguaacugagcugcagcuucugaugcagucuacacccgccaccggcucggggucagcuauagcaagcggaguggccgucuguaagguguugcaccucgagggcgaaguuaacaaaaucaagagugcucugcuguccacgaauaaagccguggucucucucagcgguugcgggguguccguauuaacuuuuaagguucuggaccuuaagaacuacauugauaaacaauugcugccuauccuaaauaagcagucauguaguauuagcaacaucgagaccgugauagaguuccagcagaaaaauaacaggcuccuggaaauuacacgggaguuuucugucaaugcgggagugacuaccccaguguccacauauaugcuuaccaacucagaacuguugagccucaucaaugacaugccgauuacgaacgaucaaaagaaacugaugaguaacaauguccagaucguucgccagcagucuuacuccaucaugugcauuauaaaggaggaaguguuagcauauguagugcaacugccccucuacggcgucaucgacacuccuuguuggaaacuucauacaagcccacugugcaccacuaacacaaaggagggcucgaauauuuguuugacccgaacggaucgugggugguacugcgacaacgccggaucuguguccuucuuuccccaggcugaaaccuguaagguucagucaaauagaguguucugcgauacaaugaacaguagaacucugccuagcgaggucaaucucugcaacguggacaucuuuaauccaaaauaugauuguaagauaaugaccuccaaaacagacguaucuagcucaguuauuaccagucugggugccaucguguccugcuacggcaagacuaaauguacagcaagcaacaagugcagggggaucauuaagaccuucucuaauggaugugauuaugucucaaacaaaggcguggacacugucaguguggguaauacgcuuuacuauguuaacaagcaagaggggaaaagccuguacgugaagggagaacccaucauuaauuuuuaugacccuuugguauucccauccgaugaguuugacgcuucuauaucgcaggucaacgagaaaaucaaccagagccucgccuucauucggaaguccgaugaacuguuacacaaugugaacgcgggcaagucaacaaccaauaucaugaucacuaccauuauaaucguuauuaucgugauucugcuaagucucaucgccgucggccugcuuuuguacugcaaagcacgcucuacaccggugacccugagcaaggaccagcucuccgggauaaacaauaucgcuuucucaaacugaggacuaguacuggcugcaucucccuuuccucuguccuccauccuucucccaggauggugaagggggaccugguacccagugauccccaccccaggauccuaaaucaugacuuaccugcuaauaaaaacucauuggaaaagugagaagaucuaaaaaaaaaaaaaaaaaaaaaaaaaaaaaaaaaaaaaaaaaaaaaaaaaaaaaaaaaaaaaaaaugcaucccccccccccccccccccccccccccccccaaaggcucuuuucagagccaccagaauu

SEQ ID NO: 5627 - RNA, 1989 nt, Artificial Sequence
  mRNA product Design h-1 comprising derived and/or modified sequence from HRSV(A2)__F_DSCav1_mut5 (opt4)
gggagacccgugacccggaaguuguacggcuacgcgacuuucccucccacaaacccucgcgcccuuccuuuccuacuugggcccggcagaaagcuuaccauggagcugcugauccugaaggccaacgccaucaccaccauccugaccgccgugaccuucugcuucgccagcggccagaacaucaccgaggaguucuaccagagcaccugcagcgccgugagcaagggcuaccugagcgcccugagaaccggcugguacaccagcgugaucaccaucgagcugagcaacaucaaggagaacaagugcaacggcaccgacgccaaggugaagcugaucaagcaggagcuggacaaguacaagaacgccgugaccgagcugcagcugcugaugcagagcacccccgccaccggcagcggcagcgccaucgccagcggcguggccgugugcaaggugcugcaccuggagggcgaggugaacaagaucaagagcgcccugcugagcaccaacaaggccguggugagccugagcggcugcggcgugagcgugcugaccuucaaggugcuggaccugaagaacuacaucgacaagcagcugcugcccauccugaacaagcagagcugcagcaucagcaacaucgagaccgugaucgaguuccagcagaagaacaacagacugcuggagaucaccagagaguucagcgugaacgccggcgugaccacccccgugagcaccuacaugcugaccaacagcgagcugcugagccugaucaacgacaugcccaucaccaacgaccagaagaagcugaugagcaacaacgugcagaucgugagacagcagagcuacagcaucaugugcaucaucaaggaggaggugcuggccuacguggugcagcugccccuguacggcgugaucgacacccccugcuggaagcugcacaccagcccccugugcaccaccaacaccaaggagggcagcaacaucugccugaccagaaccgacagaggcugguacugcgacaacgccggcagcgugagcuucuucccccaggccgagaccugcaaggugcagagcaacagaguguucugcgacaccaugaacagcagaacccugcccagcgaggugaaccugugcaacguggacaucuucaaccccaaguacgacugcaagaucaugaccagcaagaccgacgugagcagcagcgugaucaccagccugggcgccaucgugagcugcuacggcaagaccaagugcaccgccagcaacaagugcagaggcaucaucaagaccuucagcaacggcugcgacuacgugagcaacaagggcguggacaccgugagcgugggcaacacccuguacuacgugaacaagcaggagggcaagagccuguacgugaagggcgagcccaucaucaacuucuacgacccccugguguuccccagcgacgaguucgacgccagcaucagccaggugaacgagaagaucaaccagagccuggccuucaucagaaagagcgacgagcugcugcacaacgugaacgccggcaagagcaccaccaacaucaugaucaccaccaucaucaucgugaucaucgugauccugcugagccugaucgccgugggccugcugcuguacugcaaggccagaagcacccccgugacccugagcaaggaccagcugagcggcaucaacaacaucgccuucagcaacugaggacuaguacuggcugcaucucccuuuccucuguccuccauccuucucccaggauggugaagggggaccugguacccagugauccccaccccaggauccuaaaucaugacuuaccugcuaauaaaaacucauuggaaaagugagaagaucuaaaaaaaaaaaaaaaaaaaaaaaaaaaaaaaaaaaaaaaaaaaaaaaaaaaaaaaaaaaaaaaaugcaucccccccccccccccccccccccccccccccaaaggcucuuuucagagccaccagaauu

SEQ ID NO: 5628 - RNA, 1989 nt, Artificial Sequence
  mRNA product Design h-1 comprising derived and/or modified sequence from HRSV(A2)__F_DSCav1_mut5 (opt5)
gggagacccgugacccggaaguuguacggcuacgcgacuuucccucccacaaacccucgcgcccuuccuuuccuacuugggcccggcagaaagcuuaccauggagcugcucauccugaaggccaacgcuauuaccacaauccuuacggccgugaccuucugcuuugcgagcggccagaauauuacagaagaguucuaccaauccaccuguucugcugucagcaaaggguaucuguccgcccucagaacaggaugguacaccucuguuaucacaauugaacugagcaacaucaaggagaauaaaugcaacggcaccgacgccaaggugaaacuuaucaagcaggaacuggauaaguauaaaaaugcugugacggagcuccagcugcugaugcaguccacccccgccacagggucuggaagcgcuauugccuccggcgucgcgguguguaagguucuccaccuggagggggaagugaacaaaaucaagagcgcccuucugucuaccaauaaagcugucgugucccucagcggaugcggcguuucugugcugacauuuaagguccuugaccugaagaacuacauugauaaacaacuccugccuauccugaauaagcaguccuguagcauuucuaacaucgagaccgugauugaguuccagcagaaaaauaaccggcuccuggaaaucacgcgcgaguuuuccgugaaugccggcgucacaaccccgguuagcacauauaugcuuaccaacuccgaacugcucucucugaucaaugacaugcccauuaccaacgaucaaaagaaacuuaugagcaacaaugugcagaucgugagacagcaguccuacagcauuaugugcaucauuaaggaggaaguccuggcuuaugugguucaacucccucuguacggggugaucgacacacccuguuggaaacugcauacgucuccucucugcaccacaaacaccaaggagggauccaauaucugucugacacggaccgaucgcggcugguacugcgacaacgccgggagcgucucuuucuuuccccaggcggaaacguguaaggugcagagcaauagaguuuucugcgauacaaugaacuccagaacccugccuucugaggugaaucucugcaacgucgacauuuuuaauccgaaauaugauuguaagaucaugaccagcaaaacagacguguccagcucugucauuaccucccugggagccaucgugagcugcuacggcaagacaaaauguacggcuucuaacaagugccgggggauuaucaagaccuucuccaauggaugugauuauguuagcaacaaaggcguggacacagucuccgugggcaauacccuuuacuauguuaacaagcaagaggggaaaucucuguacgugaagggagaacccaucauuaauuuuuaugacccucucgucuuccccagcgaugaguuugacgccuccaucucucaggugaacgagaaaauuaaccagagccuggcuuucauccgcaaguccgaugaacugcuccacaaugugaacgccggcaagagcacaaccaauauuaugaucacgaccauuaucaucguuauuaucgucauucugcuuucucugaucgccguggggcuccugcuguacugcaaagcuagauccacaccugugacccuuagcaaggaccagcucucuggaauuaacaauaucgcguucuccaacugaggacuaguacuggcugcaucucccuuuccucuguccuccauccuucucccaggauggugaagggggaccugguacccagugauccccaccccaggauccuaaaucaugacuuaccugcuaauaaaaacucauuggaaaagugagaagaucuaaaaaaaaaaaaaaaaaaaaaaaaaaaaaaaaaaaaaaaaaaaaaaaaaaaaaaaaaaaaaaaaugcaucccccccccccccccccccccccccccccccaaaggcucuuuucagagccaccagaauu

SEQ ID NO: 5629 - RNA, 1989 nt, Artificial Sequence
  mRNA product Design h-1 comprising derived and/or modified sequence from HRSV(A2)__F_DSCav1_mut5 (opt6)
gggagacccgugacccggaaguuguacggcuacgcgacuuucccucccacaaacccucgcgcccuuccuuuccuacuugggcccggcagaaagcuuaccauggaacuauuaauacuuaaagccaacgcaauaacaacaauucucacugcugucaccuucugcuucgccucaggccaaaacauaacggaagaauuuuaccaaucaacaugcucugcaguauccaaaggcuaccuaucugcucuaagaacagguugguauacaucaguaauaaccauagaacuaucaaacauaaaagaaaauaaaugcaacggaacagacgcaaaaguuaaacucauaaaacaagaacuagacaaauauaaaaacgcaguuaccgaacuacaacuacuuaugcaauccacucccgccacuggaucaggaucagcaauagcaucaggagucgcaguauguaaagucuuacaccucgaaggcgaagucaauaaaaucaaauccgcauuacuauccacaaacaaagcagucguaucccuaagcggaugcggaguaucaguacuaacauuuaaaguacuagaccuaaaaaauuacaucgauaaacaacuauuaccuauauuaaacaaacaauccugcuccauuucaaauaucgaaaccguaauagaauuucaacaaaaaaacaacagauuacuagaaauaacaagagaauuuuccguaaaugcuggcguaacaacaccaguauccacauacaugcucacaaacuccgaacuacuaucacuaauaaaugacaugcccauaacaaacgaucaaaaaaaacuaaugucaaauaauguacaaauaguaagacaacaaagcuacuccaucauguguauaauaaaagaagaaguacuagcauacguaguucaacuaccacuuuacggcguaaucgacaccccuugcuggaaacuacacaccuccccucuaugcaccacaaacacaaaagaagguuccaacauaugccuuaccagaacagacagaggcugguauugcgacaacgcaggaucaguuucauuuuuuccacaagcugaaacaugcaaaguacaaucaaacagagucuucugcgacacaaugaacucaagaacucuacccucagaaguaaaccuauguaacguagacauuuucaaccccaaauacgacugcaaaauuaugacaucaaaaacagacguuucaucaucaguuaucaccucauuaggagcaauaguaagcugcuacggaaaaacaaaaugcaccgccucaaauaaaugcagaggaauaauaaaaacuuucuccaacggaugcgacuacguuucaaacaaagguguagacacuguaucaguaggaaacacacuauauuacguaaauaaacaagaaggaaaaucacuuuaugucaaaggagaaccaauaaucaauuucuacgacccauuaguauucccaucagacgaauuugaugcuucaauaucacaaguaaacgaaaaaauaaaucaaucacucgcauuuauacgaaaaucagacgaacuacuacacaauguaaacgcaggcaaaucaacaacaaacauaaugauaacaacaauaaucauuguaauaauaguaauacuucuaucucuaauagcaguaggauuacuccucuacugcaaagcaagaucaaccccuguaacacuaucaaaagaccaacuuucagguauaaauaauauagcuuuuuccaauuaaggacuaguacuggcugcaucucccuuuccucuguccuccauccuucucccaggauggugaagggggaccugguacccagugauccccaccccaggauccuaaaucaugacuuaccugcuaauaaaaacucauuggaaaagugagaagaucuaaaaaaaaaaaaaaaaaaaaaaaaaaaaaaaaaaaaaaaaaaaaaaaaaaaaaaaaaaaaaaaaugcaucccccccccccccccccccccccccccccccaaaggcucuuuucagagccaccagaauu

SEQ ID NO: 5630 - RNA, 1989 nt, Artificial Sequence
  mRNA product Design h-1 comprising derived and/or modified sequence from HRSV(A2)__F_DSCav1_mut5 (opt11)
gggagacccgugacccggaaguuguacggcuacgcgacuuucccucccacaaacccucgcgcccuuccuuuccuacuugggcccggcagaaagcuuaccauggagcuccuaauccucaaagccaacgcgaucacuacaauccucacagccgucaccuucugcuucgccuccggccaaaacaucaccgaggaguucuaccaaucaaccugcuccgccguaucaaaaggauaccuaagcgcccuacggaccggcugguacacaucugucaucaccaucgaacuaucaaacaucaaagaaaacaaaugcaacggaaccgacgcaaaagucaaacugauuaaacaagaacuagacaaauacaaaaacgcagucaccgaacugcaauuacucaugcaaagcacaccggccaccggcucaggcagcgccaucgccuccggcgucgccgucugcaaaguucuccaccucgagggcgaagucaacaaaauaaaaucugcccuccucuccaccaacaaagccgucgucucccucagcggcugcggagucuccguccucaccuucaaaguucucgaucucaagaacuauauugacaaacaacuucuacccauacucaacaaacaaagcugcagcauauccaacaucgaaaccgucaucgaguuccaacaaaagaacaaccgccuccucgaaauaacccgcgaguucagcguuaacgccggagucacuaccccugucuccaccuacaugcucaccaacuccgaacuccuaucacuaaucaacgacaugcccauaaccaacgaccagaagaaacucauguccaacaacguccaaauuguccgacaacaaagcuacuccauaaugugcauaauaaaagaggaaguccucgccuacgucguacaacugccccuuuauggcguaaucgacacacccugcuggaaacuccacacgucaccccucugcaccaccaacacaaaagaaggcucgaacaucugccuaacacggacugaccgcggcugguacugcgacaacgccggcuccgucagcuucuucccacaagccgaaaccugcaaaguacaauccaaccgaguauucugcgacaccaugaacuccagaacccuccccucagaggucaaccugugcaacguagacaucuucaaccccaaauacgacugcaaaauaaugaccucaaaaacagacgucuccucuuccguaaucaccagccucggagccaucgucagcugcuacggcaaaaccaaaugcaccgccucaaacaaaugccgcggcaucaucaaaacauucucaaacggcugcgacuacgucuccaacaaaggcgucgacacaguaagcguaggcaacacacuguacuacgucaacaaacaagagggaaaaucacucuacgucaaaggagaacccauaaucaacuucuacgacccccucguuuuccccagcgacgaguucgacgccagcauaucccaagucaacgagaaaauuaaccaaucccuagcauucauccgaaaaucugacgaacugcuccacaacgucaacgcgggaaaaucaacaaccaacauaaugauaaccacaaucauaauagucaucaucguaauccuccucagccuaaucgcugucggccuccuccucuacugcaaagcccguuccaccccagucacacuuuccaaggaccaacuaagcggaauaaacaacaucgcguucucaaacuaaggacuaguacuggcugcaucucccuuuccucuguccuccauccuucucccaggauggugaagggggaccugguacccagugauccccaccccaggauccuaaaucaugacuuaccugcuaauaaaaacucauuggaaaagugagaagaucuaaaaaaaaaaaaaaaaaaaaaaaaaaaaaaaaaaaaaaaaaaaaaaaaaaaaaaaaaaaaaaaaugcaucccccccccccccccccccccccccccccccaaaggcucuuuucagagccaccagaauu

SEQ ID NO: 5631 - RNA, 2205 nt, Artificial Sequence
  mRNA product Design h-2 comprising derived and/or modified sequence from HRSV(A2)__F_DSCav1_mut5 (opt1)
gggagacccgugacccggaaguuguacggcuacgcgacuuucccucccacaaacccucgcgcccuuccuuuccuacuugggcccggcagaaagcuuaccauggagcugcucauccugaaggccaacgccaucaccaccauccugacggcggugaccuucugcuucgccagcggccagaacaucaccgaggaguucuaccaguccacgugcagcgccgucuccaagggguaccucagcgcccugcggaccggcugguacaccuccgugaucaccaucgagcugagcaacaucaaggagaacaagugcaacgggaccgacgccaaggugaagcucaucaagcaggagcuggacaaguacaagaacgcggucacggagcugcagcuccugaugcaguccaccccggcaaccggcuccggcuccgccaucgcgagcggcgucgccgugugcaaggugcugcaccucgagggggaggucaacaagaucaagagcgcccugcuguccaccaacaaggccguggugagccucuccggcugcggcgucagcgugcugaccuucaaggugcuggaccucaagaacuacaucgacaagcagcugcugcccauccugaacaagcagagcugcuccaucagcaacaucgagacggugaucgaguuccagcagaagaacaaccggcuccuggagaucacccgcgaguucagcgugaacgccggggucaccacccccguguccacguacaugcugaccaacagcgagcuccugucccugaucaacgacaugccgaucaccaacgaccagaagaagcucaugagcaacaacgugcagaucguccggcagcaguccuacagcaucaugugcaucaucaaggaggaggugcuggcguacgugguccagcugccccucuacggcgugaucgacacccccugcuggaagcugcacacgagcccccugugcaccaccaacaccaaggagggguccaacaucugccucacgcgcaccgaccggggcugguacugcgacaacgccggcagcgucuccuucuucccgcaggccgagaccugcaaggugcagagcaaccgcguguucugcgacaccaugaacucccggacgcugcccagcgagguaaaccucugcaacgucgacaucuucaaccccaaguacgacugcaagaucaugaccuccaagaccgacgugagcuccagcgugaucaccucccugggggccaucgucagcugcuacggcaagacgaagugcaccgccagcaacaagugccgggggaucaucaagaccuucuccaacggcugcgacuacgugagcaacaagggcguggacaccguguccgucgggaacacccuguacuacgugaacaagcaggagggcaagagccucuacgugaagggggagcccaucaucaacuucuacgacccgcuggucuuccccuccgacgaguucgacgcgagcaucucccaggugaacgagaagaucaaccagagccuggccuucauccgcaaguccgacgagcugcuccacaacgugaacgccggcaagagcacgaccaacaucaugaucaccaccaucaucaucgucaucaucgugauccugcugucccucaucgccguggggcugcugcucuacugcaaggcccggagcacgcccgucacccuguccaaggaccagcugagcggcaucaacaacaucgcguucuccaacugaggacuagugaagggaacacccaaauuuaauucagccuuaagcacaauuaauuaagagugaaacguaauuguacaagcaguuggucacccaccauagggcaugaucaacaccgcaaccuuuccuuuuucccccagugauucugaaaaaccccucuucccuucagcuugcuuagauguuccaaauuuaguaagcuuaaggcggccuacagaagaaaaagaaaaaaaaggccacaaaaguucccucucacuuucaguaaauaaaauaaaagcagcaacagaaauaaagaaauaaaugaaauucaaaaugaaauaaauauuguguugugcagcauuaaaaaaucaauaaaaauuaaaaaugagcaagaucuaaaaaaaaaaaaaaaaaaaaaaaaaaaaaaaaaaaaaaaaaaaaaaaaaaaaaaaaaaaaaaaaugcaucccccccccccccccccccccccccccccccaaaggcucuuuucagagccaccagaauu

SEQ ID NO: 5632 - RNA, 2205 nt, Artificial Sequence
  mRNA product Design h-2 comprising derived and/or modified sequence from HRSV(A2)__F_DSCav1_mut5 (opt1)
gggagacccgugacccggaaguuguacggcuacgcgacuuucccucccacaaacccucgcgcccuuccuuuccuacuugggcccggcagaaagcuuaccauggagcugcucauccugaaggccaacgccaucaccaccauccugacggcggugaccuucugcuucgccagcggccagaacaucaccgaggaguucuaccaguccacgugcagcgccgucuccaagggguaccucagcgcccugcgcaccggcugguacaccuccgugaucaccaucgagcugagcaacaucaaggagaacaagugcaacgggaccgacgccaaggugaagcucaucaagcaggagcuggacaaguacaagaacgcggucacggagcugcagcuccugaugcaguccacccccgccaccggcagcggguccgccaucgccagcggcguggcggugugcaagguccugcaccucgagggcgaggugaacaagaucaaguccgcccugcugagcaccaacaaggccguggucucccucagcgggugcggcguguccgugcugacguucaagguccuggaccucaagaacuacaucgacaagcagcugcugccgauccucaacaagcagagcugcuccaucagcaacaucgagaccgugaucgaguuccagcagaagaacaaccggcugcuggagaucacccgcgaguucuccgugaacgccggggucaccacgcccgugagcaccuacaugcucaccaacagcgagcugcugucccucaucaacgacaugcccaucaccaacgaccagaagaagcugaugagcaacaacgugcagaucguccggcagcaguccuacagcaucaugugcaucaucaaggaggaggugcuggccuacgugguccagcucccccuguacggcgugaucgacacgccgugcuggaagcugcacaccagcccccucugcaccaccaacacgaaggagggguccaacaucugccugacccgcaccgaccggggcugguacugcgacaacgcgggcuccgugagcuucuucccccaggccgagaccugcaagguccaguccaaccgcguguucugcgacacgaugaacagccggacccuccccuccgaggucaaccugugcaacguggacaucuucaacccgaaguacgacugcaagaucaugaccagcaagaccgacguguccagcuccgucaucacgagccugggggccaucguguccugcuacggcaagaccaagugcaccgccagcaacaagugccgggggaucaucaagaccuucuccaacggcugcgacuacgugagcaacaagggcgucgacacggugagcguggggaacacccucuacuacgucaacaagcaggagggcaagucccuguacgugaagggggagcccaucaucaacuucuacgacccccugguguuccccagcgacgaguucgacgccuccaucagccaggucaacgagaagaucaaccagucccucgcguucauccgcaagagcgacgagcugcugcacaacgugaacgccggcaaguccaccaccaacaucaugaucaccacgaucaucaucgugaucaucgucauccuccugagccugaucgccguggggcuccugcuguacugcaaggcccgguccaccccggugacccugagcaaggaccagcucuccggcaucaacaacaucgccuucagcaacugaggacuagugaagggaacacccaaauuuaauucagccuuaagcacaauuaauuaagagugaaacguaauuguacaagcaguuggucacccaccauagggcaugaucaacaccgcaaccuuuccuuuuucccccagugauucugaaaaaccccucuucccuucagcuugcuuagauguuccaaauuuaguaagcuuaaggcggccuacagaagaaaaagaaaaaaaaggccacaaaaguucccucucacuuucaguaaauaaaauaaaagcagcaacagaaauaaagaaauaaaugaaauucaaaaugaaauaaauauuguguugugcagcauuaaaaaaucaauaaaaauuaaaaaugagcaagaucuaaaaaaaaaaaaaaaaaaaaaaaaaaaaaaaaaaaaaaaaaaaaaaaaaaaaaaaaaaaaaaaaugcaucccccccccccccccccccccccccccccccaaaggcucuuuucagagccaccagaauu

SEQ ID NO: 5633 - RNA, 2205 nt, Artificial Sequence
  mRNA product Design h-2 comprising derived and/or modified sequence from HRSV(A2)__F_DSCav1_mut5 (opt2)
gggagacccgugacccggaaguuguacggcuacgcgacuuucccucccacaaacccucgcgcccuuccuuuccuacuugggcccggcagaaagcuuaccauggagcuccucauccucaaggccaacgccaucaccaccauccucaccgccgucaccuucugcuucgccuccggccagaacaucaccgaggaguucuaccaguccaccugcuccgccgucuccaagggcuaccucuccgcccuccgcaccggcugguacaccuccgucaucaccaucgagcucuccaacaucaaggagaacaagugcaacggcaccgacgccaaggucaagcucaucaagcaggagcucgacaaguacaagaacgccgucaccgagcuccagcuccucaugcaguccacccccgccaccggcuccggcuccgccaucgccuccggcgucgccgucugcaagguccuccaccucgagggcgaggucaacaagaucaaguccgcccuccucuccaccaacaaggccgucgucucccucuccggcugcggcgucuccguccucaccuucaagguccucgaccucaagaacuacaucgacaagcagcuccuccccauccucaacaagcaguccugcuccaucuccaacaucgagaccgucaucgaguuccagcagaagaacaaccgccuccucgagaucacccgcgaguucuccgucaacgccggcgucaccacccccgucuccaccuacaugcucaccaacuccgagcuccucucccucaucaacgacaugcccaucaccaacgaccagaagaagcucauguccaacaacguccagaucguccgccagcaguccuacuccaucaugugcaucaucaaggaggagguccucgccuacgucguccagcucccccucuacggcgucaucgacacccccugcuggaagcuccacaccuccccccucugcaccaccaacaccaaggagggcuccaacaucugccucacccgcaccgaccgcggcugguacugcgacaacgccggcuccgucuccuucuucccccaggccgagaccugcaagguccaguccaaccgcgucuucugcgacaccaugaacucccgcacccuccccuccgaggucaaccucugcaacgucgacaucuucaaccccaaguacgacugcaagaucaugaccuccaagaccgacgucuccuccuccgucaucaccucccucggcgccaucgucuccugcuacggcaagaccaagugcaccgccuccaacaagugccgcggcaucaucaagaccuucuccaacggcugcgacuacgucuccaacaagggcgucgacaccgucuccgucggcaacacccucuacuacgucaacaagcaggagggcaagucccucuacgucaagggcgagcccaucaucaacuucuacgacccccucgucuuccccuccgacgaguucgacgccuccaucucccaggucaacgagaagaucaaccagucccucgccuucauccgcaaguccgacgagcuccuccacaacgucaacgccggcaaguccaccaccaacaucaugaucaccaccaucaucaucgucaucaucgucauccuccucucccucaucgccgucggccuccuccucuacugcaaggcccgcuccacccccgucacccucuccaaggaccagcucuccggcaucaacaacaucgccuucuccaacugaggacuagugaagggaacacccaaauuuaauucagccuuaagcacaauuaauuaagagugaaacguaauuguacaagcaguuggucacccaccauagggcaugaucaacaccgcaaccuuuccuuuuucccccagugauucugaaaaaccccucuucccuucagcuugcuuagauguuccaaauuuaguaagcuuaaggcggccuacagaagaaaaagaaaaaaaaggccacaaaaguucccucucacuuucaguaaauaaaauaaaagcagcaacagaaauaaagaaauaaaugaaauucaaaaugaaauaaauauuguguugugcagcauuaaaaaaucaauaaaaauuaaaaaugagcaagaucuaaaaaaaaaaaaaaaaaaaaaaaaaaaaaaaaaaaaaaaaaaaaaaaaaaaaaaaaaaaaaaaaugcaucccccccccccccccccccccccccccccccaaaggcucuuuucagagccaccagaauu

SEQ ID NO: 5634 - RNA, 2205 nt, Artificial Sequence
  mRNA product Design h-2 comprising derived and/or modified sequence from HRSV(A2)__F_DSCav1_mut5 (opt3)
gggagacccgugacccggaaguuguacggcuacgcgacuuucccucccacaaacccucgcgcccuuccuuuccuacuugggcccggcagaaagcuuaccauggagcugcucauccuuaaggccaacgcuauuaccacaauacugacugcagugacguucugcuuugccagcggccagaauaucaccgaagaguucuaccaauccacauguucugcggucucaaaaggguauuugagugcuuuaagaacuggaugguacaccagcguuauuacaaucgaacuguccaacauuaaggagaauaaaugcaacgguaccgacgccaaggugaaacuaaucaagcaggaacucgauaaguauaaaaaugcaguaacugagcugcagcuucugaugcagucuacacccgccaccggcucggggucagcuauagcaagcggaguggccgucuguaagguguugcaccucgagggcgaaguuaacaaaaucaagagugcucugcuguccacgaauaaagccguggucucucucagcgguugcgggguguccguauuaacuuuuaagguucuggaccuuaagaacuacauugauaaacaauugcugccuauccuaaauaagcagucauguaguauuagcaacaucgagaccgugauagaguuccagcagaaaaauaacaggcuccuggaaauuacacgggaguuuucugucaaugcgggagugacuaccccaguguccacauauaugcuuaccaacucagaacuguugagccucaucaaugacaugccgauuacgaacgaucaaaagaaacugaugaguaacaauguccagaucguucgccagcagucuuacuccaucaugugcauuauaaaggaggaaguguuagcauauguagugcaacugccccucuacggcgucaucgacacuccuuguuggaaacuucauacaagcccacugugcaccacuaacacaaaggagggcucgaauauuuguuugacccgaacggaucgugggugguacugcgacaacgccggaucuguguccuucuuuccccaggcugaaaccuguaagguucagucaaauagaguguucugcgauacaaugaacaguagaacucugccuagcgaggucaaucucugcaacguggacaucuuuaauccaaaauaugauuguaagauaaugaccuccaaaacagacguaucuagcucaguuauuaccagucugggugccaucguguccugcuacggcaagacuaaauguacagcaagcaacaagugcagggggaucauuaagaccuucucuaauggaugugauuaugucucaaacaaaggcguggacacugucaguguggguaauacgcuuuacuauguuaacaagcaagaggggaaaagccuguacgugaagggagaacccaucauuaauuuuuaugacccuuugguauucccauccgaugaguuugacgcuucuauaucgcaggucaacgagaaaaucaaccagagccucgccuucauucggaaguccgaugaacuguuacacaaugugaacgcgggcaagucaacaaccaauaucaugaucacuaccauuauaaucguuauuaucgugauucugcuaagucucaucgccgucggccugcuuuuguacugcaaagcacgcucuacaccggugacccugagcaaggaccagcucuccgggauaaacaauaucgcuuucucaaacugaggacuagugaagggaacacccaaauuuaauucagccuuaagcacaauuaauuaagagugaaacguaauuguacaagcaguuggucacccaccauagggcaugaucaacaccgcaaccuuuccuuuuucccccagugauucugaaaaaccccucuucccuucagcuugcuuagauguuccaaauuuaguaagcuuaaggcggccuacagaagaaaaagaaaaaaaaggccacaaaaguucccucucacuuucaguaaauaaaauaaaagcagcaacagaaauaaagaaauaaaugaaauucaaaaugaaauaaauauuguguugugcagcauuaaaaaaucaauaaaaauuaaaaaugagcaagaucuaaaaaaaaaaaaaaaaaaaaaaaaaaaaaaaaaaaaaaaaaaaaaaaaaaaaaaaaaaaaaaaaugcaucccccccccccccccccccccccccccccccaaaggcucuuuucagagccaccagaauu

SEQ ID NO: 5635 - RNA, 2205 nt, Artificial Sequence
  mRNA product Design h-2 comprising derived and/or modified sequence from HRSV(A2)__F_DSCav1_mut5 (opt4)
gggagacccgugacccggaaguuguacggcuacgcgacuuucccucccacaaacccucgcgcccuuccuuuccuacuugggcccggcagaaagcuuaccauggagcugcugauccugaaggccaacgccaucaccaccauccugaccgccgugaccuucugcuucgccagcggccagaacaucaccgaggaguucuaccagagcaccugcagcgccgugagcaagggcuaccugagcgcccugagaaccggcugguacaccagcgugaucaccaucgagcugagcaacaucaaggagaacaagugcaacggcaccgacgccaaggugaagcugaucaagcaggagcuggacaaguacaagaacgccgugaccgagcugcagcugcugaugcagagcacccccgccaccggcagcggcagcgccaucgccagcggcguggccgugugcaaggugcugcaccuggagggcgaggugaacaagaucaagagcgcccugcugagcaccaacaaggccguggugagccugagcggcugcggcgugagcgugcugaccuucaaggugcuggaccugaagaacuacaucgacaagcagcugcugcccauccugaacaagcagagcugcagcaucagcaacaucgagaccgugaucgaguuccagcagaagaacaacagacugcuggagaucaccagagaguucagcgugaacgccggcgugaccacccccgugagcaccuacaugcugaccaacagcgagcugcugagccugaucaacgacaugcccaucaccaacgaccagaagaagcugaugagcaacaacgugcagaucgugagacagcagagcuacagcaucaugugcaucaucaaggaggaggugcuggccuacguggugcagcugccccuguacggcgugaucgacacccccugcuggaagcugcacaccagcccccugugcaccaccaacaccaaggagggcagcaacaucugccugaccagaaccgacagaggcugguacugcgacaacgccggcagcgugagcuucuucccccaggccgagaccugcaaggugcagagcaacagaguguucugcgacaccaugaacagcagaacccugcccagcgaggugaaccugugcaacguggacaucuucaaccccaaguacgacugcaagaucaugaccagcaagaccgacgugagcagcagcgugaucaccagccugggcgccaucgugagcugcuacggcaagaccaagugcaccgccagcaacaagugcagaggcaucaucaagaccuucagcaacggcugcgacuacgugagcaacaagggcguggacaccgugagcgugggcaacacccuguacuacgugaacaagcaggagggcaagagccuguacgugaagggcgagcccaucaucaacuucuacgacccccugguguuccccagcgacgaguucgacgccagcaucagccaggugaacgagaagaucaaccagagccuggccuucaucagaaagagcgacgagcugcugcacaacgugaacgccggcaagagcaccaccaacaucaugaucaccaccaucaucaucgugaucaucgugauccugcugagccugaucgccgugggccugcugcuguacugcaaggccagaagcacccccgugacccugagcaaggaccagcugagcggcaucaacaacaucgccuucagcaacugaggacuagugaagggaacacccaaauuuaauucagccuuaagcacaauuaauuaagagugaaacguaauuguacaagcaguuggucacccaccauagggcaugaucaacaccgcaaccuuuccuuuuucccccagugauucugaaaaaccccucuucccuucagcuugcuuagauguuccaaauuuaguaagcuuaaggcggccuacagaagaaaaagaaaaaaaaggccacaaaaguucccucucacuuucaguaaauaaaauaaaagcagcaacagaaauaaagaaauaaaugaaauucaaaaugaaauaaauauuguguugugcagcauuaaaaaaucaauaaaaauuaaaaaugagcaagaucuaaaaaaaaaaaaaaaaaaaaaaaaaaaaaaaaaaaaaaaaaaaaaaaaaaaaaaaaaaaaaaaaugcaucccccccccccccccccccccccccccccccaaaggcucuuuucagagccaccagaauu

SEQ ID NO: 5636 - RNA, 2205 nt, Artificial Sequence
  mRNA product Design h-2 comprising derived and/or modified sequence from HRSV(A2)__F_DSCav1_mut5 (opt5)
gggagacccgugacccggaaguuguacggcuacgcgacuuucccucccacaaacccucgcgcccuuccuuuccuacuugggcccggcagaaagcuuaccauggagcugcucauccugaaggccaacgcuauuaccacaauccuuacggccgugaccuucugcuuugcgagcggccagaauauuacagaagaguucuaccaauccaccuguucugcugucagcaaaggguaucuguccgcccucagaacaggaugguacaccucuguuaucacaauugaacugagcaacaucaaggagaauaaaugcaacggcaccgacgccaaggugaaacuuaucaagcaggaacuggauaaguauaaaaaugcugugacggagcuccagcugcugaugcaguccacccccgccacagggucuggaagcgcuauugccuccggcgucgcgguguguaagguucuccaccuggagggggaagugaacaaaaucaagagcgcccuucugucuaccaauaaagcugucgugucccucagcggaugcggcguuucugugcugacauuuaagguccuugaccugaagaacuacauugauaaacaacuccugccuauccugaauaagcaguccuguagcauuucuaacaucgagaccgugauugaguuccagcagaaaaauaaccggcuccuggaaaucacgcgcgaguuuuccgugaaugccggcgucacaaccccgguuagcacauauaugcuuaccaacuccgaacugcucucucugaucaaugacaugcccauuaccaacgaucaaaagaaacuuaugagcaacaaugugcagaucgugagacagcaguccuacagcauuaugugcaucauuaaggaggaaguccuggcuuaugugguucaacucccucuguacggggugaucgacacacccuguuggaaacugcauacgucuccucucugcaccacaaacaccaaggagggauccaauaucugucugacacggaccgaucgcggcugguacugcgacaacgccgggagcgucucuuucuuuccccaggcggaaacguguaaggugcagagcaauagaguuuucugcgauacaaugaacuccagaacccugccuucugaggugaaucucugcaacgucgacauuuuuaauccgaaauaugauuguaagaucaugaccagcaaaacagacguguccagcucugucauuaccucccugggagccaucgugagcugcuacggcaagacaaaauguacggcuucuaacaagugccgggggauuaucaagaccuucuccaauggaugugauuauguuagcaacaaaggcguggacacagucuccgugggcaauacccuuuacuauguuaacaagcaagaggggaaaucucuguacgugaagggagaacccaucauuaauuuuuaugacccucucgucuuccccagcgaugaguuugacgccuccaucucucaggugaacgagaaaauuaaccagagccuggcuuucauccgcaaguccgaugaacugcuccacaaugugaacgccggcaagagcacaaccaauauuaugaucacgaccauuaucaucguuauuaucgucauucugcuuucucugaucgccguggggcuccugcuguacugcaaagcuagauccacaccugugacccuuagcaaggaccagcucucuggaauuaacaauaucgcguucuccaacugaggacuagugaagggaacacccaaauuuaauucagccuuaagcacaauuaauuaagagugaaacguaauuguacaagcaguuggucacccaccauagggcaugaucaacaccgcaaccuuuccuuuuucccccagugauucugaaaaaccccucuucccuucagcuugcuuagauguuccaaauuuaguaagcuuaaggcggccuacagaagaaaaagaaaaaaaaggccacaaaaguucccucucacuuucaguaaauaaaauaaaagcagcaacagaaauaaagaaauaaaugaaauucaaaaugaaauaaauauuguguugugcagcauuaaaaaaucaauaaaaauuaaaaaugagcaagaucuaaaaaaaaaaaaaaaaaaaaaaaaaaaaaaaaaaaaaaaaaaaaaaaaaaaaaaaaaaaaaaaaugcaucccccccccccccccccccccccccccccccaaaggcucuuuucagagccaccagaauu

SEQ ID NO: 5637 - RNA, 2205 nt, Artificial Sequence
  mRNA product Design h-2 comprising derived and/or modified sequence from HRSV(A2)__F_DSCav1_mut5 (opt6)
gggagacccgugacccggaaguuguacggcuacgcgacuuucccucccacaaacccucgcgcccuuccuuuccuacuugggcccggcagaaagcuuaccauggaacuauuaauacuuaaagccaacgcaauaacaacaauucucacugcugucaccuucugcuucgccucaggccaaaacauaacggaagaauuuuaccaaucaacaugcucugcaguauccaaaggcuaccuaucugcucuaagaacagguugguauacaucaguaauaaccauagaacuaucaaacauaaaagaaaauaaaugcaacggaacagacgcaaaaguuaaacucauaaaacaagaacuagacaaauauaaaaacgcaguuaccgaacuacaacuacuuaugcaauccacucccgccacuggaucaggaucagcaauagcaucaggagucgcaguauguaaagucuuacaccucgaaggcgaagucaauaaaaucaaauccgcauuacuauccacaaacaaagcagucguaucccuaagcggaugcggaguaucaguacuaacauuuaaaguacuagaccuaaaaaauuacaucgauaaacaacuauuaccuauauuaaacaaacaauccugcuccauuucaaauaucgaaaccguaauagaauuucaacaaaaaaacaacagauuacuagaaauaacaagagaauuuuccguaaaugcuggcguaacaacaccaguauccacauacaugcucacaaacuccgaacuacuaucacuaauaaaugacaugcccauaacaaacgaucaaaaaaaacuaaugucaaauaauguacaaauaguaagacaacaaagcuacuccaucauguguauaauaaaagaagaaguacuagcauacguaguucaacuaccacuuuacggcguaaucgacaccccuugcuggaaacuacacaccuccccucuaugcaccacaaacacaaaagaagguuccaacauaugccuuaccagaacagacagaggcugguauugcgacaacgcaggaucaguuucauuuuuuccacaagcugaaacaugcaaaguacaaucaaacagagucuucugcgacacaaugaacucaagaacucuacccucagaaguaaaccuauguaacguagacauuuucaaccccaaauacgacugcaaaauuaugacaucaaaaacagacguuucaucaucaguuaucaccucauuaggagcaauaguaagcugcuacggaaaaacaaaaugcaccgccucaaauaaaugcagaggaauaauaaaaacuuucuccaacggaugcgacuacguuucaaacaaagguguagacacuguaucaguaggaaacacacuauauuacguaaauaaacaagaaggaaaaucacuuuaugucaaaggagaaccaauaaucaauuucuacgacccauuaguauucccaucagacgaauuugaugcuucaauaucacaaguaaacgaaaaaauaaaucaaucacucgcauuuauacgaaaaucagacgaacuacuacacaauguaaacgcaggcaaaucaacaacaaacauaaugauaacaacaauaaucauuguaauaauaguaauacuucuaucucuaauagcaguaggauuacuccucuacugcaaagcaagaucaaccccuguaacacuaucaaaagaccaacuuucagguauaaauaauauagcuuuuuccaauuaaggacuagugaagggaacacccaaauuuaauucagccuuaagcacaauuaauuaagagugaaacguaauuguacaagcaguuggucacccaccauagggcaugaucaacaccgcaaccuuuccuuuuucccccagugauucugaaaaaccccucuucccuucagcuugcuuagauguuccaaauuuaguaagcuuaaggcggccuacagaagaaaaagaaaaaaaaggccacaaaaguucccucucacuuucaguaaauaaaauaaaagcagcaacagaaauaaagaaauaaaugaaauucaaaaugaaauaaauauuguguugugcagcauuaaaaaaucaauaaaaauuaaaaaugagcaagaucuaaaaaaaaaaaaaaaaaaaaaaaaaaaaaaaaaaaaaaaaaaaaaaaaaaaaaaaaaaaaaaaaugcaucccccccccccccccccccccccccccccccaaaggcucuuuucagagccaccagaauu

SEQ ID NO: 5638 - RNA, 2205 nt, Artificial Sequence
  mRNA product Design h-2 comprising derived and/or modified sequence from HRSV(A2)__F_DSCav1_mut5 (opt11)
gggagacccgugacccggaaguuguacggcuacgcgacuuucccucccacaaacccucgcgcccuuccuuuccuacuugggcccggcagaaagcuuaccauggagcuccuaauccucaaagccaacgcgaucacuacaauccucacagccgucaccuucugcuucgccuccggccaaaacaucaccgaggaguucuaccaaucaaccugcuccgccguaucaaaaggauaccuaagcgcccuacggaccggcugguacacaucugucaucaccaucgaacuaucaaacaucaaagaaaacaaaugcaacggaaccgacgcaaaagucaaacugauuaaacaagaacuagacaaauacaaaaacgcagucaccgaacugcaauuacucaugcaaagcacaccggccaccggcucaggcagcgccaucgccuccggcgucgccgucugcaaaguucuccaccucgagggcgaagucaacaaaauaaaaucugcccuccucuccaccaacaaagccgucgucucccucagcggcugcggagucuccguccucaccuucaaaguucucgaucucaagaacuauauugacaaacaacuucuacccauacucaacaaacaaagcugcagcauauccaacaucgaaaccgucaucgaguuccaacaaaagaacaaccgccuccucgaaauaacccgcgaguucagcguuaacgccggagucacuaccccugucuccaccuacaugcucaccaacuccgaacuccuaucacuaaucaacgacaugcccauaaccaacgaccagaagaaacucauguccaacaacguccaaauuguccgacaacaaagcuacuccauaaugugcauaauaaaagaggaaguccucgccuacgucguacaacugccccuuuauggcguaaucgacacacccugcuggaaacuccacacgucaccccucugcaccaccaacacaaaagaaggcucgaacaucugccuaacacggacugaccgcggcugguacugcgacaacgccggcuccgucagcuucuucccacaagccgaaaccugcaaaguacaauccaaccgaguauucugcgacaccaugaacuccagaacccuccccucagaggucaaccugugcaacguagacaucuucaaccccaaauacgacugcaaaauaaugaccucaaaaacagacgucuccucuuccguaaucaccagccucggagccaucgucagcugcuacggcaaaaccaaaugcaccgccucaaacaaaugccgcggcaucaucaaaacauucucaaacggcugcgacuacgucuccaacaaaggcgucgacacaguaagcguaggcaacacacuguacuacgucaacaaacaagagggaaaaucacucuacgucaaaggagaacccauaaucaacuucuacgacccccucguuuuccccagcgacgaguucgacgccagcauaucccaagucaacgagaaaauuaaccaaucccuagcauucauccgaaaaucugacgaacugcuccacaacgucaacgcgggaaaaucaacaaccaacauaaugauaaccacaaucauaauagucaucaucguaauccuccucagccuaaucgcugucggccuccuccucuacugcaaagcccguuccaccccagucacacuuuccaaggaccaacuaagcggaauaaacaacaucgcguucucaaacuaaggacuagugaagggaacacccaaauuuaauucagccuuaagcacaauuaauuaagagugaaacguaauuguacaagcaguuggucacccaccauagggcaugaucaacaccgcaaccuuuccuuuuucccccagugauucugaaaaaccccucuucccuucagcuugcuuagauguuccaaauuuaguaagcuuaaggcggccuacagaagaaaaagaaaaaaaaggccacaaaaguucccucucacuuucaguaaauaaaauaaaagcagcaacagaaauaaagaaauaaaugaaauucaaaaugaaauaaauauuguguugugcagcauuaaaaaaucaauaaaaauuaaaaaugagcaagaucuaaaaaaaaaaaaaaaaaaaaaaaaaaaaaaaaaaaaaaaaaaaaaaaaaaaaaaaaaaaaaaaaugcaucccccccccccccccccccccccccccccccaaaggcucuuuucagagccaccagaauu

SEQ ID NO: 5639 - RNA, 1985 nt, Artificial Sequence
  mRNA product Design h-3 comprising derived and/or modified sequence from HRSV(A2)__F_DSCav1_mut5 (opt1)
gggagacccgugacccggaaguuguacggcuacgcgacuuucccucccacaaacccucgcgcccuuccuuuccuacuugggcccggcagaaagcuuaccauggagcugcucauccugaaggccaacgccaucaccaccauccugacggcggugaccuucugcuucgccagcggccagaacaucaccgaggaguucuaccaguccacgugcagcgccgucuccaagggguaccucagcgcccugcggaccggcugguacaccuccgugaucaccaucgagcugagcaacaucaaggagaacaagugcaacgggaccgacgccaaggugaagcucaucaagcaggagcuggacaaguacaagaacgcggucacggagcugcagcuccugaugcaguccaccccggcaaccggcuccggcuccgccaucgcgagcggcgucgccgugugcaaggugcugcaccucgagggggaggucaacaagaucaagagcgcccugcuguccaccaacaaggccguggugagccucuccggcugcggcgucagcgugcugaccuucaaggugcuggaccucaagaacuacaucgacaagcagcugcugcccauccugaacaagcagagcugcuccaucagcaacaucgagacggugaucgaguuccagcagaagaacaaccggcuccuggagaucacccgcgaguucagcgugaacgccggggucaccacccccguguccacguacaugcugaccaacagcgagcuccugucccugaucaacgacaugccgaucaccaacgaccagaagaagcucaugagcaacaacgugcagaucguccggcagcaguccuacagcaucaugugcaucaucaaggaggaggugcuggcguacgugguccagcugccccucuacggcgugaucgacacccccugcuggaagcugcacacgagcccccugugcaccaccaacaccaaggagggguccaacaucugccucacgcgcaccgaccggggcugguacugcgacaacgccggcagcgucuccuucuucccgcaggccgagaccugcaaggugcagagcaaccgcguguucugcgacaccaugaacucccggacgcugcccagcgagguaaaccucugcaacgucgacaucuucaaccccaaguacgacugcaagaucaugaccuccaagaccgacgugagcuccagcgugaucaccucccugggggccaucgucagcugcuacggcaagacgaagugcaccgccagcaacaagugccgggggaucaucaagaccuucuccaacggcugcgacuacgugagcaacaagggcguggacaccguguccgucgggaacacccuguacuacgugaacaagcaggagggcaagagccucuacgugaagggggagcccaucaucaacuucuacgacccgcuggucuuccccuccgacgaguucgacgcgagcaucucccaggugaacgagaagaucaaccagagccuggccuucauccgcaaguccgacgagcugcuccacaacgugaacgccggcaagagcacgaccaacaucaugaucaccaccaucaucaucgucaucaucgugauccugcugucccucaucgccguggggcugcugcucuacugcaaggcccggagcacgcccgucacccuguccaaggaccagcugagcggcaucaacaacaucgcguucuccaacugaggacuaguggaagcauuuuccuggcugauuaaaagaaauuacucagcuauggucaucuguuccuguuagaaggcuaugcagcauauuauauacuaugcgcauguuaugaaaugcauaauaaaaaauuuuaaaaaaucuaaaagaucuaaaaaaaaaaaaaaaaaaaaaaaaaaaaaaaaaaaaaaaaaaaaaaaaaaaaaaaaaaaaaaaaugcaucccccccccccccccccccccccccccccccaaaggcucuuuucagagccaccagaauu

SEQ ID NO: 5640 - RNA, 1985 nt, Artificial Sequence
  mRNA product Design h-3 comprising derived and/or modified sequence from HRSV(A2)__F_DSCav1_mut5 (opt1)
gggagacccgugacccggaaguuguacggcuacgcgacuuucccucccacaaacccucgcgcccuuccuuuccuacuugggcccggcagaaagcuuaccauggagcugcucauccugaaggccaacgccaucaccaccauccugacggcggugaccuucugcuucgccagcggccagaacaucaccgaggaguucuaccaguccacgugcagcgccgucuccaagggguaccucagcgcccugcgcaccggcugguacaccuccgugaucaccaucgagcugagcaacaucaaggagaacaagugcaacgggaccgacgccaaggugaagcucaucaagcaggagcuggacaaguacaagaacgcggucacggagcugcagcuccugaugcaguccacccccgccaccggcagcggguccgccaucgccagcggcguggcggugugcaagguccugcaccucgagggcgaggugaacaagaucaaguccgcccugcugagcaccaacaaggccguggucucccucagcgggugcggcguguccgugcugacguucaagguccuggaccucaagaacuacaucgacaagcagcugcugccgauccucaacaagcagagcugcuccaucagcaacaucgagaccgugaucgaguuccagcagaagaacaaccggcugcuggagaucacccgcgaguucuccgugaacgccggggucaccacgcccgugagcaccuacaugcucaccaacagcgagcugcugucccucaucaacgacaugcccaucaccaacgaccagaagaagcugaugagcaacaacgugcagaucguccggcagcaguccuacagcaucaugugcaucaucaaggaggaggugcuggccuacgugguccagcucccccuguacggcgugaucgacacgccgugcuggaagcugcacaccagcccccucugcaccaccaacacgaaggagggguccaacaucugccugacccgcaccgaccggggcugguacugcgacaacgcgggcuccgugagcuucuucccccaggccgagaccugcaagguccaguccaaccgcguguucugcgacacgaugaacagccggacccuccccuccgaggucaaccugugcaacguggacaucuucaacccgaaguacgacugcaagaucaugaccagcaagaccgacguguccagcuccgucaucacgagccugggggccaucguguccugcuacggcaagaccaagugcaccgccagcaacaagugccgggggaucaucaagaccuucuccaacggcugcgacuacgugagcaacaagggcgucgacacggugagcguggggaacacccucuacuacgucaacaagcaggagggcaagucccuguacgugaagggggagcccaucaucaacuucuacgacccccugguguuccccagcgacgaguucgacgccuccaucagccaggucaacgagaagaucaaccagucccucgcguucauccgcaagagcgacgagcugcugcacaacgugaacgccggcaaguccaccaccaacaucaugaucaccacgaucaucaucgugaucaucgucauccuccugagccugaucgccguggggcuccugcuguacugcaaggcccgguccaccccggugacccugagcaaggaccagcucuccggcaucaacaacaucgccuucagcaacugaggacuaguggaagcauuuuccuggcugauuaaaagaaauuacucagcuauggucaucuguuccuguuagaaggcuaugcagcauauuauauacuaugcgcauguuaugaaaugcauaauaaaaaauuuuaaaaaaucuaaaagaucuaaaaaaaaaaaaaaaaaaaaaaaaaaaaaaaaaaaaaaaaaaaaaaaaaaaaaaaaaaaaaaaaugcaucccccccccccccccccccccccccccccccaaaggcucuuuucagagccaccagaauu

SEQ ID NO: 5641 - RNA, 1985 nt, Artificial Sequence
  mRNA product Design h-3 comprising derived and/or modified sequence from HRSV(A2)__F_DSCav1_mut5 (opt2)
gggagacccgugacccggaaguuguacggcuacgcgacuuucccucccacaaacccucgcgcccuuccuuuccuacuugggcccggcagaaagcuuaccauggagcuccucauccucaaggccaacgccaucaccaccauccucaccgccgucaccuucugcuucgccuccggccagaacaucaccgaggaguucuaccaguccaccugcuccgccgucuccaagggcuaccucuccgcccuccgcaccggcugguacaccuccgucaucaccaucgagcucuccaacaucaaggagaacaagugcaacggcaccgacgccaaggucaagcucaucaagcaggagcucgacaaguacaagaacgccgucaccgagcuccagcuccucaugcaguccacccccgccaccggcuccggcuccgccaucgccuccggcgucgccgucugcaagguccuccaccucgagggcgaggucaacaagaucaaguccgcccuccucuccaccaacaaggccgucgucucccucuccggcugcggcgucuccguccucaccuucaagguccucgaccucaagaacuacaucgacaagcagcuccuccccauccucaacaagcaguccugcuccaucuccaacaucgagaccgucaucgaguuccagcagaagaacaaccgccuccucgagaucacccgcgaguucuccgucaacgccggcgucaccacccccgucuccaccuacaugcucaccaacuccgagcuccucucccucaucaacgacaugcccaucaccaacgaccagaagaagcucauguccaacaacguccagaucguccgccagcaguccuacuccaucaugugcaucaucaaggaggagguccucgccuacgucguccagcucccccucuacggcgucaucgacacccccugcuggaagcuccacaccuccccccucugcaccaccaacaccaaggagggcuccaacaucugccucacccgcaccgaccgcggcugguacugcgacaacgccggcuccgucuccuucuucccccaggccgagaccugcaagguccaguccaaccgcgucuucugcgacaccaugaacucccgcacccuccccuccgaggucaaccucugcaacgucgacaucuucaaccccaaguacgacugcaagaucaugaccuccaagaccgacgucuccuccuccgucaucaccucccucggcgccaucgucuccugcuacggcaagaccaagugcaccgccuccaacaagugccgcggcaucaucaagaccuucuccaacggcugcgacuacgucuccaacaagggcgucgacaccgucuccgucggcaacacccucuacuacgucaacaagcaggagggcaagucccucuacgucaagggcgagcccaucaucaacuucuacgacccccucgucuuccccuccgacgaguucgacgccuccaucucccaggucaacgagaagaucaaccagucccucgccuucauccgcaaguccgacgagcuccuccacaacgucaacgccggcaaguccaccaccaacaucaugaucaccaccaucaucaucgucaucaucgucauccuccucucccucaucgccgucggccuccuccucuacugcaaggcccgcuccacccccgucacccucuccaaggaccagcucuccggcaucaacaacaucgccuucuccaacugaggacuaguggaagcauuuuccuggcugauuaaaagaaauuacucagcuauggucaucuguuccuguuagaaggcuaugcagcauauuauauacuaugcgcauguuaugaaaugcauaauaaaaaauuuuaaaaaaucuaaaagaucuaaaaaaaaaaaaaaaaaaaaaaaaaaaaaaaaaaaaaaaaaaaaaaaaaaaaaaaaaaaaaaaaugcaucccccccccccccccccccccccccccccccaaaggcucuuuucagagccaccagaauu

SEQ ID NO: 5642 - RNA, 1985 nt, Artificial Sequence
  mRNA product Design h-3 comprising derived and/or modified sequence from HRSV(A2)__F_DSCav1_mut5 (opt3)
gggagacccgugacccggaaguuguacggcuacgcgacuuucccucccacaaacccucgcgcccuuccuuuccuacuugggcccggcagaaagcuuaccauggagcugcucauccuuaaggccaacgcuauuaccacaauacugacugcagugacguucugcuuugccagcggccagaauaucaccgaagaguucuaccaauccacauguucugcggucucaaaaggguauuugagugcuuuaagaacuggaugguacaccagcguuauuacaaucgaacuguccaacauuaaggagaauaaaugcaacgguaccgacgccaaggugaaacuaaucaagcaggaacucgauaaguauaaaaaugcaguaacugagcugcagcuucugaugcagucuacacccgccaccggcucggggucagcuauagcaagcggaguggccgucuguaagguguugcaccucgagggcgaaguuaacaaaaucaagagugcucugcuguccacgaauaaagccguggucucucucagcgguugcgggguguccguauuaacuuuuaagguucuggaccuuaagaacuacauugauaaacaauugcugccuauccuaaauaagcagucauguaguauuagcaacaucgagaccgugauagaguuccagcagaaaaauaacaggcuccuggaaauuacacgggaguuuucugucaaugcgggagugacuaccccaguguccacauauaugcuuaccaacucagaacuguugagccucaucaaugacaugccgauuacgaacgaucaaaagaaacugaugaguaacaauguccagaucguucgccagcagucuuacuccaucaugugcauuauaaaggaggaaguguuagcauauguagugcaacugccccucuacggcgucaucgacacuccuuguuggaaacuucauacaagcccacugugcaccacuaacacaaaggagggcucgaauauuuguuugacccgaacggaucgugggugguacugcgacaacgccggaucuguguccuucuuuccccaggcugaaaccuguaagguucagucaaauagaguguucugcgauacaaugaacaguagaacucugccuagcgaggucaaucucugcaacguggacaucuuuaauccaaaauaugauuguaagauaaugaccuccaaaacagacguaucuagcucaguuauuaccagucugggugccaucguguccugcuacggcaagacuaaauguacagcaagcaacaagugcagggggaucauuaagaccuucucuaauggaugugauuaugucucaaacaaaggcguggacacugucaguguggguaauacgcuuuacuauguuaacaagcaagaggggaaaagccuguacgugaagggagaacccaucauuaauuuuuaugacccuuugguauucccauccgaugaguuugacgcuucuauaucgcaggucaacgagaaaaucaaccagagccucgccuucauucggaaguccgaugaacuguuacacaaugugaacgcgggcaagucaacaaccaauaucaugaucacuaccauuauaaucguuauuaucgugauucugcuaagucucaucgccgucggccugcuuuuguacugcaaagcacgcucuacaccggugacccugagcaaggaccagcucuccgggauaaacaauaucgcuuucucaaacugaggacuaguggaagcauuuuccuggcugauuaaaagaaauuacucagcuauggucaucuguuccuguuagaaggcuaugcagcauauuauauacuaugcgcauguuaugaaaugcauaauaaaaaauuuuaaaaaaucuaaaagaucuaaaaaaaaaaaaaaaaaaaaaaaaaaaaaaaaaaaaaaaaaaaaaaaaaaaaaaaaaaaaaaaaugcaucccccccccccccccccccccccccccccccaaaggcucuuuucagagccaccagaauu

SEQ ID NO: 5643 - RNA, 1985 nt, Artificial Sequence
  mRNA product Design h-3 comprising derived and/or modified sequence from HRSV(A2)__F_DSCav1_mut5 (opt4)
gggagacccgugacccggaaguuguacggcuacgcgacuuucccucccacaaacccucgcgcccuuccuuuccuacuugggcccggcagaaagcuuaccauggagcugcugauccugaaggccaacgccaucaccaccauccugaccgccgugaccuucugcuucgccagcggccagaacaucaccgaggaguucuaccagagcaccugcagcgccgugagcaagggcuaccugagcgcccugagaaccggcugguacaccagcgugaucaccaucgagcugagcaacaucaaggagaacaagugcaacggcaccgacgccaaggugaagcugaucaagcaggagcuggacaaguacaagaacgccgugaccgagcugcagcugcugaugcagagcacccccgccaccggcagcggcagcgccaucgccagcggcguggccgugugcaaggugcugcaccuggagggcgaggugaacaagaucaagagcgcccugcugagcaccaacaaggccguggugagccugagcggcugcggcgugagcgugcugaccuucaaggugcuggaccugaagaacuacaucgacaagcagcugcugcccauccugaacaagcagagcugcagcaucagcaacaucgagaccgugaucgaguuccagcagaagaacaacagacugcuggagaucaccagagaguucagcgugaacgccggcgugaccacccccgugagcaccuacaugcugaccaacagcgagcugcugagccugaucaacgacaugcccaucaccaacgaccagaagaagcugaugagcaacaacgugcagaucgugagacagcagagcuacagcaucaugugcaucaucaaggaggaggugcuggccuacguggugcagcugccccuguacggcgugaucgacacccccugcuggaagcugcacaccagcccccugugcaccaccaacaccaaggagggcagcaacaucugccugaccagaaccgacagaggcugguacugcgacaacgccggcagcgugagcuucuucccccaggccgagaccugcaaggugcagagcaacagaguguucugcgacaccaugaacagcagaacccugcccagcgaggugaaccugugcaacguggacaucuucaaccccaaguacgacugcaagaucaugaccagcaagaccgacgugagcagcagcgugaucaccagccugggcgccaucgugagcugcuacggcaagaccaagugcaccgccagcaacaagugcagaggcaucaucaagaccuucagcaacggcugcgacuacgugagcaacaagggcguggacaccgugagcgugggcaacacccuguacuacgugaacaagcaggagggcaagagccuguacgugaagggcgagcccaucaucaacuucuacgacccccugguguuccccagcgacgaguucgacgccagcaucagccaggugaacgagaagaucaaccagagccuggccuucaucagaaagagcgacgagcugcugcacaacgugaacgccggcaagagcaccaccaacaucaugaucaccaccaucaucaucgugaucaucgugauccugcugagccugaucgccgugggccugcugcuguacugcaaggccagaagcacccccgugacccugagcaaggaccagcugagcggcaucaacaacaucgccuucagcaacugaggacuaguggaagcauuuuccuggcugauuaaaagaaauuacucagcuauggucaucuguuccuguuagaaggcuaugcagcauauuauauacuaugcgcauguuaugaaaugcauaauaaaaaauuuuaaaaaaucuaaaagaucuaaaaaaaaaaaaaaaaaaaaaaaaaaaaaaaaaaaaaaaaaaaaaaaaaaaaaaaaaaaaaaaaugcaucccccccccccccccccccccccccccccccaaaggcucuuuucagagccaccagaauu

SEQ ID NO: 5644 - RNA, 1985 nt, Artificial Sequence
  mRNA product Design h-3 comprising derived and/or modified sequence from HRSV(A2)__F_DSCav1_mut5 (opt5)
gggagacccgugacccggaaguuguacggcuacgcgacuuucccucccacaaacccucgcgcccuuccuuuccuacuugggcccggcagaaagcuuaccauggagcugcucauccugaaggccaacgcuauuaccacaauccuuacggccgugaccuucugcuuugcgagcggccagaauauuacagaagaguucuaccaauccaccuguucugcugucagcaaaggguaucuguccgcccucagaacaggaugguacaccucuguuaucacaauugaacugagcaacaucaaggagaauaaaugcaacggcaccgacgccaaggugaaacuuaucaagcaggaacuggauaaguauaaaaaugcugugacggagcuccagcugcugaugcaguccacccccgccacagggucuggaagcgcuauugccuccggcgucgcgguguguaagguucuccaccuggagggggaagugaacaaaaucaagagcgcccuucugucuaccaauaaagcugucgugucccucagcggaugcggcguuucugugcugacauuuaagguccuugaccugaagaacuacauugauaaacaacuccugccuauccugaauaagcaguccuguagcauuucuaacaucgagaccgugauugaguuccagcagaaaaauaaccggcuccuggaaaucacgcgcgaguuuuccgugaaugccggcgucacaaccccgguuagcacauauaugcuuaccaacuccgaacugcucucucugaucaaugacaugcccauuaccaacgaucaaaagaaacuuaugagcaacaaugugcagaucgugagacagcaguccuacagcauuaugugcaucauuaaggaggaaguccuggcuuaugugguucaacucccucuguacggggugaucgacacacccuguuggaaacugcauacgucuccucucugcaccacaaacaccaaggagggauccaauaucugucugacacggaccgaucgcggcugguacugcgacaacgccgggagcgucucuuucuuuccccaggcggaaacguguaaggugcagagcaauagaguuuucugcgauacaaugaacuccagaacccugccuucugaggugaaucucugcaacgucgacauuuuuaauccgaaauaugauuguaagaucaugaccagcaaaacagacguguccagcucugucauuaccucccugggagccaucgugagcugcuacggcaagacaaaauguacggcuucuaacaagugccgggggauuaucaagaccuucuccaauggaugugauuauguuagcaacaaaggcguggacacagucuccgugggcaauacccuuuacuauguuaacaagcaagaggggaaaucucuguacgugaagggagaacccaucauuaauuuuuaugacccucucgucuuccccagcgaugaguuugacgccuccaucucucaggugaacgagaaaauuaaccagagccuggcuuucauccgcaaguccgaugaacugcuccacaaugugaacgccggcaagagcacaaccaauauuaugaucacgaccauuaucaucguuauuaucgucauucugcuuucucugaucgccguggggcuccugcuguacugcaaagcuagauccacaccugugacccuuagcaaggaccagcucucuggaauuaacaauaucgcguucuccaacugaggacuaguggaagcauuuuccuggcugauuaaaagaaauuacucagcuauggucaucuguuccuguuagaaggcuaugcagcauauuauauacuaugcgcauguuaugaaaugcauaauaaaaaauuuuaaaaaaucuaaaagaucuaaaaaaaaaaaaaaaaaaaaaaaaaaaaaaaaaaaaaaaaaaaaaaaaaaaaaaaaaaaaaaaaugcaucccccccccccccccccccccccccccccccaaaggcucuuuucagagccaccagaauu

SEQ ID NO: 5645 - RNA, 1985 nt, Artificial Sequence
  mRNA product Design h-3 comprising derived and/or modified sequence from HRSV(A2)__F_DSCav1_mut5 (opt6)
gggagacccgugacccggaaguuguacggcuacgcgacuuucccucccacaaacccucgcgcccuuccuuuccuacuugggcccggcagaaagcuuaccauggaacuauuaauacuuaaagccaacgcaauaacaacaauucucacugcugucaccuucugcuucgccucaggccaaaacauaacggaagaauuuuaccaaucaacaugcucugcaguauccaaaggcuaccuaucugcucuaagaacagguugguauacaucaguaauaaccauagaacuaucaaacauaaaagaaaauaaaugcaacggaacagacgcaaaaguuaaacucauaaaacaagaacuagacaaauauaaaaacgcaguuaccgaacuacaacuacuuaugcaauccacucccgccacuggaucaggaucagcaauagcaucaggagucgcaguauguaaagucuuacaccucgaaggcgaagucaauaaaaucaaauccgcauuacuauccacaaacaaagcagucguaucccuaagcggaugcggaguaucaguacuaacauuuaaaguacuagaccuaaaaaauuacaucgauaaacaacuauuaccuauauuaaacaaacaauccugcuccauuucaaauaucgaaaccguaauagaauuucaacaaaaaaacaacagauuacuagaaauaacaagagaauuuuccguaaaugcuggcguaacaacaccaguauccacauacaugcucacaaacuccgaacuacuaucacuaauaaaugacaugcccauaacaaacgaucaaaaaaaacuaaugucaaauaauguacaaauaguaagacaacaaagcuacuccaucauguguauaauaaaagaagaaguacuagcauacguaguucaacuaccacuuuacggcguaaucgacaccccuugcuggaaacuacacaccuccccucuaugcaccacaaacacaaaagaagguuccaacauaugccuuaccagaacagacagaggcugguauugcgacaacgcaggaucaguuucauuuuuuccacaagcugaaacaugcaaaguacaaucaaacagagucuucugcgacacaaugaacucaagaacucuacccucagaaguaaaccuauguaacguagacauuuucaaccccaaauacgacugcaaaauuaugacaucaaaaacagacguuucaucaucaguuaucaccucauuaggagcaauaguaagcugcuacggaaaaacaaaaugcaccgccucaaauaaaugcagaggaauaauaaaaacuuucuccaacggaugcgacuacguuucaaacaaagguguagacacuguaucaguaggaaacacacuauauuacguaaauaaacaagaaggaaaaucacuuuaugucaaaggagaaccaauaaucaauuucuacgacccauuaguauucccaucagacgaauuugaugcuucaauaucacaaguaaacgaaaaaauaaaucaaucacucgcauuuauacgaaaaucagacgaacuacuacacaauguaaacgcaggcaaaucaacaacaaacauaaugauaacaacaauaaucauuguaauaauaguaauacuucuaucucuaauagcaguaggauuacuccucuacugcaaagcaagaucaaccccuguaacacuaucaaaagaccaacuuucagguauaaauaauauagcuuuuuccaauuaaggacuaguggaagcauuuuccuggcugauuaaaagaaauuacucagcuauggucaucuguuccuguuagaaggcuaugcagcauauuauauacuaugcgcauguuaugaaaugcauaauaaaaaauuuuaaaaaaucuaaaagaucuaaaaaaaaaaaaaaaaaaaaaaaaaaaaaaaaaaaaaaaaaaaaaaaaaaaaaaaaaaaaaaaaugcaucccccccccccccccccccccccccccccccaaaggcucuuuucagagccaccagaauu

SEQ ID NO: 5646 - RNA, 1985 nt, Artificial Sequence
  mRNA product Design h-3 comprising derived and/or modified sequence from HRSV(A2)__F_DSCav1_mut5 (opt11)
gggagacccgugacccggaaguuguacggcuacgcgacuuucccucccacaaacccucgcgcccuuccuuuccuacuugggcccggcagaaagcuuaccauggagcuccuaauccucaaagccaacgcgaucacuacaauccucacagccgucaccuucugcuucgccuccggccaaaacaucaccgaggaguucuaccaaucaaccugcuccgccguaucaaaaggauaccuaagcgcccuacggaccggcugguacacaucugucaucaccaucgaacuaucaaacaucaaagaaaacaaaugcaacggaaccgacgcaaaagucaaacugauuaaacaagaacuagacaaauacaaaaacgcagucaccgaacugcaauuacucaugcaaagcacaccggccaccggcucaggcagcgccaucgccuccggcgucgccgucugcaaaguucuccaccucgagggcgaagucaacaaaauaaaaucugcccuccucuccaccaacaaagccgucgucucccucagcggcugcggagucuccguccucaccuucaaaguucucgaucucaagaacuauauugacaaacaacuucuacccauacucaacaaacaaagcugcagcauauccaacaucgaaaccgucaucgaguuccaacaaaagaacaaccgccuccucgaaauaacccgcgaguucagcguuaacgccggagucacuaccccugucuccaccuacaugcucaccaacuccgaacuccuaucacuaaucaacgacaugcccauaaccaacgaccagaagaaacucauguccaacaacguccaaauuguccgacaacaaagcuacuccauaaugugcauaauaaaagaggaaguccucgccuacgucguacaacugccccuuuauggcguaaucgacacacccugcuggaaacuccacacgucaccccucugcaccaccaacacaaaagaaggcucgaacaucugccuaacacggacugaccgcggcugguacugcgacaacgccggcuccgucagcuucuucccacaagccgaaaccugcaaaguacaauccaaccgaguauucugcgacaccaugaacuccagaacccuccccucagaggucaaccugugcaacguagacaucuucaaccccaaauacgacugcaaaauaaugaccucaaaaacagacgucuccucuuccguaaucaccagccucggagccaucgucagcugcuacggcaaaaccaaaugcaccgccucaaacaaaugccgcggcaucaucaaaacauucucaaacggcugcgacuacgucuccaacaaaggcgucgacacaguaagcguaggcaacacacuguacuacgucaacaaacaagagggaaaaucacucuacgucaaaggagaacccauaaucaacuucuacgacccccucguuuuccccagcgacgaguucgacgccagcauaucccaagucaacgagaaaauuaaccaaucccuagcauucauccgaaaaucugacgaacugcuccacaacgucaacgcgggaaaaucaacaaccaacauaaugauaaccacaaucauaauagucaucaucguaauccuccucagccuaaucgcugucggccuccuccucuacugcaaagcccguuccaccccagucacacuuuccaaggaccaacuaagcggaauaaacaacaucgcguucucaaacuaaggacuaguggaagcauuuuccuggcugauuaaaagaaauuacucagcuauggucaucuguuccuguuagaaggcuaugcagcauauuauauacuaugcgcauguuaugaaaugcauaauaaaaaauuuuaaaaaaucuaaaagaucuaaaaaaaaaaaaaaaaaaaaaaaaaaaaaaaaaaaaaaaaaaaaaaaaaaaaaaaaaaaaaaaaugcaucccccccccccccccccccccccccccccccaaaggcucuuuucagagccaccagaauu

SEQ ID NO: 5647 - RNA, 2048 nt, Artificial Sequence
  mRNA product Design h-4 comprising derived and/or modified sequence from HRSV(A2)__F_DSCav1_mut5 (opt1)
gggagagggcgcuuggcuugcaaggacccugagcugcggcauugaagcacacccaacccaacucgacugaagucagccucacugaaccggaucugagaaucuucucucucugggcuugccagggcucuccgaaccuagcuagcauccucuucaauuccaacuagaaagcuuaccauggagcugcucauccugaaggccaacgccaucaccaccauccugacggcggugaccuucugcuucgccagcggccagaacaucaccgaggaguucuaccaguccacgugcagcgccgucuccaagggguaccucagcgcccugcggaccggcugguacaccuccgugaucaccaucgagcugagcaacaucaaggagaacaagugcaacgggaccgacgccaaggugaagcucaucaagcaggagcuggacaaguacaagaacgcggucacggagcugcagcuccugaugcaguccaccccggcaaccggcuccggcuccgccaucgcgagcggcgucgccgugugcaaggugcugcaccucgagggggaggucaacaagaucaagagcgcccugcuguccaccaacaaggccguggugagccucuccggcugcggcgucagcgugcugaccuucaaggugcuggaccucaagaacuacaucgacaagcagcugcugcccauccugaacaagcagagcugcuccaucagcaacaucgagacggugaucgaguuccagcagaagaacaaccggcuccuggagaucacccgcgaguucagcgugaacgccggggucaccacccccguguccacguacaugcugaccaacagcgagcuccugucccugaucaacgacaugccgaucaccaacgaccagaagaagcucaugagcaacaacgugcagaucguccggcagcaguccuacagcaucaugugcaucaucaaggaggaggugcuggcguacgugguccagcugccccucuacggcgugaucgacacccccugcuggaagcugcacacgagcccccugugcaccaccaacaccaaggagggguccaacaucugccucacgcgcaccgaccggggcugguacugcgacaacgccggcagcgucuccuucuucccgcaggccgagaccugcaaggugcagagcaaccgcguguucugcgacaccaugaacucccggacgcugcccagcgagguaaaccucugcaacgucgacaucuucaaccccaaguacgacugcaagaucaugaccuccaagaccgacgugagcuccagcgugaucaccucccugggggccaucgucagcugcuacggcaagacgaagugcaccgccagcaacaagugccgggggaucaucaagaccuucuccaacggcugcgacuacgugagcaacaagggcguggacaccguguccgucgggaacacccuguacuacgugaacaagcaggagggcaagagccucuacgugaagggggagcccaucaucaacuucuacgacccgcuggucuuccccuccgacgaguucgacgcgagcaucucccaggugaacgagaagaucaaccagagccuggccuucauccgcaaguccgacgagcugcuccacaacgugaacgccggcaagagcacgaccaacaucaugaucaccaccaucaucaucgucaucaucgugauccugcugucccucaucgccguggggcugcugcucuacugcaaggcccggagcacgcccgucacccuguccaaggaccagcugagcggcaucaacaacaucgcguucuccaacugaggacuaguaauaaggaaacuguaugaaugucugugggcaggaagugaagagauccuucuguaaagguuuuuggaauuaugucugcugaauaauaaacuuuuuugaaauaauaaaucugguagaaaaaugagaucuaaaaaaaaaaaaaaaaaaaaaaaaaaaaaaaaaaaaaaaaaaaaaaaaaaaaaaaaaaaaaaaaugcaucccccccccccccccccccccccccccccccaaaggcucuuuucagagccaccagaauu

SEQ ID NO: 5648 - RNA, 2048 nt, Artificial Sequence
  mRNA product Design h-4 comprising derived and/or modified sequence from HRSV(A2)__F_DSCav1_mut5 (opt1)
gggagagggcgcuuggcuugcaaggacccugagcugcggcauugaagcacacccaacccaacucgacugaagucagccucacugaaccggaucugagaaucuucucucucugggcuugccagggcucuccgaaccuagcuagcauccucuucaauuccaacuagaaagcuuaccauggagcugcucauccugaaggccaacgccaucaccaccauccugacggcggugaccuucugcuucgccagcggccagaacaucaccgaggaguucuaccaguccacgugcagcgccgucuccaagggguaccucagcgcccugcgcaccggcugguacaccuccgugaucaccaucgagcugagcaacaucaaggagaacaagugcaacgggaccgacgccaaggugaagcucaucaagcaggagcuggacaaguacaagaacgcggucacggagcugcagcuccugaugcaguccacccccgccaccggcagcggguccgccaucgccagcggcguggcggugugcaagguccugcaccucgagggcgaggugaacaagaucaaguccgcccugcugagcaccaacaaggccguggucucccucagcgggugcggcguguccgugcugacguucaagguccuggaccucaagaacuacaucgacaagcagcugcugccgauccucaacaagcagagcugcuccaucagcaacaucgagaccgugaucgaguuccagcagaagaacaaccggcugcuggagaucacccgcgaguucuccgugaacgccggggucaccacgcccgugagcaccuacaugcucaccaacagcgagcugcugucccucaucaacgacaugcccaucaccaacgaccagaagaagcugaugagcaacaacgugcagaucguccggcagcaguccuacagcaucaugugcaucaucaaggaggaggugcuggccuacgugguccagcucccccuguacggcgugaucgacacgccgugcuggaagcugcacaccagcccccucugcaccaccaacacgaaggagggguccaacaucugccugacccgcaccgaccggggcugguacugcgacaacgcgggcuccgugagcuucuucccccaggccgagaccugcaagguccaguccaaccgcguguucugcgacacgaugaacagccggacccuccccuccgaggucaaccugugcaacguggacaucuucaacccgaaguacgacugcaagaucaugaccagcaagaccgacguguccagcuccgucaucacgagccugggggccaucguguccugcuacggcaagaccaagugcaccgccagcaacaagugccgggggaucaucaagaccuucuccaacggcugcgacuacgugagcaacaagggcgucgacacggugagcguggggaacacccucuacuacgucaacaagcaggagggcaagucccuguacgugaagggggagcccaucaucaacuucuacgacccccugguguuccccagcgacgaguucgacgccuccaucagccaggucaacgagaagaucaaccagucccucgcguucauccgcaagagcgacgagcugcugcacaacgugaacgccggcaaguccaccaccaacaucaugaucaccacgaucaucaucgugaucaucgucauccuccugagccugaucgccguggggcuccugcuguacugcaaggcccgguccaccccggugacccugagcaaggaccagcucuccggcaucaacaacaucgccuucagcaacugaggacuaguaauaaggaaacuguaugaaugucugugggcaggaagugaagagauccuucuguaaagguuuuuggaauuaugucugcugaauaauaaacuuuuuugaaauaauaaaucugguagaaaaaugagaucuaaaaaaaaaaaaaaaaaaaaaaaaaaaaaaaaaaaaaaaaaaaaaaaaaaaaaaaaaaaaaaaaugcaucccccccccccccccccccccccccccccccaaaggcucuuuucagagccaccagaauu

SEQ ID NO: 5649 - RNA, 2048 nt, Artificial Sequence
  mRNA product Design h-4 comprising derived and/or modified sequence from HRSV(A2)__F_DSCav1_mut5 (opt2)
gggagagggcgcuuggcuugcaaggacccugagcugcggcauugaagcacacccaacccaacucgacugaagucagccucacugaaccggaucugagaaucuucucucucugggcuugccagggcucuccgaaccuagcuagcauccucuucaauuccaacuagaaagcuuaccauggagcuccucauccucaaggccaacgccaucaccaccauccucaccgccgucaccuucugcuucgccuccggccagaacaucaccgaggaguucuaccaguccaccugcuccgccgucuccaagggcuaccucuccgcccuccgcaccggcugguacaccuccgucaucaccaucgagcucuccaacaucaaggagaacaagugcaacggcaccgacgccaaggucaagcucaucaagcaggagcucgacaaguacaagaacgccgucaccgagcuccagcuccucaugcaguccacccccgccaccggcuccggcuccgccaucgccuccggcgucgccgucugcaagguccuccaccucgagggcgaggucaacaagaucaaguccgcccuccucuccaccaacaaggccgucgucucccucuccggcugcggcgucuccguccucaccuucaagguccucgaccucaagaacuacaucgacaagcagcuccuccccauccucaacaagcaguccugcuccaucuccaacaucgagaccgucaucgaguuccagcagaagaacaaccgccuccucgagaucacccgcgaguucuccgucaacgccggcgucaccacccccgucuccaccuacaugcucaccaacuccgagcuccucucccucaucaacgacaugcccaucaccaacgaccagaagaagcucauguccaacaacguccagaucguccgccagcaguccuacuccaucaugugcaucaucaaggaggagguccucgccuacgucguccagcucccccucuacggcgucaucgacacccccugcuggaagcuccacaccuccccccucugcaccaccaacaccaaggagggcuccaacaucugccucacccgcaccgaccgcggcugguacugcgacaacgccggcuccgucuccuucuucccccaggccgagaccugcaagguccaguccaaccgcgucuucugcgacaccaugaacucccgcacccuccccuccgaggucaaccucugcaacgucgacaucuucaaccccaaguacgacugcaagaucaugaccuccaagaccgacgucuccuccuccgucaucaccucccucggcgccaucgucuccugcuacggcaagaccaagugcaccgccuccaacaagugccgcggcaucaucaagaccuucuccaacggcugcgacuacgucuccaacaagggcgucgacaccgucuccgucggcaacacccucuacuacgucaacaagcaggagggcaagucccucuacgucaagggcgagcccaucaucaacuucuacgacccccucgucuuccccuccgacgaguucgacgccuccaucucccaggucaacgagaagaucaaccagucccucgccuucauccgcaaguccgacgagcuccuccacaacgucaacgccggcaaguccaccaccaacaucaugaucaccaccaucaucaucgucaucaucgucauccuccucucccucaucgccgucggccuccuccucuacugcaaggcccgcuccacccccgucacccucuccaaggaccagcucuccggcaucaacaacaucgccuucuccaacugaggacuaguaauaaggaaacuguaugaaugucugugggcaggaagugaagagauccuucuguaaagguuuuuggaauuaugucugcugaauaauaaacuuuuuugaaauaauaaaucugguagaaaaaugagaucuaaaaaaaaaaaaaaaaaaaaaaaaaaaaaaaaaaaaaaaaaaaaaaaaaaaaaaaaaaaaaaaaugcaucccccccccccccccccccccccccccccccaaaggcucuuuucagagccaccagaauu

SEQ ID NO: 5650 - RNA, 2048 nt, Artificial Sequence
  mRNA product Design h-4 comprising derived and/or modified sequence from HRSV(A2)__F_DSCav1_mut5 (opt3)
gggagagggcgcuuggcuugcaaggacccugagcugcggcauugaagcacacccaacccaacucgacugaagucagccucacugaaccggaucugagaaucuucucucucugggcuugccagggcucuccgaaccuagcuagcauccucuucaauuccaacuagaaagcuuaccauggagcugcucauccuuaaggccaacgcuauuaccacaauacugacugcagugacguucugcuuugccagcggccagaauaucaccgaagaguucuaccaauccacauguucugcggucucaaaaggguauuugagugcuuuaagaacuggaugguacaccagcguuauuacaaucgaacuguccaacauuaaggagaauaaaugcaacgguaccgacgccaaggugaaacuaaucaagcaggaacucgauaaguauaaaaaugcaguaacugagcugcagcuucugaugcagucuacacccgccaccggcucggggucagcuauagcaagcggaguggccgucuguaagguguugcaccucgagggcgaaguuaacaaaaucaagagugcucugcuguccacgaauaaagccguggucucucucagcgguugcgggguguccguauuaacuuuuaagguucuggaccuuaagaacuacauugauaaacaauugcugccuauccuaaauaagcagucauguaguauuagcaacaucgagaccgugauagaguuccagcagaaaaauaacaggcuccuggaaauuacacgggaguuuucugucaaugcgggagugacuaccccaguguccacauauaugcuuaccaacucagaacuguugagccucaucaaugacaugccgauuacgaacgaucaaaagaaacugaugaguaacaauguccagaucguucgccagcagucuuacuccaucaugugcauuauaaaggaggaaguguuagcauauguagugcaacugccccucuacggcgucaucgacacuccuuguuggaaacuucauacaagcccacugugcaccacuaacacaaaggagggcucgaauauuuguuugacccgaacggaucgugggugguacugcgacaacgccggaucuguguccuucuuuccccaggcugaaaccuguaagguucagucaaauagaguguucugcgauacaaugaacaguagaacucugccuagcgaggucaaucucugcaacguggacaucuuuaauccaaaauaugauuguaagauaaugaccuccaaaacagacguaucuagcucaguuauuaccagucugggugccaucguguccugcuacggcaagacuaaauguacagcaagcaacaagugcagggggaucauuaagaccuucucuaauggaugugauuaugucucaaacaaaggcguggacacugucaguguggguaauacgcuuuacuauguuaacaagcaagaggggaaaagccuguacgugaagggagaacccaucauuaauuuuuaugacccuuugguauucccauccgaugaguuugacgcuucuauaucgcaggucaacgagaaaaucaaccagagccucgccuucauucggaaguccgaugaacuguuacacaaugugaacgcgggcaagucaacaaccaauaucaugaucacuaccauuauaaucguuauuaucgugauucugcuaagucucaucgccgucggccugcuuuuguacugcaaagcacgcucuacaccggugacccugagcaaggaccagcucuccgggauaaacaauaucgcuuucucaaacugaggacuaguaauaaggaaacuguaugaaugucugugggcaggaagugaagagauccuucuguaaagguuuuuggaauuaugucugcugaauaauaaacuuuuuugaaauaauaaaucugguagaaaaaugagaucuaaaaaaaaaaaaaaaaaaaaaaaaaaaaaaaaaaaaaaaaaaaaaaaaaaaaaaaaaaaaaaaaugcaucccccccccccccccccccccccccccccccaaaggcucuuuucagagccaccagaauu

SEQ ID NO: 5651 - RNA, 2048 nt, Artificial Sequence
  mRNA product Design h-4 comprising derived and/or modified sequence from HRSV(A2)__F_DSCav1_mut5 (opt4)
gggagagggcgcuuggcuugcaaggacccugagcugcggcauugaagcacacccaacccaacucgacugaagucagccucacugaaccggaucugagaaucuucucucucugggcuugccagggcucuccgaaccuagcuagcauccucuucaauuccaacuagaaagcuuaccauggagcugcugauccugaaggccaacgccaucaccaccauccugaccgccgugaccuucugcuucgccagcggccagaacaucaccgaggaguucuaccagagcaccugcagcgccgugagcaagggcuaccugagcgcccugagaaccggcugguacaccagcgugaucaccaucgagcugagcaacaucaaggagaacaagugcaacggcaccgacgccaaggugaagcugaucaagcaggagcuggacaaguacaagaacgccgugaccgagcugcagcugcugaugcagagcacccccgccaccggcagcggcagcgccaucgccagcggcguggccgugugcaaggugcugcaccuggagggcgaggugaacaagaucaagagcgcccugcugagcaccaacaaggccguggugagccugagcggcugcggcgugagcgugcugaccuucaaggugcuggaccugaagaacuacaucgacaagcagcugcugcccauccugaacaagcagagcugcagcaucagcaacaucgagaccgugaucgaguuccagcagaagaacaacagacugcuggagaucaccagagaguucagcgugaacgccggcgugaccacccccgugagcaccuacaugcugaccaacagcgagcugcugagccugaucaacgacaugcccaucaccaacgaccagaagaagcugaugagcaacaacgugcagaucgugagacagcagagcuacagcaucaugugcaucaucaaggaggaggugcuggccuacguggugcagcugccccuguacggcgugaucgacacccccugcuggaagcugcacaccagcccccugugcaccaccaacaccaaggagggcagcaacaucugccugaccagaaccgacagaggcugguacugcgacaacgccggcagcgugagcuucuucccccaggccgagaccugcaaggugcagagcaacagaguguucugcgacaccaugaacagcagaacccugcccagcgaggugaaccugugcaacguggacaucuucaaccccaaguacgacugcaagaucaugaccagcaagaccgacgugagcagcagcgugaucaccagccugggcgccaucgugagcugcuacggcaagaccaagugcaccgccagcaacaagugcagaggcaucaucaagaccuucagcaacggcugcgacuacgugagcaacaagggcguggacaccgugagcgugggcaacacccuguacuacgugaacaagcaggagggcaagagccuguacgugaagggcgagcccaucaucaacuucuacgacccccugguguuccccagcgacgaguucgacgccagcaucagccaggugaacgagaagaucaaccagagccuggccuucaucagaaagagcgacgagcugcugcacaacgugaacgccggcaagagcaccaccaacaucaugaucaccaccaucaucaucgugaucaucgugauccugcugagccugaucgccgugggccugcugcuguacugcaaggccagaagcacccccgugacccugagcaaggaccagcugagcggcaucaacaacaucgccuucagcaacugaggacuaguaauaaggaaacuguaugaaugucugugggcaggaagugaagagauccuucuguaaagguuuuuggaauuaugucugcugaauaauaaacuuuuuugaaauaauaaaucugguagaaaaaugagaucuaaaaaaaaaaaaaaaaaaaaaaaaaaaaaaaaaaaaaaaaaaaaaaaaaaaaaaaaaaaaaaaaugcaucccccccccccccccccccccccccccccccaaaggcucuuuucagagccaccagaauu

SEQ ID NO: 5652 - RNA, 2048 nt, Artificial Sequence
  mRNA product Design h-4 comprising derived and/or modified sequence from HRSV(A2)__F_DSCav1_mut5 (opt5)
gggagagggcgcuuggcuugcaaggacccugagcugcggcauugaagcacacccaacccaacucgacugaagucagccucacugaaccggaucugagaaucuucucucucugggcuugccagggcucuccgaaccuagcuagcauccucuucaauuccaacuagaaagcuuaccauggagcugcucauccugaaggccaacgcuauuaccacaauccuuacggccgugaccuucugcuuugcgagcggccagaauauuacagaagaguucuaccaauccaccuguucugcugucagcaaaggguaucuguccgcccucagaacaggaugguacaccucuguuaucacaauugaacugagcaacaucaaggagaauaaaugcaacggcaccgacgccaaggugaaacuuaucaagcaggaacuggauaaguauaaaaaugcugugacggagcuccagcugcugaugcaguccacccccgccacagggucuggaagcgcuauugccuccggcgucgcgguguguaagguucuccaccuggagggggaagugaacaaaaucaagagcgcccuucugucuaccaauaaagcugucgugucccucagcggaugcggcguuucugugcugacauuuaagguccuugaccugaagaacuacauugauaaacaacuccugccuauccugaauaagcaguccuguagcauuucuaacaucgagaccgugauugaguuccagcagaaaaauaaccggcuccuggaaaucacgcgcgaguuuuccgugaaugccggcgucacaaccccgguuagcacauauaugcuuaccaacuccgaacugcucucucugaucaaugacaugcccauuaccaacgaucaaaagaaacuuaugagcaacaaugugcagaucgugagacagcaguccuacagcauuaugugcaucauuaaggaggaaguccuggcuuaugugguucaacucccucuguacggggugaucgacacacccuguuggaaacugcauacgucuccucucugcaccacaaacaccaaggagggauccaauaucugucugacacggaccgaucgcggcugguacugcgacaacgccgggagcgucucuuucuuuccccaggcggaaacguguaaggugcagagcaauagaguuuucugcgauacaaugaacuccagaacccugccuucugaggugaaucucugcaacgucgacauuuuuaauccgaaauaugauuguaagaucaugaccagcaaaacagacguguccagcucugucauuaccucccugggagccaucgugagcugcuacggcaagacaaaauguacggcuucuaacaagugccgggggauuaucaagaccuucuccaauggaugugauuauguuagcaacaaaggcguggacacagucuccgugggcaauacccuuuacuauguuaacaagcaagaggggaaaucucuguacgugaagggagaacccaucauuaauuuuuaugacccucucgucuuccccagcgaugaguuugacgccuccaucucucaggugaacgagaaaauuaaccagagccuggcuuucauccgcaaguccgaugaacugcuccacaaugugaacgccggcaagagcacaaccaauauuaugaucacgaccauuaucaucguuauuaucgucauucugcuuucucugaucgccguggggcuccugcuguacugcaaagcuagauccacaccugugacccuuagcaaggaccagcucucuggaauuaacaauaucgcguucuccaacugaggacuaguaauaaggaaacuguaugaaugucugugggcaggaagugaagagauccuucuguaaagguuuuuggaauuaugucugcugaauaauaaacuuuuuugaaauaauaaaucugguagaaaaaugagaucuaaaaaaaaaaaaaaaaaaaaaaaaaaaaaaaaaaaaaaaaaaaaaaaaaaaaaaaaaaaaaaaaugcaucccccccccccccccccccccccccccccccaaaggcucuuuucagagccaccagaauu

SEQ ID NO: 5653 - RNA, 2048 nt, Artificial Sequence
  mRNA product Design h-4 comprising derived and/or modified sequence from HRSV(A2)__F_DSCav1_mut5 (opt6)
gggagagggcgcuuggcuugcaaggacccugagcugcggcauugaagcacacccaacccaacucgacugaagucagccucacugaaccggaucugagaaucuucucucucugggcuugccagggcucuccgaaccuagcuagcauccucuucaauuccaacuagaaagcuuaccauggaacuauuaauacuuaaagccaacgcaauaacaacaauucucacugcugucaccuucugcuucgccucaggccaaaacauaacggaagaauuuuaccaaucaacaugcucugcaguauccaaaggcuaccuaucugcucuaagaacagguugguauacaucaguaauaaccauagaacuaucaaacauaaaagaaaauaaaugcaacggaacagacgcaaaaguuaaacucauaaaacaagaacuagacaaauauaaaaacgcaguuaccgaacuacaacuacuuaugcaauccacucccgccacuggaucaggaucagcaauagcaucaggagucgcaguauguaaagucuuacaccucgaaggcgaagucaauaaaaucaaauccgcauuacuauccacaaacaaagcagucguaucccuaagcggaugcggaguaucaguacuaacauuuaaaguacuagaccuaaaaaauuacaucgauaaacaacuauuaccuauauuaaacaaacaauccugcuccauuucaaauaucgaaaccguaauagaauuucaacaaaaaaacaacagauuacuagaaauaacaagagaauuuuccguaaaugcuggcguaacaacaccaguauccacauacaugcucacaaacuccgaacuacuaucacuaauaaaugacaugcccauaacaaacgaucaaaaaaaacuaaugucaaauaauguacaaauaguaagacaacaaagcuacuccaucauguguauaauaaaagaagaaguacuagcauacguaguucaacuaccacuuuacggcguaaucgacaccccuugcuggaaacuacacaccuccccucuaugcaccacaaacacaaaagaagguuccaacauaugccuuaccagaacagacagaggcugguauugcgacaacgcaggaucaguuucauuuuuuccacaagcugaaacaugcaaaguacaaucaaacagagucuucugcgacacaaugaacucaagaacucuacccucagaaguaaaccuauguaacguagacauuuucaaccccaaauacgacugcaaaauuaugacaucaaaaacagacguuucaucaucaguuaucaccucauuaggagcaauaguaagcugcuacggaaaaacaaaaugcaccgccucaaauaaaugcagaggaauaauaaaaacuuucuccaacggaugcgacuacguuucaaacaaagguguagacacuguaucaguaggaaacacacuauauuacguaaauaaacaagaaggaaaaucacuuuaugucaaaggagaaccaauaaucaauuucuacgacccauuaguauucccaucagacgaauuugaugcuucaauaucacaaguaaacgaaaaaauaaaucaaucacucgcauuuauacgaaaaucagacgaacuacuacacaauguaaacgcaggcaaaucaacaacaaacauaaugauaacaacaauaaucauuguaauaauaguaauacuucuaucucuaauagcaguaggauuacuccucuacugcaaagcaagaucaaccccuguaacacuaucaaaagaccaacuuucagguauaaauaauauagcuuuuuccaauuaaggacuaguaauaaggaaacuguaugaaugucugugggcaggaagugaagagauccuucuguaaagguuuuuggaauuaugucugcugaauaauaaacuuuuuugaaauaauaaaucugguagaaaaaugagaucuaaaaaaaaaaaaaaaaaaaaaaaaaaaaaaaaaaaaaaaaaaaaaaaaaaaaaaaaaaaaaaaaugcaucccccccccccccccccccccccccccccccaaaggcucuuuucagagccaccagaauu

SEQ ID NO: 5654 - RNA, 2048 nt, Artificial Sequence
  mRNA product Design h-4 comprising derived and/or modified sequence from HRSV(A2)__F_DSCav1_mut5 (opt11)
gggagagggcgcuuggcuugcaaggacccugagcugcggcauugaagcacacccaacccaacucgacugaagucagccucacugaaccggaucugagaaucuucucucucugggcuugccagggcucuccgaaccuagcuagcauccucuucaauuccaacuagaaagcuuaccauggagcuccuaauccucaaagccaacgcgaucacuacaauccucacagccgucaccuucugcuucgccuccggccaaaacaucaccgaggaguucuaccaaucaaccugcuccgccguaucaaaaggauaccuaagcgcccuacggaccggcugguacacaucugucaucaccaucgaacuaucaaacaucaaagaaaacaaaugcaacggaaccgacgcaaaagucaaacugauuaaacaagaacuagacaaauacaaaaacgcagucaccgaacugcaauuacucaugcaaagcacaccggccaccggcucaggcagcgccaucgccuccggcgucgccgucugcaaaguucuccaccucgagggcgaagucaacaaaauaaaaucugcccuccucuccaccaacaaagccgucgucucccucagcggcugcggagucuccguccucaccuucaaaguucucgaucucaagaacuauauugacaaacaacuucuacccauacucaacaaacaaagcugcagcauauccaacaucgaaaccgucaucgaguuccaacaaaagaacaaccgccuccucgaaauaacccgcgaguucagcguuaacgccggagucacuaccccugucuccaccuacaugcucaccaacuccgaacuccuaucacuaaucaacgacaugcccauaaccaacgaccagaagaaacucauguccaacaacguccaaauuguccgacaacaaagcuacuccauaaugugcauaauaaaagaggaaguccucgccuacgucguacaacugccccuuuauggcguaaucgacacacccugcuggaaacuccacacgucaccccucugcaccaccaacacaaaagaaggcucgaacaucugccuaacacggacugaccgcggcugguacugcgacaacgccggcuccgucagcuucuucccacaagccgaaaccugcaaaguacaauccaaccgaguauucugcgacaccaugaacuccagaacccuccccucagaggucaaccugugcaacguagacaucuucaaccccaaauacgacugcaaaauaaugaccucaaaaacagacgucuccucuuccguaaucaccagccucggagccaucgucagcugcuacggcaaaaccaaaugcaccgccucaaacaaaugccgcggcaucaucaaaacauucucaaacggcugcgacuacgucuccaacaaaggcgucgacacaguaagcguaggcaacacacuguacuacgucaacaaacaagagggaaaaucacucuacgucaaaggagaacccauaaucaacuucuacgacccccucguuuuccccagcgacgaguucgacgccagcauaucccaagucaacgagaaaauuaaccaaucccuagcauucauccgaaaaucugacgaacugcuccacaacgucaacgcgggaaaaucaacaaccaacauaaugauaaccacaaucauaauagucaucaucguaauccuccucagccuaaucgcugucggccuccuccucuacugcaaagcccguuccaccccagucacacuuuccaaggaccaacuaagcggaauaaacaacaucgcguucucaaacuaaggacuaguaauaaggaaacuguaugaaugucugugggcaggaagugaagagauccuucuguaaagguuuuuggaauuaugucugcugaauaauaaacuuuuuugaaauaauaaaucugguagaaaaaugagaucuaaaaaaaaaaaaaaaaaaaaaaaaaaaaaaaaaaaaaaaaaaaaaaaaaaaaaaaaaaaaaaaaugcaucccccccccccccccccccccccccccccccaaaggcucuuuucagagccaccagaauu

SEQ ID NO: 5655 - RNA, 2064 nt, Artificial Sequence
  mRNA product Design h-5 comprising derived and/or modified sequence from HRSV(A2)__F_DSCav1_mut5 (opt1)
gggagagggcgcuuggcuugcaaggacccugagcugcggcauugaagcacacccaacccaacucgacugaagucagccucacugaaccggaucugagaaucuucucucucugggcuugccagggcucuccgaaccuagcuagcauccucuucaauuccaacuagaaagcuuaccauggagcugcucauccugaaggccaacgccaucaccaccauccugacggcggugaccuucugcuucgccagcggccagaacaucaccgaggaguucuaccaguccacgugcagcgccgucuccaagggguaccucagcgcccugcggaccggcugguacaccuccgugaucaccaucgagcugagcaacaucaaggagaacaagugcaacgggaccgacgccaaggugaagcucaucaagcaggagcuggacaaguacaagaacgcggucacggagcugcagcuccugaugcaguccaccccggcaaccggcuccggcuccgccaucgcgagcggcgucgccgugugcaaggugcugcaccucgagggggaggucaacaagaucaagagcgcccugcuguccaccaacaaggccguggugagccucuccggcugcggcgucagcgugcugaccuucaaggugcuggaccucaagaacuacaucgacaagcagcugcugcccauccugaacaagcagagcugcuccaucagcaacaucgagacggugaucgaguuccagcagaagaacaaccggcuccuggagaucacccgcgaguucagcgugaacgccggggucaccacccccguguccacguacaugcugaccaacagcgagcuccugucccugaucaacgacaugccgaucaccaacgaccagaagaagcucaugagcaacaacgugcagaucguccggcagcaguccuacagcaucaugugcaucaucaaggaggaggugcuggcguacgugguccagcugccccucuacggcgugaucgacacccccugcuggaagcugcacacgagcccccugugcaccaccaacaccaaggagggguccaacaucugccucacgcgcaccgaccggggcugguacugcgacaacgccggcagcgucuccuucuucccgcaggccgagaccugcaaggugcagagcaaccgcguguucugcgacaccaugaacucccggacgcugcccagcgagguaaaccucugcaacgucgacaucuucaaccccaaguacgacugcaagaucaugaccuccaagaccgacgugagcuccagcgugaucaccucccugggggccaucgucagcugcuacggcaagacgaagugcaccgccagcaacaagugccgggggaucaucaagaccuucuccaacggcugcgacuacgugagcaacaagggcguggacaccguguccgucgggaacacccuguacuacgugaacaagcaggagggcaagagccucuacgugaagggggagcccaucaucaacuucuacgacccgcuggucuuccccuccgacgaguucgacgcgagcaucucccaggugaacgagaagaucaaccagagccuggccuucauccgcaaguccgacgagcugcuccacaacgugaacgccggcaagagcacgaccaacaucaugaucaccaccaucaucaucgucaucaucgugauccugcugucccucaucgccguggggcugcugcucuacugcaaggcccggagcacgcccgucacccuguccaaggaccagcugagcggcaucaacaacaucgcguucuccaacugaggacuaguacuggcugcaucucccuuuccucuguccuccauccuucucccaggauggugaagggggaccugguacccagugauccccaccccaggauccuaaaucaugacuuaccugcuaauaaaaacucauuggaaaagugagaagaucuaaaaaaaaaaaaaaaaaaaaaaaaaaaaaaaaaaaaaaaaaaaaaaaaaaaaaaaaaaaaaaaaugcaucccccccccccccccccccccccccccccccaaaggcucuuuucagagccaccagaauu

SEQ ID NO: 5656 - RNA, 2064 nt, Artificial Sequence
  mRNA product Design h-5 comprising derived and/or modified sequence from HRSV(A2)__F_DSCav1_mut5 (opt1)
gggagagggcgcuuggcuugcaaggacccugagcugcggcauugaagcacacccaacccaacucgacugaagucagccucacugaaccggaucugagaaucuucucucucugggcuugccagggcucuccgaaccuagcuagcauccucuucaauuccaacuagaaagcuuaccauggagcugcucauccugaaggccaacgccaucaccaccauccugacggcggugaccuucugcuucgccagcggccagaacaucaccgaggaguucuaccaguccacgugcagcgccgucuccaagggguaccucagcgcccugcgcaccggcugguacaccuccgugaucaccaucgagcugagcaacaucaaggagaacaagugcaacgggaccgacgccaaggugaagcucaucaagcaggagcuggacaaguacaagaacgcggucacggagcugcagcuccugaugcaguccacccccgccaccggcagcggguccgccaucgccagcggcguggcggugugcaagguccugcaccucgagggcgaggugaacaagaucaaguccgcccugcugagcaccaacaaggccguggucucccucagcgggugcggcguguccgugcugacguucaagguccuggaccucaagaacuacaucgacaagcagcugcugccgauccucaacaagcagagcugcuccaucagcaacaucgagaccgugaucgaguuccagcagaagaacaaccggcugcuggagaucacccgcgaguucuccgugaacgccggggucaccacgcccgugagcaccuacaugcucaccaacagcgagcugcugucccucaucaacgacaugcccaucaccaacgaccagaagaagcugaugagcaacaacgugcagaucguccggcagcaguccuacagcaucaugugcaucaucaaggaggaggugcuggccuacgugguccagcucccccuguacggcgugaucgacacgccgugcuggaagcugcacaccagcccccucugcaccaccaacacgaaggagggguccaacaucugccugacccgcaccgaccggggcugguacugcgacaacgcgggcuccgugagcuucuucccccaggccgagaccugcaagguccaguccaaccgcguguucugcgacacgaugaacagccggacccuccccuccgaggucaaccugugcaacguggacaucuucaacccgaaguacgacugcaagaucaugaccagcaagaccgacguguccagcuccgucaucacgagccugggggccaucguguccugcuacggcaagaccaagugcaccgccagcaacaagugccgggggaucaucaagaccuucuccaacggcugcgacuacgugagcaacaagggcgucgacacggugagcguggggaacacccucuacuacgucaacaagcaggagggcaagucccuguacgugaagggggagcccaucaucaacuucuacgacccccugguguuccccagcgacgaguucgacgccuccaucagccaggucaacgagaagaucaaccagucccucgcguucauccgcaagagcgacgagcugcugcacaacgugaacgccggcaaguccaccaccaacaucaugaucaccacgaucaucaucgugaucaucgucauccuccugagccugaucgccguggggcuccugcuguacugcaaggcccgguccaccccggugacccugagcaaggaccagcucuccggcaucaacaacaucgccuucagcaacugaggacuaguacuggcugcaucucccuuuccucuguccuccauccuucucccaggauggugaagggggaccugguacccagugauccccaccccaggauccuaaaucaugacuuaccugcuaauaaaaacucauuggaaaagugagaagaucuaaaaaaaaaaaaaaaaaaaaaaaaaaaaaaaaaaaaaaaaaaaaaaaaaaaaaaaaaaaaaaaaugcaucccccccccccccccccccccccccccccccaaaggcucuuuucagagccaccagaauu

SEQ ID NO: 5657 - RNA, 2064 nt, Artificial Sequence
  mRNA product Design h-5 comprising derived and/or modified sequence from HRSV(A2)__F_DSCav1_mut5 (opt2)
gggagagggcgcuuggcuugcaaggacccugagcugcggcauugaagcacacccaacccaacucgacugaagucagccucacugaaccggaucugagaaucuucucucucugggcuugccagggcucuccgaaccuagcuagcauccucuucaauuccaacuagaaagcuuaccauggagcuccucauccucaaggccaacgccaucaccaccauccucaccgccgucaccuucugcuucgccuccggccagaacaucaccgaggaguucuaccaguccaccugcuccgccgucuccaagggcuaccucuccgcccuccgcaccggcugguacaccuccgucaucaccaucgagcucuccaacaucaaggagaacaagugcaacggcaccgacgccaaggucaagcucaucaagcaggagcucgacaaguacaagaacgccgucaccgagcuccagcuccucaugcaguccacccccgccaccggcuccggcuccgccaucgccuccggcgucgccgucugcaagguccuccaccucgagggcgaggucaacaagaucaaguccgcccuccucuccaccaacaaggccgucgucucccucuccggcugcggcgucuccguccucaccuucaagguccucgaccucaagaacuacaucgacaagcagcuccuccccauccucaacaagcaguccugcuccaucuccaacaucgagaccgucaucgaguuccagcagaagaacaaccgccuccucgagaucacccgcgaguucuccgucaacgccggcgucaccacccccgucuccaccuacaugcucaccaacuccgagcuccucucccucaucaacgacaugcccaucaccaacgaccagaagaagcucauguccaacaacguccagaucguccgccagcaguccuacuccaucaugugcaucaucaaggaggagguccucgccuacgucguccagcucccccucuacggcgucaucgacacccccugcuggaagcuccacaccuccccccucugcaccaccaacaccaaggagggcuccaacaucugccucacccgcaccgaccgcggcugguacugcgacaacgccggcuccgucuccuucuucccccaggccgagaccugcaagguccaguccaaccgcgucuucugcgacaccaugaacucccgcacccuccccuccgaggucaaccucugcaacgucgacaucuucaaccccaaguacgacugcaagaucaugaccuccaagaccgacgucuccuccuccgucaucaccucccucggcgccaucgucuccugcuacggcaagaccaagugcaccgccuccaacaagugccgcggcaucaucaagaccuucuccaacggcugcgacuacgucuccaacaagggcgucgacaccgucuccgucggcaacacccucuacuacgucaacaagcaggagggcaagucccucuacgucaagggcgagcccaucaucaacuucuacgacccccucgucuuccccuccgacgaguucgacgccuccaucucccaggucaacgagaagaucaaccagucccucgccuucauccgcaaguccgacgagcuccuccacaacgucaacgccggcaaguccaccaccaacaucaugaucaccaccaucaucaucgucaucaucgucauccuccucucccucaucgccgucggccuccuccucuacugcaaggcccgcuccacccccgucacccucuccaaggaccagcucuccggcaucaacaacaucgccuucuccaacugaggacuaguacuggcugcaucucccuuuccucuguccuccauccuucucccaggauggugaagggggaccugguacccagugauccccaccccaggauccuaaaucaugacuuaccugcuaauaaaaacucauuggaaaagugagaagaucuaaaaaaaaaaaaaaaaaaaaaaaaaaaaaaaaaaaaaaaaaaaaaaaaaaaaaaaaaaaaaaaaugcaucccccccccccccccccccccccccccccccaaaggcucuuuucagagccaccagaauu

SEQ ID NO: 5658 - RNA, 2064 nt, Artificial Sequence
  mRNA product Design h-5 comprising derived and/or modified sequence from HRSV(A2)__F_DSCav1_mut5 (opt3)
gggagagggcgcuuggcuugcaaggacccugagcugcggcauugaagcacacccaacccaacucgacugaagucagccucacugaaccggaucugagaaucuucucucucugggcuugccagggcucuccgaaccuagcuagcauccucuucaauuccaacuagaaagcuuaccauggagcugcucauccuuaaggccaacgcuauuaccacaauacugacugcagugacguucugcuuugccagcggccagaauaucaccgaagaguucuaccaauccacauguucugcggucucaaaaggguauuugagugcuuuaagaacuggaugguacaccagcguuauuacaaucgaacuguccaacauuaaggagaauaaaugcaacgguaccgacgccaaggugaaacuaaucaagcaggaacucgauaaguauaaaaaugcaguaacugagcugcagcuucugaugcagucuacacccgccaccggcucggggucagcuauagcaagcggaguggccgucuguaagguguugcaccucgagggcgaaguuaacaaaaucaagagugcucugcuguccacgaauaaagccguggucucucucagcgguugcgggguguccguauuaacuuuuaagguucuggaccuuaagaacuacauugauaaacaauugcugccuauccuaaauaagcagucauguaguauuagcaacaucgagaccgugauagaguuccagcagaaaaauaacaggcuccuggaaauuacacgggaguuuucugucaaugcgggagugacuaccccaguguccacauauaugcuuaccaacucagaacuguugagccucaucaaugacaugccgauuacgaacgaucaaaagaaacugaugaguaacaauguccagaucguucgccagcagucuuacuccaucaugugcauuauaaaggaggaaguguuagcauauguagugcaacugccccucuacggcgucaucgacacuccuuguuggaaacuucauacaagcccacugugcaccacuaacacaaaggagggcucgaauauuuguuugacccgaacggaucgugggugguacugcgacaacgccggaucuguguccuucuuuccccaggcugaaaccuguaagguucagucaaauagaguguucugcgauacaaugaacaguagaacucugccuagcgaggucaaucucugcaacguggacaucuuuaauccaaaauaugauuguaagauaaugaccuccaaaacagacguaucuagcucaguuauuaccagucugggugccaucguguccugcuacggcaagacuaaauguacagcaagcaacaagugcagggggaucauuaagaccuucucuaauggaugugauuaugucucaaacaaaggcguggacacugucaguguggguaauacgcuuuacuauguuaacaagcaagaggggaaaagccuguacgugaagggagaacccaucauuaauuuuuaugacccuuugguauucccauccgaugaguuugacgcuucuauaucgcaggucaacgagaaaaucaaccagagccucgccuucauucggaaguccgaugaacuguuacacaaugugaacgcgggcaagucaacaaccaauaucaugaucacuaccauuauaaucguuauuaucgugauucugcuaagucucaucgccgucggccugcuuuuguacugcaaagcacgcucuacaccggugacccugagcaaggaccagcucuccgggauaaacaauaucgcuuucucaaacugaggacuaguacuggcugcaucucccuuuccucuguccuccauccuucucccaggauggugaagggggaccugguacccagugauccccaccccaggauccuaaaucaugacuuaccugcuaauaaaaacucauuggaaaagugagaagaucuaaaaaaaaaaaaaaaaaaaaaaaaaaaaaaaaaaaaaaaaaaaaaaaaaaaaaaaaaaaaaaaaugcaucccccccccccccccccccccccccccccccaaaggcucuuuucagagccaccagaauu

SEQ ID NO: 5659 - RNA, 2064 nt, Artificial Sequence
  mRNA product Design h-5 comprising derived and/or modified sequence from HRSV(A2)__F_DSCav1_mut5 (opt4)
gggagagggcgcuuggcuugcaaggacccugagcugcggcauugaagcacacccaacccaacucgacugaagucagccucacugaaccggaucugagaaucuucucucucugggcuugccagggcucuccgaaccuagcuagcauccucuucaauuccaacuagaaagcuuaccauggagcugcugauccugaaggccaacgccaucaccaccauccugaccgccgugaccuucugcuucgccagcggccagaacaucaccgaggaguucuaccagagcaccugcagcgccgugagcaagggcuaccugagcgcccugagaaccggcugguacaccagcgugaucaccaucgagcugagcaacaucaaggagaacaagugcaacggcaccgacgccaaggugaagcugaucaagcaggagcuggacaaguacaagaacgccgugaccgagcugcagcugcugaugcagagcacccccgccaccggcagcggcagcgccaucgccagcggcguggccgugugcaaggugcugcaccuggagggcgaggugaacaagaucaagagcgcccugcugagcaccaacaaggccguggugagccugagcggcugcggcgugagcgugcugaccuucaaggugcuggaccugaagaacuacaucgacaagcagcugcugcccauccugaacaagcagagcugcagcaucagcaacaucgagaccgugaucgaguuccagcagaagaacaacagacugcuggagaucaccagagaguucagcgugaacgccggcgugaccacccccgugagcaccuacaugcugaccaacagcgagcugcugagccugaucaacgacaugcccaucaccaacgaccagaagaagcugaugagcaacaacgugcagaucgugagacagcagagcuacagcaucaugugcaucaucaaggaggaggugcuggccuacguggugcagcugccccuguacggcgugaucgacacccccugcuggaagcugcacaccagcccccugugcaccaccaacaccaaggagggcagcaacaucugccugaccagaaccgacagaggcugguacugcgacaacgccggcagcgugagcuucuucccccaggccgagaccugcaaggugcagagcaacagaguguucugcgacaccaugaacagcagaacccugcccagcgaggugaaccugugcaacguggacaucuucaaccccaaguacgacugcaagaucaugaccagcaagaccgacgugagcagcagcgugaucaccagccugggcgccaucgugagcugcuacggcaagaccaagugcaccgccagcaacaagugcagaggcaucaucaagaccuucagcaacggcugcgacuacgugagcaacaagggcguggacaccgugagcgugggcaacacccuguacuacgugaacaagcaggagggcaagagccuguacgugaagggcgagcccaucaucaacuucuacgacccccugguguuccccagcgacgaguucgacgccagcaucagccaggugaacgagaagaucaaccagagccuggccuucaucagaaagagcgacgagcugcugcacaacgugaacgccggcaagagcaccaccaacaucaugaucaccaccaucaucaucgugaucaucgugauccugcugagccugaucgccgugggccugcugcuguacugcaaggccagaagcacccccgugacccugagcaaggaccagcugagcggcaucaacaacaucgccuucagcaacugaggacuaguacuggcugcaucucccuuuccucuguccuccauccuucucccaggauggugaagggggaccugguacccagugauccccaccccaggauccuaaaucaugacuuaccugcuaauaaaaacucauuggaaaagugagaagaucuaaaaaaaaaaaaaaaaaaaaaaaaaaaaaaaaaaaaaaaaaaaaaaaaaaaaaaaaaaaaaaaaugcaucccccccccccccccccccccccccccccccaaaggcucuuuucagagccaccagaauu

SEQ ID NO: 5660 - RNA, 2064 nt, Artificial Sequence
  mRNA product Design h-5 comprising derived and/or modified sequence from HRSV(A2)__F_DSCav1_mut5 (opt5)
gggagagggcgcuuggcuugcaaggacccugagcugcggcauugaagcacacccaacccaacucgacugaagucagccucacugaaccggaucugagaaucuucucucucugggcuugccagggcucuccgaaccuagcuagcauccucuucaauuccaacuagaaagcuuaccauggagcugcucauccugaaggccaacgcuauuaccacaauccuuacggccgugaccuucugcuuugcgagcggccagaauauuacagaagaguucuaccaauccaccuguucugcugucagcaaaggguaucuguccgcccucagaacaggaugguacaccucuguuaucacaauugaacugagcaacaucaaggagaauaaaugcaacggcaccgacgccaaggugaaacuuaucaagcaggaacuggauaaguauaaaaaugcugugacggagcuccagcugcugaugcaguccacccccgccacagggucuggaagcgcuauugccuccggcgucgcgguguguaagguucuccaccuggagggggaagugaacaaaaucaagagcgcccuucugucuaccaauaaagcugucgugucccucagcggaugcggcguuucugugcugacauuuaagguccuugaccugaagaacuacauugauaaacaacuccugccuauccugaauaagcaguccuguagcauuucuaacaucgagaccgugauugaguuccagcagaaaaauaaccggcuccuggaaaucacgcgcgaguuuuccgugaaugccggcgucacaaccccgguuagcacauauaugcuuaccaacuccgaacugcucucucugaucaaugacaugcccauuaccaacgaucaaaagaaacuuaugagcaacaaugugcagaucgugagacagcaguccuacagcauuaugugcaucauuaaggaggaaguccuggcuuaugugguucaacucccucuguacggggugaucgacacacccuguuggaaacugcauacgucuccucucugcaccacaaacaccaaggagggauccaauaucugucugacacggaccgaucgcggcugguacugcgacaacgccgggagcgucucuuucuuuccccaggcggaaacguguaaggugcagagcaauagaguuuucugcgauacaaugaacuccagaacccugccuucugaggugaaucucugcaacgucgacauuuuuaauccgaaauaugauuguaagaucaugaccagcaaaacagacguguccagcucugucauuaccucccugggagccaucgugagcugcuacggcaagacaaaauguacggcuucuaacaagugccgggggauuaucaagaccuucuccaauggaugugauuauguuagcaacaaaggcguggacacagucuccgugggcaauacccuuuacuauguuaacaagcaagaggggaaaucucuguacgugaagggagaacccaucauuaauuuuuaugacccucucgucuuccccagcgaugaguuugacgccuccaucucucaggugaacgagaaaauuaaccagagccuggcuuucauccgcaaguccgaugaacugcuccacaaugugaacgccggcaagagcacaaccaauauuaugaucacgaccauuaucaucguuauuaucgucauucugcuuucucugaucgccguggggcuccugcuguacugcaaagcuagauccacaccugugacccuuagcaaggaccagcucucuggaauuaacaauaucgcguucuccaacugaggacuaguacuggcugcaucucccuuuccucuguccuccauccuucucccaggauggugaagggggaccugguacccagugauccccaccccaggauccuaaaucaugacuuaccugcuaauaaaaacucauuggaaaagugagaagaucuaaaaaaaaaaaaaaaaaaaaaaaaaaaaaaaaaaaaaaaaaaaaaaaaaaaaaaaaaaaaaaaaugcaucccccccccccccccccccccccccccccccaaaggcucuuuucagagccaccagaauu

SEQ ID NO: 5661 - RNA, 2064 nt, Artificial Sequence
  mRNA product Design h-5 comprising derived and/or modified sequence from HRSV(A2)__F_DSCav1_mut5 (opt6)
gggagagggcgcuuggcuugcaaggacccugagcugcggcauugaagcacacccaacccaacucgacugaagucagccucacugaaccggaucugagaaucuucucucucugggcuugccagggcucuccgaaccuagcuagcauccucuucaauuccaacuagaaagcuuaccauggaacuauuaauacuuaaagccaacgcaauaacaacaauucucacugcugucaccuucugcuucgccucaggccaaaacauaacggaagaauuuuaccaaucaacaugcucugcaguauccaaaggcuaccuaucugcucuaagaacagguugguauacaucaguaauaaccauagaacuaucaaacauaaaagaaaauaaaugcaacggaacagacgcaaaaguuaaacucauaaaacaagaacuagacaaauauaaaaacgcaguuaccgaacuacaacuacuuaugcaauccacucccgccacuggaucaggaucagcaauagcaucaggagucgcaguauguaaagucuuacaccucgaaggcgaagucaauaaaaucaaauccgcauuacuauccacaaacaaagcagucguaucccuaagcggaugcggaguaucaguacuaacauuuaaaguacuagaccuaaaaaauuacaucgauaaacaacuauuaccuauauuaaacaaacaauccugcuccauuucaaauaucgaaaccguaauagaauuucaacaaaaaaacaacagauuacuagaaauaacaagagaauuuuccguaaaugcuggcguaacaacaccaguauccacauacaugcucacaaacuccgaacuacuaucacuaauaaaugacaugcccauaacaaacgaucaaaaaaaacuaaugucaaauaauguacaaauaguaagacaacaaagcuacuccaucauguguauaauaaaagaagaaguacuagcauacguaguucaacuaccacuuuacggcguaaucgacaccccuugcuggaaacuacacaccuccccucuaugcaccacaaacacaaaagaagguuccaacauaugccuuaccagaacagacagaggcugguauugcgacaacgcaggaucaguuucauuuuuuccacaagcugaaacaugcaaaguacaaucaaacagagucuucugcgacacaaugaacucaagaacucuacccucagaaguaaaccuauguaacguagacauuuucaaccccaaauacgacugcaaaauuaugacaucaaaaacagacguuucaucaucaguuaucaccucauuaggagcaauaguaagcugcuacggaaaaacaaaaugcaccgccucaaauaaaugcagaggaauaauaaaaacuuucuccaacggaugcgacuacguuucaaacaaagguguagacacuguaucaguaggaaacacacuauauuacguaaauaaacaagaaggaaaaucacuuuaugucaaaggagaaccaauaaucaauuucuacgacccauuaguauucccaucagacgaauuugaugcuucaauaucacaaguaaacgaaaaaauaaaucaaucacucgcauuuauacgaaaaucagacgaacuacuacacaauguaaacgcaggcaaaucaacaacaaacauaaugauaacaacaauaaucauuguaauaauaguaauacuucuaucucuaauagcaguaggauuacuccucuacugcaaagcaagaucaaccccuguaacacuaucaaaagaccaacuuucagguauaaauaauauagcuuuuuccaauuaaggacuaguacuggcugcaucucccuuuccucuguccuccauccuucucccaggauggugaagggggaccugguacccagugauccccaccccaggauccuaaaucaugacuuaccugcuaauaaaaacucauuggaaaagugagaagaucuaaaaaaaaaaaaaaaaaaaaaaaaaaaaaaaaaaaaaaaaaaaaaaaaaaaaaaaaaaaaaaaaugcaucccccccccccccccccccccccccccccccaaaggcucuuuucagagccaccagaauu

SEQ ID NO: 5662 - RNA, 2064 nt, Artificial Sequence
  mRNA product Design h-5 comprising derived and/or modified sequence from HRSV(A2)__F_DSCav1_mut5 (opt11)
gggagagggcgcuuggcuugcaaggacccugagcugcggcauugaagcacacccaacccaacucgacugaagucagccucacugaaccggaucugagaaucuucucucucugggcuugccagggcucuccgaaccuagcuagcauccucuucaauuccaacuagaaagcuuaccauggagcuccuaauccucaaagccaacgcgaucacuacaauccucacagccgucaccuucugcuucgccuccggccaaaacaucaccgaggaguucuaccaaucaaccugcuccgccguaucaaaaggauaccuaagcgcccuacggaccggcugguacacaucugucaucaccaucgaacuaucaaacaucaaagaaaacaaaugcaacggaaccgacgcaaaagucaaacugauuaaacaagaacuagacaaauacaaaaacgcagucaccgaacugcaauuacucaugcaaagcacaccggccaccggcucaggcagcgccaucgccuccggcgucgccgucugcaaaguucuccaccucgagggcgaagucaacaaaauaaaaucugcccuccucuccaccaacaaagccgucgucucccucagcggcugcggagucuccguccucaccuucaaaguucucgaucucaagaacuauauugacaaacaacuucuacccauacucaacaaacaaagcugcagcauauccaacaucgaaaccgucaucgaguuccaacaaaagaacaaccgccuccucgaaauaacccgcgaguucagcguuaacgccggagucacuaccccugucuccaccuacaugcucaccaacuccgaacuccuaucacuaaucaacgacaugcccauaaccaacgaccagaagaaacucauguccaacaacguccaaauuguccgacaacaaagcuacuccauaaugugcauaauaaaagaggaaguccucgccuacgucguacaacugccccuuuauggcguaaucgacacacccugcuggaaacuccacacgucaccccucugcaccaccaacacaaaagaaggcucgaacaucugccuaacacggacugaccgcggcugguacugcgacaacgccggcuccgucagcuucuucccacaagccgaaaccugcaaaguacaauccaaccgaguauucugcgacaccaugaacuccagaacccuccccucagaggucaaccugugcaacguagacaucuucaaccccaaauacgacugcaaaauaaugaccucaaaaacagacgucuccucuuccguaaucaccagccucggagccaucgucagcugcuacggcaaaaccaaaugcaccgccucaaacaaaugccgcggcaucaucaaaacauucucaaacggcugcgacuacgucuccaacaaaggcgucgacacaguaagcguaggcaacacacuguacuacgucaacaaacaagagggaaaaucacucuacgucaaaggagaacccauaaucaacuucuacgacccccucguuuuccccagcgacgaguucgacgccagcauaucccaagucaacgagaaaauuaaccaaucccuagcauucauccgaaaaucugacgaacugcuccacaacgucaacgcgggaaaaucaacaaccaacauaaugauaaccacaaucauaauagucaucaucguaauccuccucagccuaaucgcugucggccuccuccucuacugcaaagcccguuccaccccagucacacuuuccaaggaccaacuaagcggaauaaacaacaucgcguucucaaacuaaggacuaguacuggcugcaucucccuuuccucuguccuccauccuucucccaggauggugaagggggaccugguacccagugauccccaccccaggauccuaaaucaugacuuaccugcuaauaaaaacucauuggaaaagugagaagaucuaaaaaaaaaaaaaaaaaaaaaaaaaaaaaaaaaaaaaaaaaaaaaaaaaaaaaaaaaaaaaaaaugcaucccccccccccccccccccccccccccccccaaaggcucuuuucagagccaccagaauu

SEQ ID NO: 5663 - RNA, 1997 nt, Artificial Sequence
  mRNA product Design i-1 comprising derived and/or modified sequence from HRSV(A2)__F_DSCav1_mut5 (opt1)
gggagagggcgcuuggcuugcaaggacccugagcugcggcauugaagcacacccaacccaacucgacugaagucagccucacugaaccggaucugagaaucuucucucucugggcuugccagggcucuccgaaccuagcuagcauccucuucaauuccaacuagaaagcuuaccauggagcugcucauccugaaggccaacgccaucaccaccauccugacggcggugaccuucugcuucgccagcggccagaacaucaccgaggaguucuaccaguccacgugcagcgccgucuccaagggguaccucagcgcccugcggaccggcugguacaccuccgugaucaccaucgagcugagcaacaucaaggagaacaagugcaacgggaccgacgccaaggugaagcucaucaagcaggagcuggacaaguacaagaacgcggucacggagcugcagcuccugaugcaguccaccccggcaaccggcuccggcuccgccaucgcgagcggcgucgccgugugcaaggugcugcaccucgagggggaggucaacaagaucaagagcgcccugcuguccaccaacaaggccguggugagccucuccggcugcggcgucagcgugcugaccuucaaggugcuggaccucaagaacuacaucgacaagcagcugcugcccauccugaacaagcagagcugcuccaucagcaacaucgagacggugaucgaguuccagcagaagaacaaccggcuccuggagaucacccgcgaguucagcgugaacgccggggucaccacccccguguccacguacaugcugaccaacagcgagcuccugucccugaucaacgacaugccgaucaccaacgaccagaagaagcucaugagcaacaacgugcagaucguccggcagcaguccuacagcaucaugugcaucaucaaggaggaggugcuggcguacgugguccagcugccccucuacggcgugaucgacacccccugcuggaagcugcacacgagcccccugugcaccaccaacaccaaggagggguccaacaucugccucacgcgcaccgaccggggcugguacugcgacaacgccggcagcgucuccuucuucccgcaggccgagaccugcaaggugcagagcaaccgcguguucugcgacaccaugaacucccggacgcugcccagcgagguaaaccucugcaacgucgacaucuucaaccccaaguacgacugcaagaucaugaccuccaagaccgacgugagcuccagcgugaucaccucccugggggccaucgucagcugcuacggcaagacgaagugcaccgccagcaacaagugccgggggaucaucaagaccuucuccaacggcugcgacuacgugagcaacaagggcguggacaccguguccgucgggaacacccuguacuacgugaacaagcaggagggcaagagccucuacgugaagggggagcccaucaucaacuucuacgacccgcuggucuuccccuccgacgaguucgacgcgagcaucucccaggugaacgagaagaucaaccagagccuggccuucauccgcaaguccgacgagcugcuccacaacgugaacgccggcaagagcacgaccaacaucaugaucaccaccaucaucaucgucaucaucgugauccugcugucccucaucgccguggggcugcugcucuacugcaaggcccggagcacgcccgucacccuguccaaggaccagcugagcggcaucaacaacaucgcguucuccaacugaggacuaguguccaccugucccuccugggcugcuggauugucucguuuuccugccaaauaaacaggaucagcgcuuuacagaucuaaaaaaaaaaaaaaaaaaaaaaaaaaaaaaaaaaaaaaaaaaaaaaaaaaaaaaaaaaaaaaaaugcaucccccccccccccccccccccccccccccccaaaggcucuuuucagagccaccagaauu

SEQ ID NO: 5664 - RNA, 1997 nt, Artificial Sequence
  mRNA product Design i-1 comprising derived and/or modified sequence from HRSV(A2)__F_DSCav1_mut5 (opt1)
gggagagggcgcuuggcuugcaaggacccugagcugcggcauugaagcacacccaacccaacucgacugaagucagccucacugaaccggaucugagaaucuucucucucugggcuugccagggcucuccgaaccuagcuagcauccucuucaauuccaacuagaaagcuuaccauggagcugcucauccugaaggccaacgccaucaccaccauccugacggcggugaccuucugcuucgccagcggccagaacaucaccgaggaguucuaccaguccacgugcagcgccgucuccaagggguaccucagcgcccugcgcaccggcugguacaccuccgugaucaccaucgagcugagcaacaucaaggagaacaagugcaacgggaccgacgccaaggugaagcucaucaagcaggagcuggacaaguacaagaacgcggucacggagcugcagcuccugaugcaguccacccccgccaccggcagcggguccgccaucgccagcggcguggcggugugcaagguccugcaccucgagggcgaggugaacaagaucaaguccgcccugcugagcaccaacaaggccguggucucccucagcgggugcggcguguccgugcugacguucaagguccuggaccucaagaacuacaucgacaagcagcugcugccgauccucaacaagcagagcugcuccaucagcaacaucgagaccgugaucgaguuccagcagaagaacaaccggcugcuggagaucacccgcgaguucuccgugaacgccggggucaccacgcccgugagcaccuacaugcucaccaacagcgagcugcugucccucaucaacgacaugcccaucaccaacgaccagaagaagcugaugagcaacaacgugcagaucguccggcagcaguccuacagcaucaugugcaucaucaaggaggaggugcuggccuacgugguccagcucccccuguacggcgugaucgacacgccgugcuggaagcugcacaccagcccccucugcaccaccaacacgaaggagggguccaacaucugccugacccgcaccgaccggggcugguacugcgacaacgcgggcuccgugagcuucuucccccaggccgagaccugcaagguccaguccaaccgcguguucugcgacacgaugaacagccggacccuccccuccgaggucaaccugugcaacguggacaucuucaacccgaaguacgacugcaagaucaugaccagcaagaccgacguguccagcuccgucaucacgagccugggggccaucguguccugcuacggcaagaccaagugcaccgccagcaacaagugccgggggaucaucaagaccuucuccaacggcugcgacuacgugagcaacaagggcgucgacacggugagcguggggaacacccucuacuacgucaacaagcaggagggcaagucccuguacgugaagggggagcccaucaucaacuucuacgacccccugguguuccccagcgacgaguucgacgccuccaucagccaggucaacgagaagaucaaccagucccucgcguucauccgcaagagcgacgagcugcugcacaacgugaacgccggcaaguccaccaccaacaucaugaucaccacgaucaucaucgugaucaucgucauccuccugagccugaucgccguggggcuccugcuguacugcaaggcccgguccaccccggugacccugagcaaggaccagcucuccggcaucaacaacaucgccuucagcaacugaggacuaguguccaccugucccuccugggcugcuggauugucucguuuuccugccaaauaaacaggaucagcgcuuuacagaucuaaaaaaaaaaaaaaaaaaaaaaaaaaaaaaaaaaaaaaaaaaaaaaaaaaaaaaaaaaaaaaaaugcaucccccccccccccccccccccccccccccccaaaggcucuuuucagagccaccagaauu

SEQ ID NO: 5665 - RNA, 1997 nt, Artificial Sequence
  mRNA product Design i-1 comprising derived and/or modified sequence from HRSV(A2)__F_DSCav1_mut5 (opt2)
gggagagggcgcuuggcuugcaaggacccugagcugcggcauugaagcacacccaacccaacucgacugaagucagccucacugaaccggaucugagaaucuucucucucugggcuugccagggcucuccgaaccuagcuagcauccucuucaauuccaacuagaaagcuuaccauggagcuccucauccucaaggccaacgccaucaccaccauccucaccgccgucaccuucugcuucgccuccggccagaacaucaccgaggaguucuaccaguccaccugcuccgccgucuccaagggcuaccucuccgcccuccgcaccggcugguacaccuccgucaucaccaucgagcucuccaacaucaaggagaacaagugcaacggcaccgacgccaaggucaagcucaucaagcaggagcucgacaaguacaagaacgccgucaccgagcuccagcuccucaugcaguccacccccgccaccggcuccggcuccgccaucgccuccggcgucgccgucugcaagguccuccaccucgagggcgaggucaacaagaucaaguccgcccuccucuccaccaacaaggccgucgucucccucuccggcugcggcgucuccguccucaccuucaagguccucgaccucaagaacuacaucgacaagcagcuccuccccauccucaacaagcaguccugcuccaucuccaacaucgagaccgucaucgaguuccagcagaagaacaaccgccuccucgagaucacccgcgaguucuccgucaacgccggcgucaccacccccgucuccaccuacaugcucaccaacuccgagcuccucucccucaucaacgacaugcccaucaccaacgaccagaagaagcucauguccaacaacguccagaucguccgccagcaguccuacuccaucaugugcaucaucaaggaggagguccucgccuacgucguccagcucccccucuacggcgucaucgacacccccugcuggaagcuccacaccuccccccucugcaccaccaacaccaaggagggcuccaacaucugccucacccgcaccgaccgcggcugguacugcgacaacgccggcuccgucuccuucuucccccaggccgagaccugcaagguccaguccaaccgcgucuucugcgacaccaugaacucccgcacccuccccuccgaggucaaccucugcaacgucgacaucuucaaccccaaguacgacugcaagaucaugaccuccaagaccgacgucuccuccuccgucaucaccucccucggcgccaucgucuccugcuacggcaagaccaagugcaccgccuccaacaagugccgcggcaucaucaagaccuucuccaacggcugcgacuacgucuccaacaagggcgucgacaccgucuccgucggcaacacccucuacuacgucaacaagcaggagggcaagucccucuacgucaagggcgagcccaucaucaacuucuacgacccccucgucuuccccuccgacgaguucgacgccuccaucucccaggucaacgagaagaucaaccagucccucgccuucauccgcaaguccgacgagcuccuccacaacgucaacgccggcaaguccaccaccaacaucaugaucaccaccaucaucaucgucaucaucgucauccuccucucccucaucgccgucggccuccuccucuacugcaaggcccgcuccacccccgucacccucuccaaggaccagcucuccggcaucaacaacaucgccuucuccaacugaggacuaguguccaccugucccuccugggcugcuggauugucucguuuuccugccaaauaaacaggaucagcgcuuuacagaucuaaaaaaaaaaaaaaaaaaaaaaaaaaaaaaaaaaaaaaaaaaaaaaaaaaaaaaaaaaaaaaaaugcaucccccccccccccccccccccccccccccccaaaggcucuuuucagagccaccagaauu

SEQ ID NO: 5666 - RNA, 1997 nt, Artificial Sequence
  mRNA product Design i-1 comprising derived and/or modified sequence from HRSV(A2)__F_DSCav1_mut5 (opt3)
gggagagggcgcuuggcuugcaaggacccugagcugcggcauugaagcacacccaacccaacucgacugaagucagccucacugaaccggaucugagaaucuucucucucugggcuugccagggcucuccgaaccuagcuagcauccucuucaauuccaacuagaaagcuuaccauggagcugcucauccuuaaggccaacgcuauuaccacaauacugacugcagugacguucugcuuugccagcggccagaauaucaccgaagaguucuaccaauccacauguucugcggucucaaaaggguauuugagugcuuuaagaacuggaugguacaccagcguuauuacaaucgaacuguccaacauuaaggagaauaaaugcaacgguaccgacgccaaggugaaacuaaucaagcaggaacucgauaaguauaaaaaugcaguaacugagcugcagcuucugaugcagucuacacccgccaccggcucggggucagcuauagcaagcggaguggccgucuguaagguguugcaccucgagggcgaaguuaacaaaaucaagagugcucugcuguccacgaauaaagccguggucucucucagcgguugcgggguguccguauuaacuuuuaagguucuggaccuuaagaacuacauugauaaacaauugcugccuauccuaaauaagcagucauguaguauuagcaacaucgagaccgugauagaguuccagcagaaaaauaacaggcuccuggaaauuacacgggaguuuucugucaaugcgggagugacuaccccaguguccacauauaugcuuaccaacucagaacuguugagccucaucaaugacaugccgauuacgaacgaucaaaagaaacugaugaguaacaauguccagaucguucgccagcagucuuacuccaucaugugcauuauaaaggaggaaguguuagcauauguagugcaacugccccucuacggcgucaucgacacuccuuguuggaaacuucauacaagcccacugugcaccacuaacacaaaggagggcucgaauauuuguuugacccgaacggaucgugggugguacugcgacaacgccggaucuguguccuucuuuccccaggcugaaaccuguaagguucagucaaauagaguguucugcgauacaaugaacaguagaacucugccuagcgaggucaaucucugcaacguggacaucuuuaauccaaaauaugauuguaagauaaugaccuccaaaacagacguaucuagcucaguuauuaccagucugggugccaucguguccugcuacggcaagacuaaauguacagcaagcaacaagugcagggggaucauuaagaccuucucuaauggaugugauuaugucucaaacaaaggcguggacacugucaguguggguaauacgcuuuacuauguuaacaagcaagaggggaaaagccuguacgugaagggagaacccaucauuaauuuuuaugacccuuugguauucccauccgaugaguuugacgcuucuauaucgcaggucaacgagaaaaucaaccagagccucgccuucauucggaaguccgaugaacuguuacacaaugugaacgcgggcaagucaacaaccaauaucaugaucacuaccauuauaaucguuauuaucgugauucugcuaagucucaucgccgucggccugcuuuuguacugcaaagcacgcucuacaccggugacccugagcaaggaccagcucuccgggauaaacaauaucgcuuucucaaacugaggacuaguguccaccugucccuccugggcugcuggauugucucguuuuccugccaaauaaacaggaucagcgcuuuacagaucuaaaaaaaaaaaaaaaaaaaaaaaaaaaaaaaaaaaaaaaaaaaaaaaaaaaaaaaaaaaaaaaaugcaucccccccccccccccccccccccccccccccaaaggcucuuuucagagccaccagaauu

SEQ ID NO: 5667 - RNA, 1997 nt, Artificial Sequence
  mRNA product Design i-1 comprising derived and/or modified sequence from HRSV(A2)__F_DSCav1_mut5 (opt4)
gggagagggcgcuuggcuugcaaggacccugagcugcggcauugaagcacacccaacccaacucgacugaagucagccucacugaaccggaucugagaaucuucucucucugggcuugccagggcucuccgaaccuagcuagcauccucuucaauuccaacuagaaagcuuaccauggagcugcugauccugaaggccaacgccaucaccaccauccugaccgccgugaccuucugcuucgccagcggccagaacaucaccgaggaguucuaccagagcaccugcagcgccgugagcaagggcuaccugagcgcccugagaaccggcugguacaccagcgugaucaccaucgagcugagcaacaucaaggagaacaagugcaacggcaccgacgccaaggugaagcugaucaagcaggagcuggacaaguacaagaacgccgugaccgagcugcagcugcugaugcagagcacccccgccaccggcagcggcagcgccaucgccagcggcguggccgugugcaaggugcugcaccuggagggcgaggugaacaagaucaagagcgcccugcugagcaccaacaaggccguggugagccugagcggcugcggcgugagcgugcugaccuucaaggugcuggaccugaagaacuacaucgacaagcagcugcugcccauccugaacaagcagagcugcagcaucagcaacaucgagaccgugaucgaguuccagcagaagaacaacagacugcuggagaucaccagagaguucagcgugaacgccggcgugaccacccccgugagcaccuacaugcugaccaacagcgagcugcugagccugaucaacgacaugcccaucaccaacgaccagaagaagcugaugagcaacaacgugcagaucgugagacagcagagcuacagcaucaugugcaucaucaaggaggaggugcuggccuacguggugcagcugccccuguacggcgugaucgacacccccugcuggaagcugcacaccagcccccugugcaccaccaacaccaaggagggcagcaacaucugccugaccagaaccgacagaggcugguacugcgacaacgccggcagcgugagcuucuucccccaggccgagaccugcaaggugcagagcaacagaguguucugcgacaccaugaacagcagaacccugcccagcgaggugaaccugugcaacguggacaucuucaaccccaaguacgacugcaagaucaugaccagcaagaccgacgugagcagcagcgugaucaccagccugggcgccaucgugagcugcuacggcaagaccaagugcaccgccagcaacaagugcagaggcaucaucaagaccuucagcaacggcugcgacuacgugagcaacaagggcguggacaccgugagcgugggcaacacccuguacuacgugaacaagcaggagggcaagagccuguacgugaagggcgagcccaucaucaacuucuacgacccccugguguuccccagcgacgaguucgacgccagcaucagccaggugaacgagaagaucaaccagagccuggccuucaucagaaagagcgacgagcugcugcacaacgugaacgccggcaagagcaccaccaacaucaugaucaccaccaucaucaucgugaucaucgugauccugcugagccugaucgccgugggccugcugcuguacugcaaggccagaagcacccccgugacccugagcaaggaccagcugagcggcaucaacaacaucgccuucagcaacugaggacuaguguccaccugucccuccugggcugcuggauugucucguuuuccugccaaauaaacaggaucagcgcuuuacagaucuaaaaaaaaaaaaaaaaaaaaaaaaaaaaaaaaaaaaaaaaaaaaaaaaaaaaaaaaaaaaaaaaugcaucccccccccccccccccccccccccccccccaaaggcucuuuucagagccaccagaauu

SEQ ID NO: 5668 - RNA, 1997 nt, Artificial Sequence
  mRNA product Design i-1 comprising derived and/or modified sequence from HRSV(A2)__F_DSCav1_mut5 (opt5)
gggagagggcgcuuggcuugcaaggacccugagcugcggcauugaagcacacccaacccaacucgacugaagucagccucacugaaccggaucugagaaucuucucucucugggcuugccagggcucuccgaaccuagcuagcauccucuucaauuccaacuagaaagcuuaccauggagcugcucauccugaaggccaacgcuauuaccacaauccuuacggccgugaccuucugcuuugcgagcggccagaauauuacagaagaguucuaccaauccaccuguucugcugucagcaaaggguaucuguccgcccucagaacaggaugguacaccucuguuaucacaauugaacugagcaacaucaaggagaauaaaugcaacggcaccgacgccaaggugaaacuuaucaagcaggaacuggauaaguauaaaaaugcugugacggagcuccagcugcugaugcaguccacccccgccacagggucuggaagcgcuauugccuccggcgucgcgguguguaagguucuccaccuggagggggaagugaacaaaaucaagagcgcccuucugucuaccaauaaagcugucgugucccucagcggaugcggcguuucugugcugacauuuaagguccuugaccugaagaacuacauugauaaacaacuccugccuauccugaauaagcaguccuguagcauuucuaacaucgagaccgugauugaguuccagcagaaaaauaaccggcuccuggaaaucacgcgcgaguuuuccgugaaugccggcgucacaaccccgguuagcacauauaugcuuaccaacuccgaacugcucucucugaucaaugacaugcccauuaccaacgaucaaaagaaacuuaugagcaacaaugugcagaucgugagacagcaguccuacagcauuaugugcaucauuaaggaggaaguccuggcuuaugugguucaacucccucuguacggggugaucgacacacccuguuggaaacugcauacgucuccucucugcaccacaaacaccaaggagggauccaauaucugucugacacggaccgaucgcggcugguacugcgacaacgccgggagcgucucuuucuuuccccaggcggaaacguguaaggugcagagcaauagaguuuucugcgauacaaugaacuccagaacccugccuucugaggugaaucucugcaacgucgacauuuuuaauccgaaauaugauuguaagaucaugaccagcaaaacagacguguccagcucugucauuaccucccugggagccaucgugagcugcuacggcaagacaaaauguacggcuucuaacaagugccgggggauuaucaagaccuucuccaauggaugugauuauguuagcaacaaaggcguggacacagucuccgugggcaauacccuuuacuauguuaacaagcaagaggggaaaucucuguacgugaagggagaacccaucauuaauuuuuaugacccucucgucuuccccagcgaugaguuugacgccuccaucucucaggugaacgagaaaauuaaccagagccuggcuuucauccgcaaguccgaugaacugcuccacaaugugaacgccggcaagagcacaaccaauauuaugaucacgaccauuaucaucguuauuaucgucauucugcuuucucugaucgccguggggcuccugcuguacugcaaagcuagauccacaccugugacccuuagcaaggaccagcucucuggaauuaacaauaucgcguucuccaacugaggacuaguguccaccugucccuccugggcugcuggauugucucguuuuccugccaaauaaacaggaucagcgcuuuacagaucuaaaaaaaaaaaaaaaaaaaaaaaaaaaaaaaaaaaaaaaaaaaaaaaaaaaaaaaaaaaaaaaaugcaucccccccccccccccccccccccccccccccaaaggcucuuuucagagccaccagaauu

SEQ ID NO: 5669 - RNA, 1997 nt, Artificial Sequence
  mRNA product Design i-1 comprising derived and/or modified sequence from HRSV(A2)__F_DSCav1_mut5 (opt6)
gggagagggcgcuuggcuugcaaggacccugagcugcggcauugaagcacacccaacccaacucgacugaagucagccucacugaaccggaucugagaaucuucucucucugggcuugccagggcucuccgaaccuagcuagcauccucuucaauuccaacuagaaagcuuaccauggaacuauuaauacuuaaagccaacgcaauaacaacaauucucacugcugucaccuucugcuucgccucaggccaaaacauaacggaagaauuuuaccaaucaacaugcucugcaguauccaaaggcuaccuaucugcucuaagaacagguugguauacaucaguaauaaccauagaacuaucaaacauaaaagaaaauaaaugcaacggaacagacgcaaaaguuaaacucauaaaacaagaacuagacaaauauaaaaacgcaguuaccgaacuacaacuacuuaugcaauccacucccgccacuggaucaggaucagcaauagcaucaggagucgcaguauguaaagucuuacaccucgaaggcgaagucaauaaaaucaaauccgcauuacuauccacaaacaaagcagucguaucccuaagcggaugcggaguaucaguacuaacauuuaaaguacuagaccuaaaaaauuacaucgauaaacaacuauuaccuauauuaaacaaacaauccugcuccauuucaaauaucgaaaccguaauagaauuucaacaaaaaaacaacagauuacuagaaauaacaagagaauuuuccguaaaugcuggcguaacaacaccaguauccacauacaugcucacaaacuccgaacuacuaucacuaauaaaugacaugcccauaacaaacgaucaaaaaaaacuaaugucaaauaauguacaaauaguaagacaacaaagcuacuccaucauguguauaauaaaagaagaaguacuagcauacguaguucaacuaccacuuuacggcguaaucgacaccccuugcuggaaacuacacaccuccccucuaugcaccacaaacacaaaagaagguuccaacauaugccuuaccagaacagacagaggcugguauugcgacaacgcaggaucaguuucauuuuuuccacaagcugaaacaugcaaaguacaaucaaacagagucuucugcgacacaaugaacucaagaacucuacccucagaaguaaaccuauguaacguagacauuuucaaccccaaauacgacugcaaaauuaugacaucaaaaacagacguuucaucaucaguuaucaccucauuaggagcaauaguaagcugcuacggaaaaacaaaaugcaccgccucaaauaaaugcagaggaauaauaaaaacuuucuccaacggaugcgacuacguuucaaacaaagguguagacacuguaucaguaggaaacacacuauauuacguaaauaaacaagaaggaaaaucacuuuaugucaaaggagaaccaauaaucaauuucuacgacccauuaguauucccaucagacgaauuugaugcuucaauaucacaaguaaacgaaaaaauaaaucaaucacucgcauuuauacgaaaaucagacgaacuacuacacaauguaaacgcaggcaaaucaacaacaaacauaaugauaacaacaauaaucauuguaauaauaguaauacuucuaucucuaauagcaguaggauuacuccucuacugcaaagcaagaucaaccccuguaacacuaucaaaagaccaacuuucagguauaaauaauauagcuuuuuccaauuaaggacuaguguccaccugucccuccugggcugcuggauugucucguuuuccugccaaauaaacaggaucagcgcuuuacagaucuaaaaaaaaaaaaaaaaaaaaaaaaaaaaaaaaaaaaaaaaaaaaaaaaaaaaaaaaaaaaaaaaugcaucccccccccccccccccccccccccccccccaaaggcucuuuucagagccaccagaauu

SEQ ID NO: 5670 - RNA, 1997 nt, Artificial Sequence
  mRNA product Design i-1 comprising derived and/or modified sequence from HRSV(A2)__F_DSCav1_mut5 (opt11)
gggagagggcgcuuggcuugcaaggacccugagcugcggcauugaagcacacccaacccaacucgacugaagucagccucacugaaccggaucugagaaucuucucucucugggcuugccagggcucuccgaaccuagcuagcauccucuucaauuccaacuagaaagcuuaccauggagcuccuaauccucaaagccaacgcgaucacuacaauccucacagccgucaccuucugcuucgccuccggccaaaacaucaccgaggaguucuaccaaucaaccugcuccgccguaucaaaaggauaccuaagcgcccuacggaccggcugguacacaucugucaucaccaucgaacuaucaaacaucaaagaaaacaaaugcaacggaaccgacgcaaaagucaaacugauuaaacaagaacuagacaaauacaaaaacgcagucaccgaacugcaauuacucaugcaaagcacaccggccaccggcucaggcagcgccaucgccuccggcgucgccgucugcaaaguucuccaccucgagggcgaagucaacaaaauaaaaucugcccuccucuccaccaacaaagccgucgucucccucagcggcugcggagucuccguccucaccuucaaaguucucgaucucaagaacuauauugacaaacaacuucuacccauacucaacaaacaaagcugcagcauauccaacaucgaaaccgucaucgaguuccaacaaaagaacaaccgccuccucgaaauaacccgcgaguucagcguuaacgccggagucacuaccccugucuccaccuacaugcucaccaacuccgaacuccuaucacuaaucaacgacaugcccauaaccaacgaccagaagaaacucauguccaacaacguccaaauuguccgacaacaaagcuacuccauaaugugcauaauaaaagaggaaguccucgccuacgucguacaacugccccuuuauggcguaaucgacacacccugcuggaaacuccacacgucaccccucugcaccaccaacacaaaagaaggcucgaacaucugccuaacacggacugaccgcggcugguacugcgacaacgccggcuccgucagcuucuucccacaagccgaaaccugcaaaguacaauccaaccgaguauucugcgacaccaugaacuccagaacccuccccucagaggucaaccugugcaacguagacaucuucaaccccaaauacgacugcaaaauaaugaccucaaaaacagacgucuccucuuccguaaucaccagccucggagccaucgucagcugcuacggcaaaaccaaaugcaccgccucaaacaaaugccgcggcaucaucaaaacauucucaaacggcugcgacuacgucuccaacaaaggcgucgacacaguaagcguaggcaacacacuguacuacgucaacaaacaagagggaaaaucacucuacgucaaaggagaacccauaaucaacuucuacgacccccucguuuuccccagcgacgaguucgacgccagcauaucccaagucaacgagaaaauuaaccaaucccuagcauucauccgaaaaucugacgaacugcuccacaacgucaacgcgggaaaaucaacaaccaacauaaugauaaccacaaucauaauagucaucaucguaauccuccucagccuaaucgcugucggccuccuccucuacugcaaagcccguuccaccccagucacacuuuccaaggaccaacuaagcggaauaaacaacaucgcguucucaaacuaaggacuaguguccaccugucccuccugggcugcuggauugucucguuuuccugccaaauaaacaggaucagcgcuuuacagaucuaaaaaaaaaaaaaaaaaaaaaaaaaaaaaaaaaaaaaaaaaaaaaaaaaaaaaaaaaaaaaaaaugcaucccccccccccccccccccccccccccccccaaaggcucuuuucagagccaccagaauu

SEQ ID NO: 5671 - RNA, 1997 nt, Artificial Sequence
  mRNA product Design i-2 comprising derived and/or modified sequence from HRSV(A2)__F_DSCav1_mut5 (opt1)
gggagaggcgcugccuacggagguggcagccaucuccuucucggcaucaagcuuaccauggagcugcucauccugaaggccaacgccaucaccaccauccugacggcggugaccuucugcuucgccagcggccagaacaucaccgaggaguucuaccaguccacgugcagcgccgucuccaagggguaccucagcgcccugcggaccggcugguacaccuccgugaucaccaucgagcugagcaacaucaaggagaacaagugcaacgggaccgacgccaaggugaagcucaucaagcaggagcuggacaaguacaagaacgcggucacggagcugcagcuccugaugcaguccaccccggcaaccggcuccggcuccgccaucgcgagcggcgucgccgugugcaaggugcugcaccucgagggggaggucaacaagaucaagagcgcccugcuguccaccaacaaggccguggugagccucuccggcugcggcgucagcgugcugaccuucaaggugcuggaccucaagaacuacaucgacaagcagcugcugcccauccugaacaagcagagcugcuccaucagcaacaucgagacggugaucgaguuccagcagaagaacaaccggcuccuggagaucacccgcgaguucagcgugaacgccggggucaccacccccguguccacguacaugcugaccaacagcgagcuccugucccugaucaacgacaugccgaucaccaacgaccagaagaagcucaugagcaacaacgugcagaucguccggcagcaguccuacagcaucaugugcaucaucaaggaggaggugcuggcguacgugguccagcugccccucuacggcgugaucgacacccccugcuggaagcugcacacgagcccccugugcaccaccaacaccaaggagggguccaacaucugccucacgcgcaccgaccggggcugguacugcgacaacgccggcagcgucuccuucuucccgcaggccgagaccugcaaggugcagagcaaccgcguguucugcgacaccaugaacucccggacgcugcccagcgagguaaaccucugcaacgucgacaucuucaaccccaaguacgacugcaagaucaugaccuccaagaccgacgugagcuccagcgugaucaccucccugggggccaucgucagcugcuacggcaagacgaagugcaccgccagcaacaagugccgggggaucaucaagaccuucuccaacggcugcgacuacgugagcaacaagggcguggacaccguguccgucgggaacacccuguacuacgugaacaagcaggagggcaagagccucuacgugaagggggagcccaucaucaacuucuacgacccgcuggucuuccccuccgacgaguucgacgcgagcaucucccaggugaacgagaagaucaaccagagccuggccuucauccgcaaguccgacgagcugcuccacaacgugaacgccggcaagagcacgaccaacaucaugaucaccaccaucaucaucgucaucaucgugauccugcugucccucaucgccguggggcugcugcucuacugcaaggcccggagcacgcccgucacccuguccaaggaccagcugagcggcaucaacaacaucgcguucuccaacugaggacuagugcaucacauuuaaaagcaucucagccuaccaugagaauaagagaaagaaaaugaagaucaauagcuuauucaucucuuuuucuuuuucguugguguaaagccaacacccugucuaaaaaacauaaauuucuuuaaucauuuugccucuuuucucugugcuucaauuaauaaaaaauggaaagaaccuagaucuaaaaaaaaaaaaaaaaaaaaaaaaaaaaaaaaaaaaaaaaaaaaaaaaaaaaaaaaaaaaaaaaugcaucccccccccccccccccccccccccccccccaaaggcucuuuucagagccaccagaauu

SEQ ID NO: 5672 - RNA, 1997 nt, Artificial Sequence
  mRNA product Design i-2 comprising derived and/or modified sequence from HRSV(A2)__F_DSCav1_mut5 (opt1)
gggagaggcgcugccuacggagguggcagccaucuccuucucggcaucaagcuuaccauggagcugcucauccugaaggccaacgccaucaccaccauccugacggcggugaccuucugcuucgccagcggccagaacaucaccgaggaguucuaccaguccacgugcagcgccgucuccaagggguaccucagcgcccugcgcaccggcugguacaccuccgugaucaccaucgagcugagcaacaucaaggagaacaagugcaacgggaccgacgccaaggugaagcucaucaagcaggagcuggacaaguacaagaacgcggucacggagcugcagcuccugaugcaguccacccccgccaccggcagcggguccgccaucgccagcggcguggcggugugcaagguccugcaccucgagggcgaggugaacaagaucaaguccgcccugcugagcaccaacaaggccguggucucccucagcgggugcggcguguccgugcugacguucaagguccuggaccucaagaacuacaucgacaagcagcugcugccgauccucaacaagcagagcugcuccaucagcaacaucgagaccgugaucgaguuccagcagaagaacaaccggcugcuggagaucacccgcgaguucuccgugaacgccggggucaccacgcccgugagcaccuacaugcucaccaacagcgagcugcugucccucaucaacgacaugcccaucaccaacgaccagaagaagcugaugagcaacaacgugcagaucguccggcagcaguccuacagcaucaugugcaucaucaaggaggaggugcuggccuacgugguccagcucccccuguacggcgugaucgacacgccgugcuggaagcugcacaccagcccccucugcaccaccaacacgaaggagggguccaacaucugccugacccgcaccgaccggggcugguacugcgacaacgcgggcuccgugagcuucuucccccaggccgagaccugcaagguccaguccaaccgcguguucugcgacacgaugaacagccggacccuccccuccgaggucaaccugugcaacguggacaucuucaacccgaaguacgacugcaagaucaugaccagcaagaccgacguguccagcuccgucaucacgagccugggggccaucguguccugcuacggcaagaccaagugcaccgccagcaacaagugccgggggaucaucaagaccuucuccaacggcugcgacuacgugagcaacaagggcgucgacacggugagcguggggaacacccucuacuacgucaacaagcaggagggcaagucccuguacgugaagggggagcccaucaucaacuucuacgacccccugguguuccccagcgacgaguucgacgccuccaucagccaggucaacgagaagaucaaccagucccucgcguucauccgcaagagcgacgagcugcugcacaacgugaacgccggcaaguccaccaccaacaucaugaucaccacgaucaucaucgugaucaucgucauccuccugagccugaucgccguggggcuccugcuguacugcaaggcccgguccaccccggugacccugagcaaggaccagcucuccggcaucaacaacaucgccuucagcaacugaggacuagugcaucacauuuaaaagcaucucagccuaccaugagaauaagagaaagaaaaugaagaucaauagcuuauucaucucuuuuucuuuuucguugguguaaagccaacacccugucuaaaaaacauaaauuucuuuaaucauuuugccucuuuucucugugcuucaauuaauaaaaaauggaaagaaccuagaucuaaaaaaaaaaaaaaaaaaaaaaaaaaaaaaaaaaaaaaaaaaaaaaaaaaaaaaaaaaaaaaaaugcaucccccccccccccccccccccccccccccccaaaggcucuuuucagagccaccagaauu

SEQ ID NO: 5673 - RNA, 1997 nt, Artificial Sequence
  mRNA product Design i-2 comprising derived and/or modified sequence from HRSV(A2)__F_DSCav1_mut5 (opt2)
gggagaggcgcugccuacggagguggcagccaucuccuucucggcaucaagcuuaccauggagcuccucauccucaaggccaacgccaucaccaccauccucaccgccgucaccuucugcuucgccuccggccagaacaucaccgaggaguucuaccaguccaccugcuccgccgucuccaagggcuaccucuccgcccuccgcaccggcugguacaccuccgucaucaccaucgagcucuccaacaucaaggagaacaagugcaacggcaccgacgccaaggucaagcucaucaagcaggagcucgacaaguacaagaacgccgucaccgagcuccagcuccucaugcaguccacccccgccaccggcuccggcuccgccaucgccuccggcgucgccgucugcaagguccuccaccucgagggcgaggucaacaagaucaaguccgcccuccucuccaccaacaaggccgucgucucccucuccggcugcggcgucuccguccucaccuucaagguccucgaccucaagaacuacaucgacaagcagcuccuccccauccucaacaagcaguccugcuccaucuccaacaucgagaccgucaucgaguuccagcagaagaacaaccgccuccucgagaucacccgcgaguucuccgucaacgccggcgucaccacccccgucuccaccuacaugcucaccaacuccgagcuccucucccucaucaacgacaugcccaucaccaacgaccagaagaagcucauguccaacaacguccagaucguccgccagcaguccuacuccaucaugugcaucaucaaggaggagguccucgccuacgucguccagcucccccucuacggcgucaucgacacccccugcuggaagcuccacaccuccccccucugcaccaccaacaccaaggagggcuccaacaucugccucacccgcaccgaccgcggcugguacugcgacaacgccggcuccgucuccuucuucccccaggccgagaccugcaagguccaguccaaccgcgucuucugcgacaccaugaacucccgcacccuccccuccgaggucaaccucugcaacgucgacaucuucaaccccaaguacgacugcaagaucaugaccuccaagaccgacgucuccuccuccgucaucaccucccucggcgccaucgucuccugcuacggcaagaccaagugcaccgccuccaacaagugccgcggcaucaucaagaccuucuccaacggcugcgacuacgucuccaacaagggcgucgacaccgucuccgucggcaacacccucuacuacgucaacaagcaggagggcaagucccucuacgucaagggcgagcccaucaucaacuucuacgacccccucgucuuccccuccgacgaguucgacgccuccaucucccaggucaacgagaagaucaaccagucccucgccuucauccgcaaguccgacgagcuccuccacaacgucaacgccggcaaguccaccaccaacaucaugaucaccaccaucaucaucgucaucaucgucauccuccucucccucaucgccgucggccuccuccucuacugcaaggcccgcuccacccccgucacccucuccaaggaccagcucuccggcaucaacaacaucgccuucuccaacugaggacuagugcaucacauuuaaaagcaucucagccuaccaugagaauaagagaaagaaaaugaagaucaauagcuuauucaucucuuuuucuuuuucguugguguaaagccaacacccugucuaaaaaacauaaauuucuuuaaucauuuugccucuuuucucugugcuucaauuaauaaaaaauggaaagaaccuagaucuaaaaaaaaaaaaaaaaaaaaaaaaaaaaaaaaaaaaaaaaaaaaaaaaaaaaaaaaaaaaaaaaugcaucccccccccccccccccccccccccccccccaaaggcucuuuucagagccaccagaauu

SEQ ID NO: 5674 - RNA, 1997 nt, Artificial Sequence
  mRNA product Design i-2 comprising derived and/or modified sequence from HRSV(A2)__F_DSCav1_mut5 (opt3)
gggagaggcgcugccuacggagguggcagccaucuccuucucggcaucaagcuuaccauggagcugcucauccuuaaggccaacgcuauuaccacaauacugacugcagugacguucugcuuugccagcggccagaauaucaccgaagaguucuaccaauccacauguucugcggucucaaaaggguauuugagugcuuuaagaacuggaugguacaccagcguuauuacaaucgaacuguccaacauuaaggagaauaaaugcaacgguaccgacgccaaggugaaacuaaucaagcaggaacucgauaaguauaaaaaugcaguaacugagcugcagcuucugaugcagucuacacccgccaccggcucggggucagcuauagcaagcggaguggccgucuguaagguguugcaccucgagggcgaaguuaacaaaaucaagagugcucugcuguccacgaauaaagccguggucucucucagcgguugcgggguguccguauuaacuuuuaagguucuggaccuuaagaacuacauugauaaacaauugcugccuauccuaaauaagcagucauguaguauuagcaacaucgagaccgugauagaguuccagcagaaaaauaacaggcuccuggaaauuacacgggaguuuucugucaaugcgggagugacuaccccaguguccacauauaugcuuaccaacucagaacuguugagccucaucaaugacaugccgauuacgaacgaucaaaagaaacugaugaguaacaauguccagaucguucgccagcagucuuacuccaucaugugcauuauaaaggaggaaguguuagcauauguagugcaacugccccucuacggcgucaucgacacuccuuguuggaaacuucauacaagcccacugugcaccacuaacacaaaggagggcucgaauauuuguuugacccgaacggaucgugggugguacugcgacaacgccggaucuguguccuucuuuccccaggcugaaaccuguaagguucagucaaauagaguguucugcgauacaaugaacaguagaacucugccuagcgaggucaaucucugcaacguggacaucuuuaauccaaaauaugauuguaagauaaugaccuccaaaacagacguaucuagcucaguuauuaccagucugggugccaucguguccugcuacggcaagacuaaauguacagcaagcaacaagugcagggggaucauuaagaccuucucuaauggaugugauuaugucucaaacaaaggcguggacacugucaguguggguaauacgcuuuacuauguuaacaagcaagaggggaaaagccuguacgugaagggagaacccaucauuaauuuuuaugacccuuugguauucccauccgaugaguuugacgcuucuauaucgcaggucaacgagaaaaucaaccagagccucgccuucauucggaaguccgaugaacuguuacacaaugugaacgcgggcaagucaacaaccaauaucaugaucacuaccauuauaaucguuauuaucgugauucugcuaagucucaucgccgucggccugcuuuuguacugcaaagcacgcucuacaccggugacccugagcaaggaccagcucuccgggauaaacaauaucgcuuucucaaacugaggacuagugcaucacauuuaaaagcaucucagccuaccaugagaauaagagaaagaaaaugaagaucaauagcuuauucaucucuuuuucuuuuucguugguguaaagccaacacccugucuaaaaaacauaaauuucuuuaaucauuuugccucuuuucucugugcuucaauuaauaaaaaauggaaagaaccuagaucuaaaaaaaaaaaaaaaaaaaaaaaaaaaaaaaaaaaaaaaaaaaaaaaaaaaaaaaaaaaaaaaaugcaucccccccccccccccccccccccccccccccaaaggcucuuuucagagccaccagaauu

SEQ ID NO: 5675 - RNA, 1997 nt, Artificial Sequence
  mRNA product Design i-2 comprising derived and/or modified sequence from HRSV(A2)__F_DSCav1_mut5 (opt4)
gggagaggcgcugccuacggagguggcagccaucuccuucucggcaucaagcuuaccauggagcugcugauccugaaggccaacgccaucaccaccauccugaccgccgugaccuucugcuucgccagcggccagaacaucaccgaggaguucuaccagagcaccugcagcgccgugagcaagggcuaccugagcgcccugagaaccggcugguacaccagcgugaucaccaucgagcugagcaacaucaaggagaacaagugcaacggcaccgacgccaaggugaagcugaucaagcaggagcuggacaaguacaagaacgccgugaccgagcugcagcugcugaugcagagcacccccgccaccggcagcggcagcgccaucgccagcggcguggccgugugcaaggugcugcaccuggagggcgaggugaacaagaucaagagcgcccugcugagcaccaacaaggccguggugagccugagcggcugcggcgugagcgugcugaccuucaaggugcuggaccugaagaacuacaucgacaagcagcugcugcccauccugaacaagcagagcugcagcaucagcaacaucgagaccgugaucgaguuccagcagaagaacaacagacugcuggagaucaccagagaguucagcgugaacgccggcgugaccacccccgugagcaccuacaugcugaccaacagcgagcugcugagccugaucaacgacaugcccaucaccaacgaccagaagaagcugaugagcaacaacgugcagaucgugagacagcagagcuacagcaucaugugcaucaucaaggaggaggugcuggccuacguggugcagcugccccuguacggcgugaucgacacccccugcuggaagcugcacaccagcccccugugcaccaccaacaccaaggagggcagcaacaucugccugaccagaaccgacagaggcugguacugcgacaacgccggcagcgugagcuucuucccccaggccgagaccugcaaggugcagagcaacagaguguucugcgacaccaugaacagcagaacccugcccagcgaggugaaccugugcaacguggacaucuucaaccccaaguacgacugcaagaucaugaccagcaagaccgacgugagcagcagcgugaucaccagccugggcgccaucgugagcugcuacggcaagaccaagugcaccgccagcaacaagugcagaggcaucaucaagaccuucagcaacggcugcgacuacgugagcaacaagggcguggacaccgugagcgugggcaacacccuguacuacgugaacaagcaggagggcaagagccuguacgugaagggcgagcccaucaucaacuucuacgacccccugguguuccccagcgacgaguucgacgccagcaucagccaggugaacgagaagaucaaccagagccuggccuucaucagaaagagcgacgagcugcugcacaacgugaacgccggcaagagcaccaccaacaucaugaucaccaccaucaucaucgugaucaucgugauccugcugagccugaucgccgugggccugcugcuguacugcaaggccagaagcacccccgugacccugagcaaggaccagcugagcggcaucaacaacaucgccuucagcaacugaggacuagugcaucacauuuaaaagcaucucagccuaccaugagaauaagagaaagaaaaugaagaucaauagcuuauucaucucuuuuucuuuuucguugguguaaagccaacacccugucuaaaaaacauaaauuucuuuaaucauuuugccucuuuucucugugcuucaauuaauaaaaaauggaaagaaccuagaucuaaaaaaaaaaaaaaaaaaaaaaaaaaaaaaaaaaaaaaaaaaaaaaaaaaaaaaaaaaaaaaaaugcaucccccccccccccccccccccccccccccccaaaggcucuuuucagagccaccagaauu

SEQ ID NO: 5676 - RNA, 1997 nt, Artificial Sequence
  mRNA product Design i-2 comprising derived and/or modified sequence from HRSV(A2)__F_DSCav1_mut5 (opt5)
gggagaggcgcugccuacggagguggcagccaucuccuucucggcaucaagcuuaccauggagcugcucauccugaaggccaacgcuauuaccacaauccuuacggccgugaccuucugcuuugcgagcggccagaauauuacagaagaguucuaccaauccaccuguucugcugucagcaaaggguaucuguccgcccucagaacaggaugguacaccucuguuaucacaauugaacugagcaacaucaaggagaauaaaugcaacggcaccgacgccaaggugaaacuuaucaagcaggaacuggauaaguauaaaaaugcugugacggagcuccagcugcugaugcaguccacccccgccacagggucuggaagcgcuauugccuccggcgucgcgguguguaagguucuccaccuggagggggaagugaacaaaaucaagagcgcccuucugucuaccaauaaagcugucgugucccucagcggaugcggcguuucugugcugacauuuaagguccuugaccugaagaacuacauugauaaacaacuccugccuauccugaauaagcaguccuguagcauuucuaacaucgagaccgugauugaguuccagcagaaaaauaaccggcuccuggaaaucacgcgcgaguuuuccgugaaugccggcgucacaaccccgguuagcacauauaugcuuaccaacuccgaacugcucucucugaucaaugacaugcccauuaccaacgaucaaaagaaacuuaugagcaacaaugugcagaucgugagacagcaguccuacagcauuaugugcaucauuaaggaggaaguccuggcuuaugugguucaacucccucuguacggggugaucgacacacccuguuggaaacugcauacgucuccucucugcaccacaaacaccaaggagggauccaauaucugucugacacggaccgaucgcggcugguacugcgacaacgccgggagcgucucuuucuuuccccaggcggaaacguguaaggugcagagcaauagaguuuucugcgauacaaugaacuccagaacccugccuucugaggugaaucucugcaacgucgacauuuuuaauccgaaauaugauuguaagaucaugaccagcaaaacagacguguccagcucugucauuaccucccugggagccaucgugagcugcuacggcaagacaaaauguacggcuucuaacaagugccgggggauuaucaagaccuucuccaauggaugugauuauguuagcaacaaaggcguggacacagucuccgugggcaauacccuuuacuauguuaacaagcaagaggggaaaucucuguacgugaagggagaacccaucauuaauuuuuaugacccucucgucuuccccagcgaugaguuugacgccuccaucucucaggugaacgagaaaauuaaccagagccuggcuuucauccgcaaguccgaugaacugcuccacaaugugaacgccggcaagagcacaaccaauauuaugaucacgaccauuaucaucguuauuaucgucauucugcuuucucugaucgccguggggcuccugcuguacugcaaagcuagauccacaccugugacccuuagcaaggaccagcucucuggaauuaacaauaucgcguucuccaacugaggacuagugcaucacauuuaaaagcaucucagccuaccaugagaauaagagaaagaaaaugaagaucaauagcuuauucaucucuuuuucuuuuucguugguguaaagccaacacccugucuaaaaaacauaaauuucuuuaaucauuuugccucuuuucucugugcuucaauuaauaaaaaauggaaagaaccuagaucuaaaaaaaaaaaaaaaaaaaaaaaaaaaaaaaaaaaaaaaaaaaaaaaaaaaaaaaaaaaaaaaaugcaucccccccccccccccccccccccccccccccaaaggcucuuuucagagccaccagaauu

SEQ ID NO: 5677 - RNA, 1997 nt, Artificial Sequence
  mRNA product Design i-2 comprising derived and/or modified sequence from HRSV(A2)__F_DSCav1_mut5 (opt6)
gggagaggcgcugccuacggagguggcagccaucuccuucucggcaucaagcuuaccauggaacuauuaauacuuaaagccaacgcaauaacaacaauucucacugcugucaccuucugcuucgccucaggccaaaacauaacggaagaauuuuaccaaucaacaugcucugcaguauccaaaggcuaccuaucugcucuaagaacagguugguauacaucaguaauaaccauagaacuaucaaacauaaaagaaaauaaaugcaacggaacagacgcaaaaguuaaacucauaaaacaagaacuagacaaauauaaaaacgcaguuaccgaacuacaacuacuuaugcaauccacucccgccacuggaucaggaucagcaauagcaucaggagucgcaguauguaaagucuuacaccucgaaggcgaagucaauaaaaucaaauccgcauuacuauccacaaacaaagcagucguaucccuaagcggaugcggaguaucaguacuaacauuuaaaguacuagaccuaaaaaauuacaucgauaaacaacuauuaccuauauuaaacaaacaauccugcuccauuucaaauaucgaaaccguaauagaauuucaacaaaaaaacaacagauuacuagaaauaacaagagaauuuuccguaaaugcuggcguaacaacaccaguauccacauacaugcucacaaacuccgaacuacuaucacuaauaaaugacaugcccauaacaaacgaucaaaaaaaacuaaugucaaauaauguacaaauaguaagacaacaaagcuacuccaucauguguauaauaaaagaagaaguacuagcauacguaguucaacuaccacuuuacggcguaaucgacaccccuugcuggaaacuacacaccuccccucuaugcaccacaaacacaaaagaagguuccaacauaugccuuaccagaacagacagaggcugguauugcgacaacgcaggaucaguuucauuuuuuccacaagcugaaacaugcaaaguacaaucaaacagagucuucugcgacacaaugaacucaagaacucuacccucagaaguaaaccuauguaacguagacauuuucaaccccaaauacgacugcaaaauuaugacaucaaaaacagacguuucaucaucaguuaucaccucauuaggagcaauaguaagcugcuacggaaaaacaaaaugcaccgccucaaauaaaugcagaggaauaauaaaaacuuucuccaacggaugcgacuacguuucaaacaaagguguagacacuguaucaguaggaaacacacuauauuacguaaauaaacaagaaggaaaaucacuuuaugucaaaggagaaccaauaaucaauuucuacgacccauuaguauucccaucagacgaauuugaugcuucaauaucacaaguaaacgaaaaaauaaaucaaucacucgcauuuauacgaaaaucagacgaacuacuacacaauguaaacgcaggcaaaucaacaacaaacauaaugauaacaacaauaaucauuguaauaauaguaauacuucuaucucuaauagcaguaggauuacuccucuacugcaaagcaagaucaaccccuguaacacuaucaaaagaccaacuuucagguauaaauaauauagcuuuuuccaauuaaggacuagugcaucacauuuaaaagcaucucagccuaccaugagaauaagagaaagaaaaugaagaucaauagcuuauucaucucuuuuucuuuuucguugguguaaagccaacacccugucuaaaaaacauaaauuucuuuaaucauuuugccucuuuucucugugcuucaauuaauaaaaaauggaaagaaccuagaucuaaaaaaaaaaaaaaaaaaaaaaaaaaaaaaaaaaaaaaaaaaaaaaaaaaaaaaaaaaaaaaaaugcaucccccccccccccccccccccccccccccccaaaggcucuuuucagagccaccagaauu

SEQ ID NO: 5678 - RNA, 1997 nt, Artificial Sequence
  mRNA product Design i-2 comprising derived and/or modified sequence from HRSV(A2)__F_DSCav1_mut5 (opt11)
gggagaggcgcugccuacggagguggcagccaucuccuucucggcaucaagcuuaccauggagcuccuaauccucaaagccaacgcgaucacuacaauccucacagccgucaccuucugcuucgccuccggccaaaacaucaccgaggaguucuaccaaucaaccugcuccgccguaucaaaaggauaccuaagcgcccuacggaccggcugguacacaucugucaucaccaucgaacuaucaaacaucaaagaaaacaaaugcaacggaaccgacgcaaaagucaaacugauuaaacaagaacuagacaaauacaaaaacgcagucaccgaacugcaauuacucaugcaaagcacaccggccaccggcucaggcagcgccaucgccuccggcgucgccgucugcaaaguucuccaccucgagggcgaagucaacaaaauaaaaucugcccuccucuccaccaacaaagccgucgucucccucagcggcugcggagucuccguccucaccuucaaaguucucgaucucaagaacuauauugacaaacaacuucuacccauacucaacaaacaaagcugcagcauauccaacaucgaaaccgucaucgaguuccaacaaaagaacaaccgccuccucgaaauaacccgcgaguucagcguuaacgccggagucacuaccccugucuccaccuacaugcucaccaacuccgaacuccuaucacuaaucaacgacaugcccauaaccaacgaccagaagaaacucauguccaacaacguccaaauuguccgacaacaaagcuacuccauaaugugcauaauaaaagaggaaguccucgccuacgucguacaacugccccuuuauggcguaaucgacacacccugcuggaaacuccacacgucaccccucugcaccaccaacacaaaagaaggcucgaacaucugccuaacacggacugaccgcggcugguacugcgacaacgccggcuccgucagcuucuucccacaagccgaaaccugcaaaguacaauccaaccgaguauucugcgacaccaugaacuccagaacccuccccucagaggucaaccugugcaacguagacaucuucaaccccaaauacgacugcaaaauaaugaccucaaaaacagacgucuccucuuccguaaucaccagccucggagccaucgucagcugcuacggcaaaaccaaaugcaccgccucaaacaaaugccgcggcaucaucaaaacauucucaaacggcugcgacuacgucuccaacaaaggcgucgacacaguaagcguaggcaacacacuguacuacgucaacaaacaagagggaaaaucacucuacgucaaaggagaacccauaaucaacuucuacgacccccucguuuuccccagcgacgaguucgacgccagcauaucccaagucaacgagaaaauuaaccaaucccuagcauucauccgaaaaucugacgaacugcuccacaacgucaacgcgggaaaaucaacaaccaacauaaugauaaccacaaucauaauagucaucaucguaauccuccucagccuaaucgcugucggccuccuccucuacugcaaagcccguuccaccccagucacacuuuccaaggaccaacuaagcggaauaaacaacaucgcguucucaaacuaaggacuagugcaucacauuuaaaagcaucucagccuaccaugagaauaagagaaagaaaaugaagaucaauagcuuauucaucucuuuuucuuuuucguugguguaaagccaacacccugucuaaaaaacauaaauuucuuuaaucauuuugccucuuuucucugugcuucaauuaauaaaaaauggaaagaaccuagaucuaaaaaaaaaaaaaaaaaaaaaaaaaaaaaaaaaaaaaaaaaaaaaaaaaaaaaaaaaaaaaaaaugcaucccccccccccccccccccccccccccccccaaaggcucuuuucagagccaccagaauu

SEQ ID NO: 5679 - RNA, 1993 nt, Artificial Sequence
  mRNA product Design i-2 comprising derived and/or modified sequence from HRSV(A2)__F_DSCav1_mut5 (opt1)
ggggcgcugccuacggagguggcagccaucuccuucucggcaucaagcuuaccauggagcugcucauccugaaggccaacgccaucaccaccauccugacggcggugaccuucugcuucgccagcggccagaacaucaccgaggaguucuaccaguccacgugcagcgccgucuccaagggguaccucagcgcccugcggaccggcugguacaccuccgugaucaccaucgagcugagcaacaucaaggagaacaagugcaacgggaccgacgccaaggugaagcucaucaagcaggagcuggacaaguacaagaacgcggucacggagcugcagcuccugaugcaguccaccccggcaaccggcuccggcuccgccaucgcgagcggcgucgccgugugcaaggugcugcaccucgagggggaggucaacaagaucaagagcgcccugcuguccaccaacaaggccguggugagccucuccggcugcggcgucagcgugcugaccuucaaggugcuggaccucaagaacuacaucgacaagcagcugcugcccauccugaacaagcagagcugcuccaucagcaacaucgagacggugaucgaguuccagcagaagaacaaccggcuccuggagaucacccgcgaguucagcgugaacgccggggucaccacccccguguccacguacaugcugaccaacagcgagcuccugucccugaucaacgacaugccgaucaccaacgaccagaagaagcucaugagcaacaacgugcagaucguccggcagcaguccuacagcaucaugugcaucaucaaggaggaggugcuggcguacgugguccagcugccccucuacggcgugaucgacacccccugcuggaagcugcacacgagcccccugugcaccaccaacaccaaggagggguccaacaucugccucacgcgcaccgaccggggcugguacugcgacaacgccggcagcgucuccuucuucccgcaggccgagaccugcaaggugcagagcaaccgcguguucugcgacaccaugaacucccggacgcugcccagcgagguaaaccucugcaacgucgacaucuucaaccccaaguacgacugcaagaucaugaccuccaagaccgacgugagcuccagcgugaucaccucccugggggccaucgucagcugcuacggcaagacgaagugcaccgccagcaacaagugccgggggaucaucaagaccuucuccaacggcugcgacuacgugagcaacaagggcguggacaccguguccgucgggaacacccuguacuacgugaacaagcaggagggcaagagccucuacgugaagggggagcccaucaucaacuucuacgacccgcuggucuuccccuccgacgaguucgacgcgagcaucucccaggugaacgagaagaucaaccagagccuggccuucauccgcaaguccgacgagcugcuccacaacgugaacgccggcaagagcacgaccaacaucaugaucaccaccaucaucaucgucaucaucgugauccugcugucccucaucgccguggggcugcugcucuacugcaaggcccggagcacgcccgucacccuguccaaggaccagcugagcggcaucaacaacaucgcguucuccaacugaggacuagugcaucacauuuaaaagcaucucagccuaccaugagaauaagagaaagaaaaugaagaucaauagcuuauucaucucuuuuucuuuuucguugguguaaagccaacacccugucuaaaaaacauaaauuucuuuaaucauuuugccucuuuucucugugcuucaauuaauaaaaaauggaaagaaccuagaucuaaaaaaaaaaaaaaaaaaaaaaaaaaaaaaaaaaaaaaaaaaaaaaaaaaaaaaaaaaaaaaaaugcaucccccccccccccccccccccccccccccccaaaggcucuuuucagagccaccagaauu

SEQ ID NO: 5680 - RNA, 1993 nt, Artificial Sequence
  mRNA product Design i-2 comprising derived and/or modified sequence from HRSV(A2)__F_DSCav1_mut5 (opt1)
ggggcgcugccuacggagguggcagccaucuccuucucggcaucaagcuuaccauggagcugcucauccugaaggccaacgccaucaccaccauccugacggcggugaccuucugcuucgccagcggccagaacaucaccgaggaguucuaccaguccacgugcagcgccgucuccaagggguaccucagcgcccugcgcaccggcugguacaccuccgugaucaccaucgagcugagcaacaucaaggagaacaagugcaacgggaccgacgccaaggugaagcucaucaagcaggagcuggacaaguacaagaacgcggucacggagcugcagcuccugaugcaguccacccccgccaccggcagcggguccgccaucgccagcggcguggcggugugcaagguccugcaccucgagggcgaggugaacaagaucaaguccgcccugcugagcaccaacaaggccguggucucccucagcgggugcggcguguccgugcugacguucaagguccuggaccucaagaacuacaucgacaagcagcugcugccgauccucaacaagcagagcugcuccaucagcaacaucgagaccgugaucgaguuccagcagaagaacaaccggcugcuggagaucacccgcgaguucuccgugaacgccggggucaccacgcccgugagcaccuacaugcucaccaacagcgagcugcugucccucaucaacgacaugcccaucaccaacgaccagaagaagcugaugagcaacaacgugcagaucguccggcagcaguccuacagcaucaugugcaucaucaaggaggaggugcuggccuacgugguccagcucccccuguacggcgugaucgacacgccgugcuggaagcugcacaccagcccccucugcaccaccaacacgaaggagggguccaacaucugccugacccgcaccgaccggggcugguacugcgacaacgcgggcuccgugagcuucuucccccaggccgagaccugcaagguccaguccaaccgcguguucugcgacacgaugaacagccggacccuccccuccgaggucaaccugugcaacguggacaucuucaacccgaaguacgacugcaagaucaugaccagcaagaccgacguguccagcuccgucaucacgagccugggggccaucguguccugcuacggcaagaccaagugcaccgccagcaacaagugccgggggaucaucaagaccuucuccaacggcugcgacuacgugagcaacaagggcgucgacacggugagcguggggaacacccucuacuacgucaacaagcaggagggcaagucccuguacgugaagggggagcccaucaucaacuucuacgacccccugguguuccccagcgacgaguucgacgccuccaucagccaggucaacgagaagaucaaccagucccucgcguucauccgcaagagcgacgagcugcugcacaacgugaacgccggcaaguccaccaccaacaucaugaucaccacgaucaucaucgugaucaucgucauccuccugagccugaucgccguggggcuccugcuguacugcaaggcccgguccaccccggugacccugagcaaggaccagcucuccggcaucaacaacaucgccuucagcaacugaggacuagugcaucacauuuaaaagcaucucagccuaccaugagaauaagagaaagaaaaugaagaucaauagcuuauucaucucuuuuucuuuuucguugguguaaagccaacacccugucuaaaaaacauaaauuucuuuaaucauuuugccucuuuucucugugcuucaauuaauaaaaaauggaaagaaccuagaucuaaaaaaaaaaaaaaaaaaaaaaaaaaaaaaaaaaaaaaaaaaaaaaaaaaaaaaaaaaaaaaaaugcaucccccccccccccccccccccccccccccccaaaggcucuuuucagagccaccagaauu

SEQ ID NO: 5681 - RNA, 1993 nt, Artificial Sequence
  mRNA product Design i-2 comprising derived and/or modified sequence from HRSV(A2)__F_DSCav1_mut5 (opt2)
ggggcgcugccuacggagguggcagccaucuccuucucggcaucaagcuuaccauggagcuccucauccucaaggccaacgccaucaccaccauccucaccgccgucaccuucugcuucgccuccggccagaacaucaccgaggaguucuaccaguccaccugcuccgccgucuccaagggcuaccucuccgcccuccgcaccggcugguacaccuccgucaucaccaucgagcucuccaacaucaaggagaacaagugcaacggcaccgacgccaaggucaagcucaucaagcaggagcucgacaaguacaagaacgccgucaccgagcuccagcuccucaugcaguccacccccgccaccggcuccggcuccgccaucgccuccggcgucgccgucugcaagguccuccaccucgagggcgaggucaacaagaucaaguccgcccuccucuccaccaacaaggccgucgucucccucuccggcugcggcgucuccguccucaccuucaagguccucgaccucaagaacuacaucgacaagcagcuccuccccauccucaacaagcaguccugcuccaucuccaacaucgagaccgucaucgaguuccagcagaagaacaaccgccuccucgagaucacccgcgaguucuccgucaacgccggcgucaccacccccgucuccaccuacaugcucaccaacuccgagcuccucucccucaucaacgacaugcccaucaccaacgaccagaagaagcucauguccaacaacguccagaucguccgccagcaguccuacuccaucaugugcaucaucaaggaggagguccucgccuacgucguccagcucccccucuacggcgucaucgacacccccugcuggaagcuccacaccuccccccucugcaccaccaacaccaaggagggcuccaacaucugccucacccgcaccgaccgcggcugguacugcgacaacgccggcuccgucuccuucuucccccaggccgagaccugcaagguccaguccaaccgcgucuucugcgacaccaugaacucccgcacccuccccuccgaggucaaccucugcaacgucgacaucuucaaccccaaguacgacugcaagaucaugaccuccaagaccgacgucuccuccuccgucaucaccucccucggcgccaucgucuccugcuacggcaagaccaagugcaccgccuccaacaagugccgcggcaucaucaagaccuucuccaacggcugcgacuacgucuccaacaagggcgucgacaccgucuccgucggcaacacccucuacuacgucaacaagcaggagggcaagucccucuacgucaagggcgagcccaucaucaacuucuacgacccccucgucuuccccuccgacgaguucgacgccuccaucucccaggucaacgagaagaucaaccagucccucgccuucauccgcaaguccgacgagcuccuccacaacgucaacgccggcaaguccaccaccaacaucaugaucaccaccaucaucaucgucaucaucgucauccuccucucccucaucgccgucggccuccuccucuacugcaaggcccgcuccacccccgucacccucuccaaggaccagcucuccggcaucaacaacaucgccuucuccaacugaggacuagugcaucacauuuaaaagcaucucagccuaccaugagaauaagagaaagaaaaugaagaucaauagcuuauucaucucuuuuucuuuuucguugguguaaagccaacacccugucuaaaaaacauaaauuucuuuaaucauuuugccucuuuucucugugcuucaauuaauaaaaaauggaaagaaccuagaucuaaaaaaaaaaaaaaaaaaaaaaaaaaaaaaaaaaaaaaaaaaaaaaaaaaaaaaaaaaaaaaaaugcaucccccccccccccccccccccccccccccccaaaggcucuuuucagagccaccagaauu

SEQ ID NO: 5682 - RNA, 1993 nt, Artificial Sequence
  mRNA product Design i-2 comprising derived and/or modified sequence from HRSV(A2)__F_DSCav1_mut5 (opt3)
ggggcgcugccuacggagguggcagccaucuccuucucggcaucaagcuuaccauggagcugcucauccuuaaggccaacgcuauuaccacaauacugacugcagugacguucugcuuugccagcggccagaauaucaccgaagaguucuaccaauccacauguucugcggucucaaaaggguauuugagugcuuuaagaacuggaugguacaccagcguuauuacaaucgaacuguccaacauuaaggagaauaaaugcaacgguaccgacgccaaggugaaacuaaucaagcaggaacucgauaaguauaaaaaugcaguaacugagcugcagcuucugaugcagucuacacccgccaccggcucggggucagcuauagcaagcggaguggccgucuguaagguguugcaccucgagggcgaaguuaacaaaaucaagagugcucugcuguccacgaauaaagccguggucucucucagcgguugcgggguguccguauuaacuuuuaagguucuggaccuuaagaacuacauugauaaacaauugcugccuauccuaaauaagcagucauguaguauuagcaacaucgagaccgugauagaguuccagcagaaaaauaacaggcuccuggaaauuacacgggaguuuucugucaaugcgggagugacuaccccaguguccacauauaugcuuaccaacucagaacuguugagccucaucaaugacaugccgauuacgaacgaucaaaagaaacugaugaguaacaauguccagaucguucgccagcagucuuacuccaucaugugcauuauaaaggaggaaguguuagcauauguagugcaacugccccucuacggcgucaucgacacuccuuguuggaaacuucauacaagcccacugugcaccacuaacacaaaggagggcucgaauauuuguuugacccgaacggaucgugggugguacugcgacaacgccggaucuguguccuucuuuccccaggcugaaaccuguaagguucagucaaauagaguguucugcgauacaaugaacaguagaacucugccuagcgaggucaaucucugcaacguggacaucuuuaauccaaaauaugauuguaagauaaugaccuccaaaacagacguaucuagcucaguuauuaccagucugggugccaucguguccugcuacggcaagacuaaauguacagcaagcaacaagugcagggggaucauuaagaccuucucuaauggaugugauuaugucucaaacaaaggcguggacacugucaguguggguaauacgcuuuacuauguuaacaagcaagaggggaaaagccuguacgugaagggagaacccaucauuaauuuuuaugacccuuugguauucccauccgaugaguuugacgcuucuauaucgcaggucaacgagaaaaucaaccagagccucgccuucauucggaaguccgaugaacuguuacacaaugugaacgcgggcaagucaacaaccaauaucaugaucacuaccauuauaaucguuauuaucgugauucugcuaagucucaucgccgucggccugcuuuuguacugcaaagcacgcucuacaccggugacccugagcaaggaccagcucuccgggauaaacaauaucgcuuucucaaacugaggacuagugcaucacauuuaaaagcaucucagccuaccaugagaauaagagaaagaaaaugaagaucaauagcuuauucaucucuuuuucuuuuucguugguguaaagccaacacccugucuaaaaaacauaaauuucuuuaaucauuuugccucuuuucucugugcuucaauuaauaaaaaauggaaagaaccuagaucuaaaaaaaaaaaaaaaaaaaaaaaaaaaaaaaaaaaaaaaaaaaaaaaaaaaaaaaaaaaaaaaaugcaucccccccccccccccccccccccccccccccaaaggcucuuuucagagccaccagaauu

SEQ ID NO: 5683 - RNA, 1993 nt, Artificial Sequence
  mRNA product Design i-2 comprising derived and/or modified sequence from HRSV(A2)__F_DSCav1_mut5 (opt4)
ggggcgcugccuacggagguggcagccaucuccuucucggcaucaagcuuaccauggagcugcugauccugaaggccaacgccaucaccaccauccugaccgccgugaccuucugcuucgccagcggccagaacaucaccgaggaguucuaccagagcaccugcagcgccgugagcaagggcuaccugagcgcccugagaaccggcugguacaccagcgugaucaccaucgagcugagcaacaucaaggagaacaagugcaacggcaccgacgccaaggugaagcugaucaagcaggagcuggacaaguacaagaacgccgugaccgagcugcagcugcugaugcagagcacccccgccaccggcagcggcagcgccaucgccagcggcguggccgugugcaaggugcugcaccuggagggcgaggugaacaagaucaagagcgcccugcugagcaccaacaaggccguggugagccugagcggcugcggcgugagcgugcugaccuucaaggugcuggaccugaagaacuacaucgacaagcagcugcugcccauccugaacaagcagagcugcagcaucagcaacaucgagaccgugaucgaguuccagcagaagaacaacagacugcuggagaucaccagagaguucagcgugaacgccggcgugaccacccccgugagcaccuacaugcugaccaacagcgagcugcugagccugaucaacgacaugcccaucaccaacgaccagaagaagcugaugagcaacaacgugcagaucgugagacagcagagcuacagcaucaugugcaucaucaaggaggaggugcuggccuacguggugcagcugccccuguacggcgugaucgacacccccugcuggaagcugcacaccagcccccugugcaccaccaacaccaaggagggcagcaacaucugccugaccagaaccgacagaggcugguacugcgacaacgccggcagcgugagcuucuucccccaggccgagaccugcaaggugcagagcaacagaguguucugcgacaccaugaacagcagaacccugcccagcgaggugaaccugugcaacguggacaucuucaaccccaaguacgacugcaagaucaugaccagcaagaccgacgugagcagcagcgugaucaccagccugggcgccaucgugagcugcuacggcaagaccaagugcaccgccagcaacaagugcagaggcaucaucaagaccuucagcaacggcugcgacuacgugagcaacaagggcguggacaccgugagcgugggcaacacccuguacuacgugaacaagcaggagggcaagagccuguacgugaagggcgagcccaucaucaacuucuacgacccccugguguuccccagcgacgaguucgacgccagcaucagccaggugaacgagaagaucaaccagagccuggccuucaucagaaagagcgacgagcugcugcacaacgugaacgccggcaagagcaccaccaacaucaugaucaccaccaucaucaucgugaucaucgugauccugcugagccugaucgccgugggccugcugcuguacugcaaggccagaagcacccccgugacccugagcaaggaccagcugagcggcaucaacaacaucgccuucagcaacugaggacuagugcaucacauuuaaaagcaucucagccuaccaugagaauaagagaaagaaaaugaagaucaauagcuuauucaucucuuuuucuuuuucguugguguaaagccaacacccugucuaaaaaacauaaauuucuuuaaucauuuugccucuuuucucugugcuucaauuaauaaaaaauggaaagaaccuagaucuaaaaaaaaaaaaaaaaaaaaaaaaaaaaaaaaaaaaaaaaaaaaaaaaaaaaaaaaaaaaaaaaugcaucccccccccccccccccccccccccccccccaaaggcucuuuucagagccaccagaauu

SEQ ID NO: 5684 - RNA, 1993 nt, Artificial Sequence
  mRNA product Design i-2 comprising derived and/or modified sequence from HRSV(A2)__F_DSCav1_mut5 (opt5)
ggggcgcugccuacggagguggcagccaucuccuucucggcaucaagcuuaccauggagcugcucauccugaaggccaacgcuauuaccacaauccuuacggccgugaccuucugcuuugcgagcggccagaauauuacagaagaguucuaccaauccaccuguucugcugucagcaaaggguaucuguccgcccucagaacaggaugguacaccucuguuaucacaauugaacugagcaacaucaaggagaauaaaugcaacggcaccgacgccaaggugaaacuuaucaagcaggaacuggauaaguauaaaaaugcugugacggagcuccagcugcugaugcaguccacccccgccacagggucuggaagcgcuauugccuccggcgucgcgguguguaagguucuccaccuggagggggaagugaacaaaaucaagagcgcccuucugucuaccaauaaagcugucgugucccucagcggaugcggcguuucugugcugacauuuaagguccuugaccugaagaacuacauugauaaacaacuccugccuauccugaauaagcaguccuguagcauuucuaacaucgagaccgugauugaguuccagcagaaaaauaaccggcuccuggaaaucacgcgcgaguuuuccgugaaugccggcgucacaaccccgguuagcacauauaugcuuaccaacuccgaacugcucucucugaucaaugacaugcccauuaccaacgaucaaaagaaacuuaugagcaacaaugugcagaucgugagacagcaguccuacagcauuaugugcaucauuaaggaggaaguccuggcuuaugugguucaacucccucuguacggggugaucgacacacccuguuggaaacugcauacgucuccucucugcaccacaaacaccaaggagggauccaauaucugucugacacggaccgaucgcggcugguacugcgacaacgccgggagcgucucuuucuuuccccaggcggaaacguguaaggugcagagcaauagaguuuucugcgauacaaugaacuccagaacccugccuucugaggugaaucucugcaacgucgacauuuuuaauccgaaauaugauuguaagaucaugaccagcaaaacagacguguccagcucugucauuaccucccugggagccaucgugagcugcuacggcaagacaaaauguacggcuucuaacaagugccgggggauuaucaagaccuucuccaauggaugugauuauguuagcaacaaaggcguggacacagucuccgugggcaauacccuuuacuauguuaacaagcaagaggggaaaucucuguacgugaagggagaacccaucauuaauuuuuaugacccucucgucuuccccagcgaugaguuugacgccuccaucucucaggugaacgagaaaauuaaccagagccuggcuuucauccgcaaguccgaugaacugcuccacaaugugaacgccggcaagagcacaaccaauauuaugaucacgaccauuaucaucguuauuaucgucauucugcuuucucugaucgccguggggcuccugcuguacugcaaagcuagauccacaccugugacccuuagcaaggaccagcucucuggaauuaacaauaucgcguucuccaacugaggacuagugcaucacauuuaaaagcaucucagccuaccaugagaauaagagaaagaaaaugaagaucaauagcuuauucaucucuuuuucuuuuucguugguguaaagccaacacccugucuaaaaaacauaaauuucuuuaaucauuuugccucuuuucucugugcuucaauuaauaaaaaauggaaagaaccuagaucuaaaaaaaaaaaaaaaaaaaaaaaaaaaaaaaaaaaaaaaaaaaaaaaaaaaaaaaaaaaaaaaaugcaucccccccccccccccccccccccccccccccaaaggcucuuuucagagccaccagaauu

SEQ ID NO: 5685 - RNA, 1993 nt, Artificial Sequence
  mRNA product Design i-2 comprising derived and/or modified sequence from HRSV(A2)__F_DSCav1_mut5 (opt6)
ggggcgcugccuacggagguggcagccaucuccuucucggcaucaagcuuaccauggaacuauuaauacuuaaagccaacgcaauaacaacaauucucacugcugucaccuucugcuucgccucaggccaaaacauaacggaagaauuuuaccaaucaacaugcucugcaguauccaaaggcuaccuaucugcucuaagaacagguugguauacaucaguaauaaccauagaacuaucaaacauaaaagaaaauaaaugcaacggaacagacgcaaaaguuaaacucauaaaacaagaacuagacaaauauaaaaacgcaguuaccgaacuacaacuacuuaugcaauccacucccgccacuggaucaggaucagcaauagcaucaggagucgcaguauguaaagucuuacaccucgaaggcgaagucaauaaaaucaaauccgcauuacuauccacaaacaaagcagucguaucccuaagcggaugcggaguaucaguacuaacauuuaaaguacuagaccuaaaaaauuacaucgauaaacaacuauuaccuauauuaaacaaacaauccugcuccauuucaaauaucgaaaccguaauagaauuucaacaaaaaaacaacagauuacuagaaauaacaagagaauuuuccguaaaugcuggcguaacaacaccaguauccacauacaugcucacaaacuccgaacuacuaucacuaauaaaugacaugcccauaacaaacgaucaaaaaaaacuaaugucaaauaauguacaaauaguaagacaacaaagcuacuccaucauguguauaauaaaagaagaaguacuagcauacguaguucaacuaccacuuuacggcguaaucgacaccccuugcuggaaacuacacaccuccccucuaugcaccacaaacacaaaagaagguuccaacauaugccuuaccagaacagacagaggcugguauugcgacaacgcaggaucaguuucauuuuuuccacaagcugaaacaugcaaaguacaaucaaacagagucuucugcgacacaaugaacucaagaacucuacccucagaaguaaaccuauguaacguagacauuuucaaccccaaauacgacugcaaaauuaugacaucaaaaacagacguuucaucaucaguuaucaccucauuaggagcaauaguaagcugcuacggaaaaacaaaaugcaccgccucaaauaaaugcagaggaauaauaaaaacuuucuccaacggaugcgacuacguuucaaacaaagguguagacacuguaucaguaggaaacacacuauauuacguaaauaaacaagaaggaaaaucacuuuaugucaaaggagaaccaauaaucaauuucuacgacccauuaguauucccaucagacgaauuugaugcuucaauaucacaaguaaacgaaaaaauaaaucaaucacucgcauuuauacgaaaaucagacgaacuacuacacaauguaaacgcaggcaaaucaacaacaaacauaaugauaacaacaauaaucauuguaauaauaguaauacuucuaucucuaauagcaguaggauuacuccucuacugcaaagcaagaucaaccccuguaacacuaucaaaagaccaacuuucagguauaaauaauauagcuuuuuccaauuaaggacuagugcaucacauuuaaaagcaucucagccuaccaugagaauaagagaaagaaaaugaagaucaauagcuuauucaucucuuuuucuuuuucguugguguaaagccaacacccugucuaaaaaacauaaauuucuuuaaucauuuugccucuuuucucugugcuucaauuaauaaaaaauggaaagaaccuagaucuaaaaaaaaaaaaaaaaaaaaaaaaaaaaaaaaaaaaaaaaaaaaaaaaaaaaaaaaaaaaaaaaugcaucccccccccccccccccccccccccccccccaaaggcucuuuucagagccaccagaauu

SEQ ID NO: 5686 - RNA, 1993 nt, Artificial Sequence
  mRNA product Design i-2 comprising derived and/or modified sequence from HRSV(A2)__F_DSCav1_mut5 (opt11)
ggggcgcugccuacggagguggcagccaucuccuucucggcaucaagcuuaccauggagcuccuaauccucaaagccaacgcgaucacuacaauccucacagccgucaccuucugcuucgccuccggccaaaacaucaccgaggaguucuaccaaucaaccugcuccgccguaucaaaaggauaccuaagcgcccuacggaccggcugguacacaucugucaucaccaucgaacuaucaaacaucaaagaaaacaaaugcaacggaaccgacgcaaaagucaaacugauuaaacaagaacuagacaaauacaaaaacgcagucaccgaacugcaauuacucaugcaaagcacaccggccaccggcucaggcagcgccaucgccuccggcgucgccgucugcaaaguucuccaccucgagggcgaagucaacaaaauaaaaucugcccuccucuccaccaacaaagccgucgucucccucagcggcugcggagucuccguccucaccuucaaaguucucgaucucaagaacuauauugacaaacaacuucuacccauacucaacaaacaaagcugcagcauauccaacaucgaaaccgucaucgaguuccaacaaaagaacaaccgccuccucgaaauaacccgcgaguucagcguuaacgccggagucacuaccccugucuccaccuacaugcucaccaacuccgaacuccuaucacuaaucaacgacaugcccauaaccaacgaccagaagaaacucauguccaacaacguccaaauuguccgacaacaaagcuacuccauaaugugcauaauaaaagaggaaguccucgccuacgucguacaacugccccuuuauggcguaaucgacacacccugcuggaaacuccacacgucaccccucugcaccaccaacacaaaagaaggcucgaacaucugccuaacacggacugaccgcggcugguacugcgacaacgccggcuccgucagcuucuucccacaagccgaaaccugcaaaguacaauccaaccgaguauucugcgacaccaugaacuccagaacccuccccucagaggucaaccugugcaacguagacaucuucaaccccaaauacgacugcaaaauaaugaccucaaaaacagacgucuccucuuccguaaucaccagccucggagccaucgucagcugcuacggcaaaaccaaaugcaccgccucaaacaaaugccgcggcaucaucaaaacauucucaaacggcugcgacuacgucuccaacaaaggcgucgacacaguaagcguaggcaacacacuguacuacgucaacaaacaagagggaaaaucacucuacgucaaaggagaacccauaaucaacuucuacgacccccucguuuuccccagcgacgaguucgacgccagcauaucccaagucaacgagaaaauuaaccaaucccuagcauucauccgaaaaucugacgaacugcuccacaacgucaacgcgggaaaaucaacaaccaacauaaugauaaccacaaucauaauagucaucaucguaauccuccucagccuaaucgcugucggccuccuccucuacugcaaagcccguuccaccccagucacacuuuccaaggaccaacuaagcggaauaaacaacaucgcguucucaaacuaaggacuagugcaucacauuuaaaagcaucucagccuaccaugagaauaagagaaagaaaaugaagaucaauagcuuauucaucucuuuuucuuuuucguugguguaaagccaacacccugucuaaaaaacauaaauuucuuuaaucauuuugccucuuuucucugugcuucaauuaauaaaaaauggaaagaaccuagaucuaaaaaaaaaaaaaaaaaaaaaaaaaaaaaaaaaaaaaaaaaaaaaaaaaaaaaaaaaaaaaaaaugcaucccccccccccccccccccccccccccccccaaaggcucuuuucagagccaccagaauu

SEQ ID NO: 5687 - RNA, 1828 nt, Artificial Sequence
  mRNA product Design i-3 comprising derived and/or modified sequence from HRSV(A2)__F_DSCav1_mut5 (opt1) R7456
gggagaaagcuuaccauggagcugcucauccugaaggccaacgccaucaccaccauccugacggcggugaccuucugcuucgccagcggccagaacaucaccgaggaguucuaccaguccacgugcagcgccgucuccaagggguaccucagcgcccugcggaccggcugguacaccuccgugaucaccaucgagcugagcaacaucaaggagaacaagugcaacgggaccgacgccaaggugaagcucaucaagcaggagcuggacaaguacaagaacgcggucacggagcugcagcuccugaugcaguccaccccggcaaccggcuccggcuccgccaucgcgagcggcgucgccgugugcaaggugcugcaccucgagggggaggucaacaagaucaagagcgcccugcuguccaccaacaaggccguggugagccucuccggcugcggcgucagcgugcugaccuucaaggugcuggaccucaagaacuacaucgacaagcagcugcugcccauccugaacaagcagagcugcuccaucagcaacaucgagacggugaucgaguuccagcagaagaacaaccggcuccuggagaucacccgcgaguucagcgugaacgccggggucaccacccccguguccacguacaugcugaccaacagcgagcuccugucccugaucaacgacaugccgaucaccaacgaccagaagaagcucaugagcaacaacgugcagaucguccggcagcaguccuacagcaucaugugcaucaucaaggaggaggugcuggcguacgugguccagcugccccucuacggcgugaucgacacccccugcuggaagcugcacacgagcccccugugcaccaccaacaccaaggagggguccaacaucugccucacgcgcaccgaccggggcugguacugcgacaacgccggcagcgucuccuucuucccgcaggccgagaccugcaaggugcagagcaaccgcguguucugcgacaccaugaacucccggacgcugcccagcgagguaaaccucugcaacgucgacaucuucaaccccaaguacgacugcaagaucaugaccuccaagaccgacgugagcuccagcgugaucaccucccugggggccaucgucagcugcuacggcaagacgaagugcaccgccagcaacaagugccgggggaucaucaagaccuucuccaacggcugcgacuacgugagcaacaagggcguggacaccguguccgucgggaacacccuguacuacgugaacaagcaggagggcaagagccucuacgugaagggggagcccaucaucaacuucuacgacccgcuggucuuccccuccgacgaguucgacgcgagcaucucccaggugaacgagaagaucaaccagagccuggccuucauccgcaaguccgacgagcugcuccacaacgugaacgccggcaagagcacgaccaacaucaugaucaccaccaucaucaucgucaucaucgugauccugcugucccucaucgccguggggcugcugcucuacugcaaggcccggagcacgcccgucacccuguccaaggaccagcugagcggcaucaacaacaucgcguucuccaacugaggacuaguuauaagacugacuagcccgaugggccucccaacgggcccuccuccccuccuugcaccgagauuaauaaaaaaaaaaaaaaaaaaaaaaaaaaaaaaaaaaaaaaaaaaaaaaaaaaaaaaaaaaaaaaaaugcaucccccccccccccccccccccccccccccccaaaggcucuuuucagagccaccagaauu

SEQ ID NO: 5688 - RNA, 1828 nt, Artificial Sequence
  mRNA product Design i-3 comprising derived and/or modified sequence from HRSV(A2)__F_DSCav1_mut5 (opt1)
gggagaaagcuuaccauggagcugcucauccugaaggccaacgccaucaccaccauccugacggcggugaccuucugcuucgccagcggccagaacaucaccgaggaguucuaccaguccacgugcagcgccgucuccaagggguaccucagcgcccugcgcaccggcugguacaccuccgugaucaccaucgagcugagcaacaucaaggagaacaagugcaacgggaccgacgccaaggugaagcucaucaagcaggagcuggacaaguacaagaacgcggucacggagcugcagcuccugaugcaguccacccccgccaccggcagcggguccgccaucgccagcggcguggcggugugcaagguccugcaccucgagggcgaggugaacaagaucaaguccgcccugcugagcaccaacaaggccguggucucccucagcgggugcggcguguccgugcugacguucaagguccuggaccucaagaacuacaucgacaagcagcugcugccgauccucaacaagcagagcugcuccaucagcaacaucgagaccgugaucgaguuccagcagaagaacaaccggcugcuggagaucacccgcgaguucuccgugaacgccggggucaccacgcccgugagcaccuacaugcucaccaacagcgagcugcugucccucaucaacgacaugcccaucaccaacgaccagaagaagcugaugagcaacaacgugcagaucguccggcagcaguccuacagcaucaugugcaucaucaaggaggaggugcuggccuacgugguccagcucccccuguacggcgugaucgacacgccgugcuggaagcugcacaccagcccccucugcaccaccaacacgaaggagggguccaacaucugccugacccgcaccgaccggggcugguacugcgacaacgcgggcuccgugagcuucuucccccaggccgagaccugcaagguccaguccaaccgcguguucugcgacacgaugaacagccggacccuccccuccgaggucaaccugugcaacguggacaucuucaacccgaaguacgacugcaagaucaugaccagcaagaccgacguguccagcuccgucaucacgagccugggggccaucguguccugcuacggcaagaccaagugcaccgccagcaacaagugccgggggaucaucaagaccuucuccaacggcugcgacuacgugagcaacaagggcgucgacacggugagcguggggaacacccucuacuacgucaacaagcaggagggcaagucccuguacgugaagggggagcccaucaucaacuucuacgacccccugguguuccccagcgacgaguucgacgccuccaucagccaggucaacgagaagaucaaccagucccucgcguucauccgcaagagcgacgagcugcugcacaacgugaacgccggcaaguccaccaccaacaucaugaucaccacgaucaucaucgugaucaucgucauccuccugagccugaucgccguggggcuccugcuguacugcaaggcccgguccaccccggugacccugagcaaggaccagcucuccggcaucaacaacaucgccuucagcaacugaggacuaguuauaagacugacuagcccgaugggccucccaacgggcccuccuccccuccuugcaccgagauuaauaaaaaaaaaaaaaaaaaaaaaaaaaaaaaaaaaaaaaaaaaaaaaaaaaaaaaaaaaaaaaaaaugcaucccccccccccccccccccccccccccccccaaaggcucuuuucagagccaccagaauu

SEQ ID NO: 5689 - RNA, 1828 nt, Artificial Sequence
  mRNA product Design i-3 comprising derived and/or modified sequence from HRSV(A2)__F_DSCav1_mut5 (opt2)
gggagaaagcuuaccauggagcuccucauccucaaggccaacgccaucaccaccauccucaccgccgucaccuucugcuucgccuccggccagaacaucaccgaggaguucuaccaguccaccugcuccgccgucuccaagggcuaccucuccgcccuccgcaccggcugguacaccuccgucaucaccaucgagcucuccaacaucaaggagaacaagugcaacggcaccgacgccaaggucaagcucaucaagcaggagcucgacaaguacaagaacgccgucaccgagcuccagcuccucaugcaguccacccccgccaccggcuccggcuccgccaucgccuccggcgucgccgucugcaagguccuccaccucgagggcgaggucaacaagaucaaguccgcccuccucuccaccaacaaggccgucgucucccucuccggcugcggcgucuccguccucaccuucaagguccucgaccucaagaacuacaucgacaagcagcuccuccccauccucaacaagcaguccugcuccaucuccaacaucgagaccgucaucgaguuccagcagaagaacaaccgccuccucgagaucacccgcgaguucuccgucaacgccggcgucaccacccccgucuccaccuacaugcucaccaacuccgagcuccucucccucaucaacgacaugcccaucaccaacgaccagaagaagcucauguccaacaacguccagaucguccgccagcaguccuacuccaucaugugcaucaucaaggaggagguccucgccuacgucguccagcucccccucuacggcgucaucgacacccccugcuggaagcuccacaccuccccccucugcaccaccaacaccaaggagggcuccaacaucugccucacccgcaccgaccgcggcugguacugcgacaacgccggcuccgucuccuucuucccccaggccgagaccugcaagguccaguccaaccgcgucuucugcgacaccaugaacucccgcacccuccccuccgaggucaaccucugcaacgucgacaucuucaaccccaaguacgacugcaagaucaugaccuccaagaccgacgucuccuccuccgucaucaccucccucggcgccaucgucuccugcuacggcaagaccaagugcaccgccuccaacaagugccgcggcaucaucaagaccuucuccaacggcugcgacuacgucuccaacaagggcgucgacaccgucuccgucggcaacacccucuacuacgucaacaagcaggagggcaagucccucuacgucaagggcgagcccaucaucaacuucuacgacccccucgucuuccccuccgacgaguucgacgccuccaucucccaggucaacgagaagaucaaccagucccucgccuucauccgcaaguccgacgagcuccuccacaacgucaacgccggcaaguccaccaccaacaucaugaucaccaccaucaucaucgucaucaucgucauccuccucucccucaucgccgucggccuccuccucuacugcaaggcccgcuccacccccgucacccucuccaaggaccagcucuccggcaucaacaacaucgccuucuccaacugaggacuaguuauaagacugacuagcccgaugggccucccaacgggcccuccuccccuccuugcaccgagauuaauaaaaaaaaaaaaaaaaaaaaaaaaaaaaaaaaaaaaaaaaaaaaaaaaaaaaaaaaaaaaaaaaugcaucccccccccccccccccccccccccccccccaaaggcucuuuucagagccaccagaauu

SEQ ID NO: 5690 - RNA, 1828 nt, Artificial Sequence
  mRNA product Design i-3 comprising derived and/or modified sequence from HRSV(A2)__F_DSCav1_mut5 (opt3)
gggagaaagcuuaccauggagcugcucauccuuaaggccaacgcuauuaccacaauacugacugcagugacguucugcuuugccagcggccagaauaucaccgaagaguucuaccaauccacauguucugcggucucaaaaggguauuugagugcuuuaagaacuggaugguacaccagcguuauuacaaucgaacuguccaacauuaaggagaauaaaugcaacgguaccgacgccaaggugaaacuaaucaagcaggaacucgauaaguauaaaaaugcaguaacugagcugcagcuucugaugcagucuacacccgccaccggcucggggucagcuauagcaagcggaguggccgucuguaagguguugcaccucgagggcgaaguuaacaaaaucaagagugcucugcuguccacgaauaaagccguggucucucucagcgguugcgggguguccguauuaacuuuuaagguucuggaccuuaagaacuacauugauaaacaauugcugccuauccuaaauaagcagucauguaguauuagcaacaucgagaccgugauagaguuccagcagaaaaauaacaggcuccuggaaauuacacgggaguuuucugucaaugcgggagugacuaccccaguguccacauauaugcuuaccaacucagaacuguugagccucaucaaugacaugccgauuacgaacgaucaaaagaaacugaugaguaacaauguccagaucguucgccagcagucuuacuccaucaugugcauuauaaaggaggaaguguuagcauauguagugcaacugccccucuacggcgucaucgacacuccuuguuggaaacuucauacaagcccacugugcaccacuaacacaaaggagggcucgaauauuuguuugacccgaacggaucgugggugguacugcgacaacgccggaucuguguccuucuuuccccaggcugaaaccuguaagguucagucaaauagaguguucugcgauacaaugaacaguagaacucugccuagcgaggucaaucucugcaacguggacaucuuuaauccaaaauaugauuguaagauaaugaccuccaaaacagacguaucuagcucaguuauuaccagucugggugccaucguguccugcuacggcaagacuaaauguacagcaagcaacaagugcagggggaucauuaagaccuucucuaauggaugugauuaugucucaaacaaaggcguggacacugucaguguggguaauacgcuuuacuauguuaacaagcaagaggggaaaagccuguacgugaagggagaacccaucauuaauuuuuaugacccuuugguauucccauccgaugaguuugacgcuucuauaucgcaggucaacgagaaaaucaaccagagccucgccuucauucggaaguccgaugaacuguuacacaaugugaacgcgggcaagucaacaaccaauaucaugaucacuaccauuauaaucguuauuaucgugauucugcuaagucucaucgccgucggccugcuuuuguacugcaaagcacgcucuacaccggugacccugagcaaggaccagcucuccgggauaaacaauaucgcuuucucaaacugaggacuaguuauaagacugacuagcccgaugggccucccaacgggcccuccuccccuccuugcaccgagauuaauaaaaaaaaaaaaaaaaaaaaaaaaaaaaaaaaaaaaaaaaaaaaaaaaaaaaaaaaaaaaaaaaugcaucccccccccccccccccccccccccccccccaaaggcucuuuucagagccaccagaauu

SEQ ID NO: 5691 - RNA, 1828 nt, Artificial Sequence
  mRNA product Design i-3 comprising derived and/or modified sequence from HRSV(A2)__F_DSCav1_mut5 (opt4)
gggagaaagcuuaccauggagcugcugauccugaaggccaacgccaucaccaccauccugaccgccgugaccuucugcuucgccagcggccagaacaucaccgaggaguucuaccagagcaccugcagcgccgugagcaagggcuaccugagcgcccugagaaccggcugguacaccagcgugaucaccaucgagcugagcaacaucaaggagaacaagugcaacggcaccgacgccaaggugaagcugaucaagcaggagcuggacaaguacaagaacgccgugaccgagcugcagcugcugaugcagagcacccccgccaccggcagcggcagcgccaucgccagcggcguggccgugugcaaggugcugcaccuggagggcgaggugaacaagaucaagagcgcccugcugagcaccaacaaggccguggugagccugagcggcugcggcgugagcgugcugaccuucaaggugcuggaccugaagaacuacaucgacaagcagcugcugcccauccugaacaagcagagcugcagcaucagcaacaucgagaccgugaucgaguuccagcagaagaacaacagacugcuggagaucaccagagaguucagcgugaacgccggcgugaccacccccgugagcaccuacaugcugaccaacagcgagcugcugagccugaucaacgacaugcccaucaccaacgaccagaagaagcugaugagcaacaacgugcagaucgugagacagcagagcuacagcaucaugugcaucaucaaggaggaggugcuggccuacguggugcagcugccccuguacggcgugaucgacacccccugcuggaagcugcacaccagcccccugugcaccaccaacaccaaggagggcagcaacaucugccugaccagaaccgacagaggcugguacugcgacaacgccggcagcgugagcuucuucccccaggccgagaccugcaaggugcagagcaacagaguguucugcgacaccaugaacagcagaacccugcccagcgaggugaaccugugcaacguggacaucuucaaccccaaguacgacugcaagaucaugaccagcaagaccgacgugagcagcagcgugaucaccagccugggcgccaucgugagcugcuacggcaagaccaagugcaccgccagcaacaagugcagaggcaucaucaagaccuucagcaacggcugcgacuacgugagcaacaagggcguggacaccgugagcgugggcaacacccuguacuacgugaacaagcaggagggcaagagccuguacgugaagggcgagcccaucaucaacuucuacgacccccugguguuccccagcgacgaguucgacgccagcaucagccaggugaacgagaagaucaaccagagccuggccuucaucagaaagagcgacgagcugcugcacaacgugaacgccggcaagagcaccaccaacaucaugaucaccaccaucaucaucgugaucaucgugauccugcugagccugaucgccgugggccugcugcuguacugcaaggccagaagcacccccgugacccugagcaaggaccagcugagcggcaucaacaacaucgccuucagcaacugaggacuaguuauaagacugacuagcccgaugggccucccaacgggcccuccuccccuccuugcaccgagauuaauaaaaaaaaaaaaaaaaaaaaaaaaaaaaaaaaaaaaaaaaaaaaaaaaaaaaaaaaaaaaaaaaugcaucccccccccccccccccccccccccccccccaaaggcucuuuucagagccaccagaauu

SEQ ID NO: 5692 - RNA, 1828 nt, Artificial Sequence
  mRNA product Design i-3 comprising derived and/or modified sequence from HRSV(A2)__F_DSCav1_mut5 (opt5)
gggagaaagcuuaccauggagcugcucauccugaaggccaacgcuauuaccacaauccuuacggccgugaccuucugcuuugcgagcggccagaauauuacagaagaguucuaccaauccaccuguucugcugucagcaaaggguaucuguccgcccucagaacaggaugguacaccucuguuaucacaauugaacugagcaacaucaaggagaauaaaugcaacggcaccgacgccaaggugaaacuuaucaagcaggaacuggauaaguauaaaaaugcugugacggagcuccagcugcugaugcaguccacccccgccacagggucuggaagcgcuauugccuccggcgucgcgguguguaagguucuccaccuggagggggaagugaacaaaaucaagagcgcccuucugucuaccaauaaagcugucgugucccucagcggaugcggcguuucugugcugacauuuaagguccuugaccugaagaacuacauugauaaacaacuccugccuauccugaauaagcaguccuguagcauuucuaacaucgagaccgugauugaguuccagcagaaaaauaaccggcuccuggaaaucacgcgcgaguuuuccgugaaugccggcgucacaaccccgguuagcacauauaugcuuaccaacuccgaacugcucucucugaucaaugacaugcccauuaccaacgaucaaaagaaacuuaugagcaacaaugugcagaucgugagacagcaguccuacagcauuaugugcaucauuaaggaggaaguccuggcuuaugugguucaacucccucuguacggggugaucgacacacccuguuggaaacugcauacgucuccucucugcaccacaaacaccaaggagggauccaauaucugucugacacggaccgaucgcggcugguacugcgacaacgccgggagcgucucuuucuuuccccaggcggaaacguguaaggugcagagcaauagaguuuucugcgauacaaugaacuccagaacccugccuucugaggugaaucucugcaacgucgacauuuuuaauccgaaauaugauuguaagaucaugaccagcaaaacagacguguccagcucugucauuaccucccugggagccaucgugagcugcuacggcaagacaaaauguacggcuucuaacaagugccgggggauuaucaagaccuucuccaauggaugugauuauguuagcaacaaaggcguggacacagucuccgugggcaauacccuuuacuauguuaacaagcaagaggggaaaucucuguacgugaagggagaacccaucauuaauuuuuaugacccucucgucuuccccagcgaugaguuugacgccuccaucucucaggugaacgagaaaauuaaccagagccuggcuuucauccgcaaguccgaugaacugcuccacaaugugaacgccggcaagagcacaaccaauauuaugaucacgaccauuaucaucguuauuaucgucauucugcuuucucugaucgccguggggcuccugcuguacugcaaagcuagauccacaccugugacccuuagcaaggaccagcucucuggaauuaacaauaucgcguucuccaacugaggacuaguuauaagacugacuagcccgaugggccucccaacgggcccuccuccccuccuugcaccgagauuaauaaaaaaaaaaaaaaaaaaaaaaaaaaaaaaaaaaaaaaaaaaaaaaaaaaaaaaaaaaaaaaaaugcaucccccccccccccccccccccccccccccccaaaggcucuuuucagagccaccagaauu

SEQ ID NO: 5693 - RNA, 1828 nt, Artificial Sequence
  mRNA product Design i-3 comprising derived and/or modified sequence from HRSV(A2)__F_DSCav1_mut5 (opt6)
gggagaaagcuuaccauggaacuauuaauacuuaaagccaacgcaauaacaacaauucucacugcugucaccuucugcuucgccucaggccaaaacauaacggaagaauuuuaccaaucaacaugcucugcaguauccaaaggcuaccuaucugcucuaagaacagguugguauacaucaguaauaaccauagaacuaucaaacauaaaagaaaauaaaugcaacggaacagacgcaaaaguuaaacucauaaaacaagaacuagacaaauauaaaaacgcaguuaccgaacuacaacuacuuaugcaauccacucccgccacuggaucaggaucagcaauagcaucaggagucgcaguauguaaagucuuacaccucgaaggcgaagucaauaaaaucaaauccgcauuacuauccacaaacaaagcagucguaucccuaagcggaugcggaguaucaguacuaacauuuaaaguacuagaccuaaaaaauuacaucgauaaacaacuauuaccuauauuaaacaaacaauccugcuccauuucaaauaucgaaaccguaauagaauuucaacaaaaaaacaacagauuacuagaaauaacaagagaauuuuccguaaaugcuggcguaacaacaccaguauccacauacaugcucacaaacuccgaacuacuaucacuaauaaaugacaugcccauaacaaacgaucaaaaaaaacuaaugucaaauaauguacaaauaguaagacaacaaagcuacuccaucauguguauaauaaaagaagaaguacuagcauacguaguucaacuaccacuuuacggcguaaucgacaccccuugcuggaaacuacacaccuccccucuaugcaccacaaacacaaaagaagguuccaacauaugccuuaccagaacagacagaggcugguauugcgacaacgcaggaucaguuucauuuuuuccacaagcugaaacaugcaaaguacaaucaaacagagucuucugcgacacaaugaacucaagaacucuacccucagaaguaaaccuauguaacguagacauuuucaaccccaaauacgacugcaaaauuaugacaucaaaaacagacguuucaucaucaguuaucaccucauuaggagcaauaguaagcugcuacggaaaaacaaaaugcaccgccucaaauaaaugcagaggaauaauaaaaacuuucuccaacggaugcgacuacguuucaaacaaagguguagacacuguaucaguaggaaacacacuauauuacguaaauaaacaagaaggaaaaucacuuuaugucaaaggagaaccaauaaucaauuucuacgacccauuaguauucccaucagacgaauuugaugcuucaauaucacaaguaaacgaaaaaauaaaucaaucacucgcauuuauacgaaaaucagacgaacuacuacacaauguaaacgcaggcaaaucaacaacaaacauaaugauaacaacaauaaucauuguaauaauaguaauacuucuaucucuaauagcaguaggauuacuccucuacugcaaagcaagaucaaccccuguaacacuaucaaaagaccaacuuucagguauaaauaauauagcuuuuuccaauuaaggacuaguuauaagacugacuagcccgaugggccucccaacgggcccuccuccccuccuugcaccgagauuaauaaaaaaaaaaaaaaaaaaaaaaaaaaaaaaaaaaaaaaaaaaaaaaaaaaaaaaaaaaaaaaaaugcaucccccccccccccccccccccccccccccccaaaggcucuuuucagagccaccagaauu

SEQ ID NO: 5694 - RNA, 1828 nt, Artificial Sequence
  mRNA product Design i-3 comprising derived and/or modified sequence from HRSV(A2)__F_DSCav1_mut5 (opt11)
gggagaaagcuuaccauggagcuccuaauccucaaagccaacgcgaucacuacaauccucacagccgucaccuucugcuucgccuccggccaaaacaucaccgaggaguucuaccaaucaaccugcuccgccguaucaaaaggauaccuaagcgcccuacggaccggcugguacacaucugucaucaccaucgaacuaucaaacaucaaagaaaacaaaugcaacggaaccgacgcaaaagucaaacugauuaaacaagaacuagacaaauacaaaaacgcagucaccgaacugcaauuacucaugcaaagcacaccggccaccggcucaggcagcgccaucgccuccggcgucgccgucugcaaaguucuccaccucgagggcgaagucaacaaaauaaaaucugcccuccucuccaccaacaaagccgucgucucccucagcggcugcggagucuccguccucaccuucaaaguucucgaucucaagaacuauauugacaaacaacuucuacccauacucaacaaacaaagcugcagcauauccaacaucgaaaccgucaucgaguuccaacaaaagaacaaccgccuccucgaaauaacccgcgaguucagcguuaacgccggagucacuaccccugucuccaccuacaugcucaccaacuccgaacuccuaucacuaaucaacgacaugcccauaaccaacgaccagaagaaacucauguccaacaacguccaaauuguccgacaacaaagcuacuccauaaugugcauaauaaaagaggaaguccucgccuacgucguacaacugccccuuuauggcguaaucgacacacccugcuggaaacuccacacgucaccccucugcaccaccaacacaaaagaaggcucgaacaucugccuaacacggacugaccgcggcugguacugcgacaacgccggcuccgucagcuucuucccacaagccgaaaccugcaaaguacaauccaaccgaguauucugcgacaccaugaacuccagaacccuccccucagaggucaaccugugcaacguagacaucuucaaccccaaauacgacugcaaaauaaugaccucaaaaacagacgucuccucuuccguaaucaccagccucggagccaucgucagcugcuacggcaaaaccaaaugcaccgccucaaacaaaugccgcggcaucaucaaaacauucucaaacggcugcgacuacgucuccaacaaaggcgucgacacaguaagcguaggcaacacacuguacuacgucaacaaacaagagggaaaaucacucuacgucaaaggagaacccauaaucaacuucuacgacccccucguuuuccccagcgacgaguucgacgccagcauaucccaagucaacgagaaaauuaaccaaucccuagcauucauccgaaaaucugacgaacugcuccacaacgucaacgcgggaaaaucaacaaccaacauaaugauaaccacaaucauaauagucaucaucguaauccuccucagccuaaucgcugucggccuccuccucuacugcaaagcccguuccaccccagucacacuuuccaaggaccaacuaagcggaauaaacaacaucgcguucucaaacuaaggacuaguuauaagacugacuagcccgaugggccucccaacgggcccuccuccccuccuugcaccgagauuaauaaaaaaaaaaaaaaaaaaaaaaaaaaaaaaaaaaaaaaaaaaaaaaaaaaaaaaaaaaaaaaaaugcaucccccccccccccccccccccccccccccccaaaggcucuuuucagagccaccagaauu

SEQ ID NO: 5695 - protein, 515 aa, Artificial Sequence
  derived and/or modified protein sequence (artificial) from HRSV(A2)__F-del_DSCav1_mut5
MELLILKANAITTILTAVTFCFASGQNITEEFYQSTCSAVSKGYLSALRTGWYTSVITIELSNIKENKCNGTDAKVKLIKQELDKYKNAVTELQLLMQSTPATGSGSAIASGVAVCKVLHLEGEVNKIKSALLSTNKAVVSLSGCGVSVLTFKVLDLKNYIDKQLLPILNKQSCSISNIETVIEFQQKNNRLLEITREFSVNAGVTTPVSTYMLTNSELLSLINDMPITNDQKKLMSNNVQIVRQQSYSIMCIIKEEVLAYVVQLPLYGVIDTPCWKLHTSPLCTTNTKEGSNICLTRTDRGWYCDNAGSVSFFPQAETCKVQSNRVFCDTMNSRTLPSEVNLCNVDIFNPKYDCKIMTSKTDVSSSVITSLGAIVSCYGKTKCTASNKCRGIIKTFSNGCDYVSNKGVDTVSVGNTLYYVNKQEGKSLYVKGEPIINFYDPLVFPSDEFDASISQVNEKINQSLAFIRKSDELLHNVNAGKSTTNIMITTIIIVIIVILLSLIAVGLLLYCKAR

SEQ ID NO: 5696 - RNA, 1548 nt, Artificial Sequence
  derived and/or modified CDS sequence (opt1) from HRSV(A2)__F-del_DSCav1_mut5
auggagcugcucauccugaaggccaacgccaucaccaccauccugacggcggugaccuucugcuucgccagcggccagaacaucaccgaggaguucuaccaguccacgugcagcgccgucuccaagggguaccucagcgcccugcggaccggcugguacaccuccgugaucaccaucgagcugagcaacaucaaggagaacaagugcaacgggaccgacgccaaggugaagcucaucaagcaggagcuggacaaguacaagaacgcggucacggagcugcagcuccugaugcaguccaccccggcaaccggcuccggcuccgccaucgcgagcggcgucgccgugugcaaggugcugcaccucgagggggaggucaacaagaucaagagcgcccugcuguccaccaacaaggccguggugagccucuccggcugcggcgucagcgugcugaccuucaaggugcuggaccucaagaacuacaucgacaagcagcugcugcccauccugaacaagcagagcugcuccaucagcaacaucgagacggugaucgaguuccagcagaagaacaaccggcuccuggagaucacccgcgaguucagcgugaacgccggggucaccacccccguguccacguacaugcugaccaacagcgagcuccugucccugaucaacgacaugccgaucaccaacgaccagaagaagcucaugagcaacaacgugcagaucguccggcagcaguccuacagcaucaugugcaucaucaaggaggaggugcuggcguacgugguccagcugccccucuacggcgugaucgacacccccugcuggaagcugcacacgagcccccugugcaccaccaacaccaaggagggguccaacaucugccucacgcgcaccgaccggggcugguacugcgacaacgccggcagcgucuccuucuucccgcaggccgagaccugcaaggugcagagcaaccgcguguucugcgacaccaugaacucccggacgcugcccagcgagguaaaccucugcaacgucgacaucuucaaccccaaguacgacugcaagaucaugaccuccaagaccgacgugagcuccagcgugaucaccucccugggggccaucgucagcugcuacggcaagacgaagugcaccgccagcaacaagugccgggggaucaucaagaccuucuccaacggcugcgacuacgugagcaacaagggcguggacaccguguccgucgggaacacccuguacuacgugaacaagcaggagggcaagagccucuacgugaagggggagcccaucaucaacuucuacgacccgcuggucuuccccuccgacgaguucgacgcgagcaucucccaggugaacgagaagaucaaccagagccuggccuucauccgcaaguccgacgagcugcuccacaacgugaacgccggcaagagcacgaccaacaucaugaucaccaccaucaucaucgucaucaucgugauccugcugucccucaucgccguggggcugcugcucuacugcaaggcccgguga

SEQ ID NO: 5697 - RNA, 1548 nt, Artificial Sequence
  derived and/or modified CDS sequence (opt1) from HRSV(A2)__F-del_DSCav1_mut5
auggagcugcucauccugaaggccaacgccaucaccaccauccugacggcggugaccuucugcuucgccagcggccagaacaucaccgaggaguucuaccaguccacgugcagcgccgucuccaagggguaccucagcgcccugcgcaccggcugguacaccuccgugaucaccaucgagcugagcaacaucaaggagaacaagugcaacgggaccgacgccaaggugaagcucaucaagcaggagcuggacaaguacaagaacgcggucacggagcugcagcuccugaugcaguccacccccgccaccggcagcggguccgccaucgccagcggcguggcggugugcaagguccugcaccucgagggcgaggugaacaagaucaaguccgcccugcugagcaccaacaaggccguggucucccucagcgggugcggcguguccgugcugacguucaagguccuggaccucaagaacuacaucgacaagcagcugcugccgauccucaacaagcagagcugcuccaucagcaacaucgagaccgugaucgaguuccagcagaagaacaaccggcugcuggagaucacccgcgaguucuccgugaacgccggggucaccacgcccgugagcaccuacaugcucaccaacagcgagcugcugucccucaucaacgacaugcccaucaccaacgaccagaagaagcugaugagcaacaacgugcagaucguccggcagcaguccuacagcaucaugugcaucaucaaggaggaggugcuggccuacgugguccagcucccccuguacggcgugaucgacacgccgugcuggaagcugcacaccagcccccucugcaccaccaacacgaaggagggguccaacaucugccugacccgcaccgaccggggcugguacugcgacaacgcgggcuccgugagcuucuucccccaggccgagaccugcaagguccaguccaaccgcguguucugcgacacgaugaacagccggacccuccccuccgaggucaaccugugcaacguggacaucuucaacccgaaguacgacugcaagaucaugaccagcaagaccgacguguccagcuccgucaucacgagccugggggccaucguguccugcuacggcaagaccaagugcaccgccagcaacaagugccgggggaucaucaagaccuucuccaacggcugcgacuacgugagcaacaagggcgucgacacggugagcguggggaacacccucuacuacgucaacaagcaggagggcaagucccuguacgugaagggggagcccaucaucaacuucuacgacccccugguguuccccagcgacgaguucgacgccuccaucagccaggucaacgagaagaucaaccagucccucgcguucauccgcaagagcgacgagcugcugcacaacgugaacgccggcaaguccaccaccaacaucaugaucaccacgaucaucaucgugaucaucgucauccuccugagccugaucgccguggggcuccugcuguacugcaaggcccgguga

SEQ ID NO: 5698 - RNA, 1548 nt, Artificial Sequence
  derived and/or modified CDS sequence (opt2) from HRSV(A2)__F-del_DSCav1_mut5
auggagcuccucauccucaaggccaacgccaucaccaccauccucaccgccgucaccuucugcuucgccuccggccagaacaucaccgaggaguucuaccaguccaccugcuccgccgucuccaagggcuaccucuccgcccuccgcaccggcugguacaccuccgucaucaccaucgagcucuccaacaucaaggagaacaagugcaacggcaccgacgccaaggucaagcucaucaagcaggagcucgacaaguacaagaacgccgucaccgagcuccagcuccucaugcaguccacccccgccaccggcuccggcuccgccaucgccuccggcgucgccgucugcaagguccuccaccucgagggcgaggucaacaagaucaaguccgcccuccucuccaccaacaaggccgucgucucccucuccggcugcggcgucuccguccucaccuucaagguccucgaccucaagaacuacaucgacaagcagcuccuccccauccucaacaagcaguccugcuccaucuccaacaucgagaccgucaucgaguuccagcagaagaacaaccgccuccucgagaucacccgcgaguucuccgucaacgccggcgucaccacccccgucuccaccuacaugcucaccaacuccgagcuccucucccucaucaacgacaugcccaucaccaacgaccagaagaagcucauguccaacaacguccagaucguccgccagcaguccuacuccaucaugugcaucaucaaggaggagguccucgccuacgucguccagcucccccucuacggcgucaucgacacccccugcuggaagcuccacaccuccccccucugcaccaccaacaccaaggagggcuccaacaucugccucacccgcaccgaccgcggcugguacugcgacaacgccggcuccgucuccuucuucccccaggccgagaccugcaagguccaguccaaccgcgucuucugcgacaccaugaacucccgcacccuccccuccgaggucaaccucugcaacgucgacaucuucaaccccaaguacgacugcaagaucaugaccuccaagaccgacgucuccuccuccgucaucaccucccucggcgccaucgucuccugcuacggcaagaccaagugcaccgccuccaacaagugccgcggcaucaucaagaccuucuccaacggcugcgacuacgucuccaacaagggcgucgacaccgucuccgucggcaacacccucuacuacgucaacaagcaggagggcaagucccucuacgucaagggcgagcccaucaucaacuucuacgacccccucgucuuccccuccgacgaguucgacgccuccaucucccaggucaacgagaagaucaaccagucccucgccuucauccgcaaguccgacgagcuccuccacaacgucaacgccggcaaguccaccaccaacaucaugaucaccaccaucaucaucgucaucaucgucauccuccucucccucaucgccgucggccuccuccucuacugcaaggcccgcuga

SEQ ID NO: 5699 - RNA, 1548 nt, Artificial Sequence
  derived and/or modified CDS sequence (opt3) from HRSV(A2)__F-del_DSCav1_mut5
auggagcugcucauccuuaaggccaacgcuauuaccacaauacugacugcagugacguucugcuuugccagcggccagaauaucaccgaagaguucuaccaauccacauguucugcggucucaaaaggguauuugagugcuuuaagaacuggaugguacaccagcguuauuacaaucgaacuguccaacauuaaggagaauaaaugcaacgguaccgacgccaaggugaaacuaaucaagcaggaacucgauaaguauaaaaaugcaguaacugagcugcagcuucugaugcagucuacacccgccaccggcucggggucagcuauagcaagcggaguggccgucuguaagguguugcaccucgagggcgaaguuaacaaaaucaagagugcucugcuguccacgaauaaagccguggucucucucagcgguugcgggguguccguauuaacuuuuaagguucuggaccuuaagaacuacauugauaaacaauugcugccuauccuaaauaagcagucauguaguauuagcaacaucgagaccgugauagaguuccagcagaaaaauaacaggcuccuggaaauuacacgggaguuuucugucaaugcgggagugacuaccccaguguccacauauaugcuuaccaacucagaacuguugagccucaucaaugacaugccgauuacgaacgaucaaaagaaacugaugaguaacaauguccagaucguucgccagcagucuuacuccaucaugugcauuauaaaggaggaaguguuagcauauguagugcaacugccccucuacggcgucaucgacacuccuuguuggaaacuucauacaagcccacugugcaccacuaacacaaaggagggcucgaauauuuguuugacccgaacggaucgugggugguacugcgacaacgccggaucuguguccuucuuuccccaggcugaaaccuguaagguucagucaaauagaguguucugcgauacaaugaacaguagaacucugccuagcgaggucaaucucugcaacguggacaucuuuaauccaaaauaugauuguaagauaaugaccuccaaaacagacguaucuagcucaguuauuaccagucugggugccaucguguccugcuacggcaagacuaaauguacagcaagcaacaagugcagggggaucauuaagaccuucucuaauggaugugauuaugucucaaacaaaggcguggacacugucaguguggguaauacgcuuuacuauguuaacaagcaagaggggaaaagccuguacgugaagggagaacccaucauuaauuuuuaugacccuuugguauucccauccgaugaguuugacgcuucuauaucgcaggucaacgagaaaaucaaccagagccucgccuucauucggaaguccgaugaacuguuacacaaugugaacgcgggcaagucaacaaccaauaucaugaucacuaccauuauaaucguuauuaucgugauucugcuaagucucaucgccgucggccugcuuuuguacugcaaagcacgcuga

SEQ ID NO: 5700 - RNA, 1548 nt, Artificial Sequence
  derived and/or modified CDS sequence (opt4) from HRSV(A2)__F-del_DSCav1_mut5
auggagcugcugauccugaaggccaacgccaucaccaccauccugaccgccgugaccuucugcuucgccagcggccagaacaucaccgaggaguucuaccagagcaccugcagcgccgugagcaagggcuaccugagcgcccugagaaccggcugguacaccagcgugaucaccaucgagcugagcaacaucaaggagaacaagugcaacggcaccgacgccaaggugaagcugaucaagcaggagcuggacaaguacaagaacgccgugaccgagcugcagcugcugaugcagagcacccccgccaccggcagcggcagcgccaucgccagcggcguggccgugugcaaggugcugcaccuggagggcgaggugaacaagaucaagagcgcccugcugagcaccaacaaggccguggugagccugagcggcugcggcgugagcgugcugaccuucaaggugcuggaccugaagaacuacaucgacaagcagcugcugcccauccugaacaagcagagcugcagcaucagcaacaucgagaccgugaucgaguuccagcagaagaacaacagacugcuggagaucaccagagaguucagcgugaacgccggcgugaccacccccgugagcaccuacaugcugaccaacagcgagcugcugagccugaucaacgacaugcccaucaccaacgaccagaagaagcugaugagcaacaacgugcagaucgugagacagcagagcuacagcaucaugugcaucaucaaggaggaggugcuggccuacguggugcagcugccccuguacggcgugaucgacacccccugcuggaagcugcacaccagcccccugugcaccaccaacaccaaggagggcagcaacaucugccugaccagaaccgacagaggcugguacugcgacaacgccggcagcgugagcuucuucccccaggccgagaccugcaaggugcagagcaacagaguguucugcgacaccaugaacagcagaacccugcccagcgaggugaaccugugcaacguggacaucuucaaccccaaguacgacugcaagaucaugaccagcaagaccgacgugagcagcagcgugaucaccagccugggcgccaucgugagcugcuacggcaagaccaagugcaccgccagcaacaagugcagaggcaucaucaagaccuucagcaacggcugcgacuacgugagcaacaagggcguggacaccgugagcgugggcaacacccuguacuacgugaacaagcaggagggcaagagccuguacgugaagggcgagcccaucaucaacuucuacgacccccugguguuccccagcgacgaguucgacgccagcaucagccaggugaacgagaagaucaaccagagccuggccuucaucagaaagagcgacgagcugcugcacaacgugaacgccggcaagagcaccaccaacaucaugaucaccaccaucaucaucgugaucaucgugauccugcugagccugaucgccgugggccugcugcuguacugcaaggccagauga

SEQ ID NO: 5701 - RNA, 1548 nt, Artificial Sequence
  derived and/or modified CDS sequence (opt5) from HRSV(A2)__F-del_DSCav1_mut5
auggagcugcucauccugaaggccaacgcuauuaccacaauccuuacggccgugaccuucugcuuugcgagcggccagaauauuacagaagaguucuaccaauccaccuguucugcugucagcaaaggguaucuguccgcccucagaacaggaugguacaccucuguuaucacaauugaacugagcaacaucaaggagaauaaaugcaacggcaccgacgccaaggugaaacuuaucaagcaggaacuggauaaguauaaaaaugcugugacggagcuccagcugcugaugcaguccacccccgccacagggucuggaagcgcuauugccuccggcgucgcgguguguaagguucuccaccuggagggggaagugaacaaaaucaagagcgcccuucugucuaccaauaaagcugucgugucccucagcggaugcggcguuucugugcugacauuuaagguccuugaccugaagaacuacauugauaaacaacuccugccuauccugaauaagcaguccuguagcauuucuaacaucgagaccgugauugaguuccagcagaaaaauaaccggcuccuggaaaucacgcgcgaguuuuccgugaaugccggcgucacaaccccgguuagcacauauaugcuuaccaacuccgaacugcucucucugaucaaugacaugcccauuaccaacgaucaaaagaaacuuaugagcaacaaugugcagaucgugagacagcaguccuacagcauuaugugcaucauuaaggaggaaguccuggcuuaugugguucaacucccucuguacggggugaucgacacacccuguuggaaacugcauacgucuccucucugcaccacaaacaccaaggagggauccaauaucugucugacacggaccgaucgcggcugguacugcgacaacgccgggagcgucucuuucuuuccccaggcggaaacguguaaggugcagagcaauagaguuuucugcgauacaaugaacuccagaacccugccuucugaggugaaucucugcaacgucgacauuuuuaauccgaaauaugauuguaagaucaugaccagcaaaacagacguguccagcucugucauuaccucccugggagccaucgugagcugcuacggcaagacaaaauguacggcuucuaacaagugccgggggauuaucaagaccuucuccaauggaugugauuauguuagcaacaaaggcguggacacagucuccgugggcaauacccuuuacuauguuaacaagcaagaggggaaaucucuguacgugaagggagaacccaucauuaauuuuuaugacccucucgucuuccccagcgaugaguuugacgccuccaucucucaggugaacgagaaaauuaaccagagccuggcuuucauccgcaaguccgaugaacugcuccacaaugugaacgccggcaagagcacaaccaauauuaugaucacgaccauuaucaucguuauuaucgucauucugcuuucucugaucgccguggggcuccugcuguacugcaaagcuagauga

SEQ ID NO: 5702 - RNA, 1548 nt, Artificial Sequence
  derived and/or modified CDS sequence (opt6) from HRSV(A2)__F-del_DSCav1_mut5
auggaacuuuuaauacugaaagcaaaugccaucacaaccauacuaacugccgucacauucugcuuugcaucaggacaaaacauaacagaagaauuuuaccaauccacaugcucagcaguaucaaaaggauaucuaucggcacuuagaacuggaugguacacaaguguuauaacuauagaacucucaaacauaaaagaaaacaaaugcaauggaacagacgcaaaaguaaaacuaauaaaacaagaacucgauaaauauaaaaaugcaguaaccgaacuacaacuauuaaugcaaagcacacccgcaacaggcagcggaucagcaauagcaagcggagucgcaguauguaaaguacuacaucuagaaggagaagucaacaaaaucaaaucugcacuucuauccacaaacaaagcuguaguaucccuauccggaugcggagucucaguauuaacuuuuaaaguacuagaccuuaaaaacuacauagauaaacaacuauuaccaauacuaaauaaacaaucaugcagcauauccaauauagagacaguaauugaauuucaacaaaaaaacaacagauuacuagaaauuacucgugaauuuuccguaaaugccggagucacaacaccaguaucaaccuauaugcuaacaaacagcgaacuacuuagcuuaauaaaugacaugccaauaacaaaugaccaaaaaaaacuuaugucaaauaacguacaaaucgucagacaacaauccuacucuauaauguguauaauuaaagaagaaguccuagcauacguaguucaauuaccacucuauggaguaauagauacaccaugcuggaaacuacacacgucaccacuauguacaacaaacacaaaagaaggauccaauauaugccuaacaagaaccgacagaggcugguauugugacaacgcaggauccguuucauucuucccacaagcagaaaccuguaaaguacaaucuaauagaguauuuugcgacacaaugaacaguagaacacuaccaagcgagguuaaucuauguaacguagacauauucaauccaaaauaugauugcaaaauaaugacaucaaaaacagauguaucgucgaguguaauaacaagucugggagcuauaguaagcugcuacggcaagacgaaauguaccgcuucaaauaaaugcagaggaaucauuaaaacauucucgaacggaugcgacuacguaaguaauaaaggugucgacaccguaucaguagggaauacauuauacuacgucaacaaacaagaaggaaaaucucuauauguaaaaggagaaccaauaauaaauuucuaugacccucuaguauucccaucagaugaauuugacgcuuccauaucacaaguaaacgaaaaaaucaaucaaucuuuagcauucauacgaaaaagugaugaacuccuacacaacgucaacgcaggaaaaagcacaacaaauauaaugaucacaacaaucaucauaguaauaauaguaauacuacuaucauuaauagcaguaggauuauugcuuuacugcaaagcacgauag

SEQ ID NO: 5703 - RNA, 1548 nt, Artificial Sequence
  derived and/or modified CDS sequence (opt11) from HRSV(A2)__F-del_DSCav1_mut5
auggaacuccucauccucaaagccaacgccauaaccacaauacucaccgccguaaccuucugcuuugcgucgggacaaaacaucaccgaagaguucuaccaauccacuugcuccgcaguaagcaaaggauaccucuccgcccugcgaaccgguugguacacaucagucaucacaaucgaacucucaaacauaaaagaaaacaaaugcaacggcaccgacgcaaaggucaaauuaaucaagcaagaacuagacaaauacaaaaacgccgucacagaacuccagcugcuaaugcagagcacacccgcaacuggcagcggauccgccaucgcaucaggagucgccgugugcaaaguccuacaccucgaaggagaagugaacaaaaucaaaucagcccuacucuccaccaacaaggccgucgucucccucuccggcugcggugucuccguccuaaccuucaaagugcuagaccucaagaacuacaucgacaaacaacuccuaccaauacucaacaagcaaucuugcuccaucuccaacaucgaaaccguaaucgaguuccaacagaagaacaaccgccuccucgaaaucacccgcgaguucucugucaacgcaggggucaccacucccgucuccacauacaugcucacaaacuccgaacuccucagccucaucaacgacaugcccauaaccaacgaccagaaaaagcuaaugagcaauaacguccaaaucguuagacaacaaaguuauuccaucaugugcaucaucaaagaagaaguccucgccuacgucguacaacucccccucuauggcgucaucgacacccccugcuggaaacugcacacaucaccccucugcaccacaaacaccaaagaaggcucaaacaucugccuaacucgcaccgaccgcggcugguacugcgacaacgccggcagcguaucauucuuuccccaagccgaaacaugcaaaguucaauccaaccgcgucuucugcgacacaaugaacuccagaacgcuccccagcgaagucaaccucuguaacguagacaucuucaacccuaaguacgacugcaaaaucaugaccuccaaaacugauguauccuccuccgucaucacaucccugggcgccaucgucagcugcuacggcaaaacaaaaugcacugccucaaacaaaugccgagguaucauaaagaccuucucaaacggaugcgauuacgucagcaacaaaggcgucgacaccgucagugucggcaacacccucuacuacgucaacaaacaagaaggaaaaucccucuacgucaaaggcgaacccaucaucaacuucuacgacccccucgucuuccccagcgacgaguucgacgccuccaucucacaagucaacgaaaagauaaaccaaucucuagccuucauccgcaaauccgaugaacuccugcauaacgucaacgccggcaaauccaccacaaacaucaugaucacuaccauaaucaucgucauaaucguaauccuccuaucucuuaucgcagucggccuacuacucuacugcaaagcccgcuaa

SEQ ID NO: 5704 - RNA, 1824 nt, Artificial Sequence
  mRNA product Design a-1 comprising derived and/or modified sequence from HRSV(A2)__F-del_DSCav1_mut5 (opt1)
gggagagucccgcagucggcguccagcggcucugcuuguucgugugugugucguugcaggccuuauucaagcuuaccauggagcugcucauccugaaggccaacgccaucaccaccauccugacggcggugaccuucugcuucgccagcggccagaacaucaccgaggaguucuaccaguccacgugcagcgccgucuccaagggguaccucagcgcccugcggaccggcugguacaccuccgugaucaccaucgagcugagcaacaucaaggagaacaagugcaacgggaccgacgccaaggugaagcucaucaagcaggagcuggacaaguacaagaacgcggucacggagcugcagcuccugaugcaguccaccccggcaaccggcuccggcuccgccaucgcgagcggcgucgccgugugcaaggugcugcaccucgagggggaggucaacaagaucaagagcgcccugcuguccaccaacaaggccguggugagccucuccggcugcggcgucagcgugcugaccuucaaggugcuggaccucaagaacuacaucgacaagcagcugcugcccauccugaacaagcagagcugcuccaucagcaacaucgagacggugaucgaguuccagcagaagaacaaccggcuccuggagaucacccgcgaguucagcgugaacgccggggucaccacccccguguccacguacaugcugaccaacagcgagcuccugucccugaucaacgacaugccgaucaccaacgaccagaagaagcucaugagcaacaacgugcagaucguccggcagcaguccuacagcaucaugugcaucaucaaggaggaggugcuggcguacgugguccagcugccccucuacggcgugaucgacacccccugcuggaagcugcacacgagcccccugugcaccaccaacaccaaggagggguccaacaucugccucacgcgcaccgaccggggcugguacugcgacaacgccggcagcgucuccuucuucccgcaggccgagaccugcaaggugcagagcaaccgcguguucugcgacaccaugaacucccggacgcugcccagcgagguaaaccucugcaacgucgacaucuucaaccccaaguacgacugcaagaucaugaccuccaagaccgacgugagcuccagcgugaucaccucccugggggccaucgucagcugcuacggcaagacgaagugcaccgccagcaacaagugccgggggaucaucaagaccuucuccaacggcugcgacuacgugagcaacaagggcguggacaccguguccgucgggaacacccuguacuacgugaacaagcaggagggcaagagccucuacgugaagggggagcccaucaucaacuucuacgacccgcuggucuuccccuccgacgaguucgacgcgagcaucucccaggugaacgagaagaucaaccagagccuggccuucauccgcaaguccgacgagcugcuccacaacgugaacgccggcaagagcacgaccaacaucaugaucaccaccaucaucaucgucaucaucgugauccugcugucccucaucgccguggggcugcugcucuacugcaaggcccggugaggacuagucccuguucccagagcccacuuuuuuuucuuuuuuugaaauaaaauagccugucuuucagaucuaaaaaaaaaaaaaaaaaaaaaaaaaaaaaaaaaaaaaaaaaaaaaaaaaaaaaaaaaaaaaaaaugcaucccccccccccccccccccccccccccccccaaaggcucuuuucagagccaccagaauu

SEQ ID NO: 5705 - RNA, 1824 nt, Artificial Sequence
  mRNA product Design a-1 comprising derived and/or modified sequence from HRSV(A2)__F-del_DSCav1_mut5 (opt1)
gggagagucccgcagucggcguccagcggcucugcuuguucgugugugugucguugcaggccuuauucaagcuuaccauggagcugcucauccugaaggccaacgccaucaccaccauccugacggcggugaccuucugcuucgccagcggccagaacaucaccgaggaguucuaccaguccacgugcagcgccgucuccaagggguaccucagcgcccugcgcaccggcugguacaccuccgugaucaccaucgagcugagcaacaucaaggagaacaagugcaacgggaccgacgccaaggugaagcucaucaagcaggagcuggacaaguacaagaacgcggucacggagcugcagcuccugaugcaguccacccccgccaccggcagcggguccgccaucgccagcggcguggcggugugcaagguccugcaccucgagggcgaggugaacaagaucaaguccgcccugcugagcaccaacaaggccguggucucccucagcgggugcggcguguccgugcugacguucaagguccuggaccucaagaacuacaucgacaagcagcugcugccgauccucaacaagcagagcugcuccaucagcaacaucgagaccgugaucgaguuccagcagaagaacaaccggcugcuggagaucacccgcgaguucuccgugaacgccggggucaccacgcccgugagcaccuacaugcucaccaacagcgagcugcugucccucaucaacgacaugcccaucaccaacgaccagaagaagcugaugagcaacaacgugcagaucguccggcagcaguccuacagcaucaugugcaucaucaaggaggaggugcuggccuacgugguccagcucccccuguacggcgugaucgacacgccgugcuggaagcugcacaccagcccccucugcaccaccaacacgaaggagggguccaacaucugccugacccgcaccgaccggggcugguacugcgacaacgcgggcuccgugagcuucuucccccaggccgagaccugcaagguccaguccaaccgcguguucugcgacacgaugaacagccggacccuccccuccgaggucaaccugugcaacguggacaucuucaacccgaaguacgacugcaagaucaugaccagcaagaccgacguguccagcuccgucaucacgagccugggggccaucguguccugcuacggcaagaccaagugcaccgccagcaacaagugccgggggaucaucaagaccuucuccaacggcugcgacuacgugagcaacaagggcgucgacacggugagcguggggaacacccucuacuacgucaacaagcaggagggcaagucccuguacgugaagggggagcccaucaucaacuucuacgacccccugguguuccccagcgacgaguucgacgccuccaucagccaggucaacgagaagaucaaccagucccucgcguucauccgcaagagcgacgagcugcugcacaacgugaacgccggcaaguccaccaccaacaucaugaucaccacgaucaucaucgugaucaucgucauccuccugagccugaucgccguggggcuccugcuguacugcaaggcccggugaggacuagucccuguucccagagcccacuuuuuuuucuuuuuuugaaauaaaauagccugucuuucagaucuaaaaaaaaaaaaaaaaaaaaaaaaaaaaaaaaaaaaaaaaaaaaaaaaaaaaaaaaaaaaaaaaugcaucccccccccccccccccccccccccccccccaaaggcucuuuucagagccaccagaauu

SEQ ID NO: 5706 - RNA, 1824 nt, Artificial Sequence
  mRNA product Design a-1 comprising derived and/or modified sequence from HRSV(A2)__F-del_DSCav1_mut5 (opt2)
gggagagucccgcagucggcguccagcggcucugcuuguucgugugugugucguugcaggccuuauucaagcuuaccauggagcuccucauccucaaggccaacgccaucaccaccauccucaccgccgucaccuucugcuucgccuccggccagaacaucaccgaggaguucuaccaguccaccugcuccgccgucuccaagggcuaccucuccgcccuccgcaccggcugguacaccuccgucaucaccaucgagcucuccaacaucaaggagaacaagugcaacggcaccgacgccaaggucaagcucaucaagcaggagcucgacaaguacaagaacgccgucaccgagcuccagcuccucaugcaguccacccccgccaccggcuccggcuccgccaucgccuccggcgucgccgucugcaagguccuccaccucgagggcgaggucaacaagaucaaguccgcccuccucuccaccaacaaggccgucgucucccucuccggcugcggcgucuccguccucaccuucaagguccucgaccucaagaacuacaucgacaagcagcuccuccccauccucaacaagcaguccugcuccaucuccaacaucgagaccgucaucgaguuccagcagaagaacaaccgccuccucgagaucacccgcgaguucuccgucaacgccggcgucaccacccccgucuccaccuacaugcucaccaacuccgagcuccucucccucaucaacgacaugcccaucaccaacgaccagaagaagcucauguccaacaacguccagaucguccgccagcaguccuacuccaucaugugcaucaucaaggaggagguccucgccuacgucguccagcucccccucuacggcgucaucgacacccccugcuggaagcuccacaccuccccccucugcaccaccaacaccaaggagggcuccaacaucugccucacccgcaccgaccgcggcugguacugcgacaacgccggcuccgucuccuucuucccccaggccgagaccugcaagguccaguccaaccgcgucuucugcgacaccaugaacucccgcacccuccccuccgaggucaaccucugcaacgucgacaucuucaaccccaaguacgacugcaagaucaugaccuccaagaccgacgucuccuccuccgucaucaccucccucggcgccaucgucuccugcuacggcaagaccaagugcaccgccuccaacaagugccgcggcaucaucaagaccuucuccaacggcugcgacuacgucuccaacaagggcgucgacaccgucuccgucggcaacacccucuacuacgucaacaagcaggagggcaagucccucuacgucaagggcgagcccaucaucaacuucuacgacccccucgucuuccccuccgacgaguucgacgccuccaucucccaggucaacgagaagaucaaccagucccucgccuucauccgcaaguccgacgagcuccuccacaacgucaacgccggcaaguccaccaccaacaucaugaucaccaccaucaucaucgucaucaucgucauccuccucucccucaucgccgucggccuccuccucuacugcaaggcccgcugaggacuagucccuguucccagagcccacuuuuuuuucuuuuuuugaaauaaaauagccugucuuucagaucuaaaaaaaaaaaaaaaaaaaaaaaaaaaaaaaaaaaaaaaaaaaaaaaaaaaaaaaaaaaaaaaaugcaucccccccccccccccccccccccccccccccaaaggcucuuuucagagccaccagaauu

SEQ ID NO: 5707 - RNA, 1824 nt, Artificial Sequence
  mRNA product Design a-1 comprising derived and/or modified sequence from HRSV(A2)__F-del_DSCav1_mut5 (opt3)
gggagagucccgcagucggcguccagcggcucugcuuguucgugugugugucguugcaggccuuauucaagcuuaccauggagcugcucauccuuaaggccaacgcuauuaccacaauacugacugcagugacguucugcuuugccagcggccagaauaucaccgaagaguucuaccaauccacauguucugcggucucaaaaggguauuugagugcuuuaagaacuggaugguacaccagcguuauuacaaucgaacuguccaacauuaaggagaauaaaugcaacgguaccgacgccaaggugaaacuaaucaagcaggaacucgauaaguauaaaaaugcaguaacugagcugcagcuucugaugcagucuacacccgccaccggcucggggucagcuauagcaagcggaguggccgucuguaagguguugcaccucgagggcgaaguuaacaaaaucaagagugcucugcuguccacgaauaaagccguggucucucucagcgguugcgggguguccguauuaacuuuuaagguucuggaccuuaagaacuacauugauaaacaauugcugccuauccuaaauaagcagucauguaguauuagcaacaucgagaccgugauagaguuccagcagaaaaauaacaggcuccuggaaauuacacgggaguuuucugucaaugcgggagugacuaccccaguguccacauauaugcuuaccaacucagaacuguugagccucaucaaugacaugccgauuacgaacgaucaaaagaaacugaugaguaacaauguccagaucguucgccagcagucuuacuccaucaugugcauuauaaaggaggaaguguuagcauauguagugcaacugccccucuacggcgucaucgacacuccuuguuggaaacuucauacaagcccacugugcaccacuaacacaaaggagggcucgaauauuuguuugacccgaacggaucgugggugguacugcgacaacgccggaucuguguccuucuuuccccaggcugaaaccuguaagguucagucaaauagaguguucugcgauacaaugaacaguagaacucugccuagcgaggucaaucucugcaacguggacaucuuuaauccaaaauaugauuguaagauaaugaccuccaaaacagacguaucuagcucaguuauuaccagucugggugccaucguguccugcuacggcaagacuaaauguacagcaagcaacaagugcagggggaucauuaagaccuucucuaauggaugugauuaugucucaaacaaaggcguggacacugucaguguggguaauacgcuuuacuauguuaacaagcaagaggggaaaagccuguacgugaagggagaacccaucauuaauuuuuaugacccuuugguauucccauccgaugaguuugacgcuucuauaucgcaggucaacgagaaaaucaaccagagccucgccuucauucggaaguccgaugaacuguuacacaaugugaacgcgggcaagucaacaaccaauaucaugaucacuaccauuauaaucguuauuaucgugauucugcuaagucucaucgccgucggccugcuuuuguacugcaaagcacgcugaggacuagucccuguucccagagcccacuuuuuuuucuuuuuuugaaauaaaauagccugucuuucagaucuaaaaaaaaaaaaaaaaaaaaaaaaaaaaaaaaaaaaaaaaaaaaaaaaaaaaaaaaaaaaaaaaugcaucccccccccccccccccccccccccccccccaaaggcucuuuucagagccaccagaauu

SEQ ID NO: 5708 - RNA, 1824 nt, Artificial Sequence
  mRNA product Design a-1 comprising derived and/or modified sequence from HRSV(A2)__F-del_DSCav1_mut5 (opt4)
gggagagucccgcagucggcguccagcggcucugcuuguucgugugugugucguugcaggccuuauucaagcuuaccauggagcugcugauccugaaggccaacgccaucaccaccauccugaccgccgugaccuucugcuucgccagcggccagaacaucaccgaggaguucuaccagagcaccugcagcgccgugagcaagggcuaccugagcgcccugagaaccggcugguacaccagcgugaucaccaucgagcugagcaacaucaaggagaacaagugcaacggcaccgacgccaaggugaagcugaucaagcaggagcuggacaaguacaagaacgccgugaccgagcugcagcugcugaugcagagcacccccgccaccggcagcggcagcgccaucgccagcggcguggccgugugcaaggugcugcaccuggagggcgaggugaacaagaucaagagcgcccugcugagcaccaacaaggccguggugagccugagcggcugcggcgugagcgugcugaccuucaaggugcuggaccugaagaacuacaucgacaagcagcugcugcccauccugaacaagcagagcugcagcaucagcaacaucgagaccgugaucgaguuccagcagaagaacaacagacugcuggagaucaccagagaguucagcgugaacgccggcgugaccacccccgugagcaccuacaugcugaccaacagcgagcugcugagccugaucaacgacaugcccaucaccaacgaccagaagaagcugaugagcaacaacgugcagaucgugagacagcagagcuacagcaucaugugcaucaucaaggaggaggugcuggccuacguggugcagcugccccuguacggcgugaucgacacccccugcuggaagcugcacaccagcccccugugcaccaccaacaccaaggagggcagcaacaucugccugaccagaaccgacagaggcugguacugcgacaacgccggcagcgugagcuucuucccccaggccgagaccugcaaggugcagagcaacagaguguucugcgacaccaugaacagcagaacccugcccagcgaggugaaccugugcaacguggacaucuucaaccccaaguacgacugcaagaucaugaccagcaagaccgacgugagcagcagcgugaucaccagccugggcgccaucgugagcugcuacggcaagaccaagugcaccgccagcaacaagugcagaggcaucaucaagaccuucagcaacggcugcgacuacgugagcaacaagggcguggacaccgugagcgugggcaacacccuguacuacgugaacaagcaggagggcaagagccuguacgugaagggcgagcccaucaucaacuucuacgacccccugguguuccccagcgacgaguucgacgccagcaucagccaggugaacgagaagaucaaccagagccuggccuucaucagaaagagcgacgagcugcugcacaacgugaacgccggcaagagcaccaccaacaucaugaucaccaccaucaucaucgugaucaucgugauccugcugagccugaucgccgugggccugcugcuguacugcaaggccagaugaggacuagucccuguucccagagcccacuuuuuuuucuuuuuuugaaauaaaauagccugucuuucagaucuaaaaaaaaaaaaaaaaaaaaaaaaaaaaaaaaaaaaaaaaaaaaaaaaaaaaaaaaaaaaaaaaugcaucccccccccccccccccccccccccccccccaaaggcucuuuucagagccaccagaauu

SEQ ID NO: 5709 - RNA, 1824 nt, Artificial Sequence
  mRNA product Design a-1 comprising derived and/or modified sequence from HRSV(A2)__F-del_DSCav1_mut5 (opt5)
gggagagucccgcagucggcguccagcggcucugcuuguucgugugugugucguugcaggccuuauucaagcuuaccauggagcugcucauccugaaggccaacgcuauuaccacaauccuuacggccgugaccuucugcuuugcgagcggccagaauauuacagaagaguucuaccaauccaccuguucugcugucagcaaaggguaucuguccgcccucagaacaggaugguacaccucuguuaucacaauugaacugagcaacaucaaggagaauaaaugcaacggcaccgacgccaaggugaaacuuaucaagcaggaacuggauaaguauaaaaaugcugugacggagcuccagcugcugaugcaguccacccccgccacagggucuggaagcgcuauugccuccggcgucgcgguguguaagguucuccaccuggagggggaagugaacaaaaucaagagcgcccuucugucuaccaauaaagcugucgugucccucagcggaugcggcguuucugugcugacauuuaagguccuugaccugaagaacuacauugauaaacaacuccugccuauccugaauaagcaguccuguagcauuucuaacaucgagaccgugauugaguuccagcagaaaaauaaccggcuccuggaaaucacgcgcgaguuuuccgugaaugccggcgucacaaccccgguuagcacauauaugcuuaccaacuccgaacugcucucucugaucaaugacaugcccauuaccaacgaucaaaagaaacuuaugagcaacaaugugcagaucgugagacagcaguccuacagcauuaugugcaucauuaaggaggaaguccuggcuuaugugguucaacucccucuguacggggugaucgacacacccuguuggaaacugcauacgucuccucucugcaccacaaacaccaaggagggauccaauaucugucugacacggaccgaucgcggcugguacugcgacaacgccgggagcgucucuuucuuuccccaggcggaaacguguaaggugcagagcaauagaguuuucugcgauacaaugaacuccagaacccugccuucugaggugaaucucugcaacgucgacauuuuuaauccgaaauaugauuguaagaucaugaccagcaaaacagacguguccagcucugucauuaccucccugggagccaucgugagcugcuacggcaagacaaaauguacggcuucuaacaagugccgggggauuaucaagaccuucuccaauggaugugauuauguuagcaacaaaggcguggacacagucuccgugggcaauacccuuuacuauguuaacaagcaagaggggaaaucucuguacgugaagggagaacccaucauuaauuuuuaugacccucucgucuuccccagcgaugaguuugacgccuccaucucucaggugaacgagaaaauuaaccagagccuggcuuucauccgcaaguccgaugaacugcuccacaaugugaacgccggcaagagcacaaccaauauuaugaucacgaccauuaucaucguuauuaucgucauucugcuuucucugaucgccguggggcuccugcuguacugcaaagcuagaugaggacuagucccuguucccagagcccacuuuuuuuucuuuuuuugaaauaaaauagccugucuuucagaucuaaaaaaaaaaaaaaaaaaaaaaaaaaaaaaaaaaaaaaaaaaaaaaaaaaaaaaaaaaaaaaaaugcaucccccccccccccccccccccccccccccccaaaggcucuuuucagagccaccagaauu

SEQ ID NO: 5710 - RNA, 1824 nt, Artificial Sequence
  mRNA product Design a-1 comprising derived and/or modified sequence from HRSV(A2)__F-del_DSCav1_mut5 (opt6)
gggagagucccgcagucggcguccagcggcucugcuuguucgugugugugucguugcaggccuuauucaagcuuaccauggaacuuuuaauacugaaagcaaaugccaucacaaccauacuaacugccgucacauucugcuuugcaucaggacaaaacauaacagaagaauuuuaccaauccacaugcucagcaguaucaaaaggauaucuaucggcacuuagaacuggaugguacacaaguguuauaacuauagaacucucaaacauaaaagaaaacaaaugcaauggaacagacgcaaaaguaaaacuaauaaaacaagaacucgauaaauauaaaaaugcaguaaccgaacuacaacuauuaaugcaaagcacacccgcaacaggcagcggaucagcaauagcaagcggagucgcaguauguaaaguacuacaucuagaaggagaagucaacaaaaucaaaucugcacuucuauccacaaacaaagcuguaguaucccuauccggaugcggagucucaguauuaacuuuuaaaguacuagaccuuaaaaacuacauagauaaacaacuauuaccaauacuaaauaaacaaucaugcagcauauccaauauagagacaguaauugaauuucaacaaaaaaacaacagauuacuagaaauuacucgugaauuuuccguaaaugccggagucacaacaccaguaucaaccuauaugcuaacaaacagcgaacuacuuagcuuaauaaaugacaugccaauaacaaaugaccaaaaaaaacuuaugucaaauaacguacaaaucgucagacaacaauccuacucuauaauguguauaauuaaagaagaaguccuagcauacguaguucaauuaccacucuauggaguaauagauacaccaugcuggaaacuacacacgucaccacuauguacaacaaacacaaaagaaggauccaauauaugccuaacaagaaccgacagaggcugguauugugacaacgcaggauccguuucauucuucccacaagcagaaaccuguaaaguacaaucuaauagaguauuuugcgacacaaugaacaguagaacacuaccaagcgagguuaaucuauguaacguagacauauucaauccaaaauaugauugcaaaauaaugacaucaaaaacagauguaucgucgaguguaauaacaagucugggagcuauaguaagcugcuacggcaagacgaaauguaccgcuucaaauaaaugcagaggaaucauuaaaacauucucgaacggaugcgacuacguaaguaauaaaggugucgacaccguaucaguagggaauacauuauacuacgucaacaaacaagaaggaaaaucucuauauguaaaaggagaaccaauaauaaauuucuaugacccucuaguauucccaucagaugaauuugacgcuuccauaucacaaguaaacgaaaaaaucaaucaaucuuuagcauucauacgaaaaagugaugaacuccuacacaacgucaacgcaggaaaaagcacaacaaauauaaugaucacaacaaucaucauaguaauaauaguaauacuacuaucauuaauagcaguaggauuauugcuuuacugcaaagcacgauagggacuagucccuguucccagagcccacuuuuuuuucuuuuuuugaaauaaaauagccugucuuucagaucuaaaaaaaaaaaaaaaaaaaaaaaaaaaaaaaaaaaaaaaaaaaaaaaaaaaaaaaaaaaaaaaaugcaucccccccccccccccccccccccccccccccaaaggcucuuuucagagccaccagaauu

SEQ ID NO: 5711 - RNA, 1824 nt, Artificial Sequence
  mRNA product Design a-1 comprising derived and/or modified sequence from HRSV(A2)__F-del_DSCav1_mut5 (opt11)
gggagagucccgcagucggcguccagcggcucugcuuguucgugugugugucguugcaggccuuauucaagcuuaccauggaacuccucauccucaaagccaacgccauaaccacaauacucaccgccguaaccuucugcuuugcgucgggacaaaacaucaccgaagaguucuaccaauccacuugcuccgcaguaagcaaaggauaccucuccgcccugcgaaccgguugguacacaucagucaucacaaucgaacucucaaacauaaaagaaaacaaaugcaacggcaccgacgcaaaggucaaauuaaucaagcaagaacuagacaaauacaaaaacgccgucacagaacuccagcugcuaaugcagagcacacccgcaacuggcagcggauccgccaucgcaucaggagucgccgugugcaaaguccuacaccucgaaggagaagugaacaaaaucaaaucagcccuacucuccaccaacaaggccgucgucucccucuccggcugcggugucuccguccuaaccuucaaagugcuagaccucaagaacuacaucgacaaacaacuccuaccaauacucaacaagcaaucuugcuccaucuccaacaucgaaaccguaaucgaguuccaacagaagaacaaccgccuccucgaaaucacccgcgaguucucugucaacgcaggggucaccacucccgucuccacauacaugcucacaaacuccgaacuccucagccucaucaacgacaugcccauaaccaacgaccagaaaaagcuaaugagcaauaacguccaaaucguuagacaacaaaguuauuccaucaugugcaucaucaaagaagaaguccucgccuacgucguacaacucccccucuauggcgucaucgacacccccugcuggaaacugcacacaucaccccucugcaccacaaacaccaaagaaggcucaaacaucugccuaacucgcaccgaccgcggcugguacugcgacaacgccggcagcguaucauucuuuccccaagccgaaacaugcaaaguucaauccaaccgcgucuucugcgacacaaugaacuccagaacgcuccccagcgaagucaaccucuguaacguagacaucuucaacccuaaguacgacugcaaaaucaugaccuccaaaacugauguauccuccuccgucaucacaucccugggcgccaucgucagcugcuacggcaaaacaaaaugcacugccucaaacaaaugccgagguaucauaaagaccuucucaaacggaugcgauuacgucagcaacaaaggcgucgacaccgucagugucggcaacacccucuacuacgucaacaaacaagaaggaaaaucccucuacgucaaaggcgaacccaucaucaacuucuacgacccccucgucuuccccagcgacgaguucgacgccuccaucucacaagucaacgaaaagauaaaccaaucucuagccuucauccgcaaauccgaugaacuccugcauaacgucaacgccggcaaauccaccacaaacaucaugaucacuaccauaaucaucgucauaaucguaauccuccuaucucuuaucgcagucggccuacuacucuacugcaaagcccgcuaaggacuagucccuguucccagagcccacuuuuuuuucuuuuuuugaaauaaaauagccugucuuucagaucuaaaaaaaaaaaaaaaaaaaaaaaaaaaaaaaaaaaaaaaaaaaaaaaaaaaaaaaaaaaaaaaaugcaucccccccccccccccccccccccccccccccaaaggcucuuuucagagccaccagaauu

SEQ ID NO: 5712 - RNA, 1843 nt, Artificial Sequence
  mRNA product Design a-2 comprising derived and/or modified sequence from HRSV(A2)__F-del_DSCav1_mut5 (opt1)
gggagaguccgcucagccagguugcagaagcggcuuagcguguguccuaaucuucucucugcguguagguaggccugugccgcaaacaagcuuaccauggagcugcucauccugaaggccaacgccaucaccaccauccugacggcggugaccuucugcuucgccagcggccagaacaucaccgaggaguucuaccaguccacgugcagcgccgucuccaagggguaccucagcgcccugcggaccggcugguacaccuccgugaucaccaucgagcugagcaacaucaaggagaacaagugcaacgggaccgacgccaaggugaagcucaucaagcaggagcuggacaaguacaagaacgcggucacggagcugcagcuccugaugcaguccaccccggcaaccggcuccggcuccgccaucgcgagcggcgucgccgugugcaaggugcugcaccucgagggggaggucaacaagaucaagagcgcccugcuguccaccaacaaggccguggugagccucuccggcugcggcgucagcgugcugaccuucaaggugcuggaccucaagaacuacaucgacaagcagcugcugcccauccugaacaagcagagcugcuccaucagcaacaucgagacggugaucgaguuccagcagaagaacaaccggcuccuggagaucacccgcgaguucagcgugaacgccggggucaccacccccguguccacguacaugcugaccaacagcgagcuccugucccugaucaacgacaugccgaucaccaacgaccagaagaagcucaugagcaacaacgugcagaucguccggcagcaguccuacagcaucaugugcaucaucaaggaggaggugcuggcguacgugguccagcugccccucuacggcgugaucgacacccccugcuggaagcugcacacgagcccccugugcaccaccaacaccaaggagggguccaacaucugccucacgcgcaccgaccggggcugguacugcgacaacgccggcagcgucuccuucuucccgcaggccgagaccugcaaggugcagagcaaccgcguguucugcgacaccaugaacucccggacgcugcccagcgagguaaaccucugcaacgucgacaucuucaaccccaaguacgacugcaagaucaugaccuccaagaccgacgugagcuccagcgugaucaccucccugggggccaucgucagcugcuacggcaagacgaagugcaccgccagcaacaagugccgggggaucaucaagaccuucuccaacggcugcgacuacgugagcaacaagggcguggacaccguguccgucgggaacacccuguacuacgugaacaagcaggagggcaagagccucuacgugaagggggagcccaucaucaacuucuacgacccgcuggucuuccccuccgacgaguucgacgcgagcaucucccaggugaacgagaagaucaaccagagccuggccuucauccgcaaguccgacgagcugcuccacaacgugaacgccggcaagagcacgaccaacaucaugaucaccaccaucaucaucgucaucaucgugauccugcugucccucaucgccguggggcugcugcucuacugcaaggcccggugaggacuagucccuguucccagagcccacuuuuuuuucuuuuuuugaaauaaaauagccugucuuucagaucuaaaaaaaaaaaaaaaaaaaaaaaaaaaaaaaaaaaaaaaaaaaaaaaaaaaaaaaaaaaaaaaaugcaucccccccccccccccccccccccccccccccaaaggcucuuuucagagccaccagaauu

SEQ ID NO: 5713 - RNA, 1843 nt, Artificial Sequence
  mRNA product Design a-2 comprising derived and/or modified sequence from HRSV(A2)__F-del_DSCav1_mut5 (opt1)
gggagaguccgcucagccagguugcagaagcggcuuagcguguguccuaaucuucucucugcguguagguaggccugugccgcaaacaagcuuaccauggagcugcucauccugaaggccaacgccaucaccaccauccugacggcggugaccuucugcuucgccagcggccagaacaucaccgaggaguucuaccaguccacgugcagcgccgucuccaagggguaccucagcgcccugcgcaccggcugguacaccuccgugaucaccaucgagcugagcaacaucaaggagaacaagugcaacgggaccgacgccaaggugaagcucaucaagcaggagcuggacaaguacaagaacgcggucacggagcugcagcuccugaugcaguccacccccgccaccggcagcggguccgccaucgccagcggcguggcggugugcaagguccugcaccucgagggcgaggugaacaagaucaaguccgcccugcugagcaccaacaaggccguggucucccucagcgggugcggcguguccgugcugacguucaagguccuggaccucaagaacuacaucgacaagcagcugcugccgauccucaacaagcagagcugcuccaucagcaacaucgagaccgugaucgaguuccagcagaagaacaaccggcugcuggagaucacccgcgaguucuccgugaacgccggggucaccacgcccgugagcaccuacaugcucaccaacagcgagcugcugucccucaucaacgacaugcccaucaccaacgaccagaagaagcugaugagcaacaacgugcagaucguccggcagcaguccuacagcaucaugugcaucaucaaggaggaggugcuggccuacgugguccagcucccccuguacggcgugaucgacacgccgugcuggaagcugcacaccagcccccucugcaccaccaacacgaaggagggguccaacaucugccugacccgcaccgaccggggcugguacugcgacaacgcgggcuccgugagcuucuucccccaggccgagaccugcaagguccaguccaaccgcguguucugcgacacgaugaacagccggacccuccccuccgaggucaaccugugcaacguggacaucuucaacccgaaguacgacugcaagaucaugaccagcaagaccgacguguccagcuccgucaucacgagccugggggccaucguguccugcuacggcaagaccaagugcaccgccagcaacaagugccgggggaucaucaagaccuucuccaacggcugcgacuacgugagcaacaagggcgucgacacggugagcguggggaacacccucuacuacgucaacaagcaggagggcaagucccuguacgugaagggggagcccaucaucaacuucuacgacccccugguguuccccagcgacgaguucgacgccuccaucagccaggucaacgagaagaucaaccagucccucgcguucauccgcaagagcgacgagcugcugcacaacgugaacgccggcaaguccaccaccaacaucaugaucaccacgaucaucaucgugaucaucgucauccuccugagccugaucgccguggggcuccugcuguacugcaaggcccggugaggacuagucccuguucccagagcccacuuuuuuuucuuuuuuugaaauaaaauagccugucuuucagaucuaaaaaaaaaaaaaaaaaaaaaaaaaaaaaaaaaaaaaaaaaaaaaaaaaaaaaaaaaaaaaaaaugcaucccccccccccccccccccccccccccccccaaaggcucuuuucagagccaccagaauu

SEQ ID NO: 5714 - RNA, 1843 nt, Artificial Sequence
  mRNA product Design a-2 comprising derived and/or modified sequence from HRSV(A2)__F-del_DSCav1_mut5 (opt2)
gggagaguccgcucagccagguugcagaagcggcuuagcguguguccuaaucuucucucugcguguagguaggccugugccgcaaacaagcuuaccauggagcuccucauccucaaggccaacgccaucaccaccauccucaccgccgucaccuucugcuucgccuccggccagaacaucaccgaggaguucuaccaguccaccugcuccgccgucuccaagggcuaccucuccgcccuccgcaccggcugguacaccuccgucaucaccaucgagcucuccaacaucaaggagaacaagugcaacggcaccgacgccaaggucaagcucaucaagcaggagcucgacaaguacaagaacgccgucaccgagcuccagcuccucaugcaguccacccccgccaccggcuccggcuccgccaucgccuccggcgucgccgucugcaagguccuccaccucgagggcgaggucaacaagaucaaguccgcccuccucuccaccaacaaggccgucgucucccucuccggcugcggcgucuccguccucaccuucaagguccucgaccucaagaacuacaucgacaagcagcuccuccccauccucaacaagcaguccugcuccaucuccaacaucgagaccgucaucgaguuccagcagaagaacaaccgccuccucgagaucacccgcgaguucuccgucaacgccggcgucaccacccccgucuccaccuacaugcucaccaacuccgagcuccucucccucaucaacgacaugcccaucaccaacgaccagaagaagcucauguccaacaacguccagaucguccgccagcaguccuacuccaucaugugcaucaucaaggaggagguccucgccuacgucguccagcucccccucuacggcgucaucgacacccccugcuggaagcuccacaccuccccccucugcaccaccaacaccaaggagggcuccaacaucugccucacccgcaccgaccgcggcugguacugcgacaacgccggcuccgucuccuucuucccccaggccgagaccugcaagguccaguccaaccgcgucuucugcgacaccaugaacucccgcacccuccccuccgaggucaaccucugcaacgucgacaucuucaaccccaaguacgacugcaagaucaugaccuccaagaccgacgucuccuccuccgucaucaccucccucggcgccaucgucuccugcuacggcaagaccaagugcaccgccuccaacaagugccgcggcaucaucaagaccuucuccaacggcugcgacuacgucuccaacaagggcgucgacaccgucuccgucggcaacacccucuacuacgucaacaagcaggagggcaagucccucuacgucaagggcgagcccaucaucaacuucuacgacccccucgucuuccccuccgacgaguucgacgccuccaucucccaggucaacgagaagaucaaccagucccucgccuucauccgcaaguccgacgagcuccuccacaacgucaacgccggcaaguccaccaccaacaucaugaucaccaccaucaucaucgucaucaucgucauccuccucucccucaucgccgucggccuccuccucuacugcaaggcccgcugaggacuagucccuguucccagagcccacuuuuuuuucuuuuuuugaaauaaaauagccugucuuucagaucuaaaaaaaaaaaaaaaaaaaaaaaaaaaaaaaaaaaaaaaaaaaaaaaaaaaaaaaaaaaaaaaaugcaucccccccccccccccccccccccccccccccaaaggcucuuuucagagccaccagaauu

SEQ ID NO: 5715 - RNA, 1843 nt, Artificial Sequence
  mRNA product Design a-2 comprising derived and/or modified sequence from HRSV(A2)__F-del_DSCav1_mut5 (opt3)
gggagaguccgcucagccagguugcagaagcggcuuagcguguguccuaaucuucucucugcguguagguaggccugugccgcaaacaagcuuaccauggagcugcucauccuuaaggccaacgcuauuaccacaauacugacugcagugacguucugcuuugccagcggccagaauaucaccgaagaguucuaccaauccacauguucugcggucucaaaaggguauuugagugcuuuaagaacuggaugguacaccagcguuauuacaaucgaacuguccaacauuaaggagaauaaaugcaacgguaccgacgccaaggugaaacuaaucaagcaggaacucgauaaguauaaaaaugcaguaacugagcugcagcuucugaugcagucuacacccgccaccggcucggggucagcuauagcaagcggaguggccgucuguaagguguugcaccucgagggcgaaguuaacaaaaucaagagugcucugcuguccacgaauaaagccguggucucucucagcgguugcgggguguccguauuaacuuuuaagguucuggaccuuaagaacuacauugauaaacaauugcugccuauccuaaauaagcagucauguaguauuagcaacaucgagaccgugauagaguuccagcagaaaaauaacaggcuccuggaaauuacacgggaguuuucugucaaugcgggagugacuaccccaguguccacauauaugcuuaccaacucagaacuguugagccucaucaaugacaugccgauuacgaacgaucaaaagaaacugaugaguaacaauguccagaucguucgccagcagucuuacuccaucaugugcauuauaaaggaggaaguguuagcauauguagugcaacugccccucuacggcgucaucgacacuccuuguuggaaacuucauacaagcccacugugcaccacuaacacaaaggagggcucgaauauuuguuugacccgaacggaucgugggugguacugcgacaacgccggaucuguguccuucuuuccccaggcugaaaccuguaagguucagucaaauagaguguucugcgauacaaugaacaguagaacucugccuagcgaggucaaucucugcaacguggacaucuuuaauccaaaauaugauuguaagauaaugaccuccaaaacagacguaucuagcucaguuauuaccagucugggugccaucguguccugcuacggcaagacuaaauguacagcaagcaacaagugcagggggaucauuaagaccuucucuaauggaugugauuaugucucaaacaaaggcguggacacugucaguguggguaauacgcuuuacuauguuaacaagcaagaggggaaaagccuguacgugaagggagaacccaucauuaauuuuuaugacccuuugguauucccauccgaugaguuugacgcuucuauaucgcaggucaacgagaaaaucaaccagagccucgccuucauucggaaguccgaugaacuguuacacaaugugaacgcgggcaagucaacaaccaauaucaugaucacuaccauuauaaucguuauuaucgugauucugcuaagucucaucgccgucggccugcuuuuguacugcaaagcacgcugaggacuagucccuguucccagagcccacuuuuuuuucuuuuuuugaaauaaaauagccugucuuucagaucuaaaaaaaaaaaaaaaaaaaaaaaaaaaaaaaaaaaaaaaaaaaaaaaaaaaaaaaaaaaaaaaaugcaucccccccccccccccccccccccccccccccaaaggcucuuuucagagccaccagaauu

SEQ ID NO: 5716 - RNA, 1843 nt, Artificial Sequence
  mRNA product Design a-2 comprising derived and/or modified sequence from HRSV(A2)__F-del_DSCav1_mut5 (opt4)
gggagaguccgcucagccagguugcagaagcggcuuagcguguguccuaaucuucucucugcguguagguaggccugugccgcaaacaagcuuaccauggagcugcugauccugaaggccaacgccaucaccaccauccugaccgccgugaccuucugcuucgccagcggccagaacaucaccgaggaguucuaccagagcaccugcagcgccgugagcaagggcuaccugagcgcccugagaaccggcugguacaccagcgugaucaccaucgagcugagcaacaucaaggagaacaagugcaacggcaccgacgccaaggugaagcugaucaagcaggagcuggacaaguacaagaacgccgugaccgagcugcagcugcugaugcagagcacccccgccaccggcagcggcagcgccaucgccagcggcguggccgugugcaaggugcugcaccuggagggcgaggugaacaagaucaagagcgcccugcugagcaccaacaaggccguggugagccugagcggcugcggcgugagcgugcugaccuucaaggugcuggaccugaagaacuacaucgacaagcagcugcugcccauccugaacaagcagagcugcagcaucagcaacaucgagaccgugaucgaguuccagcagaagaacaacagacugcuggagaucaccagagaguucagcgugaacgccggcgugaccacccccgugagcaccuacaugcugaccaacagcgagcugcugagccugaucaacgacaugcccaucaccaacgaccagaagaagcugaugagcaacaacgugcagaucgugagacagcagagcuacagcaucaugugcaucaucaaggaggaggugcuggccuacguggugcagcugccccuguacggcgugaucgacacccccugcuggaagcugcacaccagcccccugugcaccaccaacaccaaggagggcagcaacaucugccugaccagaaccgacagaggcugguacugcgacaacgccggcagcgugagcuucuucccccaggccgagaccugcaaggugcagagcaacagaguguucugcgacaccaugaacagcagaacccugcccagcgaggugaaccugugcaacguggacaucuucaaccccaaguacgacugcaagaucaugaccagcaagaccgacgugagcagcagcgugaucaccagccugggcgccaucgugagcugcuacggcaagaccaagugcaccgccagcaacaagugcagaggcaucaucaagaccuucagcaacggcugcgacuacgugagcaacaagggcguggacaccgugagcgugggcaacacccuguacuacgugaacaagcaggagggcaagagccuguacgugaagggcgagcccaucaucaacuucuacgacccccugguguuccccagcgacgaguucgacgccagcaucagccaggugaacgagaagaucaaccagagccuggccuucaucagaaagagcgacgagcugcugcacaacgugaacgccggcaagagcaccaccaacaucaugaucaccaccaucaucaucgugaucaucgugauccugcugagccugaucgccgugggccugcugcuguacugcaaggccagaugaggacuagucccuguucccagagcccacuuuuuuuucuuuuuuugaaauaaaauagccugucuuucagaucuaaaaaaaaaaaaaaaaaaaaaaaaaaaaaaaaaaaaaaaaaaaaaaaaaaaaaaaaaaaaaaaaugcaucccccccccccccccccccccccccccccccaaaggcucuuuucagagccaccagaauu

SEQ ID NO: 5717 - RNA, 1843 nt, Artificial Sequence
  mRNA product Design a-2 comprising derived and/or modified sequence from HRSV(A2)__F-del_DSCav1_mut5 (opt5)
gggagaguccgcucagccagguugcagaagcggcuuagcguguguccuaaucuucucucugcguguagguaggccugugccgcaaacaagcuuaccauggagcugcucauccugaaggccaacgcuauuaccacaauccuuacggccgugaccuucugcuuugcgagcggccagaauauuacagaagaguucuaccaauccaccuguucugcugucagcaaaggguaucuguccgcccucagaacaggaugguacaccucuguuaucacaauugaacugagcaacaucaaggagaauaaaugcaacggcaccgacgccaaggugaaacuuaucaagcaggaacuggauaaguauaaaaaugcugugacggagcuccagcugcugaugcaguccacccccgccacagggucuggaagcgcuauugccuccggcgucgcgguguguaagguucuccaccuggagggggaagugaacaaaaucaagagcgcccuucugucuaccaauaaagcugucgugucccucagcggaugcggcguuucugugcugacauuuaagguccuugaccugaagaacuacauugauaaacaacuccugccuauccugaauaagcaguccuguagcauuucuaacaucgagaccgugauugaguuccagcagaaaaauaaccggcuccuggaaaucacgcgcgaguuuuccgugaaugccggcgucacaaccccgguuagcacauauaugcuuaccaacuccgaacugcucucucugaucaaugacaugcccauuaccaacgaucaaaagaaacuuaugagcaacaaugugcagaucgugagacagcaguccuacagcauuaugugcaucauuaaggaggaaguccuggcuuaugugguucaacucccucuguacggggugaucgacacacccuguuggaaacugcauacgucuccucucugcaccacaaacaccaaggagggauccaauaucugucugacacggaccgaucgcggcugguacugcgacaacgccgggagcgucucuuucuuuccccaggcggaaacguguaaggugcagagcaauagaguuuucugcgauacaaugaacuccagaacccugccuucugaggugaaucucugcaacgucgacauuuuuaauccgaaauaugauuguaagaucaugaccagcaaaacagacguguccagcucugucauuaccucccugggagccaucgugagcugcuacggcaagacaaaauguacggcuucuaacaagugccgggggauuaucaagaccuucuccaauggaugugauuauguuagcaacaaaggcguggacacagucuccgugggcaauacccuuuacuauguuaacaagcaagaggggaaaucucuguacgugaagggagaacccaucauuaauuuuuaugacccucucgucuuccccagcgaugaguuugacgccuccaucucucaggugaacgagaaaauuaaccagagccuggcuuucauccgcaaguccgaugaacugcuccacaaugugaacgccggcaagagcacaaccaauauuaugaucacgaccauuaucaucguuauuaucgucauucugcuuucucugaucgccguggggcuccugcuguacugcaaagcuagaugaggacuagucccuguucccagagcccacuuuuuuuucuuuuuuugaaauaaaauagccugucuuucagaucuaaaaaaaaaaaaaaaaaaaaaaaaaaaaaaaaaaaaaaaaaaaaaaaaaaaaaaaaaaaaaaaaugcaucccccccccccccccccccccccccccccccaaaggcucuuuucagagccaccagaauu

SEQ ID NO: 5718 - RNA, 1843 nt, Artificial Sequence
  mRNA product Design a-2 comprising derived and/or modified sequence from HRSV(A2)__F-del_DSCav1_mut5 (opt6)
gggagaguccgcucagccagguugcagaagcggcuuagcguguguccuaaucuucucucugcguguagguaggccugugccgcaaacaagcuuaccauggaacuuuuaauacugaaagcaaaugccaucacaaccauacuaacugccgucacauucugcuuugcaucaggacaaaacauaacagaagaauuuuaccaauccacaugcucagcaguaucaaaaggauaucuaucggcacuuagaacuggaugguacacaaguguuauaacuauagaacucucaaacauaaaagaaaacaaaugcaauggaacagacgcaaaaguaaaacuaauaaaacaagaacucgauaaauauaaaaaugcaguaaccgaacuacaacuauuaaugcaaagcacacccgcaacaggcagcggaucagcaauagcaagcggagucgcaguauguaaaguacuacaucuagaaggagaagucaacaaaaucaaaucugcacuucuauccacaaacaaagcuguaguaucccuauccggaugcggagucucaguauuaacuuuuaaaguacuagaccuuaaaaacuacauagauaaacaacuauuaccaauacuaaauaaacaaucaugcagcauauccaauauagagacaguaauugaauuucaacaaaaaaacaacagauuacuagaaauuacucgugaauuuuccguaaaugccggagucacaacaccaguaucaaccuauaugcuaacaaacagcgaacuacuuagcuuaauaaaugacaugccaauaacaaaugaccaaaaaaaacuuaugucaaauaacguacaaaucgucagacaacaauccuacucuauaauguguauaauuaaagaagaaguccuagcauacguaguucaauuaccacucuauggaguaauagauacaccaugcuggaaacuacacacgucaccacuauguacaacaaacacaaaagaaggauccaauauaugccuaacaagaaccgacagaggcugguauugugacaacgcaggauccguuucauucuucccacaagcagaaaccuguaaaguacaaucuaauagaguauuuugcgacacaaugaacaguagaacacuaccaagcgagguuaaucuauguaacguagacauauucaauccaaaauaugauugcaaaauaaugacaucaaaaacagauguaucgucgaguguaauaacaagucugggagcuauaguaagcugcuacggcaagacgaaauguaccgcuucaaauaaaugcagaggaaucauuaaaacauucucgaacggaugcgacuacguaaguaauaaaggugucgacaccguaucaguagggaauacauuauacuacgucaacaaacaagaaggaaaaucucuauauguaaaaggagaaccaauaauaaauuucuaugacccucuaguauucccaucagaugaauuugacgcuuccauaucacaaguaaacgaaaaaaucaaucaaucuuuagcauucauacgaaaaagugaugaacuccuacacaacgucaacgcaggaaaaagcacaacaaauauaaugaucacaacaaucaucauaguaauaauaguaauacuacuaucauuaauagcaguaggauuauugcuuuacugcaaagcacgauagggacuagucccuguucccagagcccacuuuuuuuucuuuuuuugaaauaaaauagccugucuuucagaucuaaaaaaaaaaaaaaaaaaaaaaaaaaaaaaaaaaaaaaaaaaaaaaaaaaaaaaaaaaaaaaaaugcaucccccccccccccccccccccccccccccccaaaggcucuuuucagagccaccagaauu

SEQ ID NO: 5719 - RNA, 1843 nt, Artificial Sequence
  mRNA product Design a-2 comprising derived and/or modified sequence from HRSV(A2)__F-del_DSCav1_mut5 (opt11)
gggagaguccgcucagccagguugcagaagcggcuuagcguguguccuaaucuucucucugcguguagguaggccugugccgcaaacaagcuuaccauggaacuccucauccucaaagccaacgccauaaccacaauacucaccgccguaaccuucugcuuugcgucgggacaaaacaucaccgaagaguucuaccaauccacuugcuccgcaguaagcaaaggauaccucuccgcccugcgaaccgguugguacacaucagucaucacaaucgaacucucaaacauaaaagaaaacaaaugcaacggcaccgacgcaaaggucaaauuaaucaagcaagaacuagacaaauacaaaaacgccgucacagaacuccagcugcuaaugcagagcacacccgcaacuggcagcggauccgccaucgcaucaggagucgccgugugcaaaguccuacaccucgaaggagaagugaacaaaaucaaaucagcccuacucuccaccaacaaggccgucgucucccucuccggcugcggugucuccguccuaaccuucaaagugcuagaccucaagaacuacaucgacaaacaacuccuaccaauacucaacaagcaaucuugcuccaucuccaacaucgaaaccguaaucgaguuccaacagaagaacaaccgccuccucgaaaucacccgcgaguucucugucaacgcaggggucaccacucccgucuccacauacaugcucacaaacuccgaacuccucagccucaucaacgacaugcccauaaccaacgaccagaaaaagcuaaugagcaauaacguccaaaucguuagacaacaaaguuauuccaucaugugcaucaucaaagaagaaguccucgccuacgucguacaacucccccucuauggcgucaucgacacccccugcuggaaacugcacacaucaccccucugcaccacaaacaccaaagaaggcucaaacaucugccuaacucgcaccgaccgcggcugguacugcgacaacgccggcagcguaucauucuuuccccaagccgaaacaugcaaaguucaauccaaccgcgucuucugcgacacaaugaacuccagaacgcuccccagcgaagucaaccucuguaacguagacaucuucaacccuaaguacgacugcaaaaucaugaccuccaaaacugauguauccuccuccgucaucacaucccugggcgccaucgucagcugcuacggcaaaacaaaaugcacugccucaaacaaaugccgagguaucauaaagaccuucucaaacggaugcgauuacgucagcaacaaaggcgucgacaccgucagugucggcaacacccucuacuacgucaacaaacaagaaggaaaaucccucuacgucaaaggcgaacccaucaucaacuucuacgacccccucgucuuccccagcgacgaguucgacgccuccaucucacaagucaacgaaaagauaaaccaaucucuagccuucauccgcaaauccgaugaacuccugcauaacgucaacgccggcaaauccaccacaaacaucaugaucacuaccauaaucaucgucauaaucguaauccuccuaucucuuaucgcagucggccuacuacucuacugcaaagcccgcuaaggacuagucccuguucccagagcccacuuuuuuuucuuuuuuugaaauaaaauagccugucuuucagaucuaaaaaaaaaaaaaaaaaaaaaaaaaaaaaaaaaaaaaaaaaaaaaaaaaaaaaaaaaaaaaaaaugcaucccccccccccccccccccccccccccccccaaaggcucuuuucagagccaccagaauu

SEQ ID NO: 5720 - RNA, 1921 nt, Artificial Sequence
  mRNA product Design a-3 comprising derived and/or modified sequence from HRSV(A2)__F-del_DSCav1_mut5 (opt1)
gggagagggcgcuuggcuugcaaggacccugagcugcggcauugaagcacacccaacccaacucgacugaagucagccucacugaaccggaucugagaaucuucucucucugggcuugccagggcucuccgaaccuagcuagcauccucuucaauuccaacuagaaagcuuaccauggagcugcucauccugaaggccaacgccaucaccaccauccugacggcggugaccuucugcuucgccagcggccagaacaucaccgaggaguucuaccaguccacgugcagcgccgucuccaagggguaccucagcgcccugcggaccggcugguacaccuccgugaucaccaucgagcugagcaacaucaaggagaacaagugcaacgggaccgacgccaaggugaagcucaucaagcaggagcuggacaaguacaagaacgcggucacggagcugcagcuccugaugcaguccaccccggcaaccggcuccggcuccgccaucgcgagcggcgucgccgugugcaaggugcugcaccucgagggggaggucaacaagaucaagagcgcccugcuguccaccaacaaggccguggugagccucuccggcugcggcgucagcgugcugaccuucaaggugcuggaccucaagaacuacaucgacaagcagcugcugcccauccugaacaagcagagcugcuccaucagcaacaucgagacggugaucgaguuccagcagaagaacaaccggcuccuggagaucacccgcgaguucagcgugaacgccggggucaccacccccguguccacguacaugcugaccaacagcgagcuccugucccugaucaacgacaugccgaucaccaacgaccagaagaagcucaugagcaacaacgugcagaucguccggcagcaguccuacagcaucaugugcaucaucaaggaggaggugcuggcguacgugguccagcugccccucuacggcgugaucgacacccccugcuggaagcugcacacgagcccccugugcaccaccaacaccaaggagggguccaacaucugccucacgcgcaccgaccggggcugguacugcgacaacgccggcagcgucuccuucuucccgcaggccgagaccugcaaggugcagagcaaccgcguguucugcgacaccaugaacucccggacgcugcccagcgagguaaaccucugcaacgucgacaucuucaaccccaaguacgacugcaagaucaugaccuccaagaccgacgugagcuccagcgugaucaccucccugggggccaucgucagcugcuacggcaagacgaagugcaccgccagcaacaagugccgggggaucaucaagaccuucuccaacggcugcgacuacgugagcaacaagggcguggacaccguguccgucgggaacacccuguacuacgugaacaagcaggagggcaagagccucuacgugaagggggagcccaucaucaacuucuacgacccgcuggucuuccccuccgacgaguucgacgcgagcaucucccaggugaacgagaagaucaaccagagccuggccuucauccgcaaguccgacgagcugcuccacaacgugaacgccggcaagagcacgaccaacaucaugaucaccaccaucaucaucgucaucaucgugauccugcugucccucaucgccguggggcugcugcucuacugcaaggcccggugaggacuagucccuguucccagagcccacuuuuuuuucuuuuuuugaaauaaaauagccugucuuucagaucuaaaaaaaaaaaaaaaaaaaaaaaaaaaaaaaaaaaaaaaaaaaaaaaaaaaaaaaaaaaaaaaaugcaucccccccccccccccccccccccccccccccaaaggcucuuuucagagccaccagaauu

SEQ ID NO: 5721 - RNA, 1921 nt, Artificial Sequence
  mRNA product Design a-3 comprising derived and/or modified sequence from HRSV(A2)__F-del_DSCav1_mut5 (opt1)
gggagagggcgcuuggcuugcaaggacccugagcugcggcauugaagcacacccaacccaacucgacugaagucagccucacugaaccggaucugagaaucuucucucucugggcuugccagggcucuccgaaccuagcuagcauccucuucaauuccaacuagaaagcuuaccauggagcugcucauccugaaggccaacgccaucaccaccauccugacggcggugaccuucugcuucgccagcggccagaacaucaccgaggaguucuaccaguccacgugcagcgccgucuccaagggguaccucagcgcccugcgcaccggcugguacaccuccgugaucaccaucgagcugagcaacaucaaggagaacaagugcaacgggaccgacgccaaggugaagcucaucaagcaggagcuggacaaguacaagaacgcggucacggagcugcagcuccugaugcaguccacccccgccaccggcagcggguccgccaucgccagcggcguggcggugugcaagguccugcaccucgagggcgaggugaacaagaucaaguccgcccugcugagcaccaacaaggccguggucucccucagcgggugcggcguguccgugcugacguucaagguccuggaccucaagaacuacaucgacaagcagcugcugccgauccucaacaagcagagcugcuccaucagcaacaucgagaccgugaucgaguuccagcagaagaacaaccggcugcuggagaucacccgcgaguucuccgugaacgccggggucaccacgcccgugagcaccuacaugcucaccaacagcgagcugcugucccucaucaacgacaugcccaucaccaacgaccagaagaagcugaugagcaacaacgugcagaucguccggcagcaguccuacagcaucaugugcaucaucaaggaggaggugcuggccuacgugguccagcucccccuguacggcgugaucgacacgccgugcuggaagcugcacaccagcccccucugcaccaccaacacgaaggagggguccaacaucugccugacccgcaccgaccggggcugguacugcgacaacgcgggcuccgugagcuucuucccccaggccgagaccugcaagguccaguccaaccgcguguucugcgacacgaugaacagccggacccuccccuccgaggucaaccugugcaacguggacaucuucaacccgaaguacgacugcaagaucaugaccagcaagaccgacguguccagcuccgucaucacgagccugggggccaucguguccugcuacggcaagaccaagugcaccgccagcaacaagugccgggggaucaucaagaccuucuccaacggcugcgacuacgugagcaacaagggcgucgacacggugagcguggggaacacccucuacuacgucaacaagcaggagggcaagucccuguacgugaagggggagcccaucaucaacuucuacgacccccugguguuccccagcgacgaguucgacgccuccaucagccaggucaacgagaagaucaaccagucccucgcguucauccgcaagagcgacgagcugcugcacaacgugaacgccggcaaguccaccaccaacaucaugaucaccacgaucaucaucgugaucaucgucauccuccugagccugaucgccguggggcuccugcuguacugcaaggcccggugaggacuagucccuguucccagagcccacuuuuuuuucuuuuuuugaaauaaaauagccugucuuucagaucuaaaaaaaaaaaaaaaaaaaaaaaaaaaaaaaaaaaaaaaaaaaaaaaaaaaaaaaaaaaaaaaaugcaucccccccccccccccccccccccccccccccaaaggcucuuuucagagccaccagaauu

SEQ ID NO: 5722 - RNA, 1921 nt, Artificial Sequence
  mRNA product Design a-3 comprising derived and/or modified sequence from HRSV(A2)__F-del_DSCav1_mut5 (opt2)
gggagagggcgcuuggcuugcaaggacccugagcugcggcauugaagcacacccaacccaacucgacugaagucagccucacugaaccggaucugagaaucuucucucucugggcuugccagggcucuccgaaccuagcuagcauccucuucaauuccaacuagaaagcuuaccauggagcuccucauccucaaggccaacgccaucaccaccauccucaccgccgucaccuucugcuucgccuccggccagaacaucaccgaggaguucuaccaguccaccugcuccgccgucuccaagggcuaccucuccgcccuccgcaccggcugguacaccuccgucaucaccaucgagcucuccaacaucaaggagaacaagugcaacggcaccgacgccaaggucaagcucaucaagcaggagcucgacaaguacaagaacgccgucaccgagcuccagcuccucaugcaguccacccccgccaccggcuccggcuccgccaucgccuccggcgucgccgucugcaagguccuccaccucgagggcgaggucaacaagaucaaguccgcccuccucuccaccaacaaggccgucgucucccucuccggcugcggcgucuccguccucaccuucaagguccucgaccucaagaacuacaucgacaagcagcuccuccccauccucaacaagcaguccugcuccaucuccaacaucgagaccgucaucgaguuccagcagaagaacaaccgccuccucgagaucacccgcgaguucuccgucaacgccggcgucaccacccccgucuccaccuacaugcucaccaacuccgagcuccucucccucaucaacgacaugcccaucaccaacgaccagaagaagcucauguccaacaacguccagaucguccgccagcaguccuacuccaucaugugcaucaucaaggaggagguccucgccuacgucguccagcucccccucuacggcgucaucgacacccccugcuggaagcuccacaccuccccccucugcaccaccaacaccaaggagggcuccaacaucugccucacccgcaccgaccgcggcugguacugcgacaacgccggcuccgucuccuucuucccccaggccgagaccugcaagguccaguccaaccgcgucuucugcgacaccaugaacucccgcacccuccccuccgaggucaaccucugcaacgucgacaucuucaaccccaaguacgacugcaagaucaugaccuccaagaccgacgucuccuccuccgucaucaccucccucggcgccaucgucuccugcuacggcaagaccaagugcaccgccuccaacaagugccgcggcaucaucaagaccuucuccaacggcugcgacuacgucuccaacaagggcgucgacaccgucuccgucggcaacacccucuacuacgucaacaagcaggagggcaagucccucuacgucaagggcgagcccaucaucaacuucuacgacccccucgucuuccccuccgacgaguucgacgccuccaucucccaggucaacgagaagaucaaccagucccucgccuucauccgcaaguccgacgagcuccuccacaacgucaacgccggcaaguccaccaccaacaucaugaucaccaccaucaucaucgucaucaucgucauccuccucucccucaucgccgucggccuccuccucuacugcaaggcccgcugaggacuagucccuguucccagagcccacuuuuuuuucuuuuuuugaaauaaaauagccugucuuucagaucuaaaaaaaaaaaaaaaaaaaaaaaaaaaaaaaaaaaaaaaaaaaaaaaaaaaaaaaaaaaaaaaaugcaucccccccccccccccccccccccccccccccaaaggcucuuuucagagccaccagaauu

SEQ ID NO: 5723 - RNA, 1921 nt, Artificial Sequence
  mRNA product Design a-3 comprising derived and/or modified sequence from HRSV(A2)__F-del_DSCav1_mut5 (opt3)
gggagagggcgcuuggcuugcaaggacccugagcugcggcauugaagcacacccaacccaacucgacugaagucagccucacugaaccggaucugagaaucuucucucucugggcuugccagggcucuccgaaccuagcuagcauccucuucaauuccaacuagaaagcuuaccauggagcugcucauccuuaaggccaacgcuauuaccacaauacugacugcagugacguucugcuuugccagcggccagaauaucaccgaagaguucuaccaauccacauguucugcggucucaaaaggguauuugagugcuuuaagaacuggaugguacaccagcguuauuacaaucgaacuguccaacauuaaggagaauaaaugcaacgguaccgacgccaaggugaaacuaaucaagcaggaacucgauaaguauaaaaaugcaguaacugagcugcagcuucugaugcagucuacacccgccaccggcucggggucagcuauagcaagcggaguggccgucuguaagguguugcaccucgagggcgaaguuaacaaaaucaagagugcucugcuguccacgaauaaagccguggucucucucagcgguugcgggguguccguauuaacuuuuaagguucuggaccuuaagaacuacauugauaaacaauugcugccuauccuaaauaagcagucauguaguauuagcaacaucgagaccgugauagaguuccagcagaaaaauaacaggcuccuggaaauuacacgggaguuuucugucaaugcgggagugacuaccccaguguccacauauaugcuuaccaacucagaacuguugagccucaucaaugacaugccgauuacgaacgaucaaaagaaacugaugaguaacaauguccagaucguucgccagcagucuuacuccaucaugugcauuauaaaggaggaaguguuagcauauguagugcaacugccccucuacggcgucaucgacacuccuuguuggaaacuucauacaagcccacugugcaccacuaacacaaaggagggcucgaauauuuguuugacccgaacggaucgugggugguacugcgacaacgccggaucuguguccuucuuuccccaggcugaaaccuguaagguucagucaaauagaguguucugcgauacaaugaacaguagaacucugccuagcgaggucaaucucugcaacguggacaucuuuaauccaaaauaugauuguaagauaaugaccuccaaaacagacguaucuagcucaguuauuaccagucugggugccaucguguccugcuacggcaagacuaaauguacagcaagcaacaagugcagggggaucauuaagaccuucucuaauggaugugauuaugucucaaacaaaggcguggacacugucaguguggguaauacgcuuuacuauguuaacaagcaagaggggaaaagccuguacgugaagggagaacccaucauuaauuuuuaugacccuuugguauucccauccgaugaguuugacgcuucuauaucgcaggucaacgagaaaaucaaccagagccucgccuucauucggaaguccgaugaacuguuacacaaugugaacgcgggcaagucaacaaccaauaucaugaucacuaccauuauaaucguuauuaucgugauucugcuaagucucaucgccgucggccugcuuuuguacugcaaagcacgcugaggacuagucccuguucccagagcccacuuuuuuuucuuuuuuugaaauaaaauagccugucuuucagaucuaaaaaaaaaaaaaaaaaaaaaaaaaaaaaaaaaaaaaaaaaaaaaaaaaaaaaaaaaaaaaaaaugcaucccccccccccccccccccccccccccccccaaaggcucuuuucagagccaccagaauu

SEQ ID NO: 5724 - RNA, 1921 nt, Artificial Sequence
  mRNA product Design a-3 comprising derived and/or modified sequence from HRSV(A2)__F-del_DSCav1_mut5 (opt4)
gggagagggcgcuuggcuugcaaggacccugagcugcggcauugaagcacacccaacccaacucgacugaagucagccucacugaaccggaucugagaaucuucucucucugggcuugccagggcucuccgaaccuagcuagcauccucuucaauuccaacuagaaagcuuaccauggagcugcugauccugaaggccaacgccaucaccaccauccugaccgccgugaccuucugcuucgccagcggccagaacaucaccgaggaguucuaccagagcaccugcagcgccgugagcaagggcuaccugagcgcccugagaaccggcugguacaccagcgugaucaccaucgagcugagcaacaucaaggagaacaagugcaacggcaccgacgccaaggugaagcugaucaagcaggagcuggacaaguacaagaacgccgugaccgagcugcagcugcugaugcagagcacccccgccaccggcagcggcagcgccaucgccagcggcguggccgugugcaaggugcugcaccuggagggcgaggugaacaagaucaagagcgcccugcugagcaccaacaaggccguggugagccugagcggcugcggcgugagcgugcugaccuucaaggugcuggaccugaagaacuacaucgacaagcagcugcugcccauccugaacaagcagagcugcagcaucagcaacaucgagaccgugaucgaguuccagcagaagaacaacagacugcuggagaucaccagagaguucagcgugaacgccggcgugaccacccccgugagcaccuacaugcugaccaacagcgagcugcugagccugaucaacgacaugcccaucaccaacgaccagaagaagcugaugagcaacaacgugcagaucgugagacagcagagcuacagcaucaugugcaucaucaaggaggaggugcuggccuacguggugcagcugccccuguacggcgugaucgacacccccugcuggaagcugcacaccagcccccugugcaccaccaacaccaaggagggcagcaacaucugccugaccagaaccgacagaggcugguacugcgacaacgccggcagcgugagcuucuucccccaggccgagaccugcaaggugcagagcaacagaguguucugcgacaccaugaacagcagaacccugcccagcgaggugaaccugugcaacguggacaucuucaaccccaaguacgacugcaagaucaugaccagcaagaccgacgugagcagcagcgugaucaccagccugggcgccaucgugagcugcuacggcaagaccaagugcaccgccagcaacaagugcagaggcaucaucaagaccuucagcaacggcugcgacuacgugagcaacaagggcguggacaccgugagcgugggcaacacccuguacuacgugaacaagcaggagggcaagagccuguacgugaagggcgagcccaucaucaacuucuacgacccccugguguuccccagcgacgaguucgacgccagcaucagccaggugaacgagaagaucaaccagagccuggccuucaucagaaagagcgacgagcugcugcacaacgugaacgccggcaagagcaccaccaacaucaugaucaccaccaucaucaucgugaucaucgugauccugcugagccugaucgccgugggccugcugcuguacugcaaggccagaugaggacuagucccuguucccagagcccacuuuuuuuucuuuuuuugaaauaaaauagccugucuuucagaucuaaaaaaaaaaaaaaaaaaaaaaaaaaaaaaaaaaaaaaaaaaaaaaaaaaaaaaaaaaaaaaaaugcaucccccccccccccccccccccccccccccccaaaggcucuuuucagagccaccagaauu

SEQ ID NO: 5725 - RNA, 1921 nt, Artificial Sequence
  mRNA product Design a-3 comprising derived and/or modified sequence from HRSV(A2)__F-del_DSCav1_mut5 (opt5)
gggagagggcgcuuggcuugcaaggacccugagcugcggcauugaagcacacccaacccaacucgacugaagucagccucacugaaccggaucugagaaucuucucucucugggcuugccagggcucuccgaaccuagcuagcauccucuucaauuccaacuagaaagcuuaccauggagcugcucauccugaaggccaacgcuauuaccacaauccuuacggccgugaccuucugcuuugcgagcggccagaauauuacagaagaguucuaccaauccaccuguucugcugucagcaaaggguaucuguccgcccucagaacaggaugguacaccucuguuaucacaauugaacugagcaacaucaaggagaauaaaugcaacggcaccgacgccaaggugaaacuuaucaagcaggaacuggauaaguauaaaaaugcugugacggagcuccagcugcugaugcaguccacccccgccacagggucuggaagcgcuauugccuccggcgucgcgguguguaagguucuccaccuggagggggaagugaacaaaaucaagagcgcccuucugucuaccaauaaagcugucgugucccucagcggaugcggcguuucugugcugacauuuaagguccuugaccugaagaacuacauugauaaacaacuccugccuauccugaauaagcaguccuguagcauuucuaacaucgagaccgugauugaguuccagcagaaaaauaaccggcuccuggaaaucacgcgcgaguuuuccgugaaugccggcgucacaaccccgguuagcacauauaugcuuaccaacuccgaacugcucucucugaucaaugacaugcccauuaccaacgaucaaaagaaacuuaugagcaacaaugugcagaucgugagacagcaguccuacagcauuaugugcaucauuaaggaggaaguccuggcuuaugugguucaacucccucuguacggggugaucgacacacccuguuggaaacugcauacgucuccucucugcaccacaaacaccaaggagggauccaauaucugucugacacggaccgaucgcggcugguacugcgacaacgccgggagcgucucuuucuuuccccaggcggaaacguguaaggugcagagcaauagaguuuucugcgauacaaugaacuccagaacccugccuucugaggugaaucucugcaacgucgacauuuuuaauccgaaauaugauuguaagaucaugaccagcaaaacagacguguccagcucugucauuaccucccugggagccaucgugagcugcuacggcaagacaaaauguacggcuucuaacaagugccgggggauuaucaagaccuucuccaauggaugugauuauguuagcaacaaaggcguggacacagucuccgugggcaauacccuuuacuauguuaacaagcaagaggggaaaucucuguacgugaagggagaacccaucauuaauuuuuaugacccucucgucuuccccagcgaugaguuugacgccuccaucucucaggugaacgagaaaauuaaccagagccuggcuuucauccgcaaguccgaugaacugcuccacaaugugaacgccggcaagagcacaaccaauauuaugaucacgaccauuaucaucguuauuaucgucauucugcuuucucugaucgccguggggcuccugcuguacugcaaagcuagaugaggacuagucccuguucccagagcccacuuuuuuuucuuuuuuugaaauaaaauagccugucuuucagaucuaaaaaaaaaaaaaaaaaaaaaaaaaaaaaaaaaaaaaaaaaaaaaaaaaaaaaaaaaaaaaaaaugcaucccccccccccccccccccccccccccccccaaaggcucuuuucagagccaccagaauu

SEQ ID NO: 5726 - RNA, 1921 nt, Artificial Sequence
  mRNA product Design a-3 comprising derived and/or modified sequence from HRSV(A2)__F-del_DSCav1_mut5 (opt6)
gggagagggcgcuuggcuugcaaggacccugagcugcggcauugaagcacacccaacccaacucgacugaagucagccucacugaaccggaucugagaaucuucucucucugggcuugccagggcucuccgaaccuagcuagcauccucuucaauuccaacuagaaagcuuaccauggaacuuuuaauacugaaagcaaaugccaucacaaccauacuaacugccgucacauucugcuuugcaucaggacaaaacauaacagaagaauuuuaccaauccacaugcucagcaguaucaaaaggauaucuaucggcacuuagaacuggaugguacacaaguguuauaacuauagaacucucaaacauaaaagaaaacaaaugcaauggaacagacgcaaaaguaaaacuaauaaaacaagaacucgauaaauauaaaaaugcaguaaccgaacuacaacuauuaaugcaaagcacacccgcaacaggcagcggaucagcaauagcaagcggagucgcaguauguaaaguacuacaucuagaaggagaagucaacaaaaucaaaucugcacuucuauccacaaacaaagcuguaguaucccuauccggaugcggagucucaguauuaacuuuuaaaguacuagaccuuaaaaacuacauagauaaacaacuauuaccaauacuaaauaaacaaucaugcagcauauccaauauagagacaguaauugaauuucaacaaaaaaacaacagauuacuagaaauuacucgugaauuuuccguaaaugccggagucacaacaccaguaucaaccuauaugcuaacaaacagcgaacuacuuagcuuaauaaaugacaugccaauaacaaaugaccaaaaaaaacuuaugucaaauaacguacaaaucgucagacaacaauccuacucuauaauguguauaauuaaagaagaaguccuagcauacguaguucaauuaccacucuauggaguaauagauacaccaugcuggaaacuacacacgucaccacuauguacaacaaacacaaaagaaggauccaauauaugccuaacaagaaccgacagaggcugguauugugacaacgcaggauccguuucauucuucccacaagcagaaaccuguaaaguacaaucuaauagaguauuuugcgacacaaugaacaguagaacacuaccaagcgagguuaaucuauguaacguagacauauucaauccaaaauaugauugcaaaauaaugacaucaaaaacagauguaucgucgaguguaauaacaagucugggagcuauaguaagcugcuacggcaagacgaaauguaccgcuucaaauaaaugcagaggaaucauuaaaacauucucgaacggaugcgacuacguaaguaauaaaggugucgacaccguaucaguagggaauacauuauacuacgucaacaaacaagaaggaaaaucucuauauguaaaaggagaaccaauaauaaauuucuaugacccucuaguauucccaucagaugaauuugacgcuuccauaucacaaguaaacgaaaaaaucaaucaaucuuuagcauucauacgaaaaagugaugaacuccuacacaacgucaacgcaggaaaaagcacaacaaauauaaugaucacaacaaucaucauaguaauaauaguaauacuacuaucauuaauagcaguaggauuauugcuuuacugcaaagcacgauagggacuagucccuguucccagagcccacuuuuuuuucuuuuuuugaaauaaaauagccugucuuucagaucuaaaaaaaaaaaaaaaaaaaaaaaaaaaaaaaaaaaaaaaaaaaaaaaaaaaaaaaaaaaaaaaaugcaucccccccccccccccccccccccccccccccaaaggcucuuuucagagccaccagaauu

SEQ ID NO: 5727 - RNA, 1921 nt, Artificial Sequence
  mRNA product Design a-3 comprising derived and/or modified sequence from HRSV(A2)__F-del_DSCav1_mut5 (opt11)
gggagagggcgcuuggcuugcaaggacccugagcugcggcauugaagcacacccaacccaacucgacugaagucagccucacugaaccggaucugagaaucuucucucucugggcuugccagggcucuccgaaccuagcuagcauccucuucaauuccaacuagaaagcuuaccauggaacuccucauccucaaagccaacgccauaaccacaauacucaccgccguaaccuucugcuuugcgucgggacaaaacaucaccgaagaguucuaccaauccacuugcuccgcaguaagcaaaggauaccucuccgcccugcgaaccgguugguacacaucagucaucacaaucgaacucucaaacauaaaagaaaacaaaugcaacggcaccgacgcaaaggucaaauuaaucaagcaagaacuagacaaauacaaaaacgccgucacagaacuccagcugcuaaugcagagcacacccgcaacuggcagcggauccgccaucgcaucaggagucgccgugugcaaaguccuacaccucgaaggagaagugaacaaaaucaaaucagcccuacucuccaccaacaaggccgucgucucccucuccggcugcggugucuccguccuaaccuucaaagugcuagaccucaagaacuacaucgacaaacaacuccuaccaauacucaacaagcaaucuugcuccaucuccaacaucgaaaccguaaucgaguuccaacagaagaacaaccgccuccucgaaaucacccgcgaguucucugucaacgcaggggucaccacucccgucuccacauacaugcucacaaacuccgaacuccucagccucaucaacgacaugcccauaaccaacgaccagaaaaagcuaaugagcaauaacguccaaaucguuagacaacaaaguuauuccaucaugugcaucaucaaagaagaaguccucgccuacgucguacaacucccccucuauggcgucaucgacacccccugcuggaaacugcacacaucaccccucugcaccacaaacaccaaagaaggcucaaacaucugccuaacucgcaccgaccgcggcugguacugcgacaacgccggcagcguaucauucuuuccccaagccgaaacaugcaaaguucaauccaaccgcgucuucugcgacacaaugaacuccagaacgcuccccagcgaagucaaccucuguaacguagacaucuucaacccuaaguacgacugcaaaaucaugaccuccaaaacugauguauccuccuccgucaucacaucccugggcgccaucgucagcugcuacggcaaaacaaaaugcacugccucaaacaaaugccgagguaucauaaagaccuucucaaacggaugcgauuacgucagcaacaaaggcgucgacaccgucagugucggcaacacccucuacuacgucaacaaacaagaaggaaaaucccucuacgucaaaggcgaacccaucaucaacuucuacgacccccucgucuuccccagcgacgaguucgacgccuccaucucacaagucaacgaaaagauaaaccaaucucuagccuucauccgcaaauccgaugaacuccugcauaacgucaacgccggcaaauccaccacaaacaucaugaucacuaccauaaucaucgucauaaucguaauccuccuaucucuuaucgcagucggccuacuacucuacugcaaagcccgcuaaggacuagucccuguucccagagcccacuuuuuuuucuuuuuuugaaauaaaauagccugucuuucagaucuaaaaaaaaaaaaaaaaaaaaaaaaaaaaaaaaaaaaaaaaaaaaaaaaaaaaaaaaaaaaaaaaugcaucccccccccccccccccccccccccccccccaaaggcucuuuucagagccaccagaauu

SEQ ID NO: 5728 - RNA, 1870 nt, Artificial Sequence
  mRNA product Design a-4 comprising derived and/or modified sequence from HRSV(A2)__F-del_DSCav1_mut5 (opt1)
gggagacuccugucgggcggaaguaggaggaguagaguuuaaaaacaguacucuuuuuccgguucgggacguaguugaagcaacgacaagccggauaaccgcucuugagacaggaagcuuaccauggagcugcucauccugaaggccaacgccaucaccaccauccugacggcggugaccuucugcuucgccagcggccagaacaucaccgaggaguucuaccaguccacgugcagcgccgucuccaagggguaccucagcgcccugcggaccggcugguacaccuccgugaucaccaucgagcugagcaacaucaaggagaacaagugcaacgggaccgacgccaaggugaagcucaucaagcaggagcuggacaaguacaagaacgcggucacggagcugcagcuccugaugcaguccaccccggcaaccggcuccggcuccgccaucgcgagcggcgucgccgugugcaaggugcugcaccucgagggggaggucaacaagaucaagagcgcccugcuguccaccaacaaggccguggugagccucuccggcugcggcgucagcgugcugaccuucaaggugcuggaccucaagaacuacaucgacaagcagcugcugcccauccugaacaagcagagcugcuccaucagcaacaucgagacggugaucgaguuccagcagaagaacaaccggcuccuggagaucacccgcgaguucagcgugaacgccggggucaccacccccguguccacguacaugcugaccaacagcgagcuccugucccugaucaacgacaugccgaucaccaacgaccagaagaagcucaugagcaacaacgugcagaucguccggcagcaguccuacagcaucaugugcaucaucaaggaggaggugcuggcguacgugguccagcugccccucuacggcgugaucgacacccccugcuggaagcugcacacgagcccccugugcaccaccaacaccaaggagggguccaacaucugccucacgcgcaccgaccggggcugguacugcgacaacgccggcagcgucuccuucuucccgcaggccgagaccugcaaggugcagagcaaccgcguguucugcgacaccaugaacucccggacgcugcccagcgagguaaaccucugcaacgucgacaucuucaaccccaaguacgacugcaagaucaugaccuccaagaccgacgugagcuccagcgugaucaccucccugggggccaucgucagcugcuacggcaagacgaagugcaccgccagcaacaagugccgggggaucaucaagaccuucuccaacggcugcgacuacgugagcaacaagggcguggacaccguguccgucgggaacacccuguacuacgugaacaagcaggagggcaagagccucuacgugaagggggagcccaucaucaacuucuacgacccgcuggucuuccccuccgacgaguucgacgcgagcaucucccaggugaacgagaagaucaaccagagccuggccuucauccgcaaguccgacgagcugcuccacaacgugaacgccggcaagagcacgaccaacaucaugaucaccaccaucaucaucgucaucaucgugauccugcugucccucaucgccguggggcugcugcucuacugcaaggcccggugaggacuagucccuguucccagagcccacuuuuuuuucuuuuuuugaaauaaaauagccugucuuucagaucuaaaaaaaaaaaaaaaaaaaaaaaaaaaaaaaaaaaaaaaaaaaaaaaaaaaaaaaaaaaaaaaaugcaucccccccccccccccccccccccccccccccaaaggcucuuuucagagccaccagaauu

SEQ ID NO: 5729 - RNA, 1870 nt, Artificial Sequence
  mRNA product Design a-4 comprising derived and/or modified sequence from HRSV(A2)__F-del_DSCav1_mut5 (opt1)
gggagacuccugucgggcggaaguaggaggaguagaguuuaaaaacaguacucuuuuuccgguucgggacguaguugaagcaacgacaagccggauaaccgcucuugagacaggaagcuuaccauggagcugcucauccugaaggccaacgccaucaccaccauccugacggcggugaccuucugcuucgccagcggccagaacaucaccgaggaguucuaccaguccacgugcagcgccgucuccaagggguaccucagcgcccugcgcaccggcugguacaccuccgugaucaccaucgagcugagcaacaucaaggagaacaagugcaacgggaccgacgccaaggugaagcucaucaagcaggagcuggacaaguacaagaacgcggucacggagcugcagcuccugaugcaguccacccccgccaccggcagcggguccgccaucgccagcggcguggcggugugcaagguccugcaccucgagggcgaggugaacaagaucaaguccgcccugcugagcaccaacaaggccguggucucccucagcgggugcggcguguccgugcugacguucaagguccuggaccucaagaacuacaucgacaagcagcugcugccgauccucaacaagcagagcugcuccaucagcaacaucgagaccgugaucgaguuccagcagaagaacaaccggcugcuggagaucacccgcgaguucuccgugaacgccggggucaccacgcccgugagcaccuacaugcucaccaacagcgagcugcugucccucaucaacgacaugcccaucaccaacgaccagaagaagcugaugagcaacaacgugcagaucguccggcagcaguccuacagcaucaugugcaucaucaaggaggaggugcuggccuacgugguccagcucccccuguacggcgugaucgacacgccgugcuggaagcugcacaccagcccccucugcaccaccaacacgaaggagggguccaacaucugccugacccgcaccgaccggggcugguacugcgacaacgcgggcuccgugagcuucuucccccaggccgagaccugcaagguccaguccaaccgcguguucugcgacacgaugaacagccggacccuccccuccgaggucaaccugugcaacguggacaucuucaacccgaaguacgacugcaagaucaugaccagcaagaccgacguguccagcuccgucaucacgagccugggggccaucguguccugcuacggcaagaccaagugcaccgccagcaacaagugccgggggaucaucaagaccuucuccaacggcugcgacuacgugagcaacaagggcgucgacacggugagcguggggaacacccucuacuacgucaacaagcaggagggcaagucccuguacgugaagggggagcccaucaucaacuucuacgacccccugguguuccccagcgacgaguucgacgccuccaucagccaggucaacgagaagaucaaccagucccucgcguucauccgcaagagcgacgagcugcugcacaacgugaacgccggcaaguccaccaccaacaucaugaucaccacgaucaucaucgugaucaucgucauccuccugagccugaucgccguggggcuccugcuguacugcaaggcccggugaggacuagucccuguucccagagcccacuuuuuuuucuuuuuuugaaauaaaauagccugucuuucagaucuaaaaaaaaaaaaaaaaaaaaaaaaaaaaaaaaaaaaaaaaaaaaaaaaaaaaaaaaaaaaaaaaugcaucccccccccccccccccccccccccccccccaaaggcucuuuucagagccaccagaauu

SEQ ID NO: 5730 - RNA, 1870 nt, Artificial Sequence
  mRNA product Design a-4 comprising derived and/or modified sequence from HRSV(A2)__F-del_DSCav1_mut5 (opt2)
gggagacuccugucgggcggaaguaggaggaguagaguuuaaaaacaguacucuuuuuccgguucgggacguaguugaagcaacgacaagccggauaaccgcucuugagacaggaagcuuaccauggagcuccucauccucaaggccaacgccaucaccaccauccucaccgccgucaccuucugcuucgccuccggccagaacaucaccgaggaguucuaccaguccaccugcuccgccgucuccaagggcuaccucuccgcccuccgcaccggcugguacaccuccgucaucaccaucgagcucuccaacaucaaggagaacaagugcaacggcaccgacgccaaggucaagcucaucaagcaggagcucgacaaguacaagaacgccgucaccgagcuccagcuccucaugcaguccacccccgccaccggcuccggcuccgccaucgccuccggcgucgccgucugcaagguccuccaccucgagggcgaggucaacaagaucaaguccgcccuccucuccaccaacaaggccgucgucucccucuccggcugcggcgucuccguccucaccuucaagguccucgaccucaagaacuacaucgacaagcagcuccuccccauccucaacaagcaguccugcuccaucuccaacaucgagaccgucaucgaguuccagcagaagaacaaccgccuccucgagaucacccgcgaguucuccgucaacgccggcgucaccacccccgucuccaccuacaugcucaccaacuccgagcuccucucccucaucaacgacaugcccaucaccaacgaccagaagaagcucauguccaacaacguccagaucguccgccagcaguccuacuccaucaugugcaucaucaaggaggagguccucgccuacgucguccagcucccccucuacggcgucaucgacacccccugcuggaagcuccacaccuccccccucugcaccaccaacaccaaggagggcuccaacaucugccucacccgcaccgaccgcggcugguacugcgacaacgccggcuccgucuccuucuucccccaggccgagaccugcaagguccaguccaaccgcgucuucugcgacaccaugaacucccgcacccuccccuccgaggucaaccucugcaacgucgacaucuucaaccccaaguacgacugcaagaucaugaccuccaagaccgacgucuccuccuccgucaucaccucccucggcgccaucgucuccugcuacggcaagaccaagugcaccgccuccaacaagugccgcggcaucaucaagaccuucuccaacggcugcgacuacgucuccaacaagggcgucgacaccgucuccgucggcaacacccucuacuacgucaacaagcaggagggcaagucccucuacgucaagggcgagcccaucaucaacuucuacgacccccucgucuuccccuccgacgaguucgacgccuccaucucccaggucaacgagaagaucaaccagucccucgccuucauccgcaaguccgacgagcuccuccacaacgucaacgccggcaaguccaccaccaacaucaugaucaccaccaucaucaucgucaucaucgucauccuccucucccucaucgccgucggccuccuccucuacugcaaggcccgcugaggacuagucccuguucccagagcccacuuuuuuuucuuuuuuugaaauaaaauagccugucuuucagaucuaaaaaaaaaaaaaaaaaaaaaaaaaaaaaaaaaaaaaaaaaaaaaaaaaaaaaaaaaaaaaaaaugcaucccccccccccccccccccccccccccccccaaaggcucuuuucagagccaccagaauu

SEQ ID NO: 5731 - RNA, 1870 nt, Artificial Sequence
  mRNA product Design a-4 comprising derived and/or modified sequence from HRSV(A2)__F-del_DSCav1_mut5 (opt3)
gggagacuccugucgggcggaaguaggaggaguagaguuuaaaaacaguacucuuuuuccgguucgggacguaguugaagcaacgacaagccggauaaccgcucuugagacaggaagcuuaccauggagcugcucauccuuaaggccaacgcuauuaccacaauacugacugcagugacguucugcuuugccagcggccagaauaucaccgaagaguucuaccaauccacauguucugcggucucaaaaggguauuugagugcuuuaagaacuggaugguacaccagcguuauuacaaucgaacuguccaacauuaaggagaauaaaugcaacgguaccgacgccaaggugaaacuaaucaagcaggaacucgauaaguauaaaaaugcaguaacugagcugcagcuucugaugcagucuacacccgccaccggcucggggucagcuauagcaagcggaguggccgucuguaagguguugcaccucgagggcgaaguuaacaaaaucaagagugcucugcuguccacgaauaaagccguggucucucucagcgguugcgggguguccguauuaacuuuuaagguucuggaccuuaagaacuacauugauaaacaauugcugccuauccuaaauaagcagucauguaguauuagcaacaucgagaccgugauagaguuccagcagaaaaauaacaggcuccuggaaauuacacgggaguuuucugucaaugcgggagugacuaccccaguguccacauauaugcuuaccaacucagaacuguugagccucaucaaugacaugccgauuacgaacgaucaaaagaaacugaugaguaacaauguccagaucguucgccagcagucuuacuccaucaugugcauuauaaaggaggaaguguuagcauauguagugcaacugccccucuacggcgucaucgacacuccuuguuggaaacuucauacaagcccacugugcaccacuaacacaaaggagggcucgaauauuuguuugacccgaacggaucgugggugguacugcgacaacgccggaucuguguccuucuuuccccaggcugaaaccuguaagguucagucaaauagaguguucugcgauacaaugaacaguagaacucugccuagcgaggucaaucucugcaacguggacaucuuuaauccaaaauaugauuguaagauaaugaccuccaaaacagacguaucuagcucaguuauuaccagucugggugccaucguguccugcuacggcaagacuaaauguacagcaagcaacaagugcagggggaucauuaagaccuucucuaauggaugugauuaugucucaaacaaaggcguggacacugucaguguggguaauacgcuuuacuauguuaacaagcaagaggggaaaagccuguacgugaagggagaacccaucauuaauuuuuaugacccuuugguauucccauccgaugaguuugacgcuucuauaucgcaggucaacgagaaaaucaaccagagccucgccuucauucggaaguccgaugaacuguuacacaaugugaacgcgggcaagucaacaaccaauaucaugaucacuaccauuauaaucguuauuaucgugauucugcuaagucucaucgccgucggccugcuuuuguacugcaaagcacgcugaggacuagucccuguucccagagcccacuuuuuuuucuuuuuuugaaauaaaauagccugucuuucagaucuaaaaaaaaaaaaaaaaaaaaaaaaaaaaaaaaaaaaaaaaaaaaaaaaaaaaaaaaaaaaaaaaugcaucccccccccccccccccccccccccccccccaaaggcucuuuucagagccaccagaauu

SEQ ID NO: 5732 - RNA, 1870 nt, Artificial Sequence
  mRNA product Design a-4 comprising derived and/or modified sequence from HRSV(A2)__F-del_DSCav1_mut5 (opt4)
gggagacuccugucgggcggaaguaggaggaguagaguuuaaaaacaguacucuuuuuccgguucgggacguaguugaagcaacgacaagccggauaaccgcucuugagacaggaagcuuaccauggagcugcugauccugaaggccaacgccaucaccaccauccugaccgccgugaccuucugcuucgccagcggccagaacaucaccgaggaguucuaccagagcaccugcagcgccgugagcaagggcuaccugagcgcccugagaaccggcugguacaccagcgugaucaccaucgagcugagcaacaucaaggagaacaagugcaacggcaccgacgccaaggugaagcugaucaagcaggagcuggacaaguacaagaacgccgugaccgagcugcagcugcugaugcagagcacccccgccaccggcagcggcagcgccaucgccagcggcguggccgugugcaaggugcugcaccuggagggcgaggugaacaagaucaagagcgcccugcugagcaccaacaaggccguggugagccugagcggcugcggcgugagcgugcugaccuucaaggugcuggaccugaagaacuacaucgacaagcagcugcugcccauccugaacaagcagagcugcagcaucagcaacaucgagaccgugaucgaguuccagcagaagaacaacagacugcuggagaucaccagagaguucagcgugaacgccggcgugaccacccccgugagcaccuacaugcugaccaacagcgagcugcugagccugaucaacgacaugcccaucaccaacgaccagaagaagcugaugagcaacaacgugcagaucgugagacagcagagcuacagcaucaugugcaucaucaaggaggaggugcuggccuacguggugcagcugccccuguacggcgugaucgacacccccugcuggaagcugcacaccagcccccugugcaccaccaacaccaaggagggcagcaacaucugccugaccagaaccgacagaggcugguacugcgacaacgccggcagcgugagcuucuucccccaggccgagaccugcaaggugcagagcaacagaguguucugcgacaccaugaacagcagaacccugcccagcgaggugaaccugugcaacguggacaucuucaaccccaaguacgacugcaagaucaugaccagcaagaccgacgugagcagcagcgugaucaccagccugggcgccaucgugagcugcuacggcaagaccaagugcaccgccagcaacaagugcagaggcaucaucaagaccuucagcaacggcugcgacuacgugagcaacaagggcguggacaccgugagcgugggcaacacccuguacuacgugaacaagcaggagggcaagagccuguacgugaagggcgagcccaucaucaacuucuacgacccccugguguuccccagcgacgaguucgacgccagcaucagccaggugaacgagaagaucaaccagagccuggccuucaucagaaagagcgacgagcugcugcacaacgugaacgccggcaagagcaccaccaacaucaugaucaccaccaucaucaucgugaucaucgugauccugcugagccugaucgccgugggccugcugcuguacugcaaggccagaugaggacuagucccuguucccagagcccacuuuuuuuucuuuuuuugaaauaaaauagccugucuuucagaucuaaaaaaaaaaaaaaaaaaaaaaaaaaaaaaaaaaaaaaaaaaaaaaaaaaaaaaaaaaaaaaaaugcaucccccccccccccccccccccccccccccccaaaggcucuuuucagagccaccagaauu

SEQ ID NO: 5733 - RNA, 1870 nt, Artificial Sequence
  mRNA product Design a-4 comprising derived and/or modified sequence from HRSV(A2)__F-del_DSCav1_mut5 (opt5)
gggagacuccugucgggcggaaguaggaggaguagaguuuaaaaacaguacucuuuuuccgguucgggacguaguugaagcaacgacaagccggauaaccgcucuugagacaggaagcuuaccauggagcugcucauccugaaggccaacgcuauuaccacaauccuuacggccgugaccuucugcuuugcgagcggccagaauauuacagaagaguucuaccaauccaccuguucugcugucagcaaaggguaucuguccgcccucagaacaggaugguacaccucuguuaucacaauugaacugagcaacaucaaggagaauaaaugcaacggcaccgacgccaaggugaaacuuaucaagcaggaacuggauaaguauaaaaaugcugugacggagcuccagcugcugaugcaguccacccccgccacagggucuggaagcgcuauugccuccggcgucgcgguguguaagguucuccaccuggagggggaagugaacaaaaucaagagcgcccuucugucuaccaauaaagcugucgugucccucagcggaugcggcguuucugugcugacauuuaagguccuugaccugaagaacuacauugauaaacaacuccugccuauccugaauaagcaguccuguagcauuucuaacaucgagaccgugauugaguuccagcagaaaaauaaccggcuccuggaaaucacgcgcgaguuuuccgugaaugccggcgucacaaccccgguuagcacauauaugcuuaccaacuccgaacugcucucucugaucaaugacaugcccauuaccaacgaucaaaagaaacuuaugagcaacaaugugcagaucgugagacagcaguccuacagcauuaugugcaucauuaaggaggaaguccuggcuuaugugguucaacucccucuguacggggugaucgacacacccuguuggaaacugcauacgucuccucucugcaccacaaacaccaaggagggauccaauaucugucugacacggaccgaucgcggcugguacugcgacaacgccgggagcgucucuuucuuuccccaggcggaaacguguaaggugcagagcaauagaguuuucugcgauacaaugaacuccagaacccugccuucugaggugaaucucugcaacgucgacauuuuuaauccgaaauaugauuguaagaucaugaccagcaaaacagacguguccagcucugucauuaccucccugggagccaucgugagcugcuacggcaagacaaaauguacggcuucuaacaagugccgggggauuaucaagaccuucuccaauggaugugauuauguuagcaacaaaggcguggacacagucuccgugggcaauacccuuuacuauguuaacaagcaagaggggaaaucucuguacgugaagggagaacccaucauuaauuuuuaugacccucucgucuuccccagcgaugaguuugacgccuccaucucucaggugaacgagaaaauuaaccagagccuggcuuucauccgcaaguccgaugaacugcuccacaaugugaacgccggcaagagcacaaccaauauuaugaucacgaccauuaucaucguuauuaucgucauucugcuuucucugaucgccguggggcuccugcuguacugcaaagcuagaugaggacuagucccuguucccagagcccacuuuuuuuucuuuuuuugaaauaaaauagccugucuuucagaucuaaaaaaaaaaaaaaaaaaaaaaaaaaaaaaaaaaaaaaaaaaaaaaaaaaaaaaaaaaaaaaaaugcaucccccccccccccccccccccccccccccccaaaggcucuuuucagagccaccagaauu

SEQ ID NO: 5734 - RNA, 1870 nt, Artificial Sequence
  mRNA product Design a-4 comprising derived and/or modified sequence from HRSV(A2)__F-del_DSCav1_mut5 (opt6)
gggagacuccugucgggcggaaguaggaggaguagaguuuaaaaacaguacucuuuuuccgguucgggacguaguugaagcaacgacaagccggauaaccgcucuugagacaggaagcuuaccauggaacuuuuaauacugaaagcaaaugccaucacaaccauacuaacugccgucacauucugcuuugcaucaggacaaaacauaacagaagaauuuuaccaauccacaugcucagcaguaucaaaaggauaucuaucggcacuuagaacuggaugguacacaaguguuauaacuauagaacucucaaacauaaaagaaaacaaaugcaauggaacagacgcaaaaguaaaacuaauaaaacaagaacucgauaaauauaaaaaugcaguaaccgaacuacaacuauuaaugcaaagcacacccgcaacaggcagcggaucagcaauagcaagcggagucgcaguauguaaaguacuacaucuagaaggagaagucaacaaaaucaaaucugcacuucuauccacaaacaaagcuguaguaucccuauccggaugcggagucucaguauuaacuuuuaaaguacuagaccuuaaaaacuacauagauaaacaacuauuaccaauacuaaauaaacaaucaugcagcauauccaauauagagacaguaauugaauuucaacaaaaaaacaacagauuacuagaaauuacucgugaauuuuccguaaaugccggagucacaacaccaguaucaaccuauaugcuaacaaacagcgaacuacuuagcuuaauaaaugacaugccaauaacaaaugaccaaaaaaaacuuaugucaaauaacguacaaaucgucagacaacaauccuacucuauaauguguauaauuaaagaagaaguccuagcauacguaguucaauuaccacucuauggaguaauagauacaccaugcuggaaacuacacacgucaccacuauguacaacaaacacaaaagaaggauccaauauaugccuaacaagaaccgacagaggcugguauugugacaacgcaggauccguuucauucuucccacaagcagaaaccuguaaaguacaaucuaauagaguauuuugcgacacaaugaacaguagaacacuaccaagcgagguuaaucuauguaacguagacauauucaauccaaaauaugauugcaaaauaaugacaucaaaaacagauguaucgucgaguguaauaacaagucugggagcuauaguaagcugcuacggcaagacgaaauguaccgcuucaaauaaaugcagaggaaucauuaaaacauucucgaacggaugcgacuacguaaguaauaaaggugucgacaccguaucaguagggaauacauuauacuacgucaacaaacaagaaggaaaaucucuauauguaaaaggagaaccaauaauaaauuucuaugacccucuaguauucccaucagaugaauuugacgcuuccauaucacaaguaaacgaaaaaaucaaucaaucuuuagcauucauacgaaaaagugaugaacuccuacacaacgucaacgcaggaaaaagcacaacaaauauaaugaucacaacaaucaucauaguaauaauaguaauacuacuaucauuaauagcaguaggauuauugcuuuacugcaaagcacgauagggacuagucccuguucccagagcccacuuuuuuuucuuuuuuugaaauaaaauagccugucuuucagaucuaaaaaaaaaaaaaaaaaaaaaaaaaaaaaaaaaaaaaaaaaaaaaaaaaaaaaaaaaaaaaaaaugcaucccccccccccccccccccccccccccccccaaaggcucuuuucagagccaccagaauu

SEQ ID NO: 5735 - RNA, 1870 nt, Artificial Sequence
  mRNA product Design a-4 comprising derived and/or modified sequence from HRSV(A2)__F-del_DSCav1_mut5 (opt11)
gggagacuccugucgggcggaaguaggaggaguagaguuuaaaaacaguacucuuuuuccgguucgggacguaguugaagcaacgacaagccggauaaccgcucuugagacaggaagcuuaccauggaacuccucauccucaaagccaacgccauaaccacaauacucaccgccguaaccuucugcuuugcgucgggacaaaacaucaccgaagaguucuaccaauccacuugcuccgcaguaagcaaaggauaccucuccgcccugcgaaccgguugguacacaucagucaucacaaucgaacucucaaacauaaaagaaaacaaaugcaacggcaccgacgcaaaggucaaauuaaucaagcaagaacuagacaaauacaaaaacgccgucacagaacuccagcugcuaaugcagagcacacccgcaacuggcagcggauccgccaucgcaucaggagucgccgugugcaaaguccuacaccucgaaggagaagugaacaaaaucaaaucagcccuacucuccaccaacaaggccgucgucucccucuccggcugcggugucuccguccuaaccuucaaagugcuagaccucaagaacuacaucgacaaacaacuccuaccaauacucaacaagcaaucuugcuccaucuccaacaucgaaaccguaaucgaguuccaacagaagaacaaccgccuccucgaaaucacccgcgaguucucugucaacgcaggggucaccacucccgucuccacauacaugcucacaaacuccgaacuccucagccucaucaacgacaugcccauaaccaacgaccagaaaaagcuaaugagcaauaacguccaaaucguuagacaacaaaguuauuccaucaugugcaucaucaaagaagaaguccucgccuacgucguacaacucccccucuauggcgucaucgacacccccugcuggaaacugcacacaucaccccucugcaccacaaacaccaaagaaggcucaaacaucugccuaacucgcaccgaccgcggcugguacugcgacaacgccggcagcguaucauucuuuccccaagccgaaacaugcaaaguucaauccaaccgcgucuucugcgacacaaugaacuccagaacgcuccccagcgaagucaaccucuguaacguagacaucuucaacccuaaguacgacugcaaaaucaugaccuccaaaacugauguauccuccuccgucaucacaucccugggcgccaucgucagcugcuacggcaaaacaaaaugcacugccucaaacaaaugccgagguaucauaaagaccuucucaaacggaugcgauuacgucagcaacaaaggcgucgacaccgucagugucggcaacacccucuacuacgucaacaaacaagaaggaaaaucccucuacgucaaaggcgaacccaucaucaacuucuacgacccccucgucuuccccagcgacgaguucgacgccuccaucucacaagucaacgaaaagauaaaccaaucucuagccuucauccgcaaauccgaugaacuccugcauaacgucaacgccggcaaauccaccacaaacaucaugaucacuaccauaaucaucgucauaaucguaauccuccuaucucuuaucgcagucggccuacuacucuacugcaaagcccgcuaaggacuagucccuguucccagagcccacuuuuuuuucuuuuuuugaaauaaaauagccugucuuucagaucuaaaaaaaaaaaaaaaaaaaaaaaaaaaaaaaaaaaaaaaaaaaaaaaaaaaaaaaaaaaaaaaaugcaucccccccccccccccccccccccccccccccaaaggcucuuuucagagccaccagaauu

SEQ ID NO: 5736 - RNA, 1816 nt, Artificial Sequence
  mRNA product Design a-5 comprising derived and/or modified sequence from HRSV(A2)__F-del_DSCav1_mut5 (opt1)
gggagacuuucccauucuguagcagaauuugguguugccuguggucuuggucccgcggagaagcuuaccauggagcugcucauccugaaggccaacgccaucaccaccauccugacggcggugaccuucugcuucgccagcggccagaacaucaccgaggaguucuaccaguccacgugcagcgccgucuccaagggguaccucagcgcccugcggaccggcugguacaccuccgugaucaccaucgagcugagcaacaucaaggagaacaagugcaacgggaccgacgccaaggugaagcucaucaagcaggagcuggacaaguacaagaacgcggucacggagcugcagcuccugaugcaguccaccccggcaaccggcuccggcuccgccaucgcgagcggcgucgccgugugcaaggugcugcaccucgagggggaggucaacaagaucaagagcgcccugcuguccaccaacaaggccguggugagccucuccggcugcggcgucagcgugcugaccuucaaggugcuggaccucaagaacuacaucgacaagcagcugcugcccauccugaacaagcagagcugcuccaucagcaacaucgagacggugaucgaguuccagcagaagaacaaccggcuccuggagaucacccgcgaguucagcgugaacgccggggucaccacccccguguccacguacaugcugaccaacagcgagcuccugucccugaucaacgacaugccgaucaccaacgaccagaagaagcucaugagcaacaacgugcagaucguccggcagcaguccuacagcaucaugugcaucaucaaggaggaggugcuggcguacgugguccagcugccccucuacggcgugaucgacacccccugcuggaagcugcacacgagcccccugugcaccaccaacaccaaggagggguccaacaucugccucacgcgcaccgaccggggcugguacugcgacaacgccggcagcgucuccuucuucccgcaggccgagaccugcaaggugcagagcaaccgcguguucugcgacaccaugaacucccggacgcugcccagcgagguaaaccucugcaacgucgacaucuucaaccccaaguacgacugcaagaucaugaccuccaagaccgacgugagcuccagcgugaucaccucccugggggccaucgucagcugcuacggcaagacgaagugcaccgccagcaacaagugccgggggaucaucaagaccuucuccaacggcugcgacuacgugagcaacaagggcguggacaccguguccgucgggaacacccuguacuacgugaacaagcaggagggcaagagccucuacgugaagggggagcccaucaucaacuucuacgacccgcuggucuuccccuccgacgaguucgacgcgagcaucucccaggugaacgagaagaucaaccagagccuggccuucauccgcaaguccgacgagcugcuccacaacgugaacgccggcaagagcacgaccaacaucaugaucaccaccaucaucaucgucaucaucgugauccugcugucccucaucgccguggggcugcugcucuacugcaaggcccggugaggacuagucccuguucccagagcccacuuuuuuuucuuuuuuugaaauaaaauagccugucuuucagaucuaaaaaaaaaaaaaaaaaaaaaaaaaaaaaaaaaaaaaaaaaaaaaaaaaaaaaaaaaaaaaaaaugcaucccccccccccccccccccccccccccccccaaaggcucuuuucagagccaccagaauu

SEQ ID NO: 5737 - RNA, 1816 nt, Artificial Sequence
  mRNA product Design a-5 comprising derived and/or modified sequence from HRSV(A2)__F-del_DSCav1_mut5 (opt1)
gggagacuuucccauucuguagcagaauuugguguugccuguggucuuggucccgcggagaagcuuaccauggagcugcucauccugaaggccaacgccaucaccaccauccugacggcggugaccuucugcuucgccagcggccagaacaucaccgaggaguucuaccaguccacgugcagcgccgucuccaagggguaccucagcgcccugcgcaccggcugguacaccuccgugaucaccaucgagcugagcaacaucaaggagaacaagugcaacgggaccgacgccaaggugaagcucaucaagcaggagcuggacaaguacaagaacgcggucacggagcugcagcuccugaugcaguccacccccgccaccggcagcggguccgccaucgccagcggcguggcggugugcaagguccugcaccucgagggcgaggugaacaagaucaaguccgcccugcugagcaccaacaaggccguggucucccucagcgggugcggcguguccgugcugacguucaagguccuggaccucaagaacuacaucgacaagcagcugcugccgauccucaacaagcagagcugcuccaucagcaacaucgagaccgugaucgaguuccagcagaagaacaaccggcugcuggagaucacccgcgaguucuccgugaacgccggggucaccacgcccgugagcaccuacaugcucaccaacagcgagcugcugucccucaucaacgacaugcccaucaccaacgaccagaagaagcugaugagcaacaacgugcagaucguccggcagcaguccuacagcaucaugugcaucaucaaggaggaggugcuggccuacgugguccagcucccccuguacggcgugaucgacacgccgugcuggaagcugcacaccagcccccucugcaccaccaacacgaaggagggguccaacaucugccugacccgcaccgaccggggcugguacugcgacaacgcgggcuccgugagcuucuucccccaggccgagaccugcaagguccaguccaaccgcguguucugcgacacgaugaacagccggacccuccccuccgaggucaaccugugcaacguggacaucuucaacccgaaguacgacugcaagaucaugaccagcaagaccgacguguccagcuccgucaucacgagccugggggccaucguguccugcuacggcaagaccaagugcaccgccagcaacaagugccgggggaucaucaagaccuucuccaacggcugcgacuacgugagcaacaagggcgucgacacggugagcguggggaacacccucuacuacgucaacaagcaggagggcaagucccuguacgugaagggggagcccaucaucaacuucuacgacccccugguguuccccagcgacgaguucgacgccuccaucagccaggucaacgagaagaucaaccagucccucgcguucauccgcaagagcgacgagcugcugcacaacgugaacgccggcaaguccaccaccaacaucaugaucaccacgaucaucaucgugaucaucgucauccuccugagccugaucgccguggggcuccugcuguacugcaaggcccggugaggacuagucccuguucccagagcccacuuuuuuuucuuuuuuugaaauaaaauagccugucuuucagaucuaaaaaaaaaaaaaaaaaaaaaaaaaaaaaaaaaaaaaaaaaaaaaaaaaaaaaaaaaaaaaaaaugcaucccccccccccccccccccccccccccccccaaaggcucuuuucagagccaccagaauu

SEQ ID NO: 5738 - RNA, 1816 nt, Artificial Sequence
  mRNA product Design a-5 comprising derived and/or modified sequence from HRSV(A2)__F-del_DSCav1_mut5 (opt2)
gggagacuuucccauucuguagcagaauuugguguugccuguggucuuggucccgcggagaagcuuaccauggagcuccucauccucaaggccaacgccaucaccaccauccucaccgccgucaccuucugcuucgccuccggccagaacaucaccgaggaguucuaccaguccaccugcuccgccgucuccaagggcuaccucuccgcccuccgcaccggcugguacaccuccgucaucaccaucgagcucuccaacaucaaggagaacaagugcaacggcaccgacgccaaggucaagcucaucaagcaggagcucgacaaguacaagaacgccgucaccgagcuccagcuccucaugcaguccacccccgccaccggcuccggcuccgccaucgccuccggcgucgccgucugcaagguccuccaccucgagggcgaggucaacaagaucaaguccgcccuccucuccaccaacaaggccgucgucucccucuccggcugcggcgucuccguccucaccuucaagguccucgaccucaagaacuacaucgacaagcagcuccuccccauccucaacaagcaguccugcuccaucuccaacaucgagaccgucaucgaguuccagcagaagaacaaccgccuccucgagaucacccgcgaguucuccgucaacgccggcgucaccacccccgucuccaccuacaugcucaccaacuccgagcuccucucccucaucaacgacaugcccaucaccaacgaccagaagaagcucauguccaacaacguccagaucguccgccagcaguccuacuccaucaugugcaucaucaaggaggagguccucgccuacgucguccagcucccccucuacggcgucaucgacacccccugcuggaagcuccacaccuccccccucugcaccaccaacaccaaggagggcuccaacaucugccucacccgcaccgaccgcggcugguacugcgacaacgccggcuccgucuccuucuucccccaggccgagaccugcaagguccaguccaaccgcgucuucugcgacaccaugaacucccgcacccuccccuccgaggucaaccucugcaacgucgacaucuucaaccccaaguacgacugcaagaucaugaccuccaagaccgacgucuccuccuccgucaucaccucccucggcgccaucgucuccugcuacggcaagaccaagugcaccgccuccaacaagugccgcggcaucaucaagaccuucuccaacggcugcgacuacgucuccaacaagggcgucgacaccgucuccgucggcaacacccucuacuacgucaacaagcaggagggcaagucccucuacgucaagggcgagcccaucaucaacuucuacgacccccucgucuuccccuccgacgaguucgacgccuccaucucccaggucaacgagaagaucaaccagucccucgccuucauccgcaaguccgacgagcuccuccacaacgucaacgccggcaaguccaccaccaacaucaugaucaccaccaucaucaucgucaucaucgucauccuccucucccucaucgccgucggccuccuccucuacugcaaggcccgcugaggacuagucccuguucccagagcccacuuuuuuuucuuuuuuugaaauaaaauagccugucuuucagaucuaaaaaaaaaaaaaaaaaaaaaaaaaaaaaaaaaaaaaaaaaaaaaaaaaaaaaaaaaaaaaaaaugcaucccccccccccccccccccccccccccccccaaaggcucuuuucagagccaccagaauu

SEQ ID NO: 5739 - RNA, 1816 nt, Artificial Sequence
  mRNA product Design a-5 comprising derived and/or modified sequence from HRSV(A2)__F-del_DSCav1_mut5 (opt3)
gggagacuuucccauucuguagcagaauuugguguugccuguggucuuggucccgcggagaagcuuaccauggagcugcucauccuuaaggccaacgcuauuaccacaauacugacugcagugacguucugcuuugccagcggccagaauaucaccgaagaguucuaccaauccacauguucugcggucucaaaaggguauuugagugcuuuaagaacuggaugguacaccagcguuauuacaaucgaacuguccaacauuaaggagaauaaaugcaacgguaccgacgccaaggugaaacuaaucaagcaggaacucgauaaguauaaaaaugcaguaacugagcugcagcuucugaugcagucuacacccgccaccggcucggggucagcuauagcaagcggaguggccgucuguaagguguugcaccucgagggcgaaguuaacaaaaucaagagugcucugcuguccacgaauaaagccguggucucucucagcgguugcgggguguccguauuaacuuuuaagguucuggaccuuaagaacuacauugauaaacaauugcugccuauccuaaauaagcagucauguaguauuagcaacaucgagaccgugauagaguuccagcagaaaaauaacaggcuccuggaaauuacacgggaguuuucugucaaugcgggagugacuaccccaguguccacauauaugcuuaccaacucagaacuguugagccucaucaaugacaugccgauuacgaacgaucaaaagaaacugaugaguaacaauguccagaucguucgccagcagucuuacuccaucaugugcauuauaaaggaggaaguguuagcauauguagugcaacugccccucuacggcgucaucgacacuccuuguuggaaacuucauacaagcccacugugcaccacuaacacaaaggagggcucgaauauuuguuugacccgaacggaucgugggugguacugcgacaacgccggaucuguguccuucuuuccccaggcugaaaccuguaagguucagucaaauagaguguucugcgauacaaugaacaguagaacucugccuagcgaggucaaucucugcaacguggacaucuuuaauccaaaauaugauuguaagauaaugaccuccaaaacagacguaucuagcucaguuauuaccagucugggugccaucguguccugcuacggcaagacuaaauguacagcaagcaacaagugcagggggaucauuaagaccuucucuaauggaugugauuaugucucaaacaaaggcguggacacugucaguguggguaauacgcuuuacuauguuaacaagcaagaggggaaaagccuguacgugaagggagaacccaucauuaauuuuuaugacccuuugguauucccauccgaugaguuugacgcuucuauaucgcaggucaacgagaaaaucaaccagagccucgccuucauucggaaguccgaugaacuguuacacaaugugaacgcgggcaagucaacaaccaauaucaugaucacuaccauuauaaucguuauuaucgugauucugcuaagucucaucgccgucggccugcuuuuguacugcaaagcacgcugaggacuagucccuguucccagagcccacuuuuuuuucuuuuuuugaaauaaaauagccugucuuucagaucuaaaaaaaaaaaaaaaaaaaaaaaaaaaaaaaaaaaaaaaaaaaaaaaaaaaaaaaaaaaaaaaaugcaucccccccccccccccccccccccccccccccaaaggcucuuuucagagccaccagaauu

SEQ ID NO: 5740 - RNA, 1816 nt, Artificial Sequence
  mRNA product Design a-5 comprising derived and/or modified sequence from HRSV(A2)__F-del_DSCav1_mut5 (opt4)
gggagacuuucccauucuguagcagaauuugguguugccuguggucuuggucccgcggagaagcuuaccauggagcugcugauccugaaggccaacgccaucaccaccauccugaccgccgugaccuucugcuucgccagcggccagaacaucaccgaggaguucuaccagagcaccugcagcgccgugagcaagggcuaccugagcgcccugagaaccggcugguacaccagcgugaucaccaucgagcugagcaacaucaaggagaacaagugcaacggcaccgacgccaaggugaagcugaucaagcaggagcuggacaaguacaagaacgccgugaccgagcugcagcugcugaugcagagcacccccgccaccggcagcggcagcgccaucgccagcggcguggccgugugcaaggugcugcaccuggagggcgaggugaacaagaucaagagcgcccugcugagcaccaacaaggccguggugagccugagcggcugcggcgugagcgugcugaccuucaaggugcuggaccugaagaacuacaucgacaagcagcugcugcccauccugaacaagcagagcugcagcaucagcaacaucgagaccgugaucgaguuccagcagaagaacaacagacugcuggagaucaccagagaguucagcgugaacgccggcgugaccacccccgugagcaccuacaugcugaccaacagcgagcugcugagccugaucaacgacaugcccaucaccaacgaccagaagaagcugaugagcaacaacgugcagaucgugagacagcagagcuacagcaucaugugcaucaucaaggaggaggugcuggccuacguggugcagcugccccuguacggcgugaucgacacccccugcuggaagcugcacaccagcccccugugcaccaccaacaccaaggagggcagcaacaucugccugaccagaaccgacagaggcugguacugcgacaacgccggcagcgugagcuucuucccccaggccgagaccugcaaggugcagagcaacagaguguucugcgacaccaugaacagcagaacccugcccagcgaggugaaccugugcaacguggacaucuucaaccccaaguacgacugcaagaucaugaccagcaagaccgacgugagcagcagcgugaucaccagccugggcgccaucgugagcugcuacggcaagaccaagugcaccgccagcaacaagugcagaggcaucaucaagaccuucagcaacggcugcgacuacgugagcaacaagggcguggacaccgugagcgugggcaacacccuguacuacgugaacaagcaggagggcaagagccuguacgugaagggcgagcccaucaucaacuucuacgacccccugguguuccccagcgacgaguucgacgccagcaucagccaggugaacgagaagaucaaccagagccuggccuucaucagaaagagcgacgagcugcugcacaacgugaacgccggcaagagcaccaccaacaucaugaucaccaccaucaucaucgugaucaucgugauccugcugagccugaucgccgugggccugcugcuguacugcaaggccagaugaggacuagucccuguucccagagcccacuuuuuuuucuuuuuuugaaauaaaauagccugucuuucagaucuaaaaaaaaaaaaaaaaaaaaaaaaaaaaaaaaaaaaaaaaaaaaaaaaaaaaaaaaaaaaaaaaugcaucccccccccccccccccccccccccccccccaaaggcucuuuucagagccaccagaauu

SEQ ID NO: 5741 - RNA, 1816 nt, Artificial Sequence
  mRNA product Design a-5 comprising derived and/or modified sequence from HRSV(A2)__F-del_DSCav1_mut5 (opt5)
gggagacuuucccauucuguagcagaauuugguguugccuguggucuuggucccgcggagaagcuuaccauggagcugcucauccugaaggccaacgcuauuaccacaauccuuacggccgugaccuucugcuuugcgagcggccagaauauuacagaagaguucuaccaauccaccuguucugcugucagcaaaggguaucuguccgcccucagaacaggaugguacaccucuguuaucacaauugaacugagcaacaucaaggagaauaaaugcaacggcaccgacgccaaggugaaacuuaucaagcaggaacuggauaaguauaaaaaugcugugacggagcuccagcugcugaugcaguccacccccgccacagggucuggaagcgcuauugccuccggcgucgcgguguguaagguucuccaccuggagggggaagugaacaaaaucaagagcgcccuucugucuaccaauaaagcugucgugucccucagcggaugcggcguuucugugcugacauuuaagguccuugaccugaagaacuacauugauaaacaacuccugccuauccugaauaagcaguccuguagcauuucuaacaucgagaccgugauugaguuccagcagaaaaauaaccggcuccuggaaaucacgcgcgaguuuuccgugaaugccggcgucacaaccccgguuagcacauauaugcuuaccaacuccgaacugcucucucugaucaaugacaugcccauuaccaacgaucaaaagaaacuuaugagcaacaaugugcagaucgugagacagcaguccuacagcauuaugugcaucauuaaggaggaaguccuggcuuaugugguucaacucccucuguacggggugaucgacacacccuguuggaaacugcauacgucuccucucugcaccacaaacaccaaggagggauccaauaucugucugacacggaccgaucgcggcugguacugcgacaacgccgggagcgucucuuucuuuccccaggcggaaacguguaaggugcagagcaauagaguuuucugcgauacaaugaacuccagaacccugccuucugaggugaaucucugcaacgucgacauuuuuaauccgaaauaugauuguaagaucaugaccagcaaaacagacguguccagcucugucauuaccucccugggagccaucgugagcugcuacggcaagacaaaauguacggcuucuaacaagugccgggggauuaucaagaccuucuccaauggaugugauuauguuagcaacaaaggcguggacacagucuccgugggcaauacccuuuacuauguuaacaagcaagaggggaaaucucuguacgugaagggagaacccaucauuaauuuuuaugacccucucgucuuccccagcgaugaguuugacgccuccaucucucaggugaacgagaaaauuaaccagagccuggcuuucauccgcaaguccgaugaacugcuccacaaugugaacgccggcaagagcacaaccaauauuaugaucacgaccauuaucaucguuauuaucgucauucugcuuucucugaucgccguggggcuccugcuguacugcaaagcuagaugaggacuagucccuguucccagagcccacuuuuuuuucuuuuuuugaaauaaaauagccugucuuucagaucuaaaaaaaaaaaaaaaaaaaaaaaaaaaaaaaaaaaaaaaaaaaaaaaaaaaaaaaaaaaaaaaaugcaucccccccccccccccccccccccccccccccaaaggcucuuuucagagccaccagaauu

SEQ ID NO: 5742 - RNA, 1816 nt, Artificial Sequence
  mRNA product Design a-5 comprising derived and/or modified sequence from HRSV(A2)__F-del_DSCav1_mut5 (opt6)
gggagacuuucccauucuguagcagaauuugguguugccuguggucuuggucccgcggagaagcuuaccauggaacuuuuaauacugaaagcaaaugccaucacaaccauacuaacugccgucacauucugcuuugcaucaggacaaaacauaacagaagaauuuuaccaauccacaugcucagcaguaucaaaaggauaucuaucggcacuuagaacuggaugguacacaaguguuauaacuauagaacucucaaacauaaaagaaaacaaaugcaauggaacagacgcaaaaguaaaacuaauaaaacaagaacucgauaaauauaaaaaugcaguaaccgaacuacaacuauuaaugcaaagcacacccgcaacaggcagcggaucagcaauagcaagcggagucgcaguauguaaaguacuacaucuagaaggagaagucaacaaaaucaaaucugcacuucuauccacaaacaaagcuguaguaucccuauccggaugcggagucucaguauuaacuuuuaaaguacuagaccuuaaaaacuacauagauaaacaacuauuaccaauacuaaauaaacaaucaugcagcauauccaauauagagacaguaauugaauuucaacaaaaaaacaacagauuacuagaaauuacucgugaauuuuccguaaaugccggagucacaacaccaguaucaaccuauaugcuaacaaacagcgaacuacuuagcuuaauaaaugacaugccaauaacaaaugaccaaaaaaaacuuaugucaaauaacguacaaaucgucagacaacaauccuacucuauaauguguauaauuaaagaagaaguccuagcauacguaguucaauuaccacucuauggaguaauagauacaccaugcuggaaacuacacacgucaccacuauguacaacaaacacaaaagaaggauccaauauaugccuaacaagaaccgacagaggcugguauugugacaacgcaggauccguuucauucuucccacaagcagaaaccuguaaaguacaaucuaauagaguauuuugcgacacaaugaacaguagaacacuaccaagcgagguuaaucuauguaacguagacauauucaauccaaaauaugauugcaaaauaaugacaucaaaaacagauguaucgucgaguguaauaacaagucugggagcuauaguaagcugcuacggcaagacgaaauguaccgcuucaaauaaaugcagaggaaucauuaaaacauucucgaacggaugcgacuacguaaguaauaaaggugucgacaccguaucaguagggaauacauuauacuacgucaacaaacaagaaggaaaaucucuauauguaaaaggagaaccaauaauaaauuucuaugacccucuaguauucccaucagaugaauuugacgcuuccauaucacaaguaaacgaaaaaaucaaucaaucuuuagcauucauacgaaaaagugaugaacuccuacacaacgucaacgcaggaaaaagcacaacaaauauaaugaucacaacaaucaucauaguaauaauaguaauacuacuaucauuaauagcaguaggauuauugcuuuacugcaaagcacgauagggacuagucccuguucccagagcccacuuuuuuuucuuuuuuugaaauaaaauagccugucuuucagaucuaaaaaaaaaaaaaaaaaaaaaaaaaaaaaaaaaaaaaaaaaaaaaaaaaaaaaaaaaaaaaaaaugcaucccccccccccccccccccccccccccccccaaaggcucuuuucagagccaccagaauu

SEQ ID NO: 5743 - RNA, 1816 nt, Artificial Sequence
  mRNA product Design a-5 comprising derived and/or modified sequence from HRSV(A2)__F-del_DSCav1_mut5 (opt11)
gggagacuuucccauucuguagcagaauuugguguugccuguggucuuggucccgcggagaagcuuaccauggaacuccucauccucaaagccaacgccauaaccacaauacucaccgccguaaccuucugcuuugcgucgggacaaaacaucaccgaagaguucuaccaauccacuugcuccgcaguaagcaaaggauaccucuccgcccugcgaaccgguugguacacaucagucaucacaaucgaacucucaaacauaaaagaaaacaaaugcaacggcaccgacgcaaaggucaaauuaaucaagcaagaacuagacaaauacaaaaacgccgucacagaacuccagcugcuaaugcagagcacacccgcaacuggcagcggauccgccaucgcaucaggagucgccgugugcaaaguccuacaccucgaaggagaagugaacaaaaucaaaucagcccuacucuccaccaacaaggccgucgucucccucuccggcugcggugucuccguccuaaccuucaaagugcuagaccucaagaacuacaucgacaaacaacuccuaccaauacucaacaagcaaucuugcuccaucuccaacaucgaaaccguaaucgaguuccaacagaagaacaaccgccuccucgaaaucacccgcgaguucucugucaacgcaggggucaccacucccgucuccacauacaugcucacaaacuccgaacuccucagccucaucaacgacaugcccauaaccaacgaccagaaaaagcuaaugagcaauaacguccaaaucguuagacaacaaaguuauuccaucaugugcaucaucaaagaagaaguccucgccuacgucguacaacucccccucuauggcgucaucgacacccccugcuggaaacugcacacaucaccccucugcaccacaaacaccaaagaaggcucaaacaucugccuaacucgcaccgaccgcggcugguacugcgacaacgccggcagcguaucauucuuuccccaagccgaaacaugcaaaguucaauccaaccgcgucuucugcgacacaaugaacuccagaacgcuccccagcgaagucaaccucuguaacguagacaucuucaacccuaaguacgacugcaaaaucaugaccuccaaaacugauguauccuccuccgucaucacaucccugggcgccaucgucagcugcuacggcaaaacaaaaugcacugccucaaacaaaugccgagguaucauaaagaccuucucaaacggaugcgauuacgucagcaacaaaggcgucgacaccgucagugucggcaacacccucuacuacgucaacaaacaagaaggaaaaucccucuacgucaaaggcgaacccaucaucaacuucuacgacccccucgucuuccccagcgacgaguucgacgccuccaucucacaagucaacgaaaagauaaaccaaucucuagccuucauccgcaaauccgaugaacuccugcauaacgucaacgccggcaaauccaccacaaacaucaugaucacuaccauaaucaucgucauaaucguaauccuccuaucucuuaucgcagucggccuacuacucuacugcaaagcccgcuaaggacuagucccuguucccagagcccacuuuuuuuucuuuuuuugaaauaaaauagccugucuuucagaucuaaaaaaaaaaaaaaaaaaaaaaaaaaaaaaaaaaaaaaaaaaaaaaaaaaaaaaaaaaaaaaaaugcaucccccccccccccccccccccccccccccccaaaggcucuuuucagagccaccagaauu

SEQ ID NO: 5744 - RNA, 1997 nt, Artificial Sequence
  mRNA product Design b-1 comprising derived and/or modified sequence from HRSV(A2)__F-del_DSCav1_mut5 (opt1)
gggagacggagacggccugcaggaccugcucucucagcccucagccgaggccuacgccgagccgagugcgcagccgacgaccgggaggagccgcagccuucaacucugagguacugugauccgcgcugcccgccgggccgccccaguccgcugcugcggcaccuccuucccucgcgcccucuucgcucgccagcgccuucccugugagccugcgucaccgcggccgccaagcuuaccauggagcugcucauccugaaggccaacgccaucaccaccauccugacggcggugaccuucugcuucgccagcggccagaacaucaccgaggaguucuaccaguccacgugcagcgccgucuccaagggguaccucagcgcccugcggaccggcugguacaccuccgugaucaccaucgagcugagcaacaucaaggagaacaagugcaacgggaccgacgccaaggugaagcucaucaagcaggagcuggacaaguacaagaacgcggucacggagcugcagcuccugaugcaguccaccccggcaaccggcuccggcuccgccaucgcgagcggcgucgccgugugcaaggugcugcaccucgagggggaggucaacaagaucaagagcgcccugcuguccaccaacaaggccguggugagccucuccggcugcggcgucagcgugcugaccuucaaggugcuggaccucaagaacuacaucgacaagcagcugcugcccauccugaacaagcagagcugcuccaucagcaacaucgagacggugaucgaguuccagcagaagaacaaccggcuccuggagaucacccgcgaguucagcgugaacgccggggucaccacccccguguccacguacaugcugaccaacagcgagcuccugucccugaucaacgacaugccgaucaccaacgaccagaagaagcucaugagcaacaacgugcagaucguccggcagcaguccuacagcaucaugugcaucaucaaggaggaggugcuggcguacgugguccagcugccccucuacggcgugaucgacacccccugcuggaagcugcacacgagcccccugugcaccaccaacaccaaggagggguccaacaucugccucacgcgcaccgaccggggcugguacugcgacaacgccggcagcgucuccuucuucccgcaggccgagaccugcaaggugcagagcaaccgcguguucugcgacaccaugaacucccggacgcugcccagcgagguaaaccucugcaacgucgacaucuucaaccccaaguacgacugcaagaucaugaccuccaagaccgacgugagcuccagcgugaucaccucccugggggccaucgucagcugcuacggcaagacgaagugcaccgccagcaacaagugccgggggaucaucaagaccuucuccaacggcugcgacuacgugagcaacaagggcguggacaccguguccgucgggaacacccuguacuacgugaacaagcaggagggcaagagccucuacgugaagggggagcccaucaucaacuucuacgacccgcuggucuuccccuccgacgaguucgacgcgagcaucucccaggugaacgagaagaucaaccagagccuggccuucauccgcaaguccgacgagcugcuccacaacgugaacgccggcaagagcacgaccaacaucaugaucaccaccaucaucaucgucaucaucgugauccugcugucccucaucgccguggggcugcugcucuacugcaaggcccggugaggacuaguguccaccugucccuccugggcugcuggauugucucguuuuccugccaaauaaacaggaucagcgcuuuacagaucuaaaaaaaaaaaaaaaaaaaaaaaaaaaaaaaaaaaaaaaaaaaaaaaaaaaaaaaaaaaaaaaaugcaucccccccccccccccccccccccccccccccaaaggcucuuuucagagccaccagaauu

SEQ ID NO: 5745 - RNA, 1997 nt, Artificial Sequence
  mRNA product Design b-1 comprising derived and/or modified sequence from HRSV(A2)__F-del_DSCav1_mut5 (opt1)
gggagacggagacggccugcaggaccugcucucucagcccucagccgaggccuacgccgagccgagugcgcagccgacgaccgggaggagccgcagccuucaacucugagguacugugauccgcgcugcccgccgggccgccccaguccgcugcugcggcaccuccuucccucgcgcccucuucgcucgccagcgccuucccugugagccugcgucaccgcggccgccaagcuuaccauggagcugcucauccugaaggccaacgccaucaccaccauccugacggcggugaccuucugcuucgccagcggccagaacaucaccgaggaguucuaccaguccacgugcagcgccgucuccaagggguaccucagcgcccugcgcaccggcugguacaccuccgugaucaccaucgagcugagcaacaucaaggagaacaagugcaacgggaccgacgccaaggugaagcucaucaagcaggagcuggacaaguacaagaacgcggucacggagcugcagcuccugaugcaguccacccccgccaccggcagcggguccgccaucgccagcggcguggcggugugcaagguccugcaccucgagggcgaggugaacaagaucaaguccgcccugcugagcaccaacaaggccguggucucccucagcgggugcggcguguccgugcugacguucaagguccuggaccucaagaacuacaucgacaagcagcugcugccgauccucaacaagcagagcugcuccaucagcaacaucgagaccgugaucgaguuccagcagaagaacaaccggcugcuggagaucacccgcgaguucuccgugaacgccggggucaccacgcccgugagcaccuacaugcucaccaacagcgagcugcugucccucaucaacgacaugcccaucaccaacgaccagaagaagcugaugagcaacaacgugcagaucguccggcagcaguccuacagcaucaugugcaucaucaaggaggaggugcuggccuacgugguccagcucccccuguacggcgugaucgacacgccgugcuggaagcugcacaccagcccccucugcaccaccaacacgaaggagggguccaacaucugccugacccgcaccgaccggggcugguacugcgacaacgcgggcuccgugagcuucuucccccaggccgagaccugcaagguccaguccaaccgcguguucugcgacacgaugaacagccggacccuccccuccgaggucaaccugugcaacguggacaucuucaacccgaaguacgacugcaagaucaugaccagcaagaccgacguguccagcuccgucaucacgagccugggggccaucguguccugcuacggcaagaccaagugcaccgccagcaacaagugccgggggaucaucaagaccuucuccaacggcugcgacuacgugagcaacaagggcgucgacacggugagcguggggaacacccucuacuacgucaacaagcaggagggcaagucccuguacgugaagggggagcccaucaucaacuucuacgacccccugguguuccccagcgacgaguucgacgccuccaucagccaggucaacgagaagaucaaccagucccucgcguucauccgcaagagcgacgagcugcugcacaacgugaacgccggcaaguccaccaccaacaucaugaucaccacgaucaucaucgugaucaucgucauccuccugagccugaucgccguggggcuccugcuguacugcaaggcccggugaggacuaguguccaccugucccuccugggcugcuggauugucucguuuuccugccaaauaaacaggaucagcgcuuuacagaucuaaaaaaaaaaaaaaaaaaaaaaaaaaaaaaaaaaaaaaaaaaaaaaaaaaaaaaaaaaaaaaaaugcaucccccccccccccccccccccccccccccccaaaggcucuuuucagagccaccagaauu

SEQ ID NO: 5746 - RNA, 1997 nt, Artificial Sequence
  mRNA product Design b-1 comprising derived and/or modified sequence from HRSV(A2)__F-del_DSCav1_mut5 (opt2)
gggagacggagacggccugcaggaccugcucucucagcccucagccgaggccuacgccgagccgagugcgcagccgacgaccgggaggagccgcagccuucaacucugagguacugugauccgcgcugcccgccgggccgccccaguccgcugcugcggcaccuccuucccucgcgcccucuucgcucgccagcgccuucccugugagccugcgucaccgcggccgccaagcuuaccauggagcuccucauccucaaggccaacgccaucaccaccauccucaccgccgucaccuucugcuucgccuccggccagaacaucaccgaggaguucuaccaguccaccugcuccgccgucuccaagggcuaccucuccgcccuccgcaccggcugguacaccuccgucaucaccaucgagcucuccaacaucaaggagaacaagugcaacggcaccgacgccaaggucaagcucaucaagcaggagcucgacaaguacaagaacgccgucaccgagcuccagcuccucaugcaguccacccccgccaccggcuccggcuccgccaucgccuccggcgucgccgucugcaagguccuccaccucgagggcgaggucaacaagaucaaguccgcccuccucuccaccaacaaggccgucgucucccucuccggcugcggcgucuccguccucaccuucaagguccucgaccucaagaacuacaucgacaagcagcuccuccccauccucaacaagcaguccugcuccaucuccaacaucgagaccgucaucgaguuccagcagaagaacaaccgccuccucgagaucacccgcgaguucuccgucaacgccggcgucaccacccccgucuccaccuacaugcucaccaacuccgagcuccucucccucaucaacgacaugcccaucaccaacgaccagaagaagcucauguccaacaacguccagaucguccgccagcaguccuacuccaucaugugcaucaucaaggaggagguccucgccuacgucguccagcucccccucuacggcgucaucgacacccccugcuggaagcuccacaccuccccccucugcaccaccaacaccaaggagggcuccaacaucugccucacccgcaccgaccgcggcugguacugcgacaacgccggcuccgucuccuucuucccccaggccgagaccugcaagguccaguccaaccgcgucuucugcgacaccaugaacucccgcacccuccccuccgaggucaaccucugcaacgucgacaucuucaaccccaaguacgacugcaagaucaugaccuccaagaccgacgucuccuccuccgucaucaccucccucggcgccaucgucuccugcuacggcaagaccaagugcaccgccuccaacaagugccgcggcaucaucaagaccuucuccaacggcugcgacuacgucuccaacaagggcgucgacaccgucuccgucggcaacacccucuacuacgucaacaagcaggagggcaagucccucuacgucaagggcgagcccaucaucaacuucuacgacccccucgucuuccccuccgacgaguucgacgccuccaucucccaggucaacgagaagaucaaccagucccucgccuucauccgcaaguccgacgagcuccuccacaacgucaacgccggcaaguccaccaccaacaucaugaucaccaccaucaucaucgucaucaucgucauccuccucucccucaucgccgucggccuccuccucuacugcaaggcccgcugaggacuaguguccaccugucccuccugggcugcuggauugucucguuuuccugccaaauaaacaggaucagcgcuuuacagaucuaaaaaaaaaaaaaaaaaaaaaaaaaaaaaaaaaaaaaaaaaaaaaaaaaaaaaaaaaaaaaaaaugcaucccccccccccccccccccccccccccccccaaaggcucuuuucagagccaccagaauu

SEQ ID NO: 5747 - RNA, 1997 nt, Artificial Sequence
  mRNA product Design b-1 comprising derived and/or modified sequence from HRSV(A2)__F-del_DSCav1_mut5 (opt3)
gggagacggagacggccugcaggaccugcucucucagcccucagccgaggccuacgccgagccgagugcgcagccgacgaccgggaggagccgcagccuucaacucugagguacugugauccgcgcugcccgccgggccgccccaguccgcugcugcggcaccuccuucccucgcgcccucuucgcucgccagcgccuucccugugagccugcgucaccgcggccgccaagcuuaccauggagcugcucauccuuaaggccaacgcuauuaccacaauacugacugcagugacguucugcuuugccagcggccagaauaucaccgaagaguucuaccaauccacauguucugcggucucaaaaggguauuugagugcuuuaagaacuggaugguacaccagcguuauuacaaucgaacuguccaacauuaaggagaauaaaugcaacgguaccgacgccaaggugaaacuaaucaagcaggaacucgauaaguauaaaaaugcaguaacugagcugcagcuucugaugcagucuacacccgccaccggcucggggucagcuauagcaagcggaguggccgucuguaagguguugcaccucgagggcgaaguuaacaaaaucaagagugcucugcuguccacgaauaaagccguggucucucucagcgguugcgggguguccguauuaacuuuuaagguucuggaccuuaagaacuacauugauaaacaauugcugccuauccuaaauaagcagucauguaguauuagcaacaucgagaccgugauagaguuccagcagaaaaauaacaggcuccuggaaauuacacgggaguuuucugucaaugcgggagugacuaccccaguguccacauauaugcuuaccaacucagaacuguugagccucaucaaugacaugccgauuacgaacgaucaaaagaaacugaugaguaacaauguccagaucguucgccagcagucuuacuccaucaugugcauuauaaaggaggaaguguuagcauauguagugcaacugccccucuacggcgucaucgacacuccuuguuggaaacuucauacaagcccacugugcaccacuaacacaaaggagggcucgaauauuuguuugacccgaacggaucgugggugguacugcgacaacgccggaucuguguccuucuuuccccaggcugaaaccuguaagguucagucaaauagaguguucugcgauacaaugaacaguagaacucugccuagcgaggucaaucucugcaacguggacaucuuuaauccaaaauaugauuguaagauaaugaccuccaaaacagacguaucuagcucaguuauuaccagucugggugccaucguguccugcuacggcaagacuaaauguacagcaagcaacaagugcagggggaucauuaagaccuucucuaauggaugugauuaugucucaaacaaaggcguggacacugucaguguggguaauacgcuuuacuauguuaacaagcaagaggggaaaagccuguacgugaagggagaacccaucauuaauuuuuaugacccuuugguauucccauccgaugaguuugacgcuucuauaucgcaggucaacgagaaaaucaaccagagccucgccuucauucggaaguccgaugaacuguuacacaaugugaacgcgggcaagucaacaaccaauaucaugaucacuaccauuauaaucguuauuaucgugauucugcuaagucucaucgccgucggccugcuuuuguacugcaaagcacgcugaggacuaguguccaccugucccuccugggcugcuggauugucucguuuuccugccaaauaaacaggaucagcgcuuuacagaucuaaaaaaaaaaaaaaaaaaaaaaaaaaaaaaaaaaaaaaaaaaaaaaaaaaaaaaaaaaaaaaaaugcaucccccccccccccccccccccccccccccccaaaggcucuuuucagagccaccagaauu

SEQ ID NO: 5748 - RNA, 1997 nt, Artificial Sequence
  mRNA product Design b-1 comprising derived and/or modified sequence from HRSV(A2)__F-del_DSCav1_mut5 (opt4)
gggagacggagacggccugcaggaccugcucucucagcccucagccgaggccuacgccgagccgagugcgcagccgacgaccgggaggagccgcagccuucaacucugagguacugugauccgcgcugcccgccgggccgccccaguccgcugcugcggcaccuccuucccucgcgcccucuucgcucgccagcgccuucccugugagccugcgucaccgcggccgccaagcuuaccauggagcugcugauccugaaggccaacgccaucaccaccauccugaccgccgugaccuucugcuucgccagcggccagaacaucaccgaggaguucuaccagagcaccugcagcgccgugagcaagggcuaccugagcgcccugagaaccggcugguacaccagcgugaucaccaucgagcugagcaacaucaaggagaacaagugcaacggcaccgacgccaaggugaagcugaucaagcaggagcuggacaaguacaagaacgccgugaccgagcugcagcugcugaugcagagcacccccgccaccggcagcggcagcgccaucgccagcggcguggccgugugcaaggugcugcaccuggagggcgaggugaacaagaucaagagcgcccugcugagcaccaacaaggccguggugagccugagcggcugcggcgugagcgugcugaccuucaaggugcuggaccugaagaacuacaucgacaagcagcugcugcccauccugaacaagcagagcugcagcaucagcaacaucgagaccgugaucgaguuccagcagaagaacaacagacugcuggagaucaccagagaguucagcgugaacgccggcgugaccacccccgugagcaccuacaugcugaccaacagcgagcugcugagccugaucaacgacaugcccaucaccaacgaccagaagaagcugaugagcaacaacgugcagaucgugagacagcagagcuacagcaucaugugcaucaucaaggaggaggugcuggccuacguggugcagcugccccuguacggcgugaucgacacccccugcuggaagcugcacaccagcccccugugcaccaccaacaccaaggagggcagcaacaucugccugaccagaaccgacagaggcugguacugcgacaacgccggcagcgugagcuucuucccccaggccgagaccugcaaggugcagagcaacagaguguucugcgacaccaugaacagcagaacccugcccagcgaggugaaccugugcaacguggacaucuucaaccccaaguacgacugcaagaucaugaccagcaagaccgacgugagcagcagcgugaucaccagccugggcgccaucgugagcugcuacggcaagaccaagugcaccgccagcaacaagugcagaggcaucaucaagaccuucagcaacggcugcgacuacgugagcaacaagggcguggacaccgugagcgugggcaacacccuguacuacgugaacaagcaggagggcaagagccuguacgugaagggcgagcccaucaucaacuucuacgacccccugguguuccccagcgacgaguucgacgccagcaucagccaggugaacgagaagaucaaccagagccuggccuucaucagaaagagcgacgagcugcugcacaacgugaacgccggcaagagcaccaccaacaucaugaucaccaccaucaucaucgugaucaucgugauccugcugagccugaucgccgugggccugcugcuguacugcaaggccagaugaggacuaguguccaccugucccuccugggcugcuggauugucucguuuuccugccaaauaaacaggaucagcgcuuuacagaucuaaaaaaaaaaaaaaaaaaaaaaaaaaaaaaaaaaaaaaaaaaaaaaaaaaaaaaaaaaaaaaaaugcaucccccccccccccccccccccccccccccccaaaggcucuuuucagagccaccagaauu

SEQ ID NO: 5749 - RNA, 1997 nt, Artificial Sequence
  mRNA product Design b-1 comprising derived and/or modified sequence from HRSV(A2)__F-del_DSCav1_mut5 (opt5)
gggagacggagacggccugcaggaccugcucucucagcccucagccgaggccuacgccgagccgagugcgcagccgacgaccgggaggagccgcagccuucaacucugagguacugugauccgcgcugcccgccgggccgccccaguccgcugcugcggcaccuccuucccucgcgcccucuucgcucgccagcgccuucccugugagccugcgucaccgcggccgccaagcuuaccauggagcugcucauccugaaggccaacgcuauuaccacaauccuuacggccgugaccuucugcuuugcgagcggccagaauauuacagaagaguucuaccaauccaccuguucugcugucagcaaaggguaucuguccgcccucagaacaggaugguacaccucuguuaucacaauugaacugagcaacaucaaggagaauaaaugcaacggcaccgacgccaaggugaaacuuaucaagcaggaacuggauaaguauaaaaaugcugugacggagcuccagcugcugaugcaguccacccccgccacagggucuggaagcgcuauugccuccggcgucgcgguguguaagguucuccaccuggagggggaagugaacaaaaucaagagcgcccuucugucuaccaauaaagcugucgugucccucagcggaugcggcguuucugugcugacauuuaagguccuugaccugaagaacuacauugauaaacaacuccugccuauccugaauaagcaguccuguagcauuucuaacaucgagaccgugauugaguuccagcagaaaaauaaccggcuccuggaaaucacgcgcgaguuuuccgugaaugccggcgucacaaccccgguuagcacauauaugcuuaccaacuccgaacugcucucucugaucaaugacaugcccauuaccaacgaucaaaagaaacuuaugagcaacaaugugcagaucgugagacagcaguccuacagcauuaugugcaucauuaaggaggaaguccuggcuuaugugguucaacucccucuguacggggugaucgacacacccuguuggaaacugcauacgucuccucucugcaccacaaacaccaaggagggauccaauaucugucugacacggaccgaucgcggcugguacugcgacaacgccgggagcgucucuuucuuuccccaggcggaaacguguaaggugcagagcaauagaguuuucugcgauacaaugaacuccagaacccugccuucugaggugaaucucugcaacgucgacauuuuuaauccgaaauaugauuguaagaucaugaccagcaaaacagacguguccagcucugucauuaccucccugggagccaucgugagcugcuacggcaagacaaaauguacggcuucuaacaagugccgggggauuaucaagaccuucuccaauggaugugauuauguuagcaacaaaggcguggacacagucuccgugggcaauacccuuuacuauguuaacaagcaagaggggaaaucucuguacgugaagggagaacccaucauuaauuuuuaugacccucucgucuuccccagcgaugaguuugacgccuccaucucucaggugaacgagaaaauuaaccagagccuggcuuucauccgcaaguccgaugaacugcuccacaaugugaacgccggcaagagcacaaccaauauuaugaucacgaccauuaucaucguuauuaucgucauucugcuuucucugaucgccguggggcuccugcuguacugcaaagcuagaugaggacuaguguccaccugucccuccugggcugcuggauugucucguuuuccugccaaauaaacaggaucagcgcuuuacagaucuaaaaaaaaaaaaaaaaaaaaaaaaaaaaaaaaaaaaaaaaaaaaaaaaaaaaaaaaaaaaaaaaugcaucccccccccccccccccccccccccccccccaaaggcucuuuucagagccaccagaauu

SEQ ID NO: 5750 - RNA, 1997 nt, Artificial Sequence
  mRNA product Design b-1 comprising derived and/or modified sequence from HRSV(A2)__F-del_DSCav1_mut5 (opt6)
gggagacggagacggccugcaggaccugcucucucagcccucagccgaggccuacgccgagccgagugcgcagccgacgaccgggaggagccgcagccuucaacucugagguacugugauccgcgcugcccgccgggccgccccaguccgcugcugcggcaccuccuucccucgcgcccucuucgcucgccagcgccuucccugugagccugcgucaccgcggccgccaagcuuaccauggaacuuuuaauacugaaagcaaaugccaucacaaccauacuaacugccgucacauucugcuuugcaucaggacaaaacauaacagaagaauuuuaccaauccacaugcucagcaguaucaaaaggauaucuaucggcacuuagaacuggaugguacacaaguguuauaacuauagaacucucaaacauaaaagaaaacaaaugcaauggaacagacgcaaaaguaaaacuaauaaaacaagaacucgauaaauauaaaaaugcaguaaccgaacuacaacuauuaaugcaaagcacacccgcaacaggcagcggaucagcaauagcaagcggagucgcaguauguaaaguacuacaucuagaaggagaagucaacaaaaucaaaucugcacuucuauccacaaacaaagcuguaguaucccuauccggaugcggagucucaguauuaacuuuuaaaguacuagaccuuaaaaacuacauagauaaacaacuauuaccaauacuaaauaaacaaucaugcagcauauccaauauagagacaguaauugaauuucaacaaaaaaacaacagauuacuagaaauuacucgugaauuuuccguaaaugccggagucacaacaccaguaucaaccuauaugcuaacaaacagcgaacuacuuagcuuaauaaaugacaugccaauaacaaaugaccaaaaaaaacuuaugucaaauaacguacaaaucgucagacaacaauccuacucuauaauguguauaauuaaagaagaaguccuagcauacguaguucaauuaccacucuauggaguaauagauacaccaugcuggaaacuacacacgucaccacuauguacaacaaacacaaaagaaggauccaauauaugccuaacaagaaccgacagaggcugguauugugacaacgcaggauccguuucauucuucccacaagcagaaaccuguaaaguacaaucuaauagaguauuuugcgacacaaugaacaguagaacacuaccaagcgagguuaaucuauguaacguagacauauucaauccaaaauaugauugcaaaauaaugacaucaaaaacagauguaucgucgaguguaauaacaagucugggagcuauaguaagcugcuacggcaagacgaaauguaccgcuucaaauaaaugcagaggaaucauuaaaacauucucgaacggaugcgacuacguaaguaauaaaggugucgacaccguaucaguagggaauacauuauacuacgucaacaaacaagaaggaaaaucucuauauguaaaaggagaaccaauaauaaauuucuaugacccucuaguauucccaucagaugaauuugacgcuuccauaucacaaguaaacgaaaaaaucaaucaaucuuuagcauucauacgaaaaagugaugaacuccuacacaacgucaacgcaggaaaaagcacaacaaauauaaugaucacaacaaucaucauaguaauaauaguaauacuacuaucauuaauagcaguaggauuauugcuuuacugcaaagcacgauagggacuaguguccaccugucccuccugggcugcuggauugucucguuuuccugccaaauaaacaggaucagcgcuuuacagaucuaaaaaaaaaaaaaaaaaaaaaaaaaaaaaaaaaaaaaaaaaaaaaaaaaaaaaaaaaaaaaaaaugcaucccccccccccccccccccccccccccccccaaaggcucuuuucagagccaccagaauu

SEQ ID NO: 5751 - RNA, 1997 nt, Artificial Sequence
  mRNA product Design b-1 comprising derived and/or modified sequence from HRSV(A2)__F-del_DSCav1_mut5 (opt11)
gggagacggagacggccugcaggaccugcucucucagcccucagccgaggccuacgccgagccgagugcgcagccgacgaccgggaggagccgcagccuucaacucugagguacugugauccgcgcugcccgccgggccgccccaguccgcugcugcggcaccuccuucccucgcgcccucuucgcucgccagcgccuucccugugagccugcgucaccgcggccgccaagcuuaccauggaacuccucauccucaaagccaacgccauaaccacaauacucaccgccguaaccuucugcuuugcgucgggacaaaacaucaccgaagaguucuaccaauccacuugcuccgcaguaagcaaaggauaccucuccgcccugcgaaccgguugguacacaucagucaucacaaucgaacucucaaacauaaaagaaaacaaaugcaacggcaccgacgcaaaggucaaauuaaucaagcaagaacuagacaaauacaaaaacgccgucacagaacuccagcugcuaaugcagagcacacccgcaacuggcagcggauccgccaucgcaucaggagucgccgugugcaaaguccuacaccucgaaggagaagugaacaaaaucaaaucagcccuacucuccaccaacaaggccgucgucucccucuccggcugcggugucuccguccuaaccuucaaagugcuagaccucaagaacuacaucgacaaacaacuccuaccaauacucaacaagcaaucuugcuccaucuccaacaucgaaaccguaaucgaguuccaacagaagaacaaccgccuccucgaaaucacccgcgaguucucugucaacgcaggggucaccacucccgucuccacauacaugcucacaaacuccgaacuccucagccucaucaacgacaugcccauaaccaacgaccagaaaaagcuaaugagcaauaacguccaaaucguuagacaacaaaguuauuccaucaugugcaucaucaaagaagaaguccucgccuacgucguacaacucccccucuauggcgucaucgacacccccugcuggaaacugcacacaucaccccucugcaccacaaacaccaaagaaggcucaaacaucugccuaacucgcaccgaccgcggcugguacugcgacaacgccggcagcguaucauucuuuccccaagccgaaacaugcaaaguucaauccaaccgcgucuucugcgacacaaugaacuccagaacgcuccccagcgaagucaaccucuguaacguagacaucuucaacccuaaguacgacugcaaaaucaugaccuccaaaacugauguauccuccuccgucaucacaucccugggcgccaucgucagcugcuacggcaaaacaaaaugcacugccucaaacaaaugccgagguaucauaaagaccuucucaaacggaugcgauuacgucagcaacaaaggcgucgacaccgucagugucggcaacacccucuacuacgucaacaaacaagaaggaaaaucccucuacgucaaaggcgaacccaucaucaacuucuacgacccccucgucuuccccagcgacgaguucgacgccuccaucucacaagucaacgaaaagauaaaccaaucucuagccuucauccgcaaauccgaugaacuccugcauaacgucaacgccggcaaauccaccacaaacaucaugaucacuaccauaaucaucgucauaaucguaauccuccuaucucuuaucgcagucggccuacuacucuacugcaaagcccgcuaaggacuaguguccaccugucccuccugggcugcuggauugucucguuuuccugccaaauaaacaggaucagcgcuuuacagaucuaaaaaaaaaaaaaaaaaaaaaaaaaaaaaaaaaaaaaaaaaaaaaaaaaaaaaaaaaaaaaaaaugcaucccccccccccccccccccccccccccccccaaaggcucuuuucagagccaccagaauu

SEQ ID NO: 5752 - RNA, 1817 nt, Artificial Sequence
  mRNA product Design b-2 comprising derived and/or modified sequence from HRSV(A2)__F-del_DSCav1_mut5 (opt1)
gggagagccucugcuggaguccggggaguggcguuggcugcuagagcgaagcuuaccauggagcugcucauccugaaggccaacgccaucaccaccauccugacggcggugaccuucugcuucgccagcggccagaacaucaccgaggaguucuaccaguccacgugcagcgccgucuccaagggguaccucagcgcccugcggaccggcugguacaccuccgugaucaccaucgagcugagcaacaucaaggagaacaagugcaacgggaccgacgccaaggugaagcucaucaagcaggagcuggacaaguacaagaacgcggucacggagcugcagcuccugaugcaguccaccccggcaaccggcuccggcuccgccaucgcgagcggcgucgccgugugcaaggugcugcaccucgagggggaggucaacaagaucaagagcgcccugcuguccaccaacaaggccguggugagccucuccggcugcggcgucagcgugcugaccuucaaggugcuggaccucaagaacuacaucgacaagcagcugcugcccauccugaacaagcagagcugcuccaucagcaacaucgagacggugaucgaguuccagcagaagaacaaccggcuccuggagaucacccgcgaguucagcgugaacgccggggucaccacccccguguccacguacaugcugaccaacagcgagcuccugucccugaucaacgacaugccgaucaccaacgaccagaagaagcucaugagcaacaacgugcagaucguccggcagcaguccuacagcaucaugugcaucaucaaggaggaggugcuggcguacgugguccagcugccccucuacggcgugaucgacacccccugcuggaagcugcacacgagcccccugugcaccaccaacaccaaggagggguccaacaucugccucacgcgcaccgaccggggcugguacugcgacaacgccggcagcgucuccuucuucccgcaggccgagaccugcaaggugcagagcaaccgcguguucugcgacaccaugaacucccggacgcugcccagcgagguaaaccucugcaacgucgacaucuucaaccccaaguacgacugcaagaucaugaccuccaagaccgacgugagcuccagcgugaucaccucccugggggccaucgucagcugcuacggcaagacgaagugcaccgccagcaacaagugccgggggaucaucaagaccuucuccaacggcugcgacuacgugagcaacaagggcguggacaccguguccgucgggaacacccuguacuacgugaacaagcaggagggcaagagccucuacgugaagggggagcccaucaucaacuucuacgacccgcuggucuuccccuccgacgaguucgacgcgagcaucucccaggugaacgagaagaucaaccagagccuggccuucauccgcaaguccgacgagcugcuccacaacgugaacgccggcaagagcacgaccaacaucaugaucaccaccaucaucaucgucaucaucgugauccugcugucccucaucgccguggggcugcugcucuacugcaaggcccggugaggacuaguguccaccugucccuccugggcugcuggauugucucguuuuccugccaaauaaacaggaucagcgcuuuacagaucuaaaaaaaaaaaaaaaaaaaaaaaaaaaaaaaaaaaaaaaaaaaaaaaaaaaaaaaaaaaaaaaaugcaucccccccccccccccccccccccccccccccaaaggcucuuuucagagccaccagaauu

SEQ ID NO: 5753 - RNA, 1817 nt, Artificial Sequence
  mRNA product Design b-2 comprising derived and/or modified sequence from HRSV(A2)__F-del_DSCav1_mut5 (opt1)
gggagagccucugcuggaguccggggaguggcguuggcugcuagagcgaagcuuaccauggagcugcucauccugaaggccaacgccaucaccaccauccugacggcggugaccuucugcuucgccagcggccagaacaucaccgaggaguucuaccaguccacgugcagcgccgucuccaagggguaccucagcgcccugcgcaccggcugguacaccuccgugaucaccaucgagcugagcaacaucaaggagaacaagugcaacgggaccgacgccaaggugaagcucaucaagcaggagcuggacaaguacaagaacgcggucacggagcugcagcuccugaugcaguccacccccgccaccggcagcggguccgccaucgccagcggcguggcggugugcaagguccugcaccucgagggcgaggugaacaagaucaaguccgcccugcugagcaccaacaaggccguggucucccucagcgggugcggcguguccgugcugacguucaagguccuggaccucaagaacuacaucgacaagcagcugcugccgauccucaacaagcagagcugcuccaucagcaacaucgagaccgugaucgaguuccagcagaagaacaaccggcugcuggagaucacccgcgaguucuccgugaacgccggggucaccacgcccgugagcaccuacaugcucaccaacagcgagcugcugucccucaucaacgacaugcccaucaccaacgaccagaagaagcugaugagcaacaacgugcagaucguccggcagcaguccuacagcaucaugugcaucaucaaggaggaggugcuggccuacgugguccagcucccccuguacggcgugaucgacacgccgugcuggaagcugcacaccagcccccucugcaccaccaacacgaaggagggguccaacaucugccugacccgcaccgaccggggcugguacugcgacaacgcgggcuccgugagcuucuucccccaggccgagaccugcaagguccaguccaaccgcguguucugcgacacgaugaacagccggacccuccccuccgaggucaaccugugcaacguggacaucuucaacccgaaguacgacugcaagaucaugaccagcaagaccgacguguccagcuccgucaucacgagccugggggccaucguguccugcuacggcaagaccaagugcaccgccagcaacaagugccgggggaucaucaagaccuucuccaacggcugcgacuacgugagcaacaagggcgucgacacggugagcguggggaacacccucuacuacgucaacaagcaggagggcaagucccuguacgugaagggggagcccaucaucaacuucuacgacccccugguguuccccagcgacgaguucgacgccuccaucagccaggucaacgagaagaucaaccagucccucgcguucauccgcaagagcgacgagcugcugcacaacgugaacgccggcaaguccaccaccaacaucaugaucaccacgaucaucaucgugaucaucgucauccuccugagccugaucgccguggggcuccugcuguacugcaaggcccggugaggacuaguguccaccugucccuccugggcugcuggauugucucguuuuccugccaaauaaacaggaucagcgcuuuacagaucuaaaaaaaaaaaaaaaaaaaaaaaaaaaaaaaaaaaaaaaaaaaaaaaaaaaaaaaaaaaaaaaaugcaucccccccccccccccccccccccccccccccaaaggcucuuuucagagccaccagaauu

SEQ ID NO: 5754 - RNA, 1817 nt, Artificial Sequence
  mRNA product Design b-2 comprising derived and/or modified sequence from HRSV(A2)__F-del_DSCav1_mut5 (opt2)
gggagagccucugcuggaguccggggaguggcguuggcugcuagagcgaagcuuaccauggagcuccucauccucaaggccaacgccaucaccaccauccucaccgccgucaccuucugcuucgccuccggccagaacaucaccgaggaguucuaccaguccaccugcuccgccgucuccaagggcuaccucuccgcccuccgcaccggcugguacaccuccgucaucaccaucgagcucuccaacaucaaggagaacaagugcaacggcaccgacgccaaggucaagcucaucaagcaggagcucgacaaguacaagaacgccgucaccgagcuccagcuccucaugcaguccacccccgccaccggcuccggcuccgccaucgccuccggcgucgccgucugcaagguccuccaccucgagggcgaggucaacaagaucaaguccgcccuccucuccaccaacaaggccgucgucucccucuccggcugcggcgucuccguccucaccuucaagguccucgaccucaagaacuacaucgacaagcagcuccuccccauccucaacaagcaguccugcuccaucuccaacaucgagaccgucaucgaguuccagcagaagaacaaccgccuccucgagaucacccgcgaguucuccgucaacgccggcgucaccacccccgucuccaccuacaugcucaccaacuccgagcuccucucccucaucaacgacaugcccaucaccaacgaccagaagaagcucauguccaacaacguccagaucguccgccagcaguccuacuccaucaugugcaucaucaaggaggagguccucgccuacgucguccagcucccccucuacggcgucaucgacacccccugcuggaagcuccacaccuccccccucugcaccaccaacaccaaggagggcuccaacaucugccucacccgcaccgaccgcggcugguacugcgacaacgccggcuccgucuccuucuucccccaggccgagaccugcaagguccaguccaaccgcgucuucugcgacaccaugaacucccgcacccuccccuccgaggucaaccucugcaacgucgacaucuucaaccccaaguacgacugcaagaucaugaccuccaagaccgacgucuccuccuccgucaucaccucccucggcgccaucgucuccugcuacggcaagaccaagugcaccgccuccaacaagugccgcggcaucaucaagaccuucuccaacggcugcgacuacgucuccaacaagggcgucgacaccgucuccgucggcaacacccucuacuacgucaacaagcaggagggcaagucccucuacgucaagggcgagcccaucaucaacuucuacgacccccucgucuuccccuccgacgaguucgacgccuccaucucccaggucaacgagaagaucaaccagucccucgccuucauccgcaaguccgacgagcuccuccacaacgucaacgccggcaaguccaccaccaacaucaugaucaccaccaucaucaucgucaucaucgucauccuccucucccucaucgccgucggccuccuccucuacugcaaggcccgcugaggacuaguguccaccugucccuccugggcugcuggauugucucguuuuccugccaaauaaacaggaucagcgcuuuacagaucuaaaaaaaaaaaaaaaaaaaaaaaaaaaaaaaaaaaaaaaaaaaaaaaaaaaaaaaaaaaaaaaaugcaucccccccccccccccccccccccccccccccaaaggcucuuuucagagccaccagaauu

SEQ ID NO: 5755 - RNA, 1817 nt, Artificial Sequence
  mRNA product Design b-2 comprising derived and/or modified sequence from HRSV(A2)__F-del_DSCav1_mut5 (opt3)
gggagagccucugcuggaguccggggaguggcguuggcugcuagagcgaagcuuaccauggagcugcucauccuuaaggccaacgcuauuaccacaauacugacugcagugacguucugcuuugccagcggccagaauaucaccgaagaguucuaccaauccacauguucugcggucucaaaaggguauuugagugcuuuaagaacuggaugguacaccagcguuauuacaaucgaacuguccaacauuaaggagaauaaaugcaacgguaccgacgccaaggugaaacuaaucaagcaggaacucgauaaguauaaaaaugcaguaacugagcugcagcuucugaugcagucuacacccgccaccggcucggggucagcuauagcaagcggaguggccgucuguaagguguugcaccucgagggcgaaguuaacaaaaucaagagugcucugcuguccacgaauaaagccguggucucucucagcgguugcgggguguccguauuaacuuuuaagguucuggaccuuaagaacuacauugauaaacaauugcugccuauccuaaauaagcagucauguaguauuagcaacaucgagaccgugauagaguuccagcagaaaaauaacaggcuccuggaaauuacacgggaguuuucugucaaugcgggagugacuaccccaguguccacauauaugcuuaccaacucagaacuguugagccucaucaaugacaugccgauuacgaacgaucaaaagaaacugaugaguaacaauguccagaucguucgccagcagucuuacuccaucaugugcauuauaaaggaggaaguguuagcauauguagugcaacugccccucuacggcgucaucgacacuccuuguuggaaacuucauacaagcccacugugcaccacuaacacaaaggagggcucgaauauuuguuugacccgaacggaucgugggugguacugcgacaacgccggaucuguguccuucuuuccccaggcugaaaccuguaagguucagucaaauagaguguucugcgauacaaugaacaguagaacucugccuagcgaggucaaucucugcaacguggacaucuuuaauccaaaauaugauuguaagauaaugaccuccaaaacagacguaucuagcucaguuauuaccagucugggugccaucguguccugcuacggcaagacuaaauguacagcaagcaacaagugcagggggaucauuaagaccuucucuaauggaugugauuaugucucaaacaaaggcguggacacugucaguguggguaauacgcuuuacuauguuaacaagcaagaggggaaaagccuguacgugaagggagaacccaucauuaauuuuuaugacccuuugguauucccauccgaugaguuugacgcuucuauaucgcaggucaacgagaaaaucaaccagagccucgccuucauucggaaguccgaugaacuguuacacaaugugaacgcgggcaagucaacaaccaauaucaugaucacuaccauuauaaucguuauuaucgugauucugcuaagucucaucgccgucggccugcuuuuguacugcaaagcacgcugaggacuaguguccaccugucccuccugggcugcuggauugucucguuuuccugccaaauaaacaggaucagcgcuuuacagaucuaaaaaaaaaaaaaaaaaaaaaaaaaaaaaaaaaaaaaaaaaaaaaaaaaaaaaaaaaaaaaaaaugcaucccccccccccccccccccccccccccccccaaaggcucuuuucagagccaccagaauu

SEQ ID NO: 5756 - RNA, 1817 nt, Artificial Sequence
  mRNA product Design b-2 comprising derived and/or modified sequence from HRSV(A2)__F-del_DSCav1_mut5 (opt4)
gggagagccucugcuggaguccggggaguggcguuggcugcuagagcgaagcuuaccauggagcugcugauccugaaggccaacgccaucaccaccauccugaccgccgugaccuucugcuucgccagcggccagaacaucaccgaggaguucuaccagagcaccugcagcgccgugagcaagggcuaccugagcgcccugagaaccggcugguacaccagcgugaucaccaucgagcugagcaacaucaaggagaacaagugcaacggcaccgacgccaaggugaagcugaucaagcaggagcuggacaaguacaagaacgccgugaccgagcugcagcugcugaugcagagcacccccgccaccggcagcggcagcgccaucgccagcggcguggccgugugcaaggugcugcaccuggagggcgaggugaacaagaucaagagcgcccugcugagcaccaacaaggccguggugagccugagcggcugcggcgugagcgugcugaccuucaaggugcuggaccugaagaacuacaucgacaagcagcugcugcccauccugaacaagcagagcugcagcaucagcaacaucgagaccgugaucgaguuccagcagaagaacaacagacugcuggagaucaccagagaguucagcgugaacgccggcgugaccacccccgugagcaccuacaugcugaccaacagcgagcugcugagccugaucaacgacaugcccaucaccaacgaccagaagaagcugaugagcaacaacgugcagaucgugagacagcagagcuacagcaucaugugcaucaucaaggaggaggugcuggccuacguggugcagcugccccuguacggcgugaucgacacccccugcuggaagcugcacaccagcccccugugcaccaccaacaccaaggagggcagcaacaucugccugaccagaaccgacagaggcugguacugcgacaacgccggcagcgugagcuucuucccccaggccgagaccugcaaggugcagagcaacagaguguucugcgacaccaugaacagcagaacccugcccagcgaggugaaccugugcaacguggacaucuucaaccccaaguacgacugcaagaucaugaccagcaagaccgacgugagcagcagcgugaucaccagccugggcgccaucgugagcugcuacggcaagaccaagugcaccgccagcaacaagugcagaggcaucaucaagaccuucagcaacggcugcgacuacgugagcaacaagggcguggacaccgugagcgugggcaacacccuguacuacgugaacaagcaggagggcaagagccuguacgugaagggcgagcccaucaucaacuucuacgacccccugguguuccccagcgacgaguucgacgccagcaucagccaggugaacgagaagaucaaccagagccuggccuucaucagaaagagcgacgagcugcugcacaacgugaacgccggcaagagcaccaccaacaucaugaucaccaccaucaucaucgugaucaucgugauccugcugagccugaucgccgugggccugcugcuguacugcaaggccagaugaggacuaguguccaccugucccuccugggcugcuggauugucucguuuuccugccaaauaaacaggaucagcgcuuuacagaucuaaaaaaaaaaaaaaaaaaaaaaaaaaaaaaaaaaaaaaaaaaaaaaaaaaaaaaaaaaaaaaaaugcaucccccccccccccccccccccccccccccccaaaggcucuuuucagagccaccagaauu

SEQ ID NO: 5757 - RNA, 1817 nt, Artificial Sequence
  mRNA product Design b-2 comprising derived and/or modified sequence from HRSV(A2)__F-del_DSCav1_mut5 (opt5)
gggagagccucugcuggaguccggggaguggcguuggcugcuagagcgaagcuuaccauggagcugcucauccugaaggccaacgcuauuaccacaauccuuacggccgugaccuucugcuuugcgagcggccagaauauuacagaagaguucuaccaauccaccuguucugcugucagcaaaggguaucuguccgcccucagaacaggaugguacaccucuguuaucacaauugaacugagcaacaucaaggagaauaaaugcaacggcaccgacgccaaggugaaacuuaucaagcaggaacuggauaaguauaaaaaugcugugacggagcuccagcugcugaugcaguccacccccgccacagggucuggaagcgcuauugccuccggcgucgcgguguguaagguucuccaccuggagggggaagugaacaaaaucaagagcgcccuucugucuaccaauaaagcugucgugucccucagcggaugcggcguuucugugcugacauuuaagguccuugaccugaagaacuacauugauaaacaacuccugccuauccugaauaagcaguccuguagcauuucuaacaucgagaccgugauugaguuccagcagaaaaauaaccggcuccuggaaaucacgcgcgaguuuuccgugaaugccggcgucacaaccccgguuagcacauauaugcuuaccaacuccgaacugcucucucugaucaaugacaugcccauuaccaacgaucaaaagaaacuuaugagcaacaaugugcagaucgugagacagcaguccuacagcauuaugugcaucauuaaggaggaaguccuggcuuaugugguucaacucccucuguacggggugaucgacacacccuguuggaaacugcauacgucuccucucugcaccacaaacaccaaggagggauccaauaucugucugacacggaccgaucgcggcugguacugcgacaacgccgggagcgucucuuucuuuccccaggcggaaacguguaaggugcagagcaauagaguuuucugcgauacaaugaacuccagaacccugccuucugaggugaaucucugcaacgucgacauuuuuaauccgaaauaugauuguaagaucaugaccagcaaaacagacguguccagcucugucauuaccucccugggagccaucgugagcugcuacggcaagacaaaauguacggcuucuaacaagugccgggggauuaucaagaccuucuccaauggaugugauuauguuagcaacaaaggcguggacacagucuccgugggcaauacccuuuacuauguuaacaagcaagaggggaaaucucuguacgugaagggagaacccaucauuaauuuuuaugacccucucgucuuccccagcgaugaguuugacgccuccaucucucaggugaacgagaaaauuaaccagagccuggcuuucauccgcaaguccgaugaacugcuccacaaugugaacgccggcaagagcacaaccaauauuaugaucacgaccauuaucaucguuauuaucgucauucugcuuucucugaucgccguggggcuccugcuguacugcaaagcuagaugaggacuaguguccaccugucccuccugggcugcuggauugucucguuuuccugccaaauaaacaggaucagcgcuuuacagaucuaaaaaaaaaaaaaaaaaaaaaaaaaaaaaaaaaaaaaaaaaaaaaaaaaaaaaaaaaaaaaaaaugcaucccccccccccccccccccccccccccccccaaaggcucuuuucagagccaccagaauu

SEQ ID NO: 5758 - RNA, 1817 nt, Artificial Sequence
  mRNA product Design b-2 comprising derived and/or modified sequence from HRSV(A2)__F-del_DSCav1_mut5 (opt6)
gggagagccucugcuggaguccggggaguggcguuggcugcuagagcgaagcuuaccauggaacuuuuaauacugaaagcaaaugccaucacaaccauacuaacugccgucacauucugcuuugcaucaggacaaaacauaacagaagaauuuuaccaauccacaugcucagcaguaucaaaaggauaucuaucggcacuuagaacuggaugguacacaaguguuauaacuauagaacucucaaacauaaaagaaaacaaaugcaauggaacagacgcaaaaguaaaacuaauaaaacaagaacucgauaaauauaaaaaugcaguaaccgaacuacaacuauuaaugcaaagcacacccgcaacaggcagcggaucagcaauagcaagcggagucgcaguauguaaaguacuacaucuagaaggagaagucaacaaaaucaaaucugcacuucuauccacaaacaaagcuguaguaucccuauccggaugcggagucucaguauuaacuuuuaaaguacuagaccuuaaaaacuacauagauaaacaacuauuaccaauacuaaauaaacaaucaugcagcauauccaauauagagacaguaauugaauuucaacaaaaaaacaacagauuacuagaaauuacucgugaauuuuccguaaaugccggagucacaacaccaguaucaaccuauaugcuaacaaacagcgaacuacuuagcuuaauaaaugacaugccaauaacaaaugaccaaaaaaaacuuaugucaaauaacguacaaaucgucagacaacaauccuacucuauaauguguauaauuaaagaagaaguccuagcauacguaguucaauuaccacucuauggaguaauagauacaccaugcuggaaacuacacacgucaccacuauguacaacaaacacaaaagaaggauccaauauaugccuaacaagaaccgacagaggcugguauugugacaacgcaggauccguuucauucuucccacaagcagaaaccuguaaaguacaaucuaauagaguauuuugcgacacaaugaacaguagaacacuaccaagcgagguuaaucuauguaacguagacauauucaauccaaaauaugauugcaaaauaaugacaucaaaaacagauguaucgucgaguguaauaacaagucugggagcuauaguaagcugcuacggcaagacgaaauguaccgcuucaaauaaaugcagaggaaucauuaaaacauucucgaacggaugcgacuacguaaguaauaaaggugucgacaccguaucaguagggaauacauuauacuacgucaacaaacaagaaggaaaaucucuauauguaaaaggagaaccaauaauaaauuucuaugacccucuaguauucccaucagaugaauuugacgcuuccauaucacaaguaaacgaaaaaaucaaucaaucuuuagcauucauacgaaaaagugaugaacuccuacacaacgucaacgcaggaaaaagcacaacaaauauaaugaucacaacaaucaucauaguaauaauaguaauacuacuaucauuaauagcaguaggauuauugcuuuacugcaaagcacgauagggacuaguguccaccugucccuccugggcugcuggauugucucguuuuccugccaaauaaacaggaucagcgcuuuacagaucuaaaaaaaaaaaaaaaaaaaaaaaaaaaaaaaaaaaaaaaaaaaaaaaaaaaaaaaaaaaaaaaaugcaucccccccccccccccccccccccccccccccaaaggcucuuuucagagccaccagaauu

SEQ ID NO: 5759 - RNA, 1817 nt, Artificial Sequence
  mRNA product Design b-2 comprising derived and/or modified sequence from HRSV(A2)__F-del_DSCav1_mut5 (opt11)
gggagagccucugcuggaguccggggaguggcguuggcugcuagagcgaagcuuaccauggaacuccucauccucaaagccaacgccauaaccacaauacucaccgccguaaccuucugcuuugcgucgggacaaaacaucaccgaagaguucuaccaauccacuugcuccgcaguaagcaaaggauaccucuccgcccugcgaaccgguugguacacaucagucaucacaaucgaacucucaaacauaaaagaaaacaaaugcaacggcaccgacgcaaaggucaaauuaaucaagcaagaacuagacaaauacaaaaacgccgucacagaacuccagcugcuaaugcagagcacacccgcaacuggcagcggauccgccaucgcaucaggagucgccgugugcaaaguccuacaccucgaaggagaagugaacaaaaucaaaucagcccuacucuccaccaacaaggccgucgucucccucuccggcugcggugucuccguccuaaccuucaaagugcuagaccucaagaacuacaucgacaaacaacuccuaccaauacucaacaagcaaucuugcuccaucuccaacaucgaaaccguaaucgaguuccaacagaagaacaaccgccuccucgaaaucacccgcgaguucucugucaacgcaggggucaccacucccgucuccacauacaugcucacaaacuccgaacuccucagccucaucaacgacaugcccauaaccaacgaccagaaaaagcuaaugagcaauaacguccaaaucguuagacaacaaaguuauuccaucaugugcaucaucaaagaagaaguccucgccuacgucguacaacucccccucuauggcgucaucgacacccccugcuggaaacugcacacaucaccccucugcaccacaaacaccaaagaaggcucaaacaucugccuaacucgcaccgaccgcggcugguacugcgacaacgccggcagcguaucauucuuuccccaagccgaaacaugcaaaguucaauccaaccgcgucuucugcgacacaaugaacuccagaacgcuccccagcgaagucaaccucuguaacguagacaucuucaacccuaaguacgacugcaaaaucaugaccuccaaaacugauguauccuccuccgucaucacaucccugggcgccaucgucagcugcuacggcaaaacaaaaugcacugccucaaacaaaugccgagguaucauaaagaccuucucaaacggaugcgauuacgucagcaacaaaggcgucgacaccgucagugucggcaacacccucuacuacgucaacaaacaagaaggaaaaucccucuacgucaaaggcgaacccaucaucaacuucuacgacccccucgucuuccccagcgacgaguucgacgccuccaucucacaagucaacgaaaagauaaaccaaucucuagccuucauccgcaaauccgaugaacuccugcauaacgucaacgccggcaaauccaccacaaacaucaugaucacuaccauaaucaucgucauaaucguaauccuccuaucucuuaucgcagucggccuacuacucuacugcaaagcccgcuaaggacuaguguccaccugucccuccugggcugcuggauugucucguuuuccugccaaauaaacaggaucagcgcuuuacagaucuaaaaaaaaaaaaaaaaaaaaaaaaaaaaaaaaaaaaaaaaaaaaaaaaaaaaaaaaaaaaaaaaugcaucccccccccccccccccccccccccccccccaaaggcucuuuucagagccaccagaauu

SEQ ID NO: 5760 - RNA, 1837 nt, Artificial Sequence
  mRNA product Design b-3 comprising derived and/or modified sequence from HRSV(A2)__F-del_DSCav1_mut5 (opt1)
gggagagucccgcagucggcguccagcggcucugcuuguucgugugugugucguugcaggccuuauucaagcuuaccauggagcugcucauccugaaggccaacgccaucaccaccauccugacggcggugaccuucugcuucgccagcggccagaacaucaccgaggaguucuaccaguccacgugcagcgccgucuccaagggguaccucagcgcccugcggaccggcugguacaccuccgugaucaccaucgagcugagcaacaucaaggagaacaagugcaacgggaccgacgccaaggugaagcucaucaagcaggagcuggacaaguacaagaacgcggucacggagcugcagcuccugaugcaguccaccccggcaaccggcuccggcuccgccaucgcgagcggcgucgccgugugcaaggugcugcaccucgagggggaggucaacaagaucaagagcgcccugcuguccaccaacaaggccguggugagccucuccggcugcggcgucagcgugcugaccuucaaggugcuggaccucaagaacuacaucgacaagcagcugcugcccauccugaacaagcagagcugcuccaucagcaacaucgagacggugaucgaguuccagcagaagaacaaccggcuccuggagaucacccgcgaguucagcgugaacgccggggucaccacccccguguccacguacaugcugaccaacagcgagcuccugucccugaucaacgacaugccgaucaccaacgaccagaagaagcucaugagcaacaacgugcagaucguccggcagcaguccuacagcaucaugugcaucaucaaggaggaggugcuggcguacgugguccagcugccccucuacggcgugaucgacacccccugcuggaagcugcacacgagcccccugugcaccaccaacaccaaggagggguccaacaucugccucacgcgcaccgaccggggcugguacugcgacaacgccggcagcgucuccuucuucccgcaggccgagaccugcaaggugcagagcaaccgcguguucugcgacaccaugaacucccggacgcugcccagcgagguaaaccucugcaacgucgacaucuucaaccccaaguacgacugcaagaucaugaccuccaagaccgacgugagcuccagcgugaucaccucccugggggccaucgucagcugcuacggcaagacgaagugcaccgccagcaacaagugccgggggaucaucaagaccuucuccaacggcugcgacuacgugagcaacaagggcguggacaccguguccgucgggaacacccuguacuacgugaacaagcaggagggcaagagccucuacgugaagggggagcccaucaucaacuucuacgacccgcuggucuuccccuccgacgaguucgacgcgagcaucucccaggugaacgagaagaucaaccagagccuggccuucauccgcaaguccgacgagcugcuccacaacgugaacgccggcaagagcacgaccaacaucaugaucaccaccaucaucaucgucaucaucgugauccugcugucccucaucgccguggggcugcugcucuacugcaaggcccggugaggacuaguguccaccugucccuccugggcugcuggauugucucguuuuccugccaaauaaacaggaucagcgcuuuacagaucuaaaaaaaaaaaaaaaaaaaaaaaaaaaaaaaaaaaaaaaaaaaaaaaaaaaaaaaaaaaaaaaaugcaucccccccccccccccccccccccccccccccaaaggcucuuuucagagccaccagaauu

SEQ ID NO: 5761 - RNA, 1837 nt, Artificial Sequence
  mRNA product Design b-3 comprising derived and/or modified sequence from HRSV(A2)__F-del_DSCav1_mut5 (opt1)
gggagagucccgcagucggcguccagcggcucugcuuguucgugugugugucguugcaggccuuauucaagcuuaccauggagcugcucauccugaaggccaacgccaucaccaccauccugacggcggugaccuucugcuucgccagcggccagaacaucaccgaggaguucuaccaguccacgugcagcgccgucuccaagggguaccucagcgcccugcgcaccggcugguacaccuccgugaucaccaucgagcugagcaacaucaaggagaacaagugcaacgggaccgacgccaaggugaagcucaucaagcaggagcuggacaaguacaagaacgcggucacggagcugcagcuccugaugcaguccacccccgccaccggcagcggguccgccaucgccagcggcguggcggugugcaagguccugcaccucgagggcgaggugaacaagaucaaguccgcccugcugagcaccaacaaggccguggucucccucagcgggugcggcguguccgugcugacguucaagguccuggaccucaagaacuacaucgacaagcagcugcugccgauccucaacaagcagagcugcuccaucagcaacaucgagaccgugaucgaguuccagcagaagaacaaccggcugcuggagaucacccgcgaguucuccgugaacgccggggucaccacgcccgugagcaccuacaugcucaccaacagcgagcugcugucccucaucaacgacaugcccaucaccaacgaccagaagaagcugaugagcaacaacgugcagaucguccggcagcaguccuacagcaucaugugcaucaucaaggaggaggugcuggccuacgugguccagcucccccuguacggcgugaucgacacgccgugcuggaagcugcacaccagcccccucugcaccaccaacacgaaggagggguccaacaucugccugacccgcaccgaccggggcugguacugcgacaacgcgggcuccgugagcuucuucccccaggccgagaccugcaagguccaguccaaccgcguguucugcgacacgaugaacagccggacccuccccuccgaggucaaccugugcaacguggacaucuucaacccgaaguacgacugcaagaucaugaccagcaagaccgacguguccagcuccgucaucacgagccugggggccaucguguccugcuacggcaagaccaagugcaccgccagcaacaagugccgggggaucaucaagaccuucuccaacggcugcgacuacgugagcaacaagggcgucgacacggugagcguggggaacacccucuacuacgucaacaagcaggagggcaagucccuguacgugaagggggagcccaucaucaacuucuacgacccccugguguuccccagcgacgaguucgacgccuccaucagccaggucaacgagaagaucaaccagucccucgcguucauccgcaagagcgacgagcugcugcacaacgugaacgccggcaaguccaccaccaacaucaugaucaccacgaucaucaucgugaucaucgucauccuccugagccugaucgccguggggcuccugcuguacugcaaggcccggugaggacuaguguccaccugucccuccugggcugcuggauugucucguuuuccugccaaauaaacaggaucagcgcuuuacagaucuaaaaaaaaaaaaaaaaaaaaaaaaaaaaaaaaaaaaaaaaaaaaaaaaaaaaaaaaaaaaaaaaugcaucccccccccccccccccccccccccccccccaaaggcucuuuucagagccaccagaauu

SEQ ID NO: 5762 - RNA, 1837 nt, Artificial Sequence
  mRNA product Design b-3 comprising derived and/or modified sequence from HRSV(A2)__F-del_DSCav1_mut5 (opt2)
gggagagucccgcagucggcguccagcggcucugcuuguucgugugugugucguugcaggccuuauucaagcuuaccauggagcuccucauccucaaggccaacgccaucaccaccauccucaccgccgucaccuucugcuucgccuccggccagaacaucaccgaggaguucuaccaguccaccugcuccgccgucuccaagggcuaccucuccgcccuccgcaccggcugguacaccuccgucaucaccaucgagcucuccaacaucaaggagaacaagugcaacggcaccgacgccaaggucaagcucaucaagcaggagcucgacaaguacaagaacgccgucaccgagcuccagcuccucaugcaguccacccccgccaccggcuccggcuccgccaucgccuccggcgucgccgucugcaagguccuccaccucgagggcgaggucaacaagaucaaguccgcccuccucuccaccaacaaggccgucgucucccucuccggcugcggcgucuccguccucaccuucaagguccucgaccucaagaacuacaucgacaagcagcuccuccccauccucaacaagcaguccugcuccaucuccaacaucgagaccgucaucgaguuccagcagaagaacaaccgccuccucgagaucacccgcgaguucuccgucaacgccggcgucaccacccccgucuccaccuacaugcucaccaacuccgagcuccucucccucaucaacgacaugcccaucaccaacgaccagaagaagcucauguccaacaacguccagaucguccgccagcaguccuacuccaucaugugcaucaucaaggaggagguccucgccuacgucguccagcucccccucuacggcgucaucgacacccccugcuggaagcuccacaccuccccccucugcaccaccaacaccaaggagggcuccaacaucugccucacccgcaccgaccgcggcugguacugcgacaacgccggcuccgucuccuucuucccccaggccgagaccugcaagguccaguccaaccgcgucuucugcgacaccaugaacucccgcacccuccccuccgaggucaaccucugcaacgucgacaucuucaaccccaaguacgacugcaagaucaugaccuccaagaccgacgucuccuccuccgucaucaccucccucggcgccaucgucuccugcuacggcaagaccaagugcaccgccuccaacaagugccgcggcaucaucaagaccuucuccaacggcugcgacuacgucuccaacaagggcgucgacaccgucuccgucggcaacacccucuacuacgucaacaagcaggagggcaagucccucuacgucaagggcgagcccaucaucaacuucuacgacccccucgucuuccccuccgacgaguucgacgccuccaucucccaggucaacgagaagaucaaccagucccucgccuucauccgcaaguccgacgagcuccuccacaacgucaacgccggcaaguccaccaccaacaucaugaucaccaccaucaucaucgucaucaucgucauccuccucucccucaucgccgucggccuccuccucuacugcaaggcccgcugaggacuaguguccaccugucccuccugggcugcuggauugucucguuuuccugccaaauaaacaggaucagcgcuuuacagaucuaaaaaaaaaaaaaaaaaaaaaaaaaaaaaaaaaaaaaaaaaaaaaaaaaaaaaaaaaaaaaaaaugcaucccccccccccccccccccccccccccccccaaaggcucuuuucagagccaccagaauu

SEQ ID NO: 5763 - RNA, 1837 nt, Artificial Sequence
  mRNA product Design b-3 comprising derived and/or modified sequence from HRSV(A2)__F-del_DSCav1_mut5 (opt3)
gggagagucccgcagucggcguccagcggcucugcuuguucgugugugugucguugcaggccuuauucaagcuuaccauggagcugcucauccuuaaggccaacgcuauuaccacaauacugacugcagugacguucugcuuugccagcggccagaauaucaccgaagaguucuaccaauccacauguucugcggucucaaaaggguauuugagugcuuuaagaacuggaugguacaccagcguuauuacaaucgaacuguccaacauuaaggagaauaaaugcaacgguaccgacgccaaggugaaacuaaucaagcaggaacucgauaaguauaaaaaugcaguaacugagcugcagcuucugaugcagucuacacccgccaccggcucggggucagcuauagcaagcggaguggccgucuguaagguguugcaccucgagggcgaaguuaacaaaaucaagagugcucugcuguccacgaauaaagccguggucucucucagcgguugcgggguguccguauuaacuuuuaagguucuggaccuuaagaacuacauugauaaacaauugcugccuauccuaaauaagcagucauguaguauuagcaacaucgagaccgugauagaguuccagcagaaaaauaacaggcuccuggaaauuacacgggaguuuucugucaaugcgggagugacuaccccaguguccacauauaugcuuaccaacucagaacuguugagccucaucaaugacaugccgauuacgaacgaucaaaagaaacugaugaguaacaauguccagaucguucgccagcagucuuacuccaucaugugcauuauaaaggaggaaguguuagcauauguagugcaacugccccucuacggcgucaucgacacuccuuguuggaaacuucauacaagcccacugugcaccacuaacacaaaggagggcucgaauauuuguuugacccgaacggaucgugggugguacugcgacaacgccggaucuguguccuucuuuccccaggcugaaaccuguaagguucagucaaauagaguguucugcgauacaaugaacaguagaacucugccuagcgaggucaaucucugcaacguggacaucuuuaauccaaaauaugauuguaagauaaugaccuccaaaacagacguaucuagcucaguuauuaccagucugggugccaucguguccugcuacggcaagacuaaauguacagcaagcaacaagugcagggggaucauuaagaccuucucuaauggaugugauuaugucucaaacaaaggcguggacacugucaguguggguaauacgcuuuacuauguuaacaagcaagaggggaaaagccuguacgugaagggagaacccaucauuaauuuuuaugacccuuugguauucccauccgaugaguuugacgcuucuauaucgcaggucaacgagaaaaucaaccagagccucgccuucauucggaaguccgaugaacuguuacacaaugugaacgcgggcaagucaacaaccaauaucaugaucacuaccauuauaaucguuauuaucgugauucugcuaagucucaucgccgucggccugcuuuuguacugcaaagcacgcugaggacuaguguccaccugucccuccugggcugcuggauugucucguuuuccugccaaauaaacaggaucagcgcuuuacagaucuaaaaaaaaaaaaaaaaaaaaaaaaaaaaaaaaaaaaaaaaaaaaaaaaaaaaaaaaaaaaaaaaugcaucccccccccccccccccccccccccccccccaaaggcucuuuucagagccaccagaauu

SEQ ID NO: 5764 - RNA, 1837 nt, Artificial Sequence
  mRNA product Design b-3 comprising derived and/or modified sequence from HRSV(A2)__F-del_DSCav1_mut5 (opt4)
gggagagucccgcagucggcguccagcggcucugcuuguucgugugugugucguugcaggccuuauucaagcuuaccauggagcugcugauccugaaggccaacgccaucaccaccauccugaccgccgugaccuucugcuucgccagcggccagaacaucaccgaggaguucuaccagagcaccugcagcgccgugagcaagggcuaccugagcgcccugagaaccggcugguacaccagcgugaucaccaucgagcugagcaacaucaaggagaacaagugcaacggcaccgacgccaaggugaagcugaucaagcaggagcuggacaaguacaagaacgccgugaccgagcugcagcugcugaugcagagcacccccgccaccggcagcggcagcgccaucgccagcggcguggccgugugcaaggugcugcaccuggagggcgaggugaacaagaucaagagcgcccugcugagcaccaacaaggccguggugagccugagcggcugcggcgugagcgugcugaccuucaaggugcuggaccugaagaacuacaucgacaagcagcugcugcccauccugaacaagcagagcugcagcaucagcaacaucgagaccgugaucgaguuccagcagaagaacaacagacugcuggagaucaccagagaguucagcgugaacgccggcgugaccacccccgugagcaccuacaugcugaccaacagcgagcugcugagccugaucaacgacaugcccaucaccaacgaccagaagaagcugaugagcaacaacgugcagaucgugagacagcagagcuacagcaucaugugcaucaucaaggaggaggugcuggccuacguggugcagcugccccuguacggcgugaucgacacccccugcuggaagcugcacaccagcccccugugcaccaccaacaccaaggagggcagcaacaucugccugaccagaaccgacagaggcugguacugcgacaacgccggcagcgugagcuucuucccccaggccgagaccugcaaggugcagagcaacagaguguucugcgacaccaugaacagcagaacccugcccagcgaggugaaccugugcaacguggacaucuucaaccccaaguacgacugcaagaucaugaccagcaagaccgacgugagcagcagcgugaucaccagccugggcgccaucgugagcugcuacggcaagaccaagugcaccgccagcaacaagugcagaggcaucaucaagaccuucagcaacggcugcgacuacgugagcaacaagggcguggacaccgugagcgugggcaacacccuguacuacgugaacaagcaggagggcaagagccuguacgugaagggcgagcccaucaucaacuucuacgacccccugguguuccccagcgacgaguucgacgccagcaucagccaggugaacgagaagaucaaccagagccuggccuucaucagaaagagcgacgagcugcugcacaacgugaacgccggcaagagcaccaccaacaucaugaucaccaccaucaucaucgugaucaucgugauccugcugagccugaucgccgugggccugcugcuguacugcaaggccagaugaggacuaguguccaccugucccuccugggcugcuggauugucucguuuuccugccaaauaaacaggaucagcgcuuuacagaucuaaaaaaaaaaaaaaaaaaaaaaaaaaaaaaaaaaaaaaaaaaaaaaaaaaaaaaaaaaaaaaaaugcaucccccccccccccccccccccccccccccccaaaggcucuuuucagagccaccagaauu

SEQ ID NO: 5765 - RNA, 1837 nt, Artificial Sequence
  mRNA product Design b-3 comprising derived and/or modified sequence from HRSV(A2)__F-del_DSCav1_mut5 (opt5)
gggagagucccgcagucggcguccagcggcucugcuuguucgugugugugucguugcaggccuuauucaagcuuaccauggagcugcucauccugaaggccaacgcuauuaccacaauccuuacggccgugaccuucugcuuugcgagcggccagaauauuacagaagaguucuaccaauccaccuguucugcugucagcaaaggguaucuguccgcccucagaacaggaugguacaccucuguuaucacaauugaacugagcaacaucaaggagaauaaaugcaacggcaccgacgccaaggugaaacuuaucaagcaggaacuggauaaguauaaaaaugcugugacggagcuccagcugcugaugcaguccacccccgccacagggucuggaagcgcuauugccuccggcgucgcgguguguaagguucuccaccuggagggggaagugaacaaaaucaagagcgcccuucugucuaccaauaaagcugucgugucccucagcggaugcggcguuucugugcugacauuuaagguccuugaccugaagaacuacauugauaaacaacuccugccuauccugaauaagcaguccuguagcauuucuaacaucgagaccgugauugaguuccagcagaaaaauaaccggcuccuggaaaucacgcgcgaguuuuccgugaaugccggcgucacaaccccgguuagcacauauaugcuuaccaacuccgaacugcucucucugaucaaugacaugcccauuaccaacgaucaaaagaaacuuaugagcaacaaugugcagaucgugagacagcaguccuacagcauuaugugcaucauuaaggaggaaguccuggcuuaugugguucaacucccucuguacggggugaucgacacacccuguuggaaacugcauacgucuccucucugcaccacaaacaccaaggagggauccaauaucugucugacacggaccgaucgcggcugguacugcgacaacgccgggagcgucucuuucuuuccccaggcggaaacguguaaggugcagagcaauagaguuuucugcgauacaaugaacuccagaacccugccuucugaggugaaucucugcaacgucgacauuuuuaauccgaaauaugauuguaagaucaugaccagcaaaacagacguguccagcucugucauuaccucccugggagccaucgugagcugcuacggcaagacaaaauguacggcuucuaacaagugccgggggauuaucaagaccuucuccaauggaugugauuauguuagcaacaaaggcguggacacagucuccgugggcaauacccuuuacuauguuaacaagcaagaggggaaaucucuguacgugaagggagaacccaucauuaauuuuuaugacccucucgucuuccccagcgaugaguuugacgccuccaucucucaggugaacgagaaaauuaaccagagccuggcuuucauccgcaaguccgaugaacugcuccacaaugugaacgccggcaagagcacaaccaauauuaugaucacgaccauuaucaucguuauuaucgucauucugcuuucucugaucgccguggggcuccugcuguacugcaaagcuagaugaggacuaguguccaccugucccuccugggcugcuggauugucucguuuuccugccaaauaaacaggaucagcgcuuuacagaucuaaaaaaaaaaaaaaaaaaaaaaaaaaaaaaaaaaaaaaaaaaaaaaaaaaaaaaaaaaaaaaaaugcaucccccccccccccccccccccccccccccccaaaggcucuuuucagagccaccagaauu

SEQ ID NO: 5766 - RNA, 1837 nt, Artificial Sequence
  mRNA product Design b-3 comprising derived and/or modified sequence from HRSV(A2)__F-del_DSCav1_mut5 (opt6)
gggagagucccgcagucggcguccagcggcucugcuuguucgugugugugucguugcaggccuuauucaagcuuaccauggaacuuuuaauacugaaagcaaaugccaucacaaccauacuaacugccgucacauucugcuuugcaucaggacaaaacauaacagaagaauuuuaccaauccacaugcucagcaguaucaaaaggauaucuaucggcacuuagaacuggaugguacacaaguguuauaacuauagaacucucaaacauaaaagaaaacaaaugcaauggaacagacgcaaaaguaaaacuaauaaaacaagaacucgauaaauauaaaaaugcaguaaccgaacuacaacuauuaaugcaaagcacacccgcaacaggcagcggaucagcaauagcaagcggagucgcaguauguaaaguacuacaucuagaaggagaagucaacaaaaucaaaucugcacuucuauccacaaacaaagcuguaguaucccuauccggaugcggagucucaguauuaacuuuuaaaguacuagaccuuaaaaacuacauagauaaacaacuauuaccaauacuaaauaaacaaucaugcagcauauccaauauagagacaguaauugaauuucaacaaaaaaacaacagauuacuagaaauuacucgugaauuuuccguaaaugccggagucacaacaccaguaucaaccuauaugcuaacaaacagcgaacuacuuagcuuaauaaaugacaugccaauaacaaaugaccaaaaaaaacuuaugucaaauaacguacaaaucgucagacaacaauccuacucuauaauguguauaauuaaagaagaaguccuagcauacguaguucaauuaccacucuauggaguaauagauacaccaugcuggaaacuacacacgucaccacuauguacaacaaacacaaaagaaggauccaauauaugccuaacaagaaccgacagaggcugguauugugacaacgcaggauccguuucauucuucccacaagcagaaaccuguaaaguacaaucuaauagaguauuuugcgacacaaugaacaguagaacacuaccaagcgagguuaaucuauguaacguagacauauucaauccaaaauaugauugcaaaauaaugacaucaaaaacagauguaucgucgaguguaauaacaagucugggagcuauaguaagcugcuacggcaagacgaaauguaccgcuucaaauaaaugcagaggaaucauuaaaacauucucgaacggaugcgacuacguaaguaauaaaggugucgacaccguaucaguagggaauacauuauacuacgucaacaaacaagaaggaaaaucucuauauguaaaaggagaaccaauaauaaauuucuaugacccucuaguauucccaucagaugaauuugacgcuuccauaucacaaguaaacgaaaaaaucaaucaaucuuuagcauucauacgaaaaagugaugaacuccuacacaacgucaacgcaggaaaaagcacaacaaauauaaugaucacaacaaucaucauaguaauaauaguaauacuacuaucauuaauagcaguaggauuauugcuuuacugcaaagcacgauagggacuaguguccaccugucccuccugggcugcuggauugucucguuuuccugccaaauaaacaggaucagcgcuuuacagaucuaaaaaaaaaaaaaaaaaaaaaaaaaaaaaaaaaaaaaaaaaaaaaaaaaaaaaaaaaaaaaaaaugcaucccccccccccccccccccccccccccccccaaaggcucuuuucagagccaccagaauu

SEQ ID NO: 5767 - RNA, 1837 nt, Artificial Sequence
  mRNA product Design b-3 comprising derived and/or modified sequence from HRSV(A2)__F-del_DSCav1_mut5 (opt11)
gggagagucccgcagucggcguccagcggcucugcuuguucgugugugugucguugcaggccuuauucaagcuuaccauggaacuccucauccucaaagccaacgccauaaccacaauacucaccgccguaaccuucugcuuugcgucgggacaaaacaucaccgaagaguucuaccaauccacuugcuccgcaguaagcaaaggauaccucuccgcccugcgaaccgguugguacacaucagucaucacaaucgaacucucaaacauaaaagaaaacaaaugcaacggcaccgacgcaaaggucaaauuaaucaagcaagaacuagacaaauacaaaaacgccgucacagaacuccagcugcuaaugcagagcacacccgcaacuggcagcggauccgccaucgcaucaggagucgccgugugcaaaguccuacaccucgaaggagaagugaacaaaaucaaaucagcccuacucuccaccaacaaggccgucgucucccucuccggcugcggugucuccguccuaaccuucaaagugcuagaccucaagaacuacaucgacaaacaacuccuaccaauacucaacaagcaaucuugcuccaucuccaacaucgaaaccguaaucgaguuccaacagaagaacaaccgccuccucgaaaucacccgcgaguucucugucaacgcaggggucaccacucccgucuccacauacaugcucacaaacuccgaacuccucagccucaucaacgacaugcccauaaccaacgaccagaaaaagcuaaugagcaauaacguccaaaucguuagacaacaaaguuauuccaucaugugcaucaucaaagaagaaguccucgccuacgucguacaacucccccucuauggcgucaucgacacccccugcuggaaacugcacacaucaccccucugcaccacaaacaccaaagaaggcucaaacaucugccuaacucgcaccgaccgcggcugguacugcgacaacgccggcagcguaucauucuuuccccaagccgaaacaugcaaaguucaauccaaccgcgucuucugcgacacaaugaacuccagaacgcuccccagcgaagucaaccucuguaacguagacaucuucaacccuaaguacgacugcaaaaucaugaccuccaaaacugauguauccuccuccgucaucacaucccugggcgccaucgucagcugcuacggcaaaacaaaaugcacugccucaaacaaaugccgagguaucauaaagaccuucucaaacggaugcgauuacgucagcaacaaaggcgucgacaccgucagugucggcaacacccucuacuacgucaacaaacaagaaggaaaaucccucuacgucaaaggcgaacccaucaucaacuucuacgacccccucgucuuccccagcgacgaguucgacgccuccaucucacaagucaacgaaaagauaaaccaaucucuagccuucauccgcaaauccgaugaacuccugcauaacgucaacgccggcaaauccaccacaaacaucaugaucacuaccauaaucaucgucauaaucguaauccuccuaucucuuaucgcagucggccuacuacucuacugcaaagcccgcuaaggacuaguguccaccugucccuccugggcugcuggauugucucguuuuccugccaaauaaacaggaucagcgcuuuacagaucuaaaaaaaaaaaaaaaaaaaaaaaaaaaaaaaaaaaaaaaaaaaaaaaaaaaaaaaaaaaaaaaaugcaucccccccccccccccccccccccccccccccaaaggcucuuuucagagccaccagaauu

SEQ ID NO: 5768 - RNA, 1888 nt, Artificial Sequence
  mRNA product Design b-4 comprising derived and/or modified sequence from HRSV(A2)__F-del_DSCav1_mut5 (opt1)
gggagagucccgcagucggcguccagcggcucugcuuguucgugugugugucguugcaggccuuauucaagcuuaccauggagcugcucauccugaaggccaacgccaucaccaccauccugacggcggugaccuucugcuucgccagcggccagaacaucaccgaggaguucuaccaguccacgugcagcgccgucuccaagggguaccucagcgcccugcggaccggcugguacaccuccgugaucaccaucgagcugagcaacaucaaggagaacaagugcaacgggaccgacgccaaggugaagcucaucaagcaggagcuggacaaguacaagaacgcggucacggagcugcagcuccugaugcaguccaccccggcaaccggcuccggcuccgccaucgcgagcggcgucgccgugugcaaggugcugcaccucgagggggaggucaacaagaucaagagcgcccugcuguccaccaacaaggccguggugagccucuccggcugcggcgucagcgugcugaccuucaaggugcuggaccucaagaacuacaucgacaagcagcugcugcccauccugaacaagcagagcugcuccaucagcaacaucgagacggugaucgaguuccagcagaagaacaaccggcuccuggagaucacccgcgaguucagcgugaacgccggggucaccacccccguguccacguacaugcugaccaacagcgagcuccugucccugaucaacgacaugccgaucaccaacgaccagaagaagcucaugagcaacaacgugcagaucguccggcagcaguccuacagcaucaugugcaucaucaaggaggaggugcuggcguacgugguccagcugccccucuacggcgugaucgacacccccugcuggaagcugcacacgagcccccugugcaccaccaacaccaaggagggguccaacaucugccucacgcgcaccgaccggggcugguacugcgacaacgccggcagcgucuccuucuucccgcaggccgagaccugcaaggugcagagcaaccgcguguucugcgacaccaugaacucccggacgcugcccagcgagguaaaccucugcaacgucgacaucuucaaccccaaguacgacugcaagaucaugaccuccaagaccgacgugagcuccagcgugaucaccucccugggggccaucgucagcugcuacggcaagacgaagugcaccgccagcaacaagugccgggggaucaucaagaccuucuccaacggcugcgacuacgugagcaacaagggcguggacaccguguccgucgggaacacccuguacuacgugaacaagcaggagggcaagagccucuacgugaagggggagcccaucaucaacuucuacgacccgcuggucuuccccuccgacgaguucgacgcgagcaucucccaggugaacgagaagaucaaccagagccuggccuucauccgcaaguccgacgagcugcuccacaacgugaacgccggcaagagcacgaccaacaucaugaucaccaccaucaucaucgucaucaucgugauccugcugucccucaucgccguggggcugcugcucuacugcaaggcccggugaggacuaguaauaaggaaacuguaugaaugucugugggcaggaagugaagagauccuucuguaaagguuuuuggaauuaugucugcugaauaauaaacuuuuuugaaauaauaaaucugguagaaaaaugagaucuaaaaaaaaaaaaaaaaaaaaaaaaaaaaaaaaaaaaaaaaaaaaaaaaaaaaaaaaaaaaaaaaugcaucccccccccccccccccccccccccccccccaaaggcucuuuucagagccaccagaauu

SEQ ID NO: 5769 - RNA, 1888 nt, Artificial Sequence
  mRNA product Design b-4 comprising derived and/or modified sequence from HRSV(A2)__F-del_DSCav1_mut5 (opt1)
gggagagucccgcagucggcguccagcggcucugcuuguucgugugugugucguugcaggccuuauucaagcuuaccauggagcugcucauccugaaggccaacgccaucaccaccauccugacggcggugaccuucugcuucgccagcggccagaacaucaccgaggaguucuaccaguccacgugcagcgccgucuccaagggguaccucagcgcccugcgcaccggcugguacaccuccgugaucaccaucgagcugagcaacaucaaggagaacaagugcaacgggaccgacgccaaggugaagcucaucaagcaggagcuggacaaguacaagaacgcggucacggagcugcagcuccugaugcaguccacccccgccaccggcagcggguccgccaucgccagcggcguggcggugugcaagguccugcaccucgagggcgaggugaacaagaucaaguccgcccugcugagcaccaacaaggccguggucucccucagcgggugcggcguguccgugcugacguucaagguccuggaccucaagaacuacaucgacaagcagcugcugccgauccucaacaagcagagcugcuccaucagcaacaucgagaccgugaucgaguuccagcagaagaacaaccggcugcuggagaucacccgcgaguucuccgugaacgccggggucaccacgcccgugagcaccuacaugcucaccaacagcgagcugcugucccucaucaacgacaugcccaucaccaacgaccagaagaagcugaugagcaacaacgugcagaucguccggcagcaguccuacagcaucaugugcaucaucaaggaggaggugcuggccuacgugguccagcucccccuguacggcgugaucgacacgccgugcuggaagcugcacaccagcccccucugcaccaccaacacgaaggagggguccaacaucugccugacccgcaccgaccggggcugguacugcgacaacgcgggcuccgugagcuucuucccccaggccgagaccugcaagguccaguccaaccgcguguucugcgacacgaugaacagccggacccuccccuccgaggucaaccugugcaacguggacaucuucaacccgaaguacgacugcaagaucaugaccagcaagaccgacguguccagcuccgucaucacgagccugggggccaucguguccugcuacggcaagaccaagugcaccgccagcaacaagugccgggggaucaucaagaccuucuccaacggcugcgacuacgugagcaacaagggcgucgacacggugagcguggggaacacccucuacuacgucaacaagcaggagggcaagucccuguacgugaagggggagcccaucaucaacuucuacgacccccugguguuccccagcgacgaguucgacgccuccaucagccaggucaacgagaagaucaaccagucccucgcguucauccgcaagagcgacgagcugcugcacaacgugaacgccggcaaguccaccaccaacaucaugaucaccacgaucaucaucgugaucaucgucauccuccugagccugaucgccguggggcuccugcuguacugcaaggcccggugaggacuaguaauaaggaaacuguaugaaugucugugggcaggaagugaagagauccuucuguaaagguuuuuggaauuaugucugcugaauaauaaacuuuuuugaaauaauaaaucugguagaaaaaugagaucuaaaaaaaaaaaaaaaaaaaaaaaaaaaaaaaaaaaaaaaaaaaaaaaaaaaaaaaaaaaaaaaaugcaucccccccccccccccccccccccccccccccaaaggcucuuuucagagccaccagaauu

SEQ ID NO: 5770 - RNA, 1888 nt, Artificial Sequence
  mRNA product Design b-4 comprising derived and/or modified sequence from HRSV(A2)__F-del_DSCav1_mut5 (opt2)
gggagagucccgcagucggcguccagcggcucugcuuguucgugugugugucguugcaggccuuauucaagcuuaccauggagcuccucauccucaaggccaacgccaucaccaccauccucaccgccgucaccuucugcuucgccuccggccagaacaucaccgaggaguucuaccaguccaccugcuccgccgucuccaagggcuaccucuccgcccuccgcaccggcugguacaccuccgucaucaccaucgagcucuccaacaucaaggagaacaagugcaacggcaccgacgccaaggucaagcucaucaagcaggagcucgacaaguacaagaacgccgucaccgagcuccagcuccucaugcaguccacccccgccaccggcuccggcuccgccaucgccuccggcgucgccgucugcaagguccuccaccucgagggcgaggucaacaagaucaaguccgcccuccucuccaccaacaaggccgucgucucccucuccggcugcggcgucuccguccucaccuucaagguccucgaccucaagaacuacaucgacaagcagcuccuccccauccucaacaagcaguccugcuccaucuccaacaucgagaccgucaucgaguuccagcagaagaacaaccgccuccucgagaucacccgcgaguucuccgucaacgccggcgucaccacccccgucuccaccuacaugcucaccaacuccgagcuccucucccucaucaacgacaugcccaucaccaacgaccagaagaagcucauguccaacaacguccagaucguccgccagcaguccuacuccaucaugugcaucaucaaggaggagguccucgccuacgucguccagcucccccucuacggcgucaucgacacccccugcuggaagcuccacaccuccccccucugcaccaccaacaccaaggagggcuccaacaucugccucacccgcaccgaccgcggcugguacugcgacaacgccggcuccgucuccuucuucccccaggccgagaccugcaagguccaguccaaccgcgucuucugcgacaccaugaacucccgcacccuccccuccgaggucaaccucugcaacgucgacaucuucaaccccaaguacgacugcaagaucaugaccuccaagaccgacgucuccuccuccgucaucaccucccucggcgccaucgucuccugcuacggcaagaccaagugcaccgccuccaacaagugccgcggcaucaucaagaccuucuccaacggcugcgacuacgucuccaacaagggcgucgacaccgucuccgucggcaacacccucuacuacgucaacaagcaggagggcaagucccucuacgucaagggcgagcccaucaucaacuucuacgacccccucgucuuccccuccgacgaguucgacgccuccaucucccaggucaacgagaagaucaaccagucccucgccuucauccgcaaguccgacgagcuccuccacaacgucaacgccggcaaguccaccaccaacaucaugaucaccaccaucaucaucgucaucaucgucauccuccucucccucaucgccgucggccuccuccucuacugcaaggcccgcugaggacuaguaauaaggaaacuguaugaaugucugugggcaggaagugaagagauccuucuguaaagguuuuuggaauuaugucugcugaauaauaaacuuuuuugaaauaauaaaucugguagaaaaaugagaucuaaaaaaaaaaaaaaaaaaaaaaaaaaaaaaaaaaaaaaaaaaaaaaaaaaaaaaaaaaaaaaaaugcaucccccccccccccccccccccccccccccccaaaggcucuuuucagagccaccagaauu

SEQ ID NO: 5771 - RNA, 1888 nt, Artificial Sequence
  mRNA product Design b-4 comprising derived and/or modified sequence from HRSV(A2)__F-del_DSCav1_mut5 (opt3)
gggagagucccgcagucggcguccagcggcucugcuuguucgugugugugucguugcaggccuuauucaagcuuaccauggagcugcucauccuuaaggccaacgcuauuaccacaauacugacugcagugacguucugcuuugccagcggccagaauaucaccgaagaguucuaccaauccacauguucugcggucucaaaaggguauuugagugcuuuaagaacuggaugguacaccagcguuauuacaaucgaacuguccaacauuaaggagaauaaaugcaacgguaccgacgccaaggugaaacuaaucaagcaggaacucgauaaguauaaaaaugcaguaacugagcugcagcuucugaugcagucuacacccgccaccggcucggggucagcuauagcaagcggaguggccgucuguaagguguugcaccucgagggcgaaguuaacaaaaucaagagugcucugcuguccacgaauaaagccguggucucucucagcgguugcgggguguccguauuaacuuuuaagguucuggaccuuaagaacuacauugauaaacaauugcugccuauccuaaauaagcagucauguaguauuagcaacaucgagaccgugauagaguuccagcagaaaaauaacaggcuccuggaaauuacacgggaguuuucugucaaugcgggagugacuaccccaguguccacauauaugcuuaccaacucagaacuguugagccucaucaaugacaugccgauuacgaacgaucaaaagaaacugaugaguaacaauguccagaucguucgccagcagucuuacuccaucaugugcauuauaaaggaggaaguguuagcauauguagugcaacugccccucuacggcgucaucgacacuccuuguuggaaacuucauacaagcccacugugcaccacuaacacaaaggagggcucgaauauuuguuugacccgaacggaucgugggugguacugcgacaacgccggaucuguguccuucuuuccccaggcugaaaccuguaagguucagucaaauagaguguucugcgauacaaugaacaguagaacucugccuagcgaggucaaucucugcaacguggacaucuuuaauccaaaauaugauuguaagauaaugaccuccaaaacagacguaucuagcucaguuauuaccagucugggugccaucguguccugcuacggcaagacuaaauguacagcaagcaacaagugcagggggaucauuaagaccuucucuaauggaugugauuaugucucaaacaaaggcguggacacugucaguguggguaauacgcuuuacuauguuaacaagcaagaggggaaaagccuguacgugaagggagaacccaucauuaauuuuuaugacccuuugguauucccauccgaugaguuugacgcuucuauaucgcaggucaacgagaaaaucaaccagagccucgccuucauucggaaguccgaugaacuguuacacaaugugaacgcgggcaagucaacaaccaauaucaugaucacuaccauuauaaucguuauuaucgugauucugcuaagucucaucgccgucggccugcuuuuguacugcaaagcacgcugaggacuaguaauaaggaaacuguaugaaugucugugggcaggaagugaagagauccuucuguaaagguuuuuggaauuaugucugcugaauaauaaacuuuuuugaaauaauaaaucugguagaaaaaugagaucuaaaaaaaaaaaaaaaaaaaaaaaaaaaaaaaaaaaaaaaaaaaaaaaaaaaaaaaaaaaaaaaaugcaucccccccccccccccccccccccccccccccaaaggcucuuuucagagccaccagaauu

SEQ ID NO: 5772 - RNA, 1888 nt, Artificial Sequence
  mRNA product Design b-4 comprising derived and/or modified sequence from HRSV(A2)__F-del_DSCav1_mut5 (opt4)
gggagagucccgcagucggcguccagcggcucugcuuguucgugugugugucguugcaggccuuauucaagcuuaccauggagcugcugauccugaaggccaacgccaucaccaccauccugaccgccgugaccuucugcuucgccagcggccagaacaucaccgaggaguucuaccagagcaccugcagcgccgugagcaagggcuaccugagcgcccugagaaccggcugguacaccagcgugaucaccaucgagcugagcaacaucaaggagaacaagugcaacggcaccgacgccaaggugaagcugaucaagcaggagcuggacaaguacaagaacgccgugaccgagcugcagcugcugaugcagagcacccccgccaccggcagcggcagcgccaucgccagcggcguggccgugugcaaggugcugcaccuggagggcgaggugaacaagaucaagagcgcccugcugagcaccaacaaggccguggugagccugagcggcugcggcgugagcgugcugaccuucaaggugcuggaccugaagaacuacaucgacaagcagcugcugcccauccugaacaagcagagcugcagcaucagcaacaucgagaccgugaucgaguuccagcagaagaacaacagacugcuggagaucaccagagaguucagcgugaacgccggcgugaccacccccgugagcaccuacaugcugaccaacagcgagcugcugagccugaucaacgacaugcccaucaccaacgaccagaagaagcugaugagcaacaacgugcagaucgugagacagcagagcuacagcaucaugugcaucaucaaggaggaggugcuggccuacguggugcagcugccccuguacggcgugaucgacacccccugcuggaagcugcacaccagcccccugugcaccaccaacaccaaggagggcagcaacaucugccugaccagaaccgacagaggcugguacugcgacaacgccggcagcgugagcuucuucccccaggccgagaccugcaaggugcagagcaacagaguguucugcgacaccaugaacagcagaacccugcccagcgaggugaaccugugcaacguggacaucuucaaccccaaguacgacugcaagaucaugaccagcaagaccgacgugagcagcagcgugaucaccagccugggcgccaucgugagcugcuacggcaagaccaagugcaccgccagcaacaagugcagaggcaucaucaagaccuucagcaacggcugcgacuacgugagcaacaagggcguggacaccgugagcgugggcaacacccuguacuacgugaacaagcaggagggcaagagccuguacgugaagggcgagcccaucaucaacuucuacgacccccugguguuccccagcgacgaguucgacgccagcaucagccaggugaacgagaagaucaaccagagccuggccuucaucagaaagagcgacgagcugcugcacaacgugaacgccggcaagagcaccaccaacaucaugaucaccaccaucaucaucgugaucaucgugauccugcugagccugaucgccgugggccugcugcuguacugcaaggccagaugaggacuaguaauaaggaaacuguaugaaugucugugggcaggaagugaagagauccuucuguaaagguuuuuggaauuaugucugcugaauaauaaacuuuuuugaaauaauaaaucugguagaaaaaugagaucuaaaaaaaaaaaaaaaaaaaaaaaaaaaaaaaaaaaaaaaaaaaaaaaaaaaaaaaaaaaaaaaaugcaucccccccccccccccccccccccccccccccaaaggcucuuuucagagccaccagaauu

SEQ ID NO: 5773 - RNA, 1888 nt, Artificial Sequence
  mRNA product Design b-4 comprising derived and/or modified sequence from HRSV(A2)__F-del_DSCav1_mut5 (opt5)
gggagagucccgcagucggcguccagcggcucugcuuguucgugugugugucguugcaggccuuauucaagcuuaccauggagcugcucauccugaaggccaacgcuauuaccacaauccuuacggccgugaccuucugcuuugcgagcggccagaauauuacagaagaguucuaccaauccaccuguucugcugucagcaaaggguaucuguccgcccucagaacaggaugguacaccucuguuaucacaauugaacugagcaacaucaaggagaauaaaugcaacggcaccgacgccaaggugaaacuuaucaagcaggaacuggauaaguauaaaaaugcugugacggagcuccagcugcugaugcaguccacccccgccacagggucuggaagcgcuauugccuccggcgucgcgguguguaagguucuccaccuggagggggaagugaacaaaaucaagagcgcccuucugucuaccaauaaagcugucgugucccucagcggaugcggcguuucugugcugacauuuaagguccuugaccugaagaacuacauugauaaacaacuccugccuauccugaauaagcaguccuguagcauuucuaacaucgagaccgugauugaguuccagcagaaaaauaaccggcuccuggaaaucacgcgcgaguuuuccgugaaugccggcgucacaaccccgguuagcacauauaugcuuaccaacuccgaacugcucucucugaucaaugacaugcccauuaccaacgaucaaaagaaacuuaugagcaacaaugugcagaucgugagacagcaguccuacagcauuaugugcaucauuaaggaggaaguccuggcuuaugugguucaacucccucuguacggggugaucgacacacccuguuggaaacugcauacgucuccucucugcaccacaaacaccaaggagggauccaauaucugucugacacggaccgaucgcggcugguacugcgacaacgccgggagcgucucuuucuuuccccaggcggaaacguguaaggugcagagcaauagaguuuucugcgauacaaugaacuccagaacccugccuucugaggugaaucucugcaacgucgacauuuuuaauccgaaauaugauuguaagaucaugaccagcaaaacagacguguccagcucugucauuaccucccugggagccaucgugagcugcuacggcaagacaaaauguacggcuucuaacaagugccgggggauuaucaagaccuucuccaauggaugugauuauguuagcaacaaaggcguggacacagucuccgugggcaauacccuuuacuauguuaacaagcaagaggggaaaucucuguacgugaagggagaacccaucauuaauuuuuaugacccucucgucuuccccagcgaugaguuugacgccuccaucucucaggugaacgagaaaauuaaccagagccuggcuuucauccgcaaguccgaugaacugcuccacaaugugaacgccggcaagagcacaaccaauauuaugaucacgaccauuaucaucguuauuaucgucauucugcuuucucugaucgccguggggcuccugcuguacugcaaagcuagaugaggacuaguaauaaggaaacuguaugaaugucugugggcaggaagugaagagauccuucuguaaagguuuuuggaauuaugucugcugaauaauaaacuuuuuugaaauaauaaaucugguagaaaaaugagaucuaaaaaaaaaaaaaaaaaaaaaaaaaaaaaaaaaaaaaaaaaaaaaaaaaaaaaaaaaaaaaaaaugcaucccccccccccccccccccccccccccccccaaaggcucuuuucagagccaccagaauu

SEQ ID NO: 5774 - RNA, 1888 nt, Artificial Sequence
  mRNA product Design b-4 comprising derived and/or modified sequence from HRSV(A2)__F-del_DSCav1_mut5 (opt6)
gggagagucccgcagucggcguccagcggcucugcuuguucgugugugugucguugcaggccuuauucaagcuuaccauggaacuuuuaauacugaaagcaaaugccaucacaaccauacuaacugccgucacauucugcuuugcaucaggacaaaacauaacagaagaauuuuaccaauccacaugcucagcaguaucaaaaggauaucuaucggcacuuagaacuggaugguacacaaguguuauaacuauagaacucucaaacauaaaagaaaacaaaugcaauggaacagacgcaaaaguaaaacuaauaaaacaagaacucgauaaauauaaaaaugcaguaaccgaacuacaacuauuaaugcaaagcacacccgcaacaggcagcggaucagcaauagcaagcggagucgcaguauguaaaguacuacaucuagaaggagaagucaacaaaaucaaaucugcacuucuauccacaaacaaagcuguaguaucccuauccggaugcggagucucaguauuaacuuuuaaaguacuagaccuuaaaaacuacauagauaaacaacuauuaccaauacuaaauaaacaaucaugcagcauauccaauauagagacaguaauugaauuucaacaaaaaaacaacagauuacuagaaauuacucgugaauuuuccguaaaugccggagucacaacaccaguaucaaccuauaugcuaacaaacagcgaacuacuuagcuuaauaaaugacaugccaauaacaaaugaccaaaaaaaacuuaugucaaauaacguacaaaucgucagacaacaauccuacucuauaauguguauaauuaaagaagaaguccuagcauacguaguucaauuaccacucuauggaguaauagauacaccaugcuggaaacuacacacgucaccacuauguacaacaaacacaaaagaaggauccaauauaugccuaacaagaaccgacagaggcugguauugugacaacgcaggauccguuucauucuucccacaagcagaaaccuguaaaguacaaucuaauagaguauuuugcgacacaaugaacaguagaacacuaccaagcgagguuaaucuauguaacguagacauauucaauccaaaauaugauugcaaaauaaugacaucaaaaacagauguaucgucgaguguaauaacaagucugggagcuauaguaagcugcuacggcaagacgaaauguaccgcuucaaauaaaugcagaggaaucauuaaaacauucucgaacggaugcgacuacguaaguaauaaaggugucgacaccguaucaguagggaauacauuauacuacgucaacaaacaagaaggaaaaucucuauauguaaaaggagaaccaauaauaaauuucuaugacccucuaguauucccaucagaugaauuugacgcuuccauaucacaaguaaacgaaaaaaucaaucaaucuuuagcauucauacgaaaaagugaugaacuccuacacaacgucaacgcaggaaaaagcacaacaaauauaaugaucacaacaaucaucauaguaauaauaguaauacuacuaucauuaauagcaguaggauuauugcuuuacugcaaagcacgauagggacuaguaauaaggaaacuguaugaaugucugugggcaggaagugaagagauccuucuguaaagguuuuuggaauuaugucugcugaauaauaaacuuuuuugaaauaauaaaucugguagaaaaaugagaucuaaaaaaaaaaaaaaaaaaaaaaaaaaaaaaaaaaaaaaaaaaaaaaaaaaaaaaaaaaaaaaaaugcaucccccccccccccccccccccccccccccccaaaggcucuuuucagagccaccagaauu

SEQ ID NO: 5775 - RNA, 1888 nt, Artificial Sequence
  mRNA product Design b-4 comprising derived and/or modified sequence from HRSV(A2)__F-del_DSCav1_mut5 (opt11)
gggagagucccgcagucggcguccagcggcucugcuuguucgugugugugucguugcaggccuuauucaagcuuaccauggaacuccucauccucaaagccaacgccauaaccacaauacucaccgccguaaccuucugcuuugcgucgggacaaaacaucaccgaagaguucuaccaauccacuugcuccgcaguaagcaaaggauaccucuccgcccugcgaaccgguugguacacaucagucaucacaaucgaacucucaaacauaaaagaaaacaaaugcaacggcaccgacgcaaaggucaaauuaaucaagcaagaacuagacaaauacaaaaacgccgucacagaacuccagcugcuaaugcagagcacacccgcaacuggcagcggauccgccaucgcaucaggagucgccgugugcaaaguccuacaccucgaaggagaagugaacaaaaucaaaucagcccuacucuccaccaacaaggccgucgucucccucuccggcugcggugucuccguccuaaccuucaaagugcuagaccucaagaacuacaucgacaaacaacuccuaccaauacucaacaagcaaucuugcuccaucuccaacaucgaaaccguaaucgaguuccaacagaagaacaaccgccuccucgaaaucacccgcgaguucucugucaacgcaggggucaccacucccgucuccacauacaugcucacaaacuccgaacuccucagccucaucaacgacaugcccauaaccaacgaccagaaaaagcuaaugagcaauaacguccaaaucguuagacaacaaaguuauuccaucaugugcaucaucaaagaagaaguccucgccuacgucguacaacucccccucuauggcgucaucgacacccccugcuggaaacugcacacaucaccccucugcaccacaaacaccaaagaaggcucaaacaucugccuaacucgcaccgaccgcggcugguacugcgacaacgccggcagcguaucauucuuuccccaagccgaaacaugcaaaguucaauccaaccgcgucuucugcgacacaaugaacuccagaacgcuccccagcgaagucaaccucuguaacguagacaucuucaacccuaaguacgacugcaaaaucaugaccuccaaaacugauguauccuccuccgucaucacaucccugggcgccaucgucagcugcuacggcaaaacaaaaugcacugccucaaacaaaugccgagguaucauaaagaccuucucaaacggaugcgauuacgucagcaacaaaggcgucgacaccgucagugucggcaacacccucuacuacgucaacaaacaagaaggaaaaucccucuacgucaaaggcgaacccaucaucaacuucuacgacccccucgucuuccccagcgacgaguucgacgccuccaucucacaagucaacgaaaagauaaaccaaucucuagccuucauccgcaaauccgaugaacuccugcauaacgucaacgccggcaaauccaccacaaacaucaugaucacuaccauaaucaucgucauaaucguaauccuccuaucucuuaucgcagucggccuacuacucuacugcaaagcccgcuaaggacuaguaauaaggaaacuguaugaaugucugugggcaggaagugaagagauccuucuguaaagguuuuuggaauuaugucugcugaauaauaaacuuuuuugaaauaauaaaucugguagaaaaaugagaucuaaaaaaaaaaaaaaaaaaaaaaaaaaaaaaaaaaaaaaaaaaaaaaaaaaaaaaaaaaaaaaaaugcaucccccccccccccccccccccccccccccccaaaggcucuuuucagagccaccagaauu

SEQ ID NO: 5776 - RNA, 1950 nt, Artificial Sequence
  mRNA product Design b-5 comprising derived and/or modified sequence from HRSV(A2)__F-del_DSCav1_mut5 (opt1)
gggagacuccugucgggcggaaguaggaggaguagaguuuaaaaacaguacucuuuuuccgguucgggacguaguugaagcaacgacaagccggauaaccgcucuugagacaggaagcuuaccauggagcugcucauccugaaggccaacgccaucaccaccauccugacggcggugaccuucugcuucgccagcggccagaacaucaccgaggaguucuaccaguccacgugcagcgccgucuccaagggguaccucagcgcccugcggaccggcugguacaccuccgugaucaccaucgagcugagcaacaucaaggagaacaagugcaacgggaccgacgccaaggugaagcucaucaagcaggagcuggacaaguacaagaacgcggucacggagcugcagcuccugaugcaguccaccccggcaaccggcuccggcuccgccaucgcgagcggcgucgccgugugcaaggugcugcaccucgagggggaggucaacaagaucaagagcgcccugcuguccaccaacaaggccguggugagccucuccggcugcggcgucagcgugcugaccuucaaggugcuggaccucaagaacuacaucgacaagcagcugcugcccauccugaacaagcagagcugcuccaucagcaacaucgagacggugaucgaguuccagcagaagaacaaccggcuccuggagaucacccgcgaguucagcgugaacgccggggucaccacccccguguccacguacaugcugaccaacagcgagcuccugucccugaucaacgacaugccgaucaccaacgaccagaagaagcucaugagcaacaacgugcagaucguccggcagcaguccuacagcaucaugugcaucaucaaggaggaggugcuggcguacgugguccagcugccccucuacggcgugaucgacacccccugcuggaagcugcacacgagcccccugugcaccaccaacaccaaggagggguccaacaucugccucacgcgcaccgaccggggcugguacugcgacaacgccggcagcgucuccuucuucccgcaggccgagaccugcaaggugcagagcaaccgcguguucugcgacaccaugaacucccggacgcugcccagcgagguaaaccucugcaacgucgacaucuucaaccccaaguacgacugcaagaucaugaccuccaagaccgacgugagcuccagcgugaucaccucccugggggccaucgucagcugcuacggcaagacgaagugcaccgccagcaacaagugccgggggaucaucaagaccuucuccaacggcugcgacuacgugagcaacaagggcguggacaccguguccgucgggaacacccuguacuacgugaacaagcaggagggcaagagccucuacgugaagggggagcccaucaucaacuucuacgacccgcuggucuuccccuccgacgaguucgacgcgagcaucucccaggugaacgagaagaucaaccagagccuggccuucauccgcaaguccgacgagcugcuccacaacgugaacgccggcaagagcacgaccaacaucaugaucaccaccaucaucaucgucaucaucgugauccugcugucccucaucgccguggggcugcugcucuacugcaaggcccggugaggacuaguacuggcugcaucucccuuuccucuguccuccauccuucucccaggauggugaagggggaccugguacccagugauccccaccccaggauccuaaaucaugacuuaccugcuaauaaaaacucauuggaaaagugagaagaucuaaaaaaaaaaaaaaaaaaaaaaaaaaaaaaaaaaaaaaaaaaaaaaaaaaaaaaaaaaaaaaaaugcaucccccccccccccccccccccccccccccccaaaggcucuuuucagagccaccagaauu

SEQ ID NO: 5777 - RNA, 1950 nt, Artificial Sequence
  mRNA product Design b-5 comprising derived and/or modified sequence from HRSV(A2)__F-del_DSCav1_mut5 (opt1)
gggagacuccugucgggcggaaguaggaggaguagaguuuaaaaacaguacucuuuuuccgguucgggacguaguugaagcaacgacaagccggauaaccgcucuugagacaggaagcuuaccauggagcugcucauccugaaggccaacgccaucaccaccauccugacggcggugaccuucugcuucgccagcggccagaacaucaccgaggaguucuaccaguccacgugcagcgccgucuccaagggguaccucagcgcccugcgcaccggcugguacaccuccgugaucaccaucgagcugagcaacaucaaggagaacaagugcaacgggaccgacgccaaggugaagcucaucaagcaggagcuggacaaguacaagaacgcggucacggagcugcagcuccugaugcaguccacccccgccaccggcagcggguccgccaucgccagcggcguggcggugugcaagguccugcaccucgagggcgaggugaacaagaucaaguccgcccugcugagcaccaacaaggccguggucucccucagcgggugcggcguguccgugcugacguucaagguccuggaccucaagaacuacaucgacaagcagcugcugccgauccucaacaagcagagcugcuccaucagcaacaucgagaccgugaucgaguuccagcagaagaacaaccggcugcuggagaucacccgcgaguucuccgugaacgccggggucaccacgcccgugagcaccuacaugcucaccaacagcgagcugcugucccucaucaacgacaugcccaucaccaacgaccagaagaagcugaugagcaacaacgugcagaucguccggcagcaguccuacagcaucaugugcaucaucaaggaggaggugcuggccuacgugguccagcucccccuguacggcgugaucgacacgccgugcuggaagcugcacaccagcccccucugcaccaccaacacgaaggagggguccaacaucugccugacccgcaccgaccggggcugguacugcgacaacgcgggcuccgugagcuucuucccccaggccgagaccugcaagguccaguccaaccgcguguucugcgacacgaugaacagccggacccuccccuccgaggucaaccugugcaacguggacaucuucaacccgaaguacgacugcaagaucaugaccagcaagaccgacguguccagcuccgucaucacgagccugggggccaucguguccugcuacggcaagaccaagugcaccgccagcaacaagugccgggggaucaucaagaccuucuccaacggcugcgacuacgugagcaacaagggcgucgacacggugagcguggggaacacccucuacuacgucaacaagcaggagggcaagucccuguacgugaagggggagcccaucaucaacuucuacgacccccugguguuccccagcgacgaguucgacgccuccaucagccaggucaacgagaagaucaaccagucccucgcguucauccgcaagagcgacgagcugcugcacaacgugaacgccggcaaguccaccaccaacaucaugaucaccacgaucaucaucgugaucaucgucauccuccugagccugaucgccguggggcuccugcuguacugcaaggcccggugaggacuaguacuggcugcaucucccuuuccucuguccuccauccuucucccaggauggugaagggggaccugguacccagugauccccaccccaggauccuaaaucaugacuuaccugcuaauaaaaacucauuggaaaagugagaagaucuaaaaaaaaaaaaaaaaaaaaaaaaaaaaaaaaaaaaaaaaaaaaaaaaaaaaaaaaaaaaaaaaugcaucccccccccccccccccccccccccccccccaaaggcucuuuucagagccaccagaauu

SEQ ID NO: 5778 - RNA, 1950 nt, Artificial Sequence
  mRNA product Design b-5 comprising derived and/or modified sequence from HRSV(A2)__F-del_DSCav1_mut5 (opt2)
gggagacuccugucgggcggaaguaggaggaguagaguuuaaaaacaguacucuuuuuccgguucgggacguaguugaagcaacgacaagccggauaaccgcucuugagacaggaagcuuaccauggagcuccucauccucaaggccaacgccaucaccaccauccucaccgccgucaccuucugcuucgccuccggccagaacaucaccgaggaguucuaccaguccaccugcuccgccgucuccaagggcuaccucuccgcccuccgcaccggcugguacaccuccgucaucaccaucgagcucuccaacaucaaggagaacaagugcaacggcaccgacgccaaggucaagcucaucaagcaggagcucgacaaguacaagaacgccgucaccgagcuccagcuccucaugcaguccacccccgccaccggcuccggcuccgccaucgccuccggcgucgccgucugcaagguccuccaccucgagggcgaggucaacaagaucaaguccgcccuccucuccaccaacaaggccgucgucucccucuccggcugcggcgucuccguccucaccuucaagguccucgaccucaagaacuacaucgacaagcagcuccuccccauccucaacaagcaguccugcuccaucuccaacaucgagaccgucaucgaguuccagcagaagaacaaccgccuccucgagaucacccgcgaguucuccgucaacgccggcgucaccacccccgucuccaccuacaugcucaccaacuccgagcuccucucccucaucaacgacaugcccaucaccaacgaccagaagaagcucauguccaacaacguccagaucguccgccagcaguccuacuccaucaugugcaucaucaaggaggagguccucgccuacgucguccagcucccccucuacggcgucaucgacacccccugcuggaagcuccacaccuccccccucugcaccaccaacaccaaggagggcuccaacaucugccucacccgcaccgaccgcggcugguacugcgacaacgccggcuccgucuccuucuucccccaggccgagaccugcaagguccaguccaaccgcgucuucugcgacaccaugaacucccgcacccuccccuccgaggucaaccucugcaacgucgacaucuucaaccccaaguacgacugcaagaucaugaccuccaagaccgacgucuccuccuccgucaucaccucccucggcgccaucgucuccugcuacggcaagaccaagugcaccgccuccaacaagugccgcggcaucaucaagaccuucuccaacggcugcgacuacgucuccaacaagggcgucgacaccgucuccgucggcaacacccucuacuacgucaacaagcaggagggcaagucccucuacgucaagggcgagcccaucaucaacuucuacgacccccucgucuuccccuccgacgaguucgacgccuccaucucccaggucaacgagaagaucaaccagucccucgccuucauccgcaaguccgacgagcuccuccacaacgucaacgccggcaaguccaccaccaacaucaugaucaccaccaucaucaucgucaucaucgucauccuccucucccucaucgccgucggccuccuccucuacugcaaggcccgcugaggacuaguacuggcugcaucucccuuuccucuguccuccauccuucucccaggauggugaagggggaccugguacccagugauccccaccccaggauccuaaaucaugacuuaccugcuaauaaaaacucauuggaaaagugagaagaucuaaaaaaaaaaaaaaaaaaaaaaaaaaaaaaaaaaaaaaaaaaaaaaaaaaaaaaaaaaaaaaaaugcaucccccccccccccccccccccccccccccccaaaggcucuuuucagagccaccagaauu

SEQ ID NO: 5779 - RNA, 1950 nt, Artificial Sequence
  mRNA product Design b-5 comprising derived and/or modified sequence from HRSV(A2)__F-del_DSCav1_mut5 (opt3)
gggagacuccugucgggcggaaguaggaggaguagaguuuaaaaacaguacucuuuuuccgguucgggacguaguugaagcaacgacaagccggauaaccgcucuugagacaggaagcuuaccauggagcugcucauccuuaaggccaacgcuauuaccacaauacugacugcagugacguucugcuuugccagcggccagaauaucaccgaagaguucuaccaauccacauguucugcggucucaaaaggguauuugagugcuuuaagaacuggaugguacaccagcguuauuacaaucgaacuguccaacauuaaggagaauaaaugcaacgguaccgacgccaaggugaaacuaaucaagcaggaacucgauaaguauaaaaaugcaguaacugagcugcagcuucugaugcagucuacacccgccaccggcucggggucagcuauagcaagcggaguggccgucuguaagguguugcaccucgagggcgaaguuaacaaaaucaagagugcucugcuguccacgaauaaagccguggucucucucagcgguugcgggguguccguauuaacuuuuaagguucuggaccuuaagaacuacauugauaaacaauugcugccuauccuaaauaagcagucauguaguauuagcaacaucgagaccgugauagaguuccagcagaaaaauaacaggcuccuggaaauuacacgggaguuuucugucaaugcgggagugacuaccccaguguccacauauaugcuuaccaacucagaacuguugagccucaucaaugacaugccgauuacgaacgaucaaaagaaacugaugaguaacaauguccagaucguucgccagcagucuuacuccaucaugugcauuauaaaggaggaaguguuagcauauguagugcaacugccccucuacggcgucaucgacacuccuuguuggaaacuucauacaagcccacugugcaccacuaacacaaaggagggcucgaauauuuguuugacccgaacggaucgugggugguacugcgacaacgccggaucuguguccuucuuuccccaggcugaaaccuguaagguucagucaaauagaguguucugcgauacaaugaacaguagaacucugccuagcgaggucaaucucugcaacguggacaucuuuaauccaaaauaugauuguaagauaaugaccuccaaaacagacguaucuagcucaguuauuaccagucugggugccaucguguccugcuacggcaagacuaaauguacagcaagcaacaagugcagggggaucauuaagaccuucucuaauggaugugauuaugucucaaacaaaggcguggacacugucaguguggguaauacgcuuuacuauguuaacaagcaagaggggaaaagccuguacgugaagggagaacccaucauuaauuuuuaugacccuuugguauucccauccgaugaguuugacgcuucuauaucgcaggucaacgagaaaaucaaccagagccucgccuucauucggaaguccgaugaacuguuacacaaugugaacgcgggcaagucaacaaccaauaucaugaucacuaccauuauaaucguuauuaucgugauucugcuaagucucaucgccgucggccugcuuuuguacugcaaagcacgcugaggacuaguacuggcugcaucucccuuuccucuguccuccauccuucucccaggauggugaagggggaccugguacccagugauccccaccccaggauccuaaaucaugacuuaccugcuaauaaaaacucauuggaaaagugagaagaucuaaaaaaaaaaaaaaaaaaaaaaaaaaaaaaaaaaaaaaaaaaaaaaaaaaaaaaaaaaaaaaaaugcaucccccccccccccccccccccccccccccccaaaggcucuuuucagagccaccagaauu

SEQ ID NO: 5780 - RNA, 1950 nt, Artificial Sequence
  mRNA product Design b-5 comprising derived and/or modified sequence from HRSV(A2)__F-del_DSCav1_mut5 (opt4)
gggagacuccugucgggcggaaguaggaggaguagaguuuaaaaacaguacucuuuuuccgguucgggacguaguugaagcaacgacaagccggauaaccgcucuugagacaggaagcuuaccauggagcugcugauccugaaggccaacgccaucaccaccauccugaccgccgugaccuucugcuucgccagcggccagaacaucaccgaggaguucuaccagagcaccugcagcgccgugagcaagggcuaccugagcgcccugagaaccggcugguacaccagcgugaucaccaucgagcugagcaacaucaaggagaacaagugcaacggcaccgacgccaaggugaagcugaucaagcaggagcuggacaaguacaagaacgccgugaccgagcugcagcugcugaugcagagcacccccgccaccggcagcggcagcgccaucgccagcggcguggccgugugcaaggugcugcaccuggagggcgaggugaacaagaucaagagcgcccugcugagcaccaacaaggccguggugagccugagcggcugcggcgugagcgugcugaccuucaaggugcuggaccugaagaacuacaucgacaagcagcugcugcccauccugaacaagcagagcugcagcaucagcaacaucgagaccgugaucgaguuccagcagaagaacaacagacugcuggagaucaccagagaguucagcgugaacgccggcgugaccacccccgugagcaccuacaugcugaccaacagcgagcugcugagccugaucaacgacaugcccaucaccaacgaccagaagaagcugaugagcaacaacgugcagaucgugagacagcagagcuacagcaucaugugcaucaucaaggaggaggugcuggccuacguggugcagcugccccuguacggcgugaucgacacccccugcuggaagcugcacaccagcccccugugcaccaccaacaccaaggagggcagcaacaucugccugaccagaaccgacagaggcugguacugcgacaacgccggcagcgugagcuucuucccccaggccgagaccugcaaggugcagagcaacagaguguucugcgacaccaugaacagcagaacccugcccagcgaggugaaccugugcaacguggacaucuucaaccccaaguacgacugcaagaucaugaccagcaagaccgacgugagcagcagcgugaucaccagccugggcgccaucgugagcugcuacggcaagaccaagugcaccgccagcaacaagugcagaggcaucaucaagaccuucagcaacggcugcgacuacgugagcaacaagggcguggacaccgugagcgugggcaacacccuguacuacgugaacaagcaggagggcaagagccuguacgugaagggcgagcccaucaucaacuucuacgacccccugguguuccccagcgacgaguucgacgccagcaucagccaggugaacgagaagaucaaccagagccuggccuucaucagaaagagcgacgagcugcugcacaacgugaacgccggcaagagcaccaccaacaucaugaucaccaccaucaucaucgugaucaucgugauccugcugagccugaucgccgugggccugcugcuguacugcaaggccagaugaggacuaguacuggcugcaucucccuuuccucuguccuccauccuucucccaggauggugaagggggaccugguacccagugauccccaccccaggauccuaaaucaugacuuaccugcuaauaaaaacucauuggaaaagugagaagaucuaaaaaaaaaaaaaaaaaaaaaaaaaaaaaaaaaaaaaaaaaaaaaaaaaaaaaaaaaaaaaaaaugcaucccccccccccccccccccccccccccccccaaaggcucuuuucagagccaccagaauu

SEQ ID NO: 5781 - RNA, 1950 nt, Artificial Sequence
  mRNA product Design b-5 comprising derived and/or modified sequence from HRSV(A2)__F-del_DSCav1_mut5 (opt5)
gggagacuccugucgggcggaaguaggaggaguagaguuuaaaaacaguacucuuuuuccgguucgggacguaguugaagcaacgacaagccggauaaccgcucuugagacaggaagcuuaccauggagcugcucauccugaaggccaacgcuauuaccacaauccuuacggccgugaccuucugcuuugcgagcggccagaauauuacagaagaguucuaccaauccaccuguucugcugucagcaaaggguaucuguccgcccucagaacaggaugguacaccucuguuaucacaauugaacugagcaacaucaaggagaauaaaugcaacggcaccgacgccaaggugaaacuuaucaagcaggaacuggauaaguauaaaaaugcugugacggagcuccagcugcugaugcaguccacccccgccacagggucuggaagcgcuauugccuccggcgucgcgguguguaagguucuccaccuggagggggaagugaacaaaaucaagagcgcccuucugucuaccaauaaagcugucgugucccucagcggaugcggcguuucugugcugacauuuaagguccuugaccugaagaacuacauugauaaacaacuccugccuauccugaauaagcaguccuguagcauuucuaacaucgagaccgugauugaguuccagcagaaaaauaaccggcuccuggaaaucacgcgcgaguuuuccgugaaugccggcgucacaaccccgguuagcacauauaugcuuaccaacuccgaacugcucucucugaucaaugacaugcccauuaccaacgaucaaaagaaacuuaugagcaacaaugugcagaucgugagacagcaguccuacagcauuaugugcaucauuaaggaggaaguccuggcuuaugugguucaacucccucuguacggggugaucgacacacccuguuggaaacugcauacgucuccucucugcaccacaaacaccaaggagggauccaauaucugucugacacggaccgaucgcggcugguacugcgacaacgccgggagcgucucuuucuuuccccaggcggaaacguguaaggugcagagcaauagaguuuucugcgauacaaugaacuccagaacccugccuucugaggugaaucucugcaacgucgacauuuuuaauccgaaauaugauuguaagaucaugaccagcaaaacagacguguccagcucugucauuaccucccugggagccaucgugagcugcuacggcaagacaaaauguacggcuucuaacaagugccgggggauuaucaagaccuucuccaauggaugugauuauguuagcaacaaaggcguggacacagucuccgugggcaauacccuuuacuauguuaacaagcaagaggggaaaucucuguacgugaagggagaacccaucauuaauuuuuaugacccucucgucuuccccagcgaugaguuugacgccuccaucucucaggugaacgagaaaauuaaccagagccuggcuuucauccgcaaguccgaugaacugcuccacaaugugaacgccggcaagagcacaaccaauauuaugaucacgaccauuaucaucguuauuaucgucauucugcuuucucugaucgccguggggcuccugcuguacugcaaagcuagaugaggacuaguacuggcugcaucucccuuuccucuguccuccauccuucucccaggauggugaagggggaccugguacccagugauccccaccccaggauccuaaaucaugacuuaccugcuaauaaaaacucauuggaaaagugagaagaucuaaaaaaaaaaaaaaaaaaaaaaaaaaaaaaaaaaaaaaaaaaaaaaaaaaaaaaaaaaaaaaaaugcaucccccccccccccccccccccccccccccccaaaggcucuuuucagagccaccagaauu

SEQ ID NO: 5782 - RNA, 1950 nt, Artificial Sequence
  mRNA product Design b-5 comprising derived and/or modified sequence from HRSV(A2)__F-del_DSCav1_mut5 (opt6)
gggagacuccugucgggcggaaguaggaggaguagaguuuaaaaacaguacucuuuuuccgguucgggacguaguugaagcaacgacaagccggauaaccgcucuugagacaggaagcuuaccauggaacuuuuaauacugaaagcaaaugccaucacaaccauacuaacugccgucacauucugcuuugcaucaggacaaaacauaacagaagaauuuuaccaauccacaugcucagcaguaucaaaaggauaucuaucggcacuuagaacuggaugguacacaaguguuauaacuauagaacucucaaacauaaaagaaaacaaaugcaauggaacagacgcaaaaguaaaacuaauaaaacaagaacucgauaaauauaaaaaugcaguaaccgaacuacaacuauuaaugcaaagcacacccgcaacaggcagcggaucagcaauagcaagcggagucgcaguauguaaaguacuacaucuagaaggagaagucaacaaaaucaaaucugcacuucuauccacaaacaaagcuguaguaucccuauccggaugcggagucucaguauuaacuuuuaaaguacuagaccuuaaaaacuacauagauaaacaacuauuaccaauacuaaauaaacaaucaugcagcauauccaauauagagacaguaauugaauuucaacaaaaaaacaacagauuacuagaaauuacucgugaauuuuccguaaaugccggagucacaacaccaguaucaaccuauaugcuaacaaacagcgaacuacuuagcuuaauaaaugacaugccaauaacaaaugaccaaaaaaaacuuaugucaaauaacguacaaaucgucagacaacaauccuacucuauaauguguauaauuaaagaagaaguccuagcauacguaguucaauuaccacucuauggaguaauagauacaccaugcuggaaacuacacacgucaccacuauguacaacaaacacaaaagaaggauccaauauaugccuaacaagaaccgacagaggcugguauugugacaacgcaggauccguuucauucuucccacaagcagaaaccuguaaaguacaaucuaauagaguauuuugcgacacaaugaacaguagaacacuaccaagcgagguuaaucuauguaacguagacauauucaauccaaaauaugauugcaaaauaaugacaucaaaaacagauguaucgucgaguguaauaacaagucugggagcuauaguaagcugcuacggcaagacgaaauguaccgcuucaaauaaaugcagaggaaucauuaaaacauucucgaacggaugcgacuacguaaguaauaaaggugucgacaccguaucaguagggaauacauuauacuacgucaacaaacaagaaggaaaaucucuauauguaaaaggagaaccaauaauaaauuucuaugacccucuaguauucccaucagaugaauuugacgcuuccauaucacaaguaaacgaaaaaaucaaucaaucuuuagcauucauacgaaaaagugaugaacuccuacacaacgucaacgcaggaaaaagcacaacaaauauaaugaucacaacaaucaucauaguaauaauaguaauacuacuaucauuaauagcaguaggauuauugcuuuacugcaaagcacgauagggacuaguacuggcugcaucucccuuuccucuguccuccauccuucucccaggauggugaagggggaccugguacccagugauccccaccccaggauccuaaaucaugacuuaccugcuaauaaaaacucauuggaaaagugagaagaucuaaaaaaaaaaaaaaaaaaaaaaaaaaaaaaaaaaaaaaaaaaaaaaaaaaaaaaaaaaaaaaaaugcaucccccccccccccccccccccccccccccccaaaggcucuuuucagagccaccagaauu

SEQ ID NO: 5783 - RNA, 1950 nt, Artificial Sequence
  mRNA product Design b-5 comprising derived and/or modified sequence from HRSV(A2)__F-del_DSCav1_mut5 (opt11)
gggagacuccugucgggcggaaguaggaggaguagaguuuaaaaacaguacucuuuuuccgguucgggacguaguugaagcaacgacaagccggauaaccgcucuugagacaggaagcuuaccauggaacuccucauccucaaagccaacgccauaaccacaauacucaccgccguaaccuucugcuuugcgucgggacaaaacaucaccgaagaguucuaccaauccacuugcuccgcaguaagcaaaggauaccucuccgcccugcgaaccgguugguacacaucagucaucacaaucgaacucucaaacauaaaagaaaacaaaugcaacggcaccgacgcaaaggucaaauuaaucaagcaagaacuagacaaauacaaaaacgccgucacagaacuccagcugcuaaugcagagcacacccgcaacuggcagcggauccgccaucgcaucaggagucgccgugugcaaaguccuacaccucgaaggagaagugaacaaaaucaaaucagcccuacucuccaccaacaaggccgucgucucccucuccggcugcggugucuccguccuaaccuucaaagugcuagaccucaagaacuacaucgacaaacaacuccuaccaauacucaacaagcaaucuugcuccaucuccaacaucgaaaccguaaucgaguuccaacagaagaacaaccgccuccucgaaaucacccgcgaguucucugucaacgcaggggucaccacucccgucuccacauacaugcucacaaacuccgaacuccucagccucaucaacgacaugcccauaaccaacgaccagaaaaagcuaaugagcaauaacguccaaaucguuagacaacaaaguuauuccaucaugugcaucaucaaagaagaaguccucgccuacgucguacaacucccccucuauggcgucaucgacacccccugcuggaaacugcacacaucaccccucugcaccacaaacaccaaagaaggcucaaacaucugccuaacucgcaccgaccgcggcugguacugcgacaacgccggcagcguaucauucuuuccccaagccgaaacaugcaaaguucaauccaaccgcgucuucugcgacacaaugaacuccagaacgcuccccagcgaagucaaccucuguaacguagacaucuucaacccuaaguacgacugcaaaaucaugaccuccaaaacugauguauccuccuccgucaucacaucccugggcgccaucgucagcugcuacggcaaaacaaaaugcacugccucaaacaaaugccgagguaucauaaagaccuucucaaacggaugcgauuacgucagcaacaaaggcgucgacaccgucagugucggcaacacccucuacuacgucaacaaacaagaaggaaaaucccucuacgucaaaggcgaacccaucaucaacuucuacgacccccucgucuuccccagcgacgaguucgacgccuccaucucacaagucaacgaaaagauaaaccaaucucuagccuucauccgcaaauccgaugaacuccugcauaacgucaacgccggcaaauccaccacaaacaucaugaucacuaccauaaucaucgucauaaucguaauccuccuaucucuuaucgcagucggccuacuacucuacugcaaagcccgcuaaggacuaguacuggcugcaucucccuuuccucuguccuccauccuucucccaggauggugaagggggaccugguacccagugauccccaccccaggauccuaaaucaugacuuaccugcuaauaaaaacucauuggaaaagugagaagaucuaaaaaaaaaaaaaaaaaaaaaaaaaaaaaaaaaaaaaaaaaaaaaaaaaaaaaaaaaaaaaaaaugcaucccccccccccccccccccccccccccccccaaaggcucuuuucagagccaccagaauu

SEQ ID NO: 5784 - RNA, 1856 nt, Artificial Sequence
  mRNA product Design c-1 comprising derived and/or modified sequence from HRSV(A2)__F-del_DSCav1_mut5 (opt1)
gggagaguccgcucagccagguugcagaagcggcuuagcguguguccuaaucuucucucugcguguagguaggccugugccgcaaacaagcuuaccauggagcugcucauccugaaggccaacgccaucaccaccauccugacggcggugaccuucugcuucgccagcggccagaacaucaccgaggaguucuaccaguccacgugcagcgccgucuccaagggguaccucagcgcccugcggaccggcugguacaccuccgugaucaccaucgagcugagcaacaucaaggagaacaagugcaacgggaccgacgccaaggugaagcucaucaagcaggagcuggacaaguacaagaacgcggucacggagcugcagcuccugaugcaguccaccccggcaaccggcuccggcuccgccaucgcgagcggcgucgccgugugcaaggugcugcaccucgagggggaggucaacaagaucaagagcgcccugcuguccaccaacaaggccguggugagccucuccggcugcggcgucagcgugcugaccuucaaggugcuggaccucaagaacuacaucgacaagcagcugcugcccauccugaacaagcagagcugcuccaucagcaacaucgagacggugaucgaguuccagcagaagaacaaccggcuccuggagaucacccgcgaguucagcgugaacgccggggucaccacccccguguccacguacaugcugaccaacagcgagcuccugucccugaucaacgacaugccgaucaccaacgaccagaagaagcucaugagcaacaacgugcagaucguccggcagcaguccuacagcaucaugugcaucaucaaggaggaggugcuggcguacgugguccagcugccccucuacggcgugaucgacacccccugcuggaagcugcacacgagcccccugugcaccaccaacaccaaggagggguccaacaucugccucacgcgcaccgaccggggcugguacugcgacaacgccggcagcgucuccuucuucccgcaggccgagaccugcaaggugcagagcaaccgcguguucugcgacaccaugaacucccggacgcugcccagcgagguaaaccucugcaacgucgacaucuucaaccccaaguacgacugcaagaucaugaccuccaagaccgacgugagcuccagcgugaucaccucccugggggccaucgucagcugcuacggcaagacgaagugcaccgccagcaacaagugccgggggaucaucaagaccuucuccaacggcugcgacuacgugagcaacaagggcguggacaccguguccgucgggaacacccuguacuacgugaacaagcaggagggcaagagccucuacgugaagggggagcccaucaucaacuucuacgacccgcuggucuuccccuccgacgaguucgacgcgagcaucucccaggugaacgagaagaucaaccagagccuggccuucauccgcaaguccgacgagcugcuccacaacgugaacgccggcaagagcacgaccaacaucaugaucaccaccaucaucaucgucaucaucgugauccugcugucccucaucgccguggggcugcugcucuacugcaaggcccggugaggacuaguguccaccugucccuccugggcugcuggauugucucguuuuccugccaaauaaacaggaucagcgcuuuacagaucuaaaaaaaaaaaaaaaaaaaaaaaaaaaaaaaaaaaaaaaaaaaaaaaaaaaaaaaaaaaaaaaaugcaucccccccccccccccccccccccccccccccaaaggcucuuuucagagccaccagaauu

SEQ ID NO: 5785 - RNA, 1856 nt, Artificial Sequence
  mRNA product Design c-1 comprising derived and/or modified sequence from HRSV(A2)__F-del_DSCav1_mut5 (opt1)
gggagaguccgcucagccagguugcagaagcggcuuagcguguguccuaaucuucucucugcguguagguaggccugugccgcaaacaagcuuaccauggagcugcucauccugaaggccaacgccaucaccaccauccugacggcggugaccuucugcuucgccagcggccagaacaucaccgaggaguucuaccaguccacgugcagcgccgucuccaagggguaccucagcgcccugcgcaccggcugguacaccuccgugaucaccaucgagcugagcaacaucaaggagaacaagugcaacgggaccgacgccaaggugaagcucaucaagcaggagcuggacaaguacaagaacgcggucacggagcugcagcuccugaugcaguccacccccgccaccggcagcggguccgccaucgccagcggcguggcggugugcaagguccugcaccucgagggcgaggugaacaagaucaaguccgcccugcugagcaccaacaaggccguggucucccucagcgggugcggcguguccgugcugacguucaagguccuggaccucaagaacuacaucgacaagcagcugcugccgauccucaacaagcagagcugcuccaucagcaacaucgagaccgugaucgaguuccagcagaagaacaaccggcugcuggagaucacccgcgaguucuccgugaacgccggggucaccacgcccgugagcaccuacaugcucaccaacagcgagcugcugucccucaucaacgacaugcccaucaccaacgaccagaagaagcugaugagcaacaacgugcagaucguccggcagcaguccuacagcaucaugugcaucaucaaggaggaggugcuggccuacgugguccagcucccccuguacggcgugaucgacacgccgugcuggaagcugcacaccagcccccucugcaccaccaacacgaaggagggguccaacaucugccugacccgcaccgaccggggcugguacugcgacaacgcgggcuccgugagcuucuucccccaggccgagaccugcaagguccaguccaaccgcguguucugcgacacgaugaacagccggacccuccccuccgaggucaaccugugcaacguggacaucuucaacccgaaguacgacugcaagaucaugaccagcaagaccgacguguccagcuccgucaucacgagccugggggccaucguguccugcuacggcaagaccaagugcaccgccagcaacaagugccgggggaucaucaagaccuucuccaacggcugcgacuacgugagcaacaagggcgucgacacggugagcguggggaacacccucuacuacgucaacaagcaggagggcaagucccuguacgugaagggggagcccaucaucaacuucuacgacccccugguguuccccagcgacgaguucgacgccuccaucagccaggucaacgagaagaucaaccagucccucgcguucauccgcaagagcgacgagcugcugcacaacgugaacgccggcaaguccaccaccaacaucaugaucaccacgaucaucaucgugaucaucgucauccuccugagccugaucgccguggggcuccugcuguacugcaaggcccggugaggacuaguguccaccugucccuccugggcugcuggauugucucguuuuccugccaaauaaacaggaucagcgcuuuacagaucuaaaaaaaaaaaaaaaaaaaaaaaaaaaaaaaaaaaaaaaaaaaaaaaaaaaaaaaaaaaaaaaaugcaucccccccccccccccccccccccccccccccaaaggcucuuuucagagccaccagaauu

SEQ ID NO: 5786 - RNA, 1856 nt, Artificial Sequence
  mRNA product Design c-1 comprising derived and/or modified sequence from HRSV(A2)__F-del_DSCav1_mut5 (opt2)
gggagaguccgcucagccagguugcagaagcggcuuagcguguguccuaaucuucucucugcguguagguaggccugugccgcaaacaagcuuaccauggagcuccucauccucaaggccaacgccaucaccaccauccucaccgccgucaccuucugcuucgccuccggccagaacaucaccgaggaguucuaccaguccaccugcuccgccgucuccaagggcuaccucuccgcccuccgcaccggcugguacaccuccgucaucaccaucgagcucuccaacaucaaggagaacaagugcaacggcaccgacgccaaggucaagcucaucaagcaggagcucgacaaguacaagaacgccgucaccgagcuccagcuccucaugcaguccacccccgccaccggcuccggcuccgccaucgccuccggcgucgccgucugcaagguccuccaccucgagggcgaggucaacaagaucaaguccgcccuccucuccaccaacaaggccgucgucucccucuccggcugcggcgucuccguccucaccuucaagguccucgaccucaagaacuacaucgacaagcagcuccuccccauccucaacaagcaguccugcuccaucuccaacaucgagaccgucaucgaguuccagcagaagaacaaccgccuccucgagaucacccgcgaguucuccgucaacgccggcgucaccacccccgucuccaccuacaugcucaccaacuccgagcuccucucccucaucaacgacaugcccaucaccaacgaccagaagaagcucauguccaacaacguccagaucguccgccagcaguccuacuccaucaugugcaucaucaaggaggagguccucgccuacgucguccagcucccccucuacggcgucaucgacacccccugcuggaagcuccacaccuccccccucugcaccaccaacaccaaggagggcuccaacaucugccucacccgcaccgaccgcggcugguacugcgacaacgccggcuccgucuccuucuucccccaggccgagaccugcaagguccaguccaaccgcgucuucugcgacaccaugaacucccgcacccuccccuccgaggucaaccucugcaacgucgacaucuucaaccccaaguacgacugcaagaucaugaccuccaagaccgacgucuccuccuccgucaucaccucccucggcgccaucgucuccugcuacggcaagaccaagugcaccgccuccaacaagugccgcggcaucaucaagaccuucuccaacggcugcgacuacgucuccaacaagggcgucgacaccgucuccgucggcaacacccucuacuacgucaacaagcaggagggcaagucccucuacgucaagggcgagcccaucaucaacuucuacgacccccucgucuuccccuccgacgaguucgacgccuccaucucccaggucaacgagaagaucaaccagucccucgccuucauccgcaaguccgacgagcuccuccacaacgucaacgccggcaaguccaccaccaacaucaugaucaccaccaucaucaucgucaucaucgucauccuccucucccucaucgccgucggccuccuccucuacugcaaggcccgcugaggacuaguguccaccugucccuccugggcugcuggauugucucguuuuccugccaaauaaacaggaucagcgcuuuacagaucuaaaaaaaaaaaaaaaaaaaaaaaaaaaaaaaaaaaaaaaaaaaaaaaaaaaaaaaaaaaaaaaaugcaucccccccccccccccccccccccccccccccaaaggcucuuuucagagccaccagaauu

SEQ ID NO: 5787 - RNA, 1856 nt, Artificial Sequence
  mRNA product Design c-1 comprising derived and/or modified sequence from HRSV(A2)__F-del_DSCav1_mut5 (opt3)
gggagaguccgcucagccagguugcagaagcggcuuagcguguguccuaaucuucucucugcguguagguaggccugugccgcaaacaagcuuaccauggagcugcucauccuuaaggccaacgcuauuaccacaauacugacugcagugacguucugcuuugccagcggccagaauaucaccgaagaguucuaccaauccacauguucugcggucucaaaaggguauuugagugcuuuaagaacuggaugguacaccagcguuauuacaaucgaacuguccaacauuaaggagaauaaaugcaacgguaccgacgccaaggugaaacuaaucaagcaggaacucgauaaguauaaaaaugcaguaacugagcugcagcuucugaugcagucuacacccgccaccggcucggggucagcuauagcaagcggaguggccgucuguaagguguugcaccucgagggcgaaguuaacaaaaucaagagugcucugcuguccacgaauaaagccguggucucucucagcgguugcgggguguccguauuaacuuuuaagguucuggaccuuaagaacuacauugauaaacaauugcugccuauccuaaauaagcagucauguaguauuagcaacaucgagaccgugauagaguuccagcagaaaaauaacaggcuccuggaaauuacacgggaguuuucugucaaugcgggagugacuaccccaguguccacauauaugcuuaccaacucagaacuguugagccucaucaaugacaugccgauuacgaacgaucaaaagaaacugaugaguaacaauguccagaucguucgccagcagucuuacuccaucaugugcauuauaaaggaggaaguguuagcauauguagugcaacugccccucuacggcgucaucgacacuccuuguuggaaacuucauacaagcccacugugcaccacuaacacaaaggagggcucgaauauuuguuugacccgaacggaucgugggugguacugcgacaacgccggaucuguguccuucuuuccccaggcugaaaccuguaagguucagucaaauagaguguucugcgauacaaugaacaguagaacucugccuagcgaggucaaucucugcaacguggacaucuuuaauccaaaauaugauuguaagauaaugaccuccaaaacagacguaucuagcucaguuauuaccagucugggugccaucguguccugcuacggcaagacuaaauguacagcaagcaacaagugcagggggaucauuaagaccuucucuaauggaugugauuaugucucaaacaaaggcguggacacugucaguguggguaauacgcuuuacuauguuaacaagcaagaggggaaaagccuguacgugaagggagaacccaucauuaauuuuuaugacccuuugguauucccauccgaugaguuugacgcuucuauaucgcaggucaacgagaaaaucaaccagagccucgccuucauucggaaguccgaugaacuguuacacaaugugaacgcgggcaagucaacaaccaauaucaugaucacuaccauuauaaucguuauuaucgugauucugcuaagucucaucgccgucggccugcuuuuguacugcaaagcacgcugaggacuaguguccaccugucccuccugggcugcuggauugucucguuuuccugccaaauaaacaggaucagcgcuuuacagaucuaaaaaaaaaaaaaaaaaaaaaaaaaaaaaaaaaaaaaaaaaaaaaaaaaaaaaaaaaaaaaaaaugcaucccccccccccccccccccccccccccccccaaaggcucuuuucagagccaccagaauu

SEQ ID NO: 5788 - RNA, 1856 nt, Artificial Sequence
  mRNA product Design c-1 comprising derived and/or modified sequence from HRSV(A2)__F-del_DSCav1_mut5 (opt4)
gggagaguccgcucagccagguugcagaagcggcuuagcguguguccuaaucuucucucugcguguagguaggccugugccgcaaacaagcuuaccauggagcugcugauccugaaggccaacgccaucaccaccauccugaccgccgugaccuucugcuucgccagcggccagaacaucaccgaggaguucuaccagagcaccugcagcgccgugagcaagggcuaccugagcgcccugagaaccggcugguacaccagcgugaucaccaucgagcugagcaacaucaaggagaacaagugcaacggcaccgacgccaaggugaagcugaucaagcaggagcuggacaaguacaagaacgccgugaccgagcugcagcugcugaugcagagcacccccgccaccggcagcggcagcgccaucgccagcggcguggccgugugcaaggugcugcaccuggagggcgaggugaacaagaucaagagcgcccugcugagcaccaacaaggccguggugagccugagcggcugcggcgugagcgugcugaccuucaaggugcuggaccugaagaacuacaucgacaagcagcugcugcccauccugaacaagcagagcugcagcaucagcaacaucgagaccgugaucgaguuccagcagaagaacaacagacugcuggagaucaccagagaguucagcgugaacgccggcgugaccacccccgugagcaccuacaugcugaccaacagcgagcugcugagccugaucaacgacaugcccaucaccaacgaccagaagaagcugaugagcaacaacgugcagaucgugagacagcagagcuacagcaucaugugcaucaucaaggaggaggugcuggccuacguggugcagcugccccuguacggcgugaucgacacccccugcuggaagcugcacaccagcccccugugcaccaccaacaccaaggagggcagcaacaucugccugaccagaaccgacagaggcugguacugcgacaacgccggcagcgugagcuucuucccccaggccgagaccugcaaggugcagagcaacagaguguucugcgacaccaugaacagcagaacccugcccagcgaggugaaccugugcaacguggacaucuucaaccccaaguacgacugcaagaucaugaccagcaagaccgacgugagcagcagcgugaucaccagccugggcgccaucgugagcugcuacggcaagaccaagugcaccgccagcaacaagugcagaggcaucaucaagaccuucagcaacggcugcgacuacgugagcaacaagggcguggacaccgugagcgugggcaacacccuguacuacgugaacaagcaggagggcaagagccuguacgugaagggcgagcccaucaucaacuucuacgacccccugguguuccccagcgacgaguucgacgccagcaucagccaggugaacgagaagaucaaccagagccuggccuucaucagaaagagcgacgagcugcugcacaacgugaacgccggcaagagcaccaccaacaucaugaucaccaccaucaucaucgugaucaucgugauccugcugagccugaucgccgugggccugcugcuguacugcaaggccagaugaggacuaguguccaccugucccuccugggcugcuggauugucucguuuuccugccaaauaaacaggaucagcgcuuuacagaucuaaaaaaaaaaaaaaaaaaaaaaaaaaaaaaaaaaaaaaaaaaaaaaaaaaaaaaaaaaaaaaaaugcaucccccccccccccccccccccccccccccccaaaggcucuuuucagagccaccagaauu

SEQ ID NO: 5789 - RNA, 1856 nt, Artificial Sequence
  mRNA product Design c-1 comprising derived and/or modified sequence from HRSV(A2)__F-del_DSCav1_mut5 (opt5)
gggagaguccgcucagccagguugcagaagcggcuuagcguguguccuaaucuucucucugcguguagguaggccugugccgcaaacaagcuuaccauggagcugcucauccugaaggccaacgcuauuaccacaauccuuacggccgugaccuucugcuuugcgagcggccagaauauuacagaagaguucuaccaauccaccuguucugcugucagcaaaggguaucuguccgcccucagaacaggaugguacaccucuguuaucacaauugaacugagcaacaucaaggagaauaaaugcaacggcaccgacgccaaggugaaacuuaucaagcaggaacuggauaaguauaaaaaugcugugacggagcuccagcugcugaugcaguccacccccgccacagggucuggaagcgcuauugccuccggcgucgcgguguguaagguucuccaccuggagggggaagugaacaaaaucaagagcgcccuucugucuaccaauaaagcugucgugucccucagcggaugcggcguuucugugcugacauuuaagguccuugaccugaagaacuacauugauaaacaacuccugccuauccugaauaagcaguccuguagcauuucuaacaucgagaccgugauugaguuccagcagaaaaauaaccggcuccuggaaaucacgcgcgaguuuuccgugaaugccggcgucacaaccccgguuagcacauauaugcuuaccaacuccgaacugcucucucugaucaaugacaugcccauuaccaacgaucaaaagaaacuuaugagcaacaaugugcagaucgugagacagcaguccuacagcauuaugugcaucauuaaggaggaaguccuggcuuaugugguucaacucccucuguacggggugaucgacacacccuguuggaaacugcauacgucuccucucugcaccacaaacaccaaggagggauccaauaucugucugacacggaccgaucgcggcugguacugcgacaacgccgggagcgucucuuucuuuccccaggcggaaacguguaaggugcagagcaauagaguuuucugcgauacaaugaacuccagaacccugccuucugaggugaaucucugcaacgucgacauuuuuaauccgaaauaugauuguaagaucaugaccagcaaaacagacguguccagcucugucauuaccucccugggagccaucgugagcugcuacggcaagacaaaauguacggcuucuaacaagugccgggggauuaucaagaccuucuccaauggaugugauuauguuagcaacaaaggcguggacacagucuccgugggcaauacccuuuacuauguuaacaagcaagaggggaaaucucuguacgugaagggagaacccaucauuaauuuuuaugacccucucgucuuccccagcgaugaguuugacgccuccaucucucaggugaacgagaaaauuaaccagagccuggcuuucauccgcaaguccgaugaacugcuccacaaugugaacgccggcaagagcacaaccaauauuaugaucacgaccauuaucaucguuauuaucgucauucugcuuucucugaucgccguggggcuccugcuguacugcaaagcuagaugaggacuaguguccaccugucccuccugggcugcuggauugucucguuuuccugccaaauaaacaggaucagcgcuuuacagaucuaaaaaaaaaaaaaaaaaaaaaaaaaaaaaaaaaaaaaaaaaaaaaaaaaaaaaaaaaaaaaaaaugcaucccccccccccccccccccccccccccccccaaaggcucuuuucagagccaccagaauu

SEQ ID NO: 5790 - RNA, 1856 nt, Artificial Sequence
  mRNA product Design c-1 comprising derived and/or modified sequence from HRSV(A2)__F-del_DSCav1_mut5 (opt6)
gggagaguccgcucagccagguugcagaagcggcuuagcguguguccuaaucuucucucugcguguagguaggccugugccgcaaacaagcuuaccauggaacuuuuaauacugaaagcaaaugccaucacaaccauacuaacugccgucacauucugcuuugcaucaggacaaaacauaacagaagaauuuuaccaauccacaugcucagcaguaucaaaaggauaucuaucggcacuuagaacuggaugguacacaaguguuauaacuauagaacucucaaacauaaaagaaaacaaaugcaauggaacagacgcaaaaguaaaacuaauaaaacaagaacucgauaaauauaaaaaugcaguaaccgaacuacaacuauuaaugcaaagcacacccgcaacaggcagcggaucagcaauagcaagcggagucgcaguauguaaaguacuacaucuagaaggagaagucaacaaaaucaaaucugcacuucuauccacaaacaaagcuguaguaucccuauccggaugcggagucucaguauuaacuuuuaaaguacuagaccuuaaaaacuacauagauaaacaacuauuaccaauacuaaauaaacaaucaugcagcauauccaauauagagacaguaauugaauuucaacaaaaaaacaacagauuacuagaaauuacucgugaauuuuccguaaaugccggagucacaacaccaguaucaaccuauaugcuaacaaacagcgaacuacuuagcuuaauaaaugacaugccaauaacaaaugaccaaaaaaaacuuaugucaaauaacguacaaaucgucagacaacaauccuacucuauaauguguauaauuaaagaagaaguccuagcauacguaguucaauuaccacucuauggaguaauagauacaccaugcuggaaacuacacacgucaccacuauguacaacaaacacaaaagaaggauccaauauaugccuaacaagaaccgacagaggcugguauugugacaacgcaggauccguuucauucuucccacaagcagaaaccuguaaaguacaaucuaauagaguauuuugcgacacaaugaacaguagaacacuaccaagcgagguuaaucuauguaacguagacauauucaauccaaaauaugauugcaaaauaaugacaucaaaaacagauguaucgucgaguguaauaacaagucugggagcuauaguaagcugcuacggcaagacgaaauguaccgcuucaaauaaaugcagaggaaucauuaaaacauucucgaacggaugcgacuacguaaguaauaaaggugucgacaccguaucaguagggaauacauuauacuacgucaacaaacaagaaggaaaaucucuauauguaaaaggagaaccaauaauaaauuucuaugacccucuaguauucccaucagaugaauuugacgcuuccauaucacaaguaaacgaaaaaaucaaucaaucuuuagcauucauacgaaaaagugaugaacuccuacacaacgucaacgcaggaaaaagcacaacaaauauaaugaucacaacaaucaucauaguaauaauaguaauacuacuaucauuaauagcaguaggauuauugcuuuacugcaaagcacgauagggacuaguguccaccugucccuccugggcugcuggauugucucguuuuccugccaaauaaacaggaucagcgcuuuacagaucuaaaaaaaaaaaaaaaaaaaaaaaaaaaaaaaaaaaaaaaaaaaaaaaaaaaaaaaaaaaaaaaaugcaucccccccccccccccccccccccccccccccaaaggcucuuuucagagccaccagaauu

SEQ ID NO: 5791 - RNA, 1856 nt, Artificial Sequence
  mRNA product Design c-1 comprising derived and/or modified sequence from HRSV(A2)__F-del_DSCav1_mut5 (opt11)
gggagaguccgcucagccagguugcagaagcggcuuagcguguguccuaaucuucucucugcguguagguaggccugugccgcaaacaagcuuaccauggaacuccucauccucaaagccaacgccauaaccacaauacucaccgccguaaccuucugcuuugcgucgggacaaaacaucaccgaagaguucuaccaauccacuugcuccgcaguaagcaaaggauaccucuccgcccugcgaaccgguugguacacaucagucaucacaaucgaacucucaaacauaaaagaaaacaaaugcaacggcaccgacgcaaaggucaaauuaaucaagcaagaacuagacaaauacaaaaacgccgucacagaacuccagcugcuaaugcagagcacacccgcaacuggcagcggauccgccaucgcaucaggagucgccgugugcaaaguccuacaccucgaaggagaagugaacaaaaucaaaucagcccuacucuccaccaacaaggccgucgucucccucuccggcugcggugucuccguccuaaccuucaaagugcuagaccucaagaacuacaucgacaaacaacuccuaccaauacucaacaagcaaucuugcuccaucuccaacaucgaaaccguaaucgaguuccaacagaagaacaaccgccuccucgaaaucacccgcgaguucucugucaacgcaggggucaccacucccgucuccacauacaugcucacaaacuccgaacuccucagccucaucaacgacaugcccauaaccaacgaccagaaaaagcuaaugagcaauaacguccaaaucguuagacaacaaaguuauuccaucaugugcaucaucaaagaagaaguccucgccuacgucguacaacucccccucuauggcgucaucgacacccccugcuggaaacugcacacaucaccccucugcaccacaaacaccaaagaaggcucaaacaucugccuaacucgcaccgaccgcggcugguacugcgacaacgccggcagcguaucauucuuuccccaagccgaaacaugcaaaguucaauccaaccgcgucuucugcgacacaaugaacuccagaacgcuccccagcgaagucaaccucuguaacguagacaucuucaacccuaaguacgacugcaaaaucaugaccuccaaaacugauguauccuccuccgucaucacaucccugggcgccaucgucagcugcuacggcaaaacaaaaugcacugccucaaacaaaugccgagguaucauaaagaccuucucaaacggaugcgauuacgucagcaacaaaggcgucgacaccgucagugucggcaacacccucuacuacgucaacaaacaagaaggaaaaucccucuacgucaaaggcgaacccaucaucaacuucuacgacccccucgucuuccccagcgacgaguucgacgccuccaucucacaagucaacgaaaagauaaaccaaucucuagccuucauccgcaaauccgaugaacuccugcauaacgucaacgccggcaaauccaccacaaacaucaugaucacuaccauaaucaucgucauaaucguaauccuccuaucucuuaucgcagucggccuacuacucuacugcaaagcccgcuaaggacuaguguccaccugucccuccugggcugcuggauugucucguuuuccugccaaauaaacaggaucagcgcuuuacagaucuaaaaaaaaaaaaaaaaaaaaaaaaaaaaaaaaaaaaaaaaaaaaaaaaaaaaaaaaaaaaaaaaugcaucccccccccccccccccccccccccccccccaaaggcucuuuucagagccaccagaauu

SEQ ID NO: 5792 - RNA, 1946 nt, Artificial Sequence
  mRNA product Design c-2 comprising derived and/or modified sequence from HRSV(A2)__F-del_DSCav1_mut5 (opt1)
gggagacuccugucgggcggaaguaggaggaguagaguuuaaaaacaguacucuuuuuccgguucgggacguaguugaagcaacgacaagccggauaaccgcucuugagacaggaagcuuaccauggagcugcucauccugaaggccaacgccaucaccaccauccugacggcggugaccuucugcuucgccagcggccagaacaucaccgaggaguucuaccaguccacgugcagcgccgucuccaagggguaccucagcgcccugcggaccggcugguacaccuccgugaucaccaucgagcugagcaacaucaaggagaacaagugcaacgggaccgacgccaaggugaagcucaucaagcaggagcuggacaaguacaagaacgcggucacggagcugcagcuccugaugcaguccaccccggcaaccggcuccggcuccgccaucgcgagcggcgucgccgugugcaaggugcugcaccucgagggggaggucaacaagaucaagagcgcccugcuguccaccaacaaggccguggugagccucuccggcugcggcgucagcgugcugaccuucaaggugcuggaccucaagaacuacaucgacaagcagcugcugcccauccugaacaagcagagcugcuccaucagcaacaucgagacggugaucgaguuccagcagaagaacaaccggcuccuggagaucacccgcgaguucagcgugaacgccggggucaccacccccguguccacguacaugcugaccaacagcgagcuccugucccugaucaacgacaugccgaucaccaacgaccagaagaagcucaugagcaacaacgugcagaucguccggcagcaguccuacagcaucaugugcaucaucaaggaggaggugcuggcguacgugguccagcugccccucuacggcgugaucgacacccccugcuggaagcugcacacgagcccccugugcaccaccaacaccaaggagggguccaacaucugccucacgcgcaccgaccggggcugguacugcgacaacgccggcagcgucuccuucuucccgcaggccgagaccugcaaggugcagagcaaccgcguguucugcgacaccaugaacucccggacgcugcccagcgagguaaaccucugcaacgucgacaucuucaaccccaaguacgacugcaagaucaugaccuccaagaccgacgugagcuccagcgugaucaccucccugggggccaucgucagcugcuacggcaagacgaagugcaccgccagcaacaagugccgggggaucaucaagaccuucuccaacggcugcgacuacgugagcaacaagggcguggacaccguguccgucgggaacacccuguacuacgugaacaagcaggagggcaagagccucuacgugaagggggagcccaucaucaacuucuacgacccgcuggucuuccccuccgacgaguucgacgcgagcaucucccaggugaacgagaagaucaaccagagccuggccuucauccgcaaguccgacgagcugcuccacaacgugaacgccggcaagagcacgaccaacaucaugaucaccaccaucaucaucgucaucaucgugauccugcugucccucaucgccguggggcugcugcucuacugcaaggcccggugaggacuaguggaagcauuuuccuggcugauuaaaagaaauuacucagcuauggucaucuguuccuguuagaaggcuaugcagcauauuauauacuaugcgcauguuaugaaaugcauaauaaaaaauuuuaaaaaaucuaaaagaucuaaaaaaaaaaaaaaaaaaaaaaaaaaaaaaaaaaaaaaaaaaaaaaaaaaaaaaaaaaaaaaaaugcaucccccccccccccccccccccccccccccccaaaggcucuuuucagagccaccagaauu

SEQ ID NO: 5793 - RNA, 1946 nt, Artificial Sequence
  mRNA product Design c-2 comprising derived and/or modified sequence from HRSV(A2)__F-del_DSCav1_mut5 (opt1)
gggagacuccugucgggcggaaguaggaggaguagaguuuaaaaacaguacucuuuuuccgguucgggacguaguugaagcaacgacaagccggauaaccgcucuugagacaggaagcuuaccauggagcugcucauccugaaggccaacgccaucaccaccauccugacggcggugaccuucugcuucgccagcggccagaacaucaccgaggaguucuaccaguccacgugcagcgccgucuccaagggguaccucagcgcccugcgcaccggcugguacaccuccgugaucaccaucgagcugagcaacaucaaggagaacaagugcaacgggaccgacgccaaggugaagcucaucaagcaggagcuggacaaguacaagaacgcggucacggagcugcagcuccugaugcaguccacccccgccaccggcagcggguccgccaucgccagcggcguggcggugugcaagguccugcaccucgagggcgaggugaacaagaucaaguccgcccugcugagcaccaacaaggccguggucucccucagcgggugcggcguguccgugcugacguucaagguccuggaccucaagaacuacaucgacaagcagcugcugccgauccucaacaagcagagcugcuccaucagcaacaucgagaccgugaucgaguuccagcagaagaacaaccggcugcuggagaucacccgcgaguucuccgugaacgccggggucaccacgcccgugagcaccuacaugcucaccaacagcgagcugcugucccucaucaacgacaugcccaucaccaacgaccagaagaagcugaugagcaacaacgugcagaucguccggcagcaguccuacagcaucaugugcaucaucaaggaggaggugcuggccuacgugguccagcucccccuguacggcgugaucgacacgccgugcuggaagcugcacaccagcccccucugcaccaccaacacgaaggagggguccaacaucugccugacccgcaccgaccggggcugguacugcgacaacgcgggcuccgugagcuucuucccccaggccgagaccugcaagguccaguccaaccgcguguucugcgacacgaugaacagccggacccuccccuccgaggucaaccugugcaacguggacaucuucaacccgaaguacgacugcaagaucaugaccagcaagaccgacguguccagcuccgucaucacgagccugggggccaucguguccugcuacggcaagaccaagugcaccgccagcaacaagugccgggggaucaucaagaccuucuccaacggcugcgacuacgugagcaacaagggcgucgacacggugagcguggggaacacccucuacuacgucaacaagcaggagggcaagucccuguacgugaagggggagcccaucaucaacuucuacgacccccugguguuccccagcgacgaguucgacgccuccaucagccaggucaacgagaagaucaaccagucccucgcguucauccgcaagagcgacgagcugcugcacaacgugaacgccggcaaguccaccaccaacaucaugaucaccacgaucaucaucgugaucaucgucauccuccugagccugaucgccguggggcuccugcuguacugcaaggcccggugaggacuaguggaagcauuuuccuggcugauuaaaagaaauuacucagcuauggucaucuguuccuguuagaaggcuaugcagcauauuauauacuaugcgcauguuaugaaaugcauaauaaaaaauuuuaaaaaaucuaaaagaucuaaaaaaaaaaaaaaaaaaaaaaaaaaaaaaaaaaaaaaaaaaaaaaaaaaaaaaaaaaaaaaaaugcaucccccccccccccccccccccccccccccccaaaggcucuuuucagagccaccagaauu

SEQ ID NO: 5794 - RNA, 1946 nt, Artificial Sequence
  mRNA product Design c-2 comprising derived and/or modified sequence from HRSV(A2)__F-del_DSCav1_mut5 (opt2)
gggagacuccugucgggcggaaguaggaggaguagaguuuaaaaacaguacucuuuuuccgguucgggacguaguugaagcaacgacaagccggauaaccgcucuugagacaggaagcuuaccauggagcuccucauccucaaggccaacgccaucaccaccauccucaccgccgucaccuucugcuucgccuccggccagaacaucaccgaggaguucuaccaguccaccugcuccgccgucuccaagggcuaccucuccgcccuccgcaccggcugguacaccuccgucaucaccaucgagcucuccaacaucaaggagaacaagugcaacggcaccgacgccaaggucaagcucaucaagcaggagcucgacaaguacaagaacgccgucaccgagcuccagcuccucaugcaguccacccccgccaccggcuccggcuccgccaucgccuccggcgucgccgucugcaagguccuccaccucgagggcgaggucaacaagaucaaguccgcccuccucuccaccaacaaggccgucgucucccucuccggcugcggcgucuccguccucaccuucaagguccucgaccucaagaacuacaucgacaagcagcuccuccccauccucaacaagcaguccugcuccaucuccaacaucgagaccgucaucgaguuccagcagaagaacaaccgccuccucgagaucacccgcgaguucuccgucaacgccggcgucaccacccccgucuccaccuacaugcucaccaacuccgagcuccucucccucaucaacgacaugcccaucaccaacgaccagaagaagcucauguccaacaacguccagaucguccgccagcaguccuacuccaucaugugcaucaucaaggaggagguccucgccuacgucguccagcucccccucuacggcgucaucgacacccccugcuggaagcuccacaccuccccccucugcaccaccaacaccaaggagggcuccaacaucugccucacccgcaccgaccgcggcugguacugcgacaacgccggcuccgucuccuucuucccccaggccgagaccugcaagguccaguccaaccgcgucuucugcgacaccaugaacucccgcacccuccccuccgaggucaaccucugcaacgucgacaucuucaaccccaaguacgacugcaagaucaugaccuccaagaccgacgucuccuccuccgucaucaccucccucggcgccaucgucuccugcuacggcaagaccaagugcaccgccuccaacaagugccgcggcaucaucaagaccuucuccaacggcugcgacuacgucuccaacaagggcgucgacaccgucuccgucggcaacacccucuacuacgucaacaagcaggagggcaagucccucuacgucaagggcgagcccaucaucaacuucuacgacccccucgucuuccccuccgacgaguucgacgccuccaucucccaggucaacgagaagaucaaccagucccucgccuucauccgcaaguccgacgagcuccuccacaacgucaacgccggcaaguccaccaccaacaucaugaucaccaccaucaucaucgucaucaucgucauccuccucucccucaucgccgucggccuccuccucuacugcaaggcccgcugaggacuaguggaagcauuuuccuggcugauuaaaagaaauuacucagcuauggucaucuguuccuguuagaaggcuaugcagcauauuauauacuaugcgcauguuaugaaaugcauaauaaaaaauuuuaaaaaaucuaaaagaucuaaaaaaaaaaaaaaaaaaaaaaaaaaaaaaaaaaaaaaaaaaaaaaaaaaaaaaaaaaaaaaaaugcaucccccccccccccccccccccccccccccccaaaggcucuuuucagagccaccagaauu

SEQ ID NO: 5795 - RNA, 1946 nt, Artificial Sequence
  mRNA product Design c-2 comprising derived and/or modified sequence from HRSV(A2)__F-del_DSCav1_mut5 (opt3)
gggagacuccugucgggcggaaguaggaggaguagaguuuaaaaacaguacucuuuuuccgguucgggacguaguugaagcaacgacaagccggauaaccgcucuugagacaggaagcuuaccauggagcugcucauccuuaaggccaacgcuauuaccacaauacugacugcagugacguucugcuuugccagcggccagaauaucaccgaagaguucuaccaauccacauguucugcggucucaaaaggguauuugagugcuuuaagaacuggaugguacaccagcguuauuacaaucgaacuguccaacauuaaggagaauaaaugcaacgguaccgacgccaaggugaaacuaaucaagcaggaacucgauaaguauaaaaaugcaguaacugagcugcagcuucugaugcagucuacacccgccaccggcucggggucagcuauagcaagcggaguggccgucuguaagguguugcaccucgagggcgaaguuaacaaaaucaagagugcucugcuguccacgaauaaagccguggucucucucagcgguugcgggguguccguauuaacuuuuaagguucuggaccuuaagaacuacauugauaaacaauugcugccuauccuaaauaagcagucauguaguauuagcaacaucgagaccgugauagaguuccagcagaaaaauaacaggcuccuggaaauuacacgggaguuuucugucaaugcgggagugacuaccccaguguccacauauaugcuuaccaacucagaacuguugagccucaucaaugacaugccgauuacgaacgaucaaaagaaacugaugaguaacaauguccagaucguucgccagcagucuuacuccaucaugugcauuauaaaggaggaaguguuagcauauguagugcaacugccccucuacggcgucaucgacacuccuuguuggaaacuucauacaagcccacugugcaccacuaacacaaaggagggcucgaauauuuguuugacccgaacggaucgugggugguacugcgacaacgccggaucuguguccuucuuuccccaggcugaaaccuguaagguucagucaaauagaguguucugcgauacaaugaacaguagaacucugccuagcgaggucaaucucugcaacguggacaucuuuaauccaaaauaugauuguaagauaaugaccuccaaaacagacguaucuagcucaguuauuaccagucugggugccaucguguccugcuacggcaagacuaaauguacagcaagcaacaagugcagggggaucauuaagaccuucucuaauggaugugauuaugucucaaacaaaggcguggacacugucaguguggguaauacgcuuuacuauguuaacaagcaagaggggaaaagccuguacgugaagggagaacccaucauuaauuuuuaugacccuuugguauucccauccgaugaguuugacgcuucuauaucgcaggucaacgagaaaaucaaccagagccucgccuucauucggaaguccgaugaacuguuacacaaugugaacgcgggcaagucaacaaccaauaucaugaucacuaccauuauaaucguuauuaucgugauucugcuaagucucaucgccgucggccugcuuuuguacugcaaagcacgcugaggacuaguggaagcauuuuccuggcugauuaaaagaaauuacucagcuauggucaucuguuccuguuagaaggcuaugcagcauauuauauacuaugcgcauguuaugaaaugcauaauaaaaaauuuuaaaaaaucuaaaagaucuaaaaaaaaaaaaaaaaaaaaaaaaaaaaaaaaaaaaaaaaaaaaaaaaaaaaaaaaaaaaaaaaugcaucccccccccccccccccccccccccccccccaaaggcucuuuucagagccaccagaauu

SEQ ID NO: 5796 - RNA, 1946 nt, Artificial Sequence
  mRNA product Design c-2 comprising derived and/or modified sequence from HRSV(A2)__F-del_DSCav1_mut5 (opt4)
gggagacuccugucgggcggaaguaggaggaguagaguuuaaaaacaguacucuuuuuccgguucgggacguaguugaagcaacgacaagccggauaaccgcucuugagacaggaagcuuaccauggagcugcugauccugaaggccaacgccaucaccaccauccugaccgccgugaccuucugcuucgccagcggccagaacaucaccgaggaguucuaccagagcaccugcagcgccgugagcaagggcuaccugagcgcccugagaaccggcugguacaccagcgugaucaccaucgagcugagcaacaucaaggagaacaagugcaacggcaccgacgccaaggugaagcugaucaagcaggagcuggacaaguacaagaacgccgugaccgagcugcagcugcugaugcagagcacccccgccaccggcagcggcagcgccaucgccagcggcguggccgugugcaaggugcugcaccuggagggcgaggugaacaagaucaagagcgcccugcugagcaccaacaaggccguggugagccugagcggcugcggcgugagcgugcugaccuucaaggugcuggaccugaagaacuacaucgacaagcagcugcugcccauccugaacaagcagagcugcagcaucagcaacaucgagaccgugaucgaguuccagcagaagaacaacagacugcuggagaucaccagagaguucagcgugaacgccggcgugaccacccccgugagcaccuacaugcugaccaacagcgagcugcugagccugaucaacgacaugcccaucaccaacgaccagaagaagcugaugagcaacaacgugcagaucgugagacagcagagcuacagcaucaugugcaucaucaaggaggaggugcuggccuacguggugcagcugccccuguacggcgugaucgacacccccugcuggaagcugcacaccagcccccugugcaccaccaacaccaaggagggcagcaacaucugccugaccagaaccgacagaggcugguacugcgacaacgccggcagcgugagcuucuucccccaggccgagaccugcaaggugcagagcaacagaguguucugcgacaccaugaacagcagaacccugcccagcgaggugaaccugugcaacguggacaucuucaaccccaaguacgacugcaagaucaugaccagcaagaccgacgugagcagcagcgugaucaccagccugggcgccaucgugagcugcuacggcaagaccaagugcaccgccagcaacaagugcagaggcaucaucaagaccuucagcaacggcugcgacuacgugagcaacaagggcguggacaccgugagcgugggcaacacccuguacuacgugaacaagcaggagggcaagagccuguacgugaagggcgagcccaucaucaacuucuacgacccccugguguuccccagcgacgaguucgacgccagcaucagccaggugaacgagaagaucaaccagagccuggccuucaucagaaagagcgacgagcugcugcacaacgugaacgccggcaagagcaccaccaacaucaugaucaccaccaucaucaucgugaucaucgugauccugcugagccugaucgccgugggccugcugcuguacugcaaggccagaugaggacuaguggaagcauuuuccuggcugauuaaaagaaauuacucagcuauggucaucuguuccuguuagaaggcuaugcagcauauuauauacuaugcgcauguuaugaaaugcauaauaaaaaauuuuaaaaaaucuaaaagaucuaaaaaaaaaaaaaaaaaaaaaaaaaaaaaaaaaaaaaaaaaaaaaaaaaaaaaaaaaaaaaaaaugcaucccccccccccccccccccccccccccccccaaaggcucuuuucagagccaccagaauu

SEQ ID NO: 5797 - RNA, 1946 nt, Artificial Sequence
  mRNA product Design c-2 comprising derived and/or modified sequence from HRSV(A2)__F-del_DSCav1_mut5 (opt5)
gggagacuccugucgggcggaaguaggaggaguagaguuuaaaaacaguacucuuuuuccgguucgggacguaguugaagcaacgacaagccggauaaccgcucuugagacaggaagcuuaccauggagcugcucauccugaaggccaacgcuauuaccacaauccuuacggccgugaccuucugcuuugcgagcggccagaauauuacagaagaguucuaccaauccaccuguucugcugucagcaaaggguaucuguccgcccucagaacaggaugguacaccucuguuaucacaauugaacugagcaacaucaaggagaauaaaugcaacggcaccgacgccaaggugaaacuuaucaagcaggaacuggauaaguauaaaaaugcugugacggagcuccagcugcugaugcaguccacccccgccacagggucuggaagcgcuauugccuccggcgucgcgguguguaagguucuccaccuggagggggaagugaacaaaaucaagagcgcccuucugucuaccaauaaagcugucgugucccucagcggaugcggcguuucugugcugacauuuaagguccuugaccugaagaacuacauugauaaacaacuccugccuauccugaauaagcaguccuguagcauuucuaacaucgagaccgugauugaguuccagcagaaaaauaaccggcuccuggaaaucacgcgcgaguuuuccgugaaugccggcgucacaaccccgguuagcacauauaugcuuaccaacuccgaacugcucucucugaucaaugacaugcccauuaccaacgaucaaaagaaacuuaugagcaacaaugugcagaucgugagacagcaguccuacagcauuaugugcaucauuaaggaggaaguccuggcuuaugugguucaacucccucuguacggggugaucgacacacccuguuggaaacugcauacgucuccucucugcaccacaaacaccaaggagggauccaauaucugucugacacggaccgaucgcggcugguacugcgacaacgccgggagcgucucuuucuuuccccaggcggaaacguguaaggugcagagcaauagaguuuucugcgauacaaugaacuccagaacccugccuucugaggugaaucucugcaacgucgacauuuuuaauccgaaauaugauuguaagaucaugaccagcaaaacagacguguccagcucugucauuaccucccugggagccaucgugagcugcuacggcaagacaaaauguacggcuucuaacaagugccgggggauuaucaagaccuucuccaauggaugugauuauguuagcaacaaaggcguggacacagucuccgugggcaauacccuuuacuauguuaacaagcaagaggggaaaucucuguacgugaagggagaacccaucauuaauuuuuaugacccucucgucuuccccagcgaugaguuugacgccuccaucucucaggugaacgagaaaauuaaccagagccuggcuuucauccgcaaguccgaugaacugcuccacaaugugaacgccggcaagagcacaaccaauauuaugaucacgaccauuaucaucguuauuaucgucauucugcuuucucugaucgccguggggcuccugcuguacugcaaagcuagaugaggacuaguggaagcauuuuccuggcugauuaaaagaaauuacucagcuauggucaucuguuccuguuagaaggcuaugcagcauauuauauacuaugcgcauguuaugaaaugcauaauaaaaaauuuuaaaaaaucuaaaagaucuaaaaaaaaaaaaaaaaaaaaaaaaaaaaaaaaaaaaaaaaaaaaaaaaaaaaaaaaaaaaaaaaugcaucccccccccccccccccccccccccccccccaaaggcucuuuucagagccaccagaauu

SEQ ID NO: 5798 - RNA, 1946 nt, Artificial Sequence
  mRNA product Design c-2 comprising derived and/or modified sequence from HRSV(A2)__F-del_DSCav1_mut5 (opt6)
gggagacuccugucgggcggaaguaggaggaguagaguuuaaaaacaguacucuuuuuccgguucgggacguaguugaagcaacgacaagccggauaaccgcucuugagacaggaagcuuaccauggaacuuuuaauacugaaagcaaaugccaucacaaccauacuaacugccgucacauucugcuuugcaucaggacaaaacauaacagaagaauuuuaccaauccacaugcucagcaguaucaaaaggauaucuaucggcacuuagaacuggaugguacacaaguguuauaacuauagaacucucaaacauaaaagaaaacaaaugcaauggaacagacgcaaaaguaaaacuaauaaaacaagaacucgauaaauauaaaaaugcaguaaccgaacuacaacuauuaaugcaaagcacacccgcaacaggcagcggaucagcaauagcaagcggagucgcaguauguaaaguacuacaucuagaaggagaagucaacaaaaucaaaucugcacuucuauccacaaacaaagcuguaguaucccuauccggaugcggagucucaguauuaacuuuuaaaguacuagaccuuaaaaacuacauagauaaacaacuauuaccaauacuaaauaaacaaucaugcagcauauccaauauagagacaguaauugaauuucaacaaaaaaacaacagauuacuagaaauuacucgugaauuuuccguaaaugccggagucacaacaccaguaucaaccuauaugcuaacaaacagcgaacuacuuagcuuaauaaaugacaugccaauaacaaaugaccaaaaaaaacuuaugucaaauaacguacaaaucgucagacaacaauccuacucuauaauguguauaauuaaagaagaaguccuagcauacguaguucaauuaccacucuauggaguaauagauacaccaugcuggaaacuacacacgucaccacuauguacaacaaacacaaaagaaggauccaauauaugccuaacaagaaccgacagaggcugguauugugacaacgcaggauccguuucauucuucccacaagcagaaaccuguaaaguacaaucuaauagaguauuuugcgacacaaugaacaguagaacacuaccaagcgagguuaaucuauguaacguagacauauucaauccaaaauaugauugcaaaauaaugacaucaaaaacagauguaucgucgaguguaauaacaagucugggagcuauaguaagcugcuacggcaagacgaaauguaccgcuucaaauaaaugcagaggaaucauuaaaacauucucgaacggaugcgacuacguaaguaauaaaggugucgacaccguaucaguagggaauacauuauacuacgucaacaaacaagaaggaaaaucucuauauguaaaaggagaaccaauaauaaauuucuaugacccucuaguauucccaucagaugaauuugacgcuuccauaucacaaguaaacgaaaaaaucaaucaaucuuuagcauucauacgaaaaagugaugaacuccuacacaacgucaacgcaggaaaaagcacaacaaauauaaugaucacaacaaucaucauaguaauaauaguaauacuacuaucauuaauagcaguaggauuauugcuuuacugcaaagcacgauagggacuaguggaagcauuuuccuggcugauuaaaagaaauuacucagcuauggucaucuguuccuguuagaaggcuaugcagcauauuauauacuaugcgcauguuaugaaaugcauaauaaaaaauuuuaaaaaaucuaaaagaucuaaaaaaaaaaaaaaaaaaaaaaaaaaaaaaaaaaaaaaaaaaaaaaaaaaaaaaaaaaaaaaaaugcaucccccccccccccccccccccccccccccccaaaggcucuuuucagagccaccagaauu

SEQ ID NO: 5799 - RNA, 1946 nt, Artificial Sequence
  mRNA product Design c-2 comprising derived and/or modified sequence from HRSV(A2)__F-del_DSCav1_mut5 (opt11)
gggagacuccugucgggcggaaguaggaggaguagaguuuaaaaacaguacucuuuuuccgguucgggacguaguugaagcaacgacaagccggauaaccgcucuugagacaggaagcuuaccauggaacuccucauccucaaagccaacgccauaaccacaauacucaccgccguaaccuucugcuuugcgucgggacaaaacaucaccgaagaguucuaccaauccacuugcuccgcaguaagcaaaggauaccucuccgcccugcgaaccgguugguacacaucagucaucacaaucgaacucucaaacauaaaagaaaacaaaugcaacggcaccgacgcaaaggucaaauuaaucaagcaagaacuagacaaauacaaaaacgccgucacagaacuccagcugcuaaugcagagcacacccgcaacuggcagcggauccgccaucgcaucaggagucgccgugugcaaaguccuacaccucgaaggagaagugaacaaaaucaaaucagcccuacucuccaccaacaaggccgucgucucccucuccggcugcggugucuccguccuaaccuucaaagugcuagaccucaagaacuacaucgacaaacaacuccuaccaauacucaacaagcaaucuugcuccaucuccaacaucgaaaccguaaucgaguuccaacagaagaacaaccgccuccucgaaaucacccgcgaguucucugucaacgcaggggucaccacucccgucuccacauacaugcucacaaacuccgaacuccucagccucaucaacgacaugcccauaaccaacgaccagaaaaagcuaaugagcaauaacguccaaaucguuagacaacaaaguuauuccaucaugugcaucaucaaagaagaaguccucgccuacgucguacaacucccccucuauggcgucaucgacacccccugcuggaaacugcacacaucaccccucugcaccacaaacaccaaagaaggcucaaacaucugccuaacucgcaccgaccgcggcugguacugcgacaacgccggcagcguaucauucuuuccccaagccgaaacaugcaaaguucaauccaaccgcgucuucugcgacacaaugaacuccagaacgcuccccagcgaagucaaccucuguaacguagacaucuucaacccuaaguacgacugcaaaaucaugaccuccaaaacugauguauccuccuccgucaucacaucccugggcgccaucgucagcugcuacggcaaaacaaaaugcacugccucaaacaaaugccgagguaucauaaagaccuucucaaacggaugcgauuacgucagcaacaaaggcgucgacaccgucagugucggcaacacccucuacuacgucaacaaacaagaaggaaaaucccucuacgucaaaggcgaacccaucaucaacuucuacgacccccucgucuuccccagcgacgaguucgacgccuccaucucacaagucaacgaaaagauaaaccaaucucuagccuucauccgcaaauccgaugaacuccugcauaacgucaacgccggcaaauccaccacaaacaucaugaucacuaccauaaucaucgucauaaucguaauccuccuaucucuuaucgcagucggccuacuacucuacugcaaagcccgcuaaggacuaguggaagcauuuuccuggcugauuaaaagaaauuacucagcuauggucaucuguuccuguuagaaggcuaugcagcauauuauauacuaugcgcauguuaugaaaugcauaauaaaaaauuuuaaaaaaucuaaaagaucuaaaaaaaaaaaaaaaaaaaaaaaaaaaaaaaaaaaaaaaaaaaaaaaaaaaaaaaaaaaaaaaaugcaucccccccccccccccccccccccccccccccaaaggcucuuuucagagccaccagaauu

SEQ ID NO: 5800 - RNA, 1923 nt, Artificial Sequence
  mRNA product Design c-3 comprising derived and/or modified sequence from HRSV(A2)__F-del_DSCav1_mut5 (opt1)
gggagaguccgcucagccagguugcagaagcggcuuagcguguguccuaaucuucucucugcguguagguaggccugugccgcaaacaagcuuaccauggagcugcucauccugaaggccaacgccaucaccaccauccugacggcggugaccuucugcuucgccagcggccagaacaucaccgaggaguucuaccaguccacgugcagcgccgucuccaagggguaccucagcgcccugcggaccggcugguacaccuccgugaucaccaucgagcugagcaacaucaaggagaacaagugcaacgggaccgacgccaaggugaagcucaucaagcaggagcuggacaaguacaagaacgcggucacggagcugcagcuccugaugcaguccaccccggcaaccggcuccggcuccgccaucgcgagcggcgucgccgugugcaaggugcugcaccucgagggggaggucaacaagaucaagagcgcccugcuguccaccaacaaggccguggugagccucuccggcugcggcgucagcgugcugaccuucaaggugcuggaccucaagaacuacaucgacaagcagcugcugcccauccugaacaagcagagcugcuccaucagcaacaucgagacggugaucgaguuccagcagaagaacaaccggcuccuggagaucacccgcgaguucagcgugaacgccggggucaccacccccguguccacguacaugcugaccaacagcgagcuccugucccugaucaacgacaugccgaucaccaacgaccagaagaagcucaugagcaacaacgugcagaucguccggcagcaguccuacagcaucaugugcaucaucaaggaggaggugcuggcguacgugguccagcugccccucuacggcgugaucgacacccccugcuggaagcugcacacgagcccccugugcaccaccaacaccaaggagggguccaacaucugccucacgcgcaccgaccggggcugguacugcgacaacgccggcagcgucuccuucuucccgcaggccgagaccugcaaggugcagagcaaccgcguguucugcgacaccaugaacucccggacgcugcccagcgagguaaaccucugcaacgucgacaucuucaaccccaaguacgacugcaagaucaugaccuccaagaccgacgugagcuccagcgugaucaccucccugggggccaucgucagcugcuacggcaagacgaagugcaccgccagcaacaagugccgggggaucaucaagaccuucuccaacggcugcgacuacgugagcaacaagggcguggacaccguguccgucgggaacacccuguacuacgugaacaagcaggagggcaagagccucuacgugaagggggagcccaucaucaacuucuacgacccgcuggucuuccccuccgacgaguucgacgcgagcaucucccaggugaacgagaagaucaaccagagccuggccuucauccgcaaguccgacgagcugcuccacaacgugaacgccggcaagagcacgaccaacaucaugaucaccaccaucaucaucgucaucaucgugauccugcugucccucaucgccguggggcugcugcucuacugcaaggcccggugaggacuaguacuggcugcaucucccuuuccucuguccuccauccuucucccaggauggugaagggggaccugguacccagugauccccaccccaggauccuaaaucaugacuuaccugcuaauaaaaacucauuggaaaagugagaagaucuaaaaaaaaaaaaaaaaaaaaaaaaaaaaaaaaaaaaaaaaaaaaaaaaaaaaaaaaaaaaaaaaugcaucccccccccccccccccccccccccccccccaaaggcucuuuucagagccaccagaauu

SEQ ID NO: 5801 - RNA, 1923 nt, Artificial Sequence
  mRNA product Design c-3 comprising derived and/or modified sequence from HRSV(A2)__F-del_DSCav1_mut5 (opt1)
gggagaguccgcucagccagguugcagaagcggcuuagcguguguccuaaucuucucucugcguguagguaggccugugccgcaaacaagcuuaccauggagcugcucauccugaaggccaacgccaucaccaccauccugacggcggugaccuucugcuucgccagcggccagaacaucaccgaggaguucuaccaguccacgugcagcgccgucuccaagggguaccucagcgcccugcgcaccggcugguacaccuccgugaucaccaucgagcugagcaacaucaaggagaacaagugcaacgggaccgacgccaaggugaagcucaucaagcaggagcuggacaaguacaagaacgcggucacggagcugcagcuccugaugcaguccacccccgccaccggcagcggguccgccaucgccagcggcguggcggugugcaagguccugcaccucgagggcgaggugaacaagaucaaguccgcccugcugagcaccaacaaggccguggucucccucagcgggugcggcguguccgugcugacguucaagguccuggaccucaagaacuacaucgacaagcagcugcugccgauccucaacaagcagagcugcuccaucagcaacaucgagaccgugaucgaguuccagcagaagaacaaccggcugcuggagaucacccgcgaguucuccgugaacgccggggucaccacgcccgugagcaccuacaugcucaccaacagcgagcugcugucccucaucaacgacaugcccaucaccaacgaccagaagaagcugaugagcaacaacgugcagaucguccggcagcaguccuacagcaucaugugcaucaucaaggaggaggugcuggccuacgugguccagcucccccuguacggcgugaucgacacgccgugcuggaagcugcacaccagcccccucugcaccaccaacacgaaggagggguccaacaucugccugacccgcaccgaccggggcugguacugcgacaacgcgggcuccgugagcuucuucccccaggccgagaccugcaagguccaguccaaccgcguguucugcgacacgaugaacagccggacccuccccuccgaggucaaccugugcaacguggacaucuucaacccgaaguacgacugcaagaucaugaccagcaagaccgacguguccagcuccgucaucacgagccugggggccaucguguccugcuacggcaagaccaagugcaccgccagcaacaagugccgggggaucaucaagaccuucuccaacggcugcgacuacgugagcaacaagggcgucgacacggugagcguggggaacacccucuacuacgucaacaagcaggagggcaagucccuguacgugaagggggagcccaucaucaacuucuacgacccccugguguuccccagcgacgaguucgacgccuccaucagccaggucaacgagaagaucaaccagucccucgcguucauccgcaagagcgacgagcugcugcacaacgugaacgccggcaaguccaccaccaacaucaugaucaccacgaucaucaucgugaucaucgucauccuccugagccugaucgccguggggcuccugcuguacugcaaggcccggugaggacuaguacuggcugcaucucccuuuccucuguccuccauccuucucccaggauggugaagggggaccugguacccagugauccccaccccaggauccuaaaucaugacuuaccugcuaauaaaaacucauuggaaaagugagaagaucuaaaaaaaaaaaaaaaaaaaaaaaaaaaaaaaaaaaaaaaaaaaaaaaaaaaaaaaaaaaaaaaaugcaucccccccccccccccccccccccccccccccaaaggcucuuuucagagccaccagaauu

SEQ ID NO: 5802 - RNA, 1923 nt, Artificial Sequence
  mRNA product Design c-3 comprising derived and/or modified sequence from HRSV(A2)__F-del_DSCav1_mut5 (opt2)
gggagaguccgcucagccagguugcagaagcggcuuagcguguguccuaaucuucucucugcguguagguaggccugugccgcaaacaagcuuaccauggagcuccucauccucaaggccaacgccaucaccaccauccucaccgccgucaccuucugcuucgccuccggccagaacaucaccgaggaguucuaccaguccaccugcuccgccgucuccaagggcuaccucuccgcccuccgcaccggcugguacaccuccgucaucaccaucgagcucuccaacaucaaggagaacaagugcaacggcaccgacgccaaggucaagcucaucaagcaggagcucgacaaguacaagaacgccgucaccgagcuccagcuccucaugcaguccacccccgccaccggcuccggcuccgccaucgccuccggcgucgccgucugcaagguccuccaccucgagggcgaggucaacaagaucaaguccgcccuccucuccaccaacaaggccgucgucucccucuccggcugcggcgucuccguccucaccuucaagguccucgaccucaagaacuacaucgacaagcagcuccuccccauccucaacaagcaguccugcuccaucuccaacaucgagaccgucaucgaguuccagcagaagaacaaccgccuccucgagaucacccgcgaguucuccgucaacgccggcgucaccacccccgucuccaccuacaugcucaccaacuccgagcuccucucccucaucaacgacaugcccaucaccaacgaccagaagaagcucauguccaacaacguccagaucguccgccagcaguccuacuccaucaugugcaucaucaaggaggagguccucgccuacgucguccagcucccccucuacggcgucaucgacacccccugcuggaagcuccacaccuccccccucugcaccaccaacaccaaggagggcuccaacaucugccucacccgcaccgaccgcggcugguacugcgacaacgccggcuccgucuccuucuucccccaggccgagaccugcaagguccaguccaaccgcgucuucugcgacaccaugaacucccgcacccuccccuccgaggucaaccucugcaacgucgacaucuucaaccccaaguacgacugcaagaucaugaccuccaagaccgacgucuccuccuccgucaucaccucccucggcgccaucgucuccugcuacggcaagaccaagugcaccgccuccaacaagugccgcggcaucaucaagaccuucuccaacggcugcgacuacgucuccaacaagggcgucgacaccgucuccgucggcaacacccucuacuacgucaacaagcaggagggcaagucccucuacgucaagggcgagcccaucaucaacuucuacgacccccucgucuuccccuccgacgaguucgacgccuccaucucccaggucaacgagaagaucaaccagucccucgccuucauccgcaaguccgacgagcuccuccacaacgucaacgccggcaaguccaccaccaacaucaugaucaccaccaucaucaucgucaucaucgucauccuccucucccucaucgccgucggccuccuccucuacugcaaggcccgcugaggacuaguacuggcugcaucucccuuuccucuguccuccauccuucucccaggauggugaagggggaccugguacccagugauccccaccccaggauccuaaaucaugacuuaccugcuaauaaaaacucauuggaaaagugagaagaucuaaaaaaaaaaaaaaaaaaaaaaaaaaaaaaaaaaaaaaaaaaaaaaaaaaaaaaaaaaaaaaaaugcaucccccccccccccccccccccccccccccccaaaggcucuuuucagagccaccagaauu

SEQ ID NO: 5803 - RNA, 1923 nt, Artificial Sequence
  mRNA product Design c-3 comprising derived and/or modified sequence from HRSV(A2)__F-del_DSCav1_mut5 (opt3)
gggagaguccgcucagccagguugcagaagcggcuuagcguguguccuaaucuucucucugcguguagguaggccugugccgcaaacaagcuuaccauggagcugcucauccuuaaggccaacgcuauuaccacaauacugacugcagugacguucugcuuugccagcggccagaauaucaccgaagaguucuaccaauccacauguucugcggucucaaaaggguauuugagugcuuuaagaacuggaugguacaccagcguuauuacaaucgaacuguccaacauuaaggagaauaaaugcaacgguaccgacgccaaggugaaacuaaucaagcaggaacucgauaaguauaaaaaugcaguaacugagcugcagcuucugaugcagucuacacccgccaccggcucggggucagcuauagcaagcggaguggccgucuguaagguguugcaccucgagggcgaaguuaacaaaaucaagagugcucugcuguccacgaauaaagccguggucucucucagcgguugcgggguguccguauuaacuuuuaagguucuggaccuuaagaacuacauugauaaacaauugcugccuauccuaaauaagcagucauguaguauuagcaacaucgagaccgugauagaguuccagcagaaaaauaacaggcuccuggaaauuacacgggaguuuucugucaaugcgggagugacuaccccaguguccacauauaugcuuaccaacucagaacuguugagccucaucaaugacaugccgauuacgaacgaucaaaagaaacugaugaguaacaauguccagaucguucgccagcagucuuacuccaucaugugcauuauaaaggaggaaguguuagcauauguagugcaacugccccucuacggcgucaucgacacuccuuguuggaaacuucauacaagcccacugugcaccacuaacacaaaggagggcucgaauauuuguuugacccgaacggaucgugggugguacugcgacaacgccggaucuguguccuucuuuccccaggcugaaaccuguaagguucagucaaauagaguguucugcgauacaaugaacaguagaacucugccuagcgaggucaaucucugcaacguggacaucuuuaauccaaaauaugauuguaagauaaugaccuccaaaacagacguaucuagcucaguuauuaccagucugggugccaucguguccugcuacggcaagacuaaauguacagcaagcaacaagugcagggggaucauuaagaccuucucuaauggaugugauuaugucucaaacaaaggcguggacacugucaguguggguaauacgcuuuacuauguuaacaagcaagaggggaaaagccuguacgugaagggagaacccaucauuaauuuuuaugacccuuugguauucccauccgaugaguuugacgcuucuauaucgcaggucaacgagaaaaucaaccagagccucgccuucauucggaaguccgaugaacuguuacacaaugugaacgcgggcaagucaacaaccaauaucaugaucacuaccauuauaaucguuauuaucgugauucugcuaagucucaucgccgucggccugcuuuuguacugcaaagcacgcugaggacuaguacuggcugcaucucccuuuccucuguccuccauccuucucccaggauggugaagggggaccugguacccagugauccccaccccaggauccuaaaucaugacuuaccugcuaauaaaaacucauuggaaaagugagaagaucuaaaaaaaaaaaaaaaaaaaaaaaaaaaaaaaaaaaaaaaaaaaaaaaaaaaaaaaaaaaaaaaaugcaucccccccccccccccccccccccccccccccaaaggcucuuuucagagccaccagaauu

SEQ ID NO: 5804 - RNA, 1923 nt, Artificial Sequence
  mRNA product Design c-3 comprising derived and/or modified sequence from HRSV(A2)__F-del_DSCav1_mut5 (opt4)
gggagaguccgcucagccagguugcagaagcggcuuagcguguguccuaaucuucucucugcguguagguaggccugugccgcaaacaagcuuaccauggagcugcugauccugaaggccaacgccaucaccaccauccugaccgccgugaccuucugcuucgccagcggccagaacaucaccgaggaguucuaccagagcaccugcagcgccgugagcaagggcuaccugagcgcccugagaaccggcugguacaccagcgugaucaccaucgagcugagcaacaucaaggagaacaagugcaacggcaccgacgccaaggugaagcugaucaagcaggagcuggacaaguacaagaacgccgugaccgagcugcagcugcugaugcagagcacccccgccaccggcagcggcagcgccaucgccagcggcguggccgugugcaaggugcugcaccuggagggcgaggugaacaagaucaagagcgcccugcugagcaccaacaaggccguggugagccugagcggcugcggcgugagcgugcugaccuucaaggugcuggaccugaagaacuacaucgacaagcagcugcugcccauccugaacaagcagagcugcagcaucagcaacaucgagaccgugaucgaguuccagcagaagaacaacagacugcuggagaucaccagagaguucagcgugaacgccggcgugaccacccccgugagcaccuacaugcugaccaacagcgagcugcugagccugaucaacgacaugcccaucaccaacgaccagaagaagcugaugagcaacaacgugcagaucgugagacagcagagcuacagcaucaugugcaucaucaaggaggaggugcuggccuacguggugcagcugccccuguacggcgugaucgacacccccugcuggaagcugcacaccagcccccugugcaccaccaacaccaaggagggcagcaacaucugccugaccagaaccgacagaggcugguacugcgacaacgccggcagcgugagcuucuucccccaggccgagaccugcaaggugcagagcaacagaguguucugcgacaccaugaacagcagaacccugcccagcgaggugaaccugugcaacguggacaucuucaaccccaaguacgacugcaagaucaugaccagcaagaccgacgugagcagcagcgugaucaccagccugggcgccaucgugagcugcuacggcaagaccaagugcaccgccagcaacaagugcagaggcaucaucaagaccuucagcaacggcugcgacuacgugagcaacaagggcguggacaccgugagcgugggcaacacccuguacuacgugaacaagcaggagggcaagagccuguacgugaagggcgagcccaucaucaacuucuacgacccccugguguuccccagcgacgaguucgacgccagcaucagccaggugaacgagaagaucaaccagagccuggccuucaucagaaagagcgacgagcugcugcacaacgugaacgccggcaagagcaccaccaacaucaugaucaccaccaucaucaucgugaucaucgugauccugcugagccugaucgccgugggccugcugcuguacugcaaggccagaugaggacuaguacuggcugcaucucccuuuccucuguccuccauccuucucccaggauggugaagggggaccugguacccagugauccccaccccaggauccuaaaucaugacuuaccugcuaauaaaaacucauuggaaaagugagaagaucuaaaaaaaaaaaaaaaaaaaaaaaaaaaaaaaaaaaaaaaaaaaaaaaaaaaaaaaaaaaaaaaaugcaucccccccccccccccccccccccccccccccaaaggcucuuuucagagccaccagaauu

SEQ ID NO: 5805 - RNA, 1923 nt, Artificial Sequence
  mRNA product Design c-3 comprising derived and/or modified sequence from HRSV(A2)__F-del_DSCav1_mut5 (opt5)
gggagaguccgcucagccagguugcagaagcggcuuagcguguguccuaaucuucucucugcguguagguaggccugugccgcaaacaagcuuaccauggagcugcucauccugaaggccaacgcuauuaccacaauccuuacggccgugaccuucugcuuugcgagcggccagaauauuacagaagaguucuaccaauccaccuguucugcugucagcaaaggguaucuguccgcccucagaacaggaugguacaccucuguuaucacaauugaacugagcaacaucaaggagaauaaaugcaacggcaccgacgccaaggugaaacuuaucaagcaggaacuggauaaguauaaaaaugcugugacggagcuccagcugcugaugcaguccacccccgccacagggucuggaagcgcuauugccuccggcgucgcgguguguaagguucuccaccuggagggggaagugaacaaaaucaagagcgcccuucugucuaccaauaaagcugucgugucccucagcggaugcggcguuucugugcugacauuuaagguccuugaccugaagaacuacauugauaaacaacuccugccuauccugaauaagcaguccuguagcauuucuaacaucgagaccgugauugaguuccagcagaaaaauaaccggcuccuggaaaucacgcgcgaguuuuccgugaaugccggcgucacaaccccgguuagcacauauaugcuuaccaacuccgaacugcucucucugaucaaugacaugcccauuaccaacgaucaaaagaaacuuaugagcaacaaugugcagaucgugagacagcaguccuacagcauuaugugcaucauuaaggaggaaguccuggcuuaugugguucaacucccucuguacggggugaucgacacacccuguuggaaacugcauacgucuccucucugcaccacaaacaccaaggagggauccaauaucugucugacacggaccgaucgcggcugguacugcgacaacgccgggagcgucucuuucuuuccccaggcggaaacguguaaggugcagagcaauagaguuuucugcgauacaaugaacuccagaacccugccuucugaggugaaucucugcaacgucgacauuuuuaauccgaaauaugauuguaagaucaugaccagcaaaacagacguguccagcucugucauuaccucccugggagccaucgugagcugcuacggcaagacaaaauguacggcuucuaacaagugccgggggauuaucaagaccuucuccaauggaugugauuauguuagcaacaaaggcguggacacagucuccgugggcaauacccuuuacuauguuaacaagcaagaggggaaaucucuguacgugaagggagaacccaucauuaauuuuuaugacccucucgucuuccccagcgaugaguuugacgccuccaucucucaggugaacgagaaaauuaaccagagccuggcuuucauccgcaaguccgaugaacugcuccacaaugugaacgccggcaagagcacaaccaauauuaugaucacgaccauuaucaucguuauuaucgucauucugcuuucucugaucgccguggggcuccugcuguacugcaaagcuagaugaggacuaguacuggcugcaucucccuuuccucuguccuccauccuucucccaggauggugaagggggaccugguacccagugauccccaccccaggauccuaaaucaugacuuaccugcuaauaaaaacucauuggaaaagugagaagaucuaaaaaaaaaaaaaaaaaaaaaaaaaaaaaaaaaaaaaaaaaaaaaaaaaaaaaaaaaaaaaaaaugcaucccccccccccccccccccccccccccccccaaaggcucuuuucagagccaccagaauu

SEQ ID NO: 5806 - RNA, 1923 nt, Artificial Sequence
  mRNA product Design c-3 comprising derived and/or modified sequence from HRSV(A2)__F-del_DSCav1_mut5 (opt6)
gggagaguccgcucagccagguugcagaagcggcuuagcguguguccuaaucuucucucugcguguagguaggccugugccgcaaacaagcuuaccauggaacuuuuaauacugaaagcaaaugccaucacaaccauacuaacugccgucacauucugcuuugcaucaggacaaaacauaacagaagaauuuuaccaauccacaugcucagcaguaucaaaaggauaucuaucggcacuuagaacuggaugguacacaaguguuauaacuauagaacucucaaacauaaaagaaaacaaaugcaauggaacagacgcaaaaguaaaacuaauaaaacaagaacucgauaaauauaaaaaugcaguaaccgaacuacaacuauuaaugcaaagcacacccgcaacaggcagcggaucagcaauagcaagcggagucgcaguauguaaaguacuacaucuagaaggagaagucaacaaaaucaaaucugcacuucuauccacaaacaaagcuguaguaucccuauccggaugcggagucucaguauuaacuuuuaaaguacuagaccuuaaaaacuacauagauaaacaacuauuaccaauacuaaauaaacaaucaugcagcauauccaauauagagacaguaauugaauuucaacaaaaaaacaacagauuacuagaaauuacucgugaauuuuccguaaaugccggagucacaacaccaguaucaaccuauaugcuaacaaacagcgaacuacuuagcuuaauaaaugacaugccaauaacaaaugaccaaaaaaaacuuaugucaaauaacguacaaaucgucagacaacaauccuacucuauaauguguauaauuaaagaagaaguccuagcauacguaguucaauuaccacucuauggaguaauagauacaccaugcuggaaacuacacacgucaccacuauguacaacaaacacaaaagaaggauccaauauaugccuaacaagaaccgacagaggcugguauugugacaacgcaggauccguuucauucuucccacaagcagaaaccuguaaaguacaaucuaauagaguauuuugcgacacaaugaacaguagaacacuaccaagcgagguuaaucuauguaacguagacauauucaauccaaaauaugauugcaaaauaaugacaucaaaaacagauguaucgucgaguguaauaacaagucugggagcuauaguaagcugcuacggcaagacgaaauguaccgcuucaaauaaaugcagaggaaucauuaaaacauucucgaacggaugcgacuacguaaguaauaaaggugucgacaccguaucaguagggaauacauuauacuacgucaacaaacaagaaggaaaaucucuauauguaaaaggagaaccaauaauaaauuucuaugacccucuaguauucccaucagaugaauuugacgcuuccauaucacaaguaaacgaaaaaaucaaucaaucuuuagcauucauacgaaaaagugaugaacuccuacacaacgucaacgcaggaaaaagcacaacaaauauaaugaucacaacaaucaucauaguaauaauaguaauacuacuaucauuaauagcaguaggauuauugcuuuacugcaaagcacgauagggacuaguacuggcugcaucucccuuuccucuguccuccauccuucucccaggauggugaagggggaccugguacccagugauccccaccccaggauccuaaaucaugacuuaccugcuaauaaaaacucauuggaaaagugagaagaucuaaaaaaaaaaaaaaaaaaaaaaaaaaaaaaaaaaaaaaaaaaaaaaaaaaaaaaaaaaaaaaaaugcaucccccccccccccccccccccccccccccccaaaggcucuuuucagagccaccagaauu

SEQ ID NO: 5807 - RNA, 1923 nt, Artificial Sequence
  mRNA product Design c-3 comprising derived and/or modified sequence from HRSV(A2)__F-del_DSCav1_mut5 (opt11)
gggagaguccgcucagccagguugcagaagcggcuuagcguguguccuaaucuucucucugcguguagguaggccugugccgcaaacaagcuuaccauggaacuccucauccucaaagccaacgccauaaccacaauacucaccgccguaaccuucugcuuugcgucgggacaaaacaucaccgaagaguucuaccaauccacuugcuccgcaguaagcaaaggauaccucuccgcccugcgaaccgguugguacacaucagucaucacaaucgaacucucaaacauaaaagaaaacaaaugcaacggcaccgacgcaaaggucaaauuaaucaagcaagaacuagacaaauacaaaaacgccgucacagaacuccagcugcuaaugcagagcacacccgcaacuggcagcggauccgccaucgcaucaggagucgccgugugcaaaguccuacaccucgaaggagaagugaacaaaaucaaaucagcccuacucuccaccaacaaggccgucgucucccucuccggcugcggugucuccguccuaaccuucaaagugcuagaccucaagaacuacaucgacaaacaacuccuaccaauacucaacaagcaaucuugcuccaucuccaacaucgaaaccguaaucgaguuccaacagaagaacaaccgccuccucgaaaucacccgcgaguucucugucaacgcaggggucaccacucccgucuccacauacaugcucacaaacuccgaacuccucagccucaucaacgacaugcccauaaccaacgaccagaaaaagcuaaugagcaauaacguccaaaucguuagacaacaaaguuauuccaucaugugcaucaucaaagaagaaguccucgccuacgucguacaacucccccucuauggcgucaucgacacccccugcuggaaacugcacacaucaccccucugcaccacaaacaccaaagaaggcucaaacaucugccuaacucgcaccgaccgcggcugguacugcgacaacgccggcagcguaucauucuuuccccaagccgaaacaugcaaaguucaauccaaccgcgucuucugcgacacaaugaacuccagaacgcuccccagcgaagucaaccucuguaacguagacaucuucaacccuaaguacgacugcaaaaucaugaccuccaaaacugauguauccuccuccgucaucacaucccugggcgccaucgucagcugcuacggcaaaacaaaaugcacugccucaaacaaaugccgagguaucauaaagaccuucucaaacggaugcgauuacgucagcaacaaaggcgucgacaccgucagugucggcaacacccucuacuacgucaacaaacaagaaggaaaaucccucuacgucaaaggcgaacccaucaucaacuucuacgacccccucgucuuccccagcgacgaguucgacgccuccaucucacaagucaacgaaaagauaaaccaaucucuagccuucauccgcaaauccgaugaacuccugcauaacgucaacgccggcaaauccaccacaaacaucaugaucacuaccauaaucaucgucauaaucguaauccuccuaucucuuaucgcagucggccuacuacucuacugcaaagcccgcuaaggacuaguacuggcugcaucucccuuuccucuguccuccauccuucucccaggauggugaagggggaccugguacccagugauccccaccccaggauccuaaaucaugacuuaccugcuaauaaaaacucauuggaaaagugagaagaucuaaaaaaaaaaaaaaaaaaaaaaaaaaaaaaaaaaaaaaaaaaaaaaaaaaaaaaaaaaaaaaaaugcaucccccccccccccccccccccccccccccccaaaggcucuuuucagagccaccagaauu

SEQ ID NO: 5808 - RNA, 1919 nt, Artificial Sequence
  mRNA product Design c-4 comprising derived and/or modified sequence from HRSV(A2)__F-del_DSCav1_mut5 (opt1)
gggagaguccgcucagccagguugcagaagcggcuuagcguguguccuaaucuucucucugcguguagguaggccugugccgcaaacaagcuuaccauggagcugcucauccugaaggccaacgccaucaccaccauccugacggcggugaccuucugcuucgccagcggccagaacaucaccgaggaguucuaccaguccacgugcagcgccgucuccaagggguaccucagcgcccugcggaccggcugguacaccuccgugaucaccaucgagcugagcaacaucaaggagaacaagugcaacgggaccgacgccaaggugaagcucaucaagcaggagcuggacaaguacaagaacgcggucacggagcugcagcuccugaugcaguccaccccggcaaccggcuccggcuccgccaucgcgagcggcgucgccgugugcaaggugcugcaccucgagggggaggucaacaagaucaagagcgcccugcuguccaccaacaaggccguggugagccucuccggcugcggcgucagcgugcugaccuucaaggugcuggaccucaagaacuacaucgacaagcagcugcugcccauccugaacaagcagagcugcuccaucagcaacaucgagacggugaucgaguuccagcagaagaacaaccggcuccuggagaucacccgcgaguucagcgugaacgccggggucaccacccccguguccacguacaugcugaccaacagcgagcuccugucccugaucaacgacaugccgaucaccaacgaccagaagaagcucaugagcaacaacgugcagaucguccggcagcaguccuacagcaucaugugcaucaucaaggaggaggugcuggcguacgugguccagcugccccucuacggcgugaucgacacccccugcuggaagcugcacacgagcccccugugcaccaccaacaccaaggagggguccaacaucugccucacgcgcaccgaccggggcugguacugcgacaacgccggcagcgucuccuucuucccgcaggccgagaccugcaaggugcagagcaaccgcguguucugcgacaccaugaacucccggacgcugcccagcgagguaaaccucugcaacgucgacaucuucaaccccaaguacgacugcaagaucaugaccuccaagaccgacgugagcuccagcgugaucaccucccugggggccaucgucagcugcuacggcaagacgaagugcaccgccagcaacaagugccgggggaucaucaagaccuucuccaacggcugcgacuacgugagcaacaagggcguggacaccguguccgucgggaacacccuguacuacgugaacaagcaggagggcaagagccucuacgugaagggggagcccaucaucaacuucuacgacccgcuggucuuccccuccgacgaguucgacgcgagcaucucccaggugaacgagaagaucaaccagagccuggccuucauccgcaaguccgacgagcugcuccacaacgugaacgccggcaagagcacgaccaacaucaugaucaccaccaucaucaucgucaucaucgugauccugcugucccucaucgccguggggcugcugcucuacugcaaggcccggugaggacuaguggaagcauuuuccuggcugauuaaaagaaauuacucagcuauggucaucuguuccuguuagaaggcuaugcagcauauuauauacuaugcgcauguuaugaaaugcauaauaaaaaauuuuaaaaaaucuaaaagaucuaaaaaaaaaaaaaaaaaaaaaaaaaaaaaaaaaaaaaaaaaaaaaaaaaaaaaaaaaaaaaaaaugcaucccccccccccccccccccccccccccccccaaaggcucuuuucagagccaccagaauu

SEQ ID NO: 5809 - RNA, 1919 nt, Artificial Sequence
  mRNA product Design c-4 comprising derived and/or modified sequence from HRSV(A2)__F-del_DSCav1_mut5 (opt1)
gggagaguccgcucagccagguugcagaagcggcuuagcguguguccuaaucuucucucugcguguagguaggccugugccgcaaacaagcuuaccauggagcugcucauccugaaggccaacgccaucaccaccauccugacggcggugaccuucugcuucgccagcggccagaacaucaccgaggaguucuaccaguccacgugcagcgccgucuccaagggguaccucagcgcccugcgcaccggcugguacaccuccgugaucaccaucgagcugagcaacaucaaggagaacaagugcaacgggaccgacgccaaggugaagcucaucaagcaggagcuggacaaguacaagaacgcggucacggagcugcagcuccugaugcaguccacccccgccaccggcagcggguccgccaucgccagcggcguggcggugugcaagguccugcaccucgagggcgaggugaacaagaucaaguccgcccugcugagcaccaacaaggccguggucucccucagcgggugcggcguguccgugcugacguucaagguccuggaccucaagaacuacaucgacaagcagcugcugccgauccucaacaagcagagcugcuccaucagcaacaucgagaccgugaucgaguuccagcagaagaacaaccggcugcuggagaucacccgcgaguucuccgugaacgccggggucaccacgcccgugagcaccuacaugcucaccaacagcgagcugcugucccucaucaacgacaugcccaucaccaacgaccagaagaagcugaugagcaacaacgugcagaucguccggcagcaguccuacagcaucaugugcaucaucaaggaggaggugcuggccuacgugguccagcucccccuguacggcgugaucgacacgccgugcuggaagcugcacaccagcccccucugcaccaccaacacgaaggagggguccaacaucugccugacccgcaccgaccggggcugguacugcgacaacgcgggcuccgugagcuucuucccccaggccgagaccugcaagguccaguccaaccgcguguucugcgacacgaugaacagccggacccuccccuccgaggucaaccugugcaacguggacaucuucaacccgaaguacgacugcaagaucaugaccagcaagaccgacguguccagcuccgucaucacgagccugggggccaucguguccugcuacggcaagaccaagugcaccgccagcaacaagugccgggggaucaucaagaccuucuccaacggcugcgacuacgugagcaacaagggcgucgacacggugagcguggggaacacccucuacuacgucaacaagcaggagggcaagucccuguacgugaagggggagcccaucaucaacuucuacgacccccugguguuccccagcgacgaguucgacgccuccaucagccaggucaacgagaagaucaaccagucccucgcguucauccgcaagagcgacgagcugcugcacaacgugaacgccggcaaguccaccaccaacaucaugaucaccacgaucaucaucgugaucaucgucauccuccugagccugaucgccguggggcuccugcuguacugcaaggcccggugaggacuaguggaagcauuuuccuggcugauuaaaagaaauuacucagcuauggucaucuguuccuguuagaaggcuaugcagcauauuauauacuaugcgcauguuaugaaaugcauaauaaaaaauuuuaaaaaaucuaaaagaucuaaaaaaaaaaaaaaaaaaaaaaaaaaaaaaaaaaaaaaaaaaaaaaaaaaaaaaaaaaaaaaaaugcaucccccccccccccccccccccccccccccccaaaggcucuuuucagagccaccagaauu

SEQ ID NO: 5810 - RNA, 1919 nt, Artificial Sequence
  mRNA product Design c-4 comprising derived and/or modified sequence from HRSV(A2)__F-del_DSCav1_mut5 (opt2)
gggagaguccgcucagccagguugcagaagcggcuuagcguguguccuaaucuucucucugcguguagguaggccugugccgcaaacaagcuuaccauggagcuccucauccucaaggccaacgccaucaccaccauccucaccgccgucaccuucugcuucgccuccggccagaacaucaccgaggaguucuaccaguccaccugcuccgccgucuccaagggcuaccucuccgcccuccgcaccggcugguacaccuccgucaucaccaucgagcucuccaacaucaaggagaacaagugcaacggcaccgacgccaaggucaagcucaucaagcaggagcucgacaaguacaagaacgccgucaccgagcuccagcuccucaugcaguccacccccgccaccggcuccggcuccgccaucgccuccggcgucgccgucugcaagguccuccaccucgagggcgaggucaacaagaucaaguccgcccuccucuccaccaacaaggccgucgucucccucuccggcugcggcgucuccguccucaccuucaagguccucgaccucaagaacuacaucgacaagcagcuccuccccauccucaacaagcaguccugcuccaucuccaacaucgagaccgucaucgaguuccagcagaagaacaaccgccuccucgagaucacccgcgaguucuccgucaacgccggcgucaccacccccgucuccaccuacaugcucaccaacuccgagcuccucucccucaucaacgacaugcccaucaccaacgaccagaagaagcucauguccaacaacguccagaucguccgccagcaguccuacuccaucaugugcaucaucaaggaggagguccucgccuacgucguccagcucccccucuacggcgucaucgacacccccugcuggaagcuccacaccuccccccucugcaccaccaacaccaaggagggcuccaacaucugccucacccgcaccgaccgcggcugguacugcgacaacgccggcuccgucuccuucuucccccaggccgagaccugcaagguccaguccaaccgcgucuucugcgacaccaugaacucccgcacccuccccuccgaggucaaccucugcaacgucgacaucuucaaccccaaguacgacugcaagaucaugaccuccaagaccgacgucuccuccuccgucaucaccucccucggcgccaucgucuccugcuacggcaagaccaagugcaccgccuccaacaagugccgcggcaucaucaagaccuucuccaacggcugcgacuacgucuccaacaagggcgucgacaccgucuccgucggcaacacccucuacuacgucaacaagcaggagggcaagucccucuacgucaagggcgagcccaucaucaacuucuacgacccccucgucuuccccuccgacgaguucgacgccuccaucucccaggucaacgagaagaucaaccagucccucgccuucauccgcaaguccgacgagcuccuccacaacgucaacgccggcaaguccaccaccaacaucaugaucaccaccaucaucaucgucaucaucgucauccuccucucccucaucgccgucggccuccuccucuacugcaaggcccgcugaggacuaguggaagcauuuuccuggcugauuaaaagaaauuacucagcuauggucaucuguuccuguuagaaggcuaugcagcauauuauauacuaugcgcauguuaugaaaugcauaauaaaaaauuuuaaaaaaucuaaaagaucuaaaaaaaaaaaaaaaaaaaaaaaaaaaaaaaaaaaaaaaaaaaaaaaaaaaaaaaaaaaaaaaaugcaucccccccccccccccccccccccccccccccaaaggcucuuuucagagccaccagaauu

SEQ ID NO: 5811 - RNA, 1919 nt, Artificial Sequence
  mRNA product Design c-4 comprising derived and/or modified sequence from HRSV(A2)__F-del_DSCav1_mut5 (opt3)
gggagaguccgcucagccagguugcagaagcggcuuagcguguguccuaaucuucucucugcguguagguaggccugugccgcaaacaagcuuaccauggagcugcucauccuuaaggccaacgcuauuaccacaauacugacugcagugacguucugcuuugccagcggccagaauaucaccgaagaguucuaccaauccacauguucugcggucucaaaaggguauuugagugcuuuaagaacuggaugguacaccagcguuauuacaaucgaacuguccaacauuaaggagaauaaaugcaacgguaccgacgccaaggugaaacuaaucaagcaggaacucgauaaguauaaaaaugcaguaacugagcugcagcuucugaugcagucuacacccgccaccggcucggggucagcuauagcaagcggaguggccgucuguaagguguugcaccucgagggcgaaguuaacaaaaucaagagugcucugcuguccacgaauaaagccguggucucucucagcgguugcgggguguccguauuaacuuuuaagguucuggaccuuaagaacuacauugauaaacaauugcugccuauccuaaauaagcagucauguaguauuagcaacaucgagaccgugauagaguuccagcagaaaaauaacaggcuccuggaaauuacacgggaguuuucugucaaugcgggagugacuaccccaguguccacauauaugcuuaccaacucagaacuguugagccucaucaaugacaugccgauuacgaacgaucaaaagaaacugaugaguaacaauguccagaucguucgccagcagucuuacuccaucaugugcauuauaaaggaggaaguguuagcauauguagugcaacugccccucuacggcgucaucgacacuccuuguuggaaacuucauacaagcccacugugcaccacuaacacaaaggagggcucgaauauuuguuugacccgaacggaucgugggugguacugcgacaacgccggaucuguguccuucuuuccccaggcugaaaccuguaagguucagucaaauagaguguucugcgauacaaugaacaguagaacucugccuagcgaggucaaucucugcaacguggacaucuuuaauccaaaauaugauuguaagauaaugaccuccaaaacagacguaucuagcucaguuauuaccagucugggugccaucguguccugcuacggcaagacuaaauguacagcaagcaacaagugcagggggaucauuaagaccuucucuaauggaugugauuaugucucaaacaaaggcguggacacugucaguguggguaauacgcuuuacuauguuaacaagcaagaggggaaaagccuguacgugaagggagaacccaucauuaauuuuuaugacccuuugguauucccauccgaugaguuugacgcuucuauaucgcaggucaacgagaaaaucaaccagagccucgccuucauucggaaguccgaugaacuguuacacaaugugaacgcgggcaagucaacaaccaauaucaugaucacuaccauuauaaucguuauuaucgugauucugcuaagucucaucgccgucggccugcuuuuguacugcaaagcacgcugaggacuaguggaagcauuuuccuggcugauuaaaagaaauuacucagcuauggucaucuguuccuguuagaaggcuaugcagcauauuauauacuaugcgcauguuaugaaaugcauaauaaaaaauuuuaaaaaaucuaaaagaucuaaaaaaaaaaaaaaaaaaaaaaaaaaaaaaaaaaaaaaaaaaaaaaaaaaaaaaaaaaaaaaaaugcaucccccccccccccccccccccccccccccccaaaggcucuuuucagagccaccagaauu

SEQ ID NO: 5812 - RNA, 1919 nt, Artificial Sequence
  mRNA product Design c-4 comprising derived and/or modified sequence from HRSV(A2)__F-del_DSCav1_mut5 (opt4)
gggagaguccgcucagccagguugcagaagcggcuuagcguguguccuaaucuucucucugcguguagguaggccugugccgcaaacaagcuuaccauggagcugcugauccugaaggccaacgccaucaccaccauccugaccgccgugaccuucugcuucgccagcggccagaacaucaccgaggaguucuaccagagcaccugcagcgccgugagcaagggcuaccugagcgcccugagaaccggcugguacaccagcgugaucaccaucgagcugagcaacaucaaggagaacaagugcaacggcaccgacgccaaggugaagcugaucaagcaggagcuggacaaguacaagaacgccgugaccgagcugcagcugcugaugcagagcacccccgccaccggcagcggcagcgccaucgccagcggcguggccgugugcaaggugcugcaccuggagggcgaggugaacaagaucaagagcgcccugcugagcaccaacaaggccguggugagccugagcggcugcggcgugagcgugcugaccuucaaggugcuggaccugaagaacuacaucgacaagcagcugcugcccauccugaacaagcagagcugcagcaucagcaacaucgagaccgugaucgaguuccagcagaagaacaacagacugcuggagaucaccagagaguucagcgugaacgccggcgugaccacccccgugagcaccuacaugcugaccaacagcgagcugcugagccugaucaacgacaugcccaucaccaacgaccagaagaagcugaugagcaacaacgugcagaucgugagacagcagagcuacagcaucaugugcaucaucaaggaggaggugcuggccuacguggugcagcugccccuguacggcgugaucgacacccccugcuggaagcugcacaccagcccccugugcaccaccaacaccaaggagggcagcaacaucugccugaccagaaccgacagaggcugguacugcgacaacgccggcagcgugagcuucuucccccaggccgagaccugcaaggugcagagcaacagaguguucugcgacaccaugaacagcagaacccugcccagcgaggugaaccugugcaacguggacaucuucaaccccaaguacgacugcaagaucaugaccagcaagaccgacgugagcagcagcgugaucaccagccugggcgccaucgugagcugcuacggcaagaccaagugcaccgccagcaacaagugcagaggcaucaucaagaccuucagcaacggcugcgacuacgugagcaacaagggcguggacaccgugagcgugggcaacacccuguacuacgugaacaagcaggagggcaagagccuguacgugaagggcgagcccaucaucaacuucuacgacccccugguguuccccagcgacgaguucgacgccagcaucagccaggugaacgagaagaucaaccagagccuggccuucaucagaaagagcgacgagcugcugcacaacgugaacgccggcaagagcaccaccaacaucaugaucaccaccaucaucaucgugaucaucgugauccugcugagccugaucgccgugggccugcugcuguacugcaaggccagaugaggacuaguggaagcauuuuccuggcugauuaaaagaaauuacucagcuauggucaucuguuccuguuagaaggcuaugcagcauauuauauacuaugcgcauguuaugaaaugcauaauaaaaaauuuuaaaaaaucuaaaagaucuaaaaaaaaaaaaaaaaaaaaaaaaaaaaaaaaaaaaaaaaaaaaaaaaaaaaaaaaaaaaaaaaugcaucccccccccccccccccccccccccccccccaaaggcucuuuucagagccaccagaauu

SEQ ID NO: 5813 - RNA, 1919 nt, Artificial Sequence
  mRNA product Design c-4 comprising derived and/or modified sequence from HRSV(A2)__F-del_DSCav1_mut5 (opt5)
gggagaguccgcucagccagguugcagaagcggcuuagcguguguccuaaucuucucucugcguguagguaggccugugccgcaaacaagcuuaccauggagcugcucauccugaaggccaacgcuauuaccacaauccuuacggccgugaccuucugcuuugcgagcggccagaauauuacagaagaguucuaccaauccaccuguucugcugucagcaaaggguaucuguccgcccucagaacaggaugguacaccucuguuaucacaauugaacugagcaacaucaaggagaauaaaugcaacggcaccgacgccaaggugaaacuuaucaagcaggaacuggauaaguauaaaaaugcugugacggagcuccagcugcugaugcaguccacccccgccacagggucuggaagcgcuauugccuccggcgucgcgguguguaagguucuccaccuggagggggaagugaacaaaaucaagagcgcccuucugucuaccaauaaagcugucgugucccucagcggaugcggcguuucugugcugacauuuaagguccuugaccugaagaacuacauugauaaacaacuccugccuauccugaauaagcaguccuguagcauuucuaacaucgagaccgugauugaguuccagcagaaaaauaaccggcuccuggaaaucacgcgcgaguuuuccgugaaugccggcgucacaaccccgguuagcacauauaugcuuaccaacuccgaacugcucucucugaucaaugacaugcccauuaccaacgaucaaaagaaacuuaugagcaacaaugugcagaucgugagacagcaguccuacagcauuaugugcaucauuaaggaggaaguccuggcuuaugugguucaacucccucuguacggggugaucgacacacccuguuggaaacugcauacgucuccucucugcaccacaaacaccaaggagggauccaauaucugucugacacggaccgaucgcggcugguacugcgacaacgccgggagcgucucuuucuuuccccaggcggaaacguguaaggugcagagcaauagaguuuucugcgauacaaugaacuccagaacccugccuucugaggugaaucucugcaacgucgacauuuuuaauccgaaauaugauuguaagaucaugaccagcaaaacagacguguccagcucugucauuaccucccugggagccaucgugagcugcuacggcaagacaaaauguacggcuucuaacaagugccgggggauuaucaagaccuucuccaauggaugugauuauguuagcaacaaaggcguggacacagucuccgugggcaauacccuuuacuauguuaacaagcaagaggggaaaucucuguacgugaagggagaacccaucauuaauuuuuaugacccucucgucuuccccagcgaugaguuugacgccuccaucucucaggugaacgagaaaauuaaccagagccuggcuuucauccgcaaguccgaugaacugcuccacaaugugaacgccggcaagagcacaaccaauauuaugaucacgaccauuaucaucguuauuaucgucauucugcuuucucugaucgccguggggcuccugcuguacugcaaagcuagaugaggacuaguggaagcauuuuccuggcugauuaaaagaaauuacucagcuauggucaucuguuccuguuagaaggcuaugcagcauauuauauacuaugcgcauguuaugaaaugcauaauaaaaaauuuuaaaaaaucuaaaagaucuaaaaaaaaaaaaaaaaaaaaaaaaaaaaaaaaaaaaaaaaaaaaaaaaaaaaaaaaaaaaaaaaugcaucccccccccccccccccccccccccccccccaaaggcucuuuucagagccaccagaauu

SEQ ID NO: 5814 - RNA, 1919 nt, Artificial Sequence
  mRNA product Design c-4 comprising derived and/or modified sequence from HRSV(A2)__F-del_DSCav1_mut5 (opt6)
gggagaguccgcucagccagguugcagaagcggcuuagcguguguccuaaucuucucucugcguguagguaggccugugccgcaaacaagcuuaccauggaacuuuuaauacugaaagcaaaugccaucacaaccauacuaacugccgucacauucugcuuugcaucaggacaaaacauaacagaagaauuuuaccaauccacaugcucagcaguaucaaaaggauaucuaucggcacuuagaacuggaugguacacaaguguuauaacuauagaacucucaaacauaaaagaaaacaaaugcaauggaacagacgcaaaaguaaaacuaauaaaacaagaacucgauaaauauaaaaaugcaguaaccgaacuacaacuauuaaugcaaagcacacccgcaacaggcagcggaucagcaauagcaagcggagucgcaguauguaaaguacuacaucuagaaggagaagucaacaaaaucaaaucugcacuucuauccacaaacaaagcuguaguaucccuauccggaugcggagucucaguauuaacuuuuaaaguacuagaccuuaaaaacuacauagauaaacaacuauuaccaauacuaaauaaacaaucaugcagcauauccaauauagagacaguaauugaauuucaacaaaaaaacaacagauuacuagaaauuacucgugaauuuuccguaaaugccggagucacaacaccaguaucaaccuauaugcuaacaaacagcgaacuacuuagcuuaauaaaugacaugccaauaacaaaugaccaaaaaaaacuuaugucaaauaacguacaaaucgucagacaacaauccuacucuauaauguguauaauuaaagaagaaguccuagcauacguaguucaauuaccacucuauggaguaauagauacaccaugcuggaaacuacacacgucaccacuauguacaacaaacacaaaagaaggauccaauauaugccuaacaagaaccgacagaggcugguauugugacaacgcaggauccguuucauucuucccacaagcagaaaccuguaaaguacaaucuaauagaguauuuugcgacacaaugaacaguagaacacuaccaagcgagguuaaucuauguaacguagacauauucaauccaaaauaugauugcaaaauaaugacaucaaaaacagauguaucgucgaguguaauaacaagucugggagcuauaguaagcugcuacggcaagacgaaauguaccgcuucaaauaaaugcagaggaaucauuaaaacauucucgaacggaugcgacuacguaaguaauaaaggugucgacaccguaucaguagggaauacauuauacuacgucaacaaacaagaaggaaaaucucuauauguaaaaggagaaccaauaauaaauuucuaugacccucuaguauucccaucagaugaauuugacgcuuccauaucacaaguaaacgaaaaaaucaaucaaucuuuagcauucauacgaaaaagugaugaacuccuacacaacgucaacgcaggaaaaagcacaacaaauauaaugaucacaacaaucaucauaguaauaauaguaauacuacuaucauuaauagcaguaggauuauugcuuuacugcaaagcacgauagggacuaguggaagcauuuuccuggcugauuaaaagaaauuacucagcuauggucaucuguuccuguuagaaggcuaugcagcauauuauauacuaugcgcauguuaugaaaugcauaauaaaaaauuuuaaaaaaucuaaaagaucuaaaaaaaaaaaaaaaaaaaaaaaaaaaaaaaaaaaaaaaaaaaaaaaaaaaaaaaaaaaaaaaaugcaucccccccccccccccccccccccccccccccaaaggcucuuuucagagccaccagaauu

SEQ ID NO: 5815 - RNA, 1919 nt, Artificial Sequence
  mRNA product Design c-4 comprising derived and/or modified sequence from HRSV(A2)__F-del_DSCav1_mut5 (opt11)
gggagaguccgcucagccagguugcagaagcggcuuagcguguguccuaaucuucucucugcguguagguaggccugugccgcaaacaagcuuaccauggaacuccucauccucaaagccaacgccauaaccacaauacucaccgccguaaccuucugcuuugcgucgggacaaaacaucaccgaagaguucuaccaauccacuugcuccgcaguaagcaaaggauaccucuccgcccugcgaaccgguugguacacaucagucaucacaaucgaacucucaaacauaaaagaaaacaaaugcaacggcaccgacgcaaaggucaaauuaaucaagcaagaacuagacaaauacaaaaacgccgucacagaacuccagcugcuaaugcagagcacacccgcaacuggcagcggauccgccaucgcaucaggagucgccgugugcaaaguccuacaccucgaaggagaagugaacaaaaucaaaucagcccuacucuccaccaacaaggccgucgucucccucuccggcugcggugucuccguccuaaccuucaaagugcuagaccucaagaacuacaucgacaaacaacuccuaccaauacucaacaagcaaucuugcuccaucuccaacaucgaaaccguaaucgaguuccaacagaagaacaaccgccuccucgaaaucacccgcgaguucucugucaacgcaggggucaccacucccgucuccacauacaugcucacaaacuccgaacuccucagccucaucaacgacaugcccauaaccaacgaccagaaaaagcuaaugagcaauaacguccaaaucguuagacaacaaaguuauuccaucaugugcaucaucaaagaagaaguccucgccuacgucguacaacucccccucuauggcgucaucgacacccccugcuggaaacugcacacaucaccccucugcaccacaaacaccaaagaaggcucaaacaucugccuaacucgcaccgaccgcggcugguacugcgacaacgccggcagcguaucauucuuuccccaagccgaaacaugcaaaguucaauccaaccgcgucuucugcgacacaaugaacuccagaacgcuccccagcgaagucaaccucuguaacguagacaucuucaacccuaaguacgacugcaaaaucaugaccuccaaaacugauguauccuccuccgucaucacaucccugggcgccaucgucagcugcuacggcaaaacaaaaugcacugccucaaacaaaugccgagguaucauaaagaccuucucaaacggaugcgauuacgucagcaacaaaggcgucgacaccgucagugucggcaacacccucuacuacgucaacaaacaagaaggaaaaucccucuacgucaaaggcgaacccaucaucaacuucuacgacccccucgucuuccccagcgacgaguucgacgccuccaucucacaagucaacgaaaagauaaaccaaucucuagccuucauccgcaaauccgaugaacuccugcauaacgucaacgccggcaaauccaccacaaacaucaugaucacuaccauaaucaucgucauaaucguaauccuccuaucucuuaucgcagucggccuacuacucuacugcaaagcccgcuaaggacuaguggaagcauuuuccuggcugauuaaaagaaauuacucagcuauggucaucuguuccuguuagaaggcuaugcagcauauuauauacuaugcgcauguuaugaaaugcauaauaaaaaauuuuaaaaaaucuaaaagaucuaaaaaaaaaaaaaaaaaaaaaaaaaaaaaaaaaaaaaaaaaaaaaaaaaaaaaaaaaaaaaaaaugcaucccccccccccccccccccccccccccccccaaaggcucuuuucagagccaccagaauu

SEQ ID NO: 5816 - RNA, 1837 nt, Artificial Sequence
  mRNA product Design c-5 comprising derived and/or modified sequence from HRSV(A2)__F-del_DSCav1_mut5 (opt1)
gggagagcggcucggccauuuugucccagucaguccggaggcugcggcugcagaaguaccgccugcggaguaacugcaaagaagcuuaccauggagcugcucauccugaaggccaacgccaucaccaccauccugacggcggugaccuucugcuucgccagcggccagaacaucaccgaggaguucuaccaguccacgugcagcgccgucuccaagggguaccucagcgcccugcggaccggcugguacaccuccgugaucaccaucgagcugagcaacaucaaggagaacaagugcaacgggaccgacgccaaggugaagcucaucaagcaggagcuggacaaguacaagaacgcggucacggagcugcagcuccugaugcaguccaccccggcaaccggcuccggcuccgccaucgcgagcggcgucgccgugugcaaggugcugcaccucgagggggaggucaacaagaucaagagcgcccugcuguccaccaacaaggccguggugagccucuccggcugcggcgucagcgugcugaccuucaaggugcuggaccucaagaacuacaucgacaagcagcugcugcccauccugaacaagcagagcugcuccaucagcaacaucgagacggugaucgaguuccagcagaagaacaaccggcuccuggagaucacccgcgaguucagcgugaacgccggggucaccacccccguguccacguacaugcugaccaacagcgagcuccugucccugaucaacgacaugccgaucaccaacgaccagaagaagcucaugagcaacaacgugcagaucguccggcagcaguccuacagcaucaugugcaucaucaaggaggaggugcuggcguacgugguccagcugccccucuacggcgugaucgacacccccugcuggaagcugcacacgagcccccugugcaccaccaacaccaaggagggguccaacaucugccucacgcgcaccgaccggggcugguacugcgacaacgccggcagcgucuccuucuucccgcaggccgagaccugcaaggugcagagcaaccgcguguucugcgacaccaugaacucccggacgcugcccagcgagguaaaccucugcaacgucgacaucuucaaccccaaguacgacugcaagaucaugaccuccaagaccgacgugagcuccagcgugaucaccucccugggggccaucgucagcugcuacggcaagacgaagugcaccgccagcaacaagugccgggggaucaucaagaccuucuccaacggcugcgacuacgugagcaacaagggcguggacaccguguccgucgggaacacccuguacuacgugaacaagcaggagggcaagagccucuacgugaagggggagcccaucaucaacuucuacgacccgcuggucuuccccuccgacgaguucgacgcgagcaucucccaggugaacgagaagaucaaccagagccuggccuucauccgcaaguccgacgagcugcuccacaacgugaacgccggcaagagcacgaccaacaucaugaucaccaccaucaucaucgucaucaucgugauccugcugucccucaucgccguggggcugcugcucuacugcaaggcccggugaggacuagucccuguucccagagcccacuuuuuuuucuuuuuuugaaauaaaauagccugucuuucagaucuaaaaaaaaaaaaaaaaaaaaaaaaaaaaaaaaaaaaaaaaaaaaaaaaaaaaaaaaaaaaaaaaugcaucccccccccccccccccccccccccccccccaaaggcucuuuucagagccaccagaauu

SEQ ID NO: 5817 - RNA, 1837 nt, Artificial Sequence
  mRNA product Design c-5 comprising derived and/or modified sequence from HRSV(A2)__F-del_DSCav1_mut5 (opt1)
gggagagcggcucggccauuuugucccagucaguccggaggcugcggcugcagaaguaccgccugcggaguaacugcaaagaagcuuaccauggagcugcucauccugaaggccaacgccaucaccaccauccugacggcggugaccuucugcuucgccagcggccagaacaucaccgaggaguucuaccaguccacgugcagcgccgucuccaagggguaccucagcgcccugcgcaccggcugguacaccuccgugaucaccaucgagcugagcaacaucaaggagaacaagugcaacgggaccgacgccaaggugaagcucaucaagcaggagcuggacaaguacaagaacgcggucacggagcugcagcuccugaugcaguccacccccgccaccggcagcggguccgccaucgccagcggcguggcggugugcaagguccugcaccucgagggcgaggugaacaagaucaaguccgcccugcugagcaccaacaaggccguggucucccucagcgggugcggcguguccgugcugacguucaagguccuggaccucaagaacuacaucgacaagcagcugcugccgauccucaacaagcagagcugcuccaucagcaacaucgagaccgugaucgaguuccagcagaagaacaaccggcugcuggagaucacccgcgaguucuccgugaacgccggggucaccacgcccgugagcaccuacaugcucaccaacagcgagcugcugucccucaucaacgacaugcccaucaccaacgaccagaagaagcugaugagcaacaacgugcagaucguccggcagcaguccuacagcaucaugugcaucaucaaggaggaggugcuggccuacgugguccagcucccccuguacggcgugaucgacacgccgugcuggaagcugcacaccagcccccucugcaccaccaacacgaaggagggguccaacaucugccugacccgcaccgaccggggcugguacugcgacaacgcgggcuccgugagcuucuucccccaggccgagaccugcaagguccaguccaaccgcguguucugcgacacgaugaacagccggacccuccccuccgaggucaaccugugcaacguggacaucuucaacccgaaguacgacugcaagaucaugaccagcaagaccgacguguccagcuccgucaucacgagccugggggccaucguguccugcuacggcaagaccaagugcaccgccagcaacaagugccgggggaucaucaagaccuucuccaacggcugcgacuacgugagcaacaagggcgucgacacggugagcguggggaacacccucuacuacgucaacaagcaggagggcaagucccuguacgugaagggggagcccaucaucaacuucuacgacccccugguguuccccagcgacgaguucgacgccuccaucagccaggucaacgagaagaucaaccagucccucgcguucauccgcaagagcgacgagcugcugcacaacgugaacgccggcaaguccaccaccaacaucaugaucaccacgaucaucaucgugaucaucgucauccuccugagccugaucgccguggggcuccugcuguacugcaaggcccggugaggacuagucccuguucccagagcccacuuuuuuuucuuuuuuugaaauaaaauagccugucuuucagaucuaaaaaaaaaaaaaaaaaaaaaaaaaaaaaaaaaaaaaaaaaaaaaaaaaaaaaaaaaaaaaaaaugcaucccccccccccccccccccccccccccccccaaaggcucuuuucagagccaccagaauu

SEQ ID NO: 5818 - RNA, 1837 nt, Artificial Sequence
  mRNA product Design c-5 comprising derived and/or modified sequence from HRSV(A2)__F-del_DSCav1_mut5 (opt2)
gggagagcggcucggccauuuugucccagucaguccggaggcugcggcugcagaaguaccgccugcggaguaacugcaaagaagcuuaccauggagcuccucauccucaaggccaacgccaucaccaccauccucaccgccgucaccuucugcuucgccuccggccagaacaucaccgaggaguucuaccaguccaccugcuccgccgucuccaagggcuaccucuccgcccuccgcaccggcugguacaccuccgucaucaccaucgagcucuccaacaucaaggagaacaagugcaacggcaccgacgccaaggucaagcucaucaagcaggagcucgacaaguacaagaacgccgucaccgagcuccagcuccucaugcaguccacccccgccaccggcuccggcuccgccaucgccuccggcgucgccgucugcaagguccuccaccucgagggcgaggucaacaagaucaaguccgcccuccucuccaccaacaaggccgucgucucccucuccggcugcggcgucuccguccucaccuucaagguccucgaccucaagaacuacaucgacaagcagcuccuccccauccucaacaagcaguccugcuccaucuccaacaucgagaccgucaucgaguuccagcagaagaacaaccgccuccucgagaucacccgcgaguucuccgucaacgccggcgucaccacccccgucuccaccuacaugcucaccaacuccgagcuccucucccucaucaacgacaugcccaucaccaacgaccagaagaagcucauguccaacaacguccagaucguccgccagcaguccuacuccaucaugugcaucaucaaggaggagguccucgccuacgucguccagcucccccucuacggcgucaucgacacccccugcuggaagcuccacaccuccccccucugcaccaccaacaccaaggagggcuccaacaucugccucacccgcaccgaccgcggcugguacugcgacaacgccggcuccgucuccuucuucccccaggccgagaccugcaagguccaguccaaccgcgucuucugcgacaccaugaacucccgcacccuccccuccgaggucaaccucugcaacgucgacaucuucaaccccaaguacgacugcaagaucaugaccuccaagaccgacgucuccuccuccgucaucaccucccucggcgccaucgucuccugcuacggcaagaccaagugcaccgccuccaacaagugccgcggcaucaucaagaccuucuccaacggcugcgacuacgucuccaacaagggcgucgacaccgucuccgucggcaacacccucuacuacgucaacaagcaggagggcaagucccucuacgucaagggcgagcccaucaucaacuucuacgacccccucgucuuccccuccgacgaguucgacgccuccaucucccaggucaacgagaagaucaaccagucccucgccuucauccgcaaguccgacgagcuccuccacaacgucaacgccggcaaguccaccaccaacaucaugaucaccaccaucaucaucgucaucaucgucauccuccucucccucaucgccgucggccuccuccucuacugcaaggcccgcugaggacuagucccuguucccagagcccacuuuuuuuucuuuuuuugaaauaaaauagccugucuuucagaucuaaaaaaaaaaaaaaaaaaaaaaaaaaaaaaaaaaaaaaaaaaaaaaaaaaaaaaaaaaaaaaaaugcaucccccccccccccccccccccccccccccccaaaggcucuuuucagagccaccagaauu

SEQ ID NO: 5819 - RNA, 1837 nt, Artificial Sequence
  mRNA product Design c-5 comprising derived and/or modified sequence from HRSV(A2)__F-del_DSCav1_mut5 (opt3)
gggagagcggcucggccauuuugucccagucaguccggaggcugcggcugcagaaguaccgccugcggaguaacugcaaagaagcuuaccauggagcugcucauccuuaaggccaacgcuauuaccacaauacugacugcagugacguucugcuuugccagcggccagaauaucaccgaagaguucuaccaauccacauguucugcggucucaaaaggguauuugagugcuuuaagaacuggaugguacaccagcguuauuacaaucgaacuguccaacauuaaggagaauaaaugcaacgguaccgacgccaaggugaaacuaaucaagcaggaacucgauaaguauaaaaaugcaguaacugagcugcagcuucugaugcagucuacacccgccaccggcucggggucagcuauagcaagcggaguggccgucuguaagguguugcaccucgagggcgaaguuaacaaaaucaagagugcucugcuguccacgaauaaagccguggucucucucagcgguugcgggguguccguauuaacuuuuaagguucuggaccuuaagaacuacauugauaaacaauugcugccuauccuaaauaagcagucauguaguauuagcaacaucgagaccgugauagaguuccagcagaaaaauaacaggcuccuggaaauuacacgggaguuuucugucaaugcgggagugacuaccccaguguccacauauaugcuuaccaacucagaacuguugagccucaucaaugacaugccgauuacgaacgaucaaaagaaacugaugaguaacaauguccagaucguucgccagcagucuuacuccaucaugugcauuauaaaggaggaaguguuagcauauguagugcaacugccccucuacggcgucaucgacacuccuuguuggaaacuucauacaagcccacugugcaccacuaacacaaaggagggcucgaauauuuguuugacccgaacggaucgugggugguacugcgacaacgccggaucuguguccuucuuuccccaggcugaaaccuguaagguucagucaaauagaguguucugcgauacaaugaacaguagaacucugccuagcgaggucaaucucugcaacguggacaucuuuaauccaaaauaugauuguaagauaaugaccuccaaaacagacguaucuagcucaguuauuaccagucugggugccaucguguccugcuacggcaagacuaaauguacagcaagcaacaagugcagggggaucauuaagaccuucucuaauggaugugauuaugucucaaacaaaggcguggacacugucaguguggguaauacgcuuuacuauguuaacaagcaagaggggaaaagccuguacgugaagggagaacccaucauuaauuuuuaugacccuuugguauucccauccgaugaguuugacgcuucuauaucgcaggucaacgagaaaaucaaccagagccucgccuucauucggaaguccgaugaacuguuacacaaugugaacgcgggcaagucaacaaccaauaucaugaucacuaccauuauaaucguuauuaucgugauucugcuaagucucaucgccgucggccugcuuuuguacugcaaagcacgcugaggacuagucccuguucccagagcccacuuuuuuuucuuuuuuugaaauaaaauagccugucuuucagaucuaaaaaaaaaaaaaaaaaaaaaaaaaaaaaaaaaaaaaaaaaaaaaaaaaaaaaaaaaaaaaaaaugcaucccccccccccccccccccccccccccccccaaaggcucuuuucagagccaccagaauu

SEQ ID NO: 5820 - RNA, 1837 nt, Artificial Sequence
  mRNA product Design c-5 comprising derived and/or modified sequence from HRSV(A2)__F-del_DSCav1_mut5 (opt4)
gggagagcggcucggccauuuugucccagucaguccggaggcugcggcugcagaaguaccgccugcggaguaacugcaaagaagcuuaccauggagcugcugauccugaaggccaacgccaucaccaccauccugaccgccgugaccuucugcuucgccagcggccagaacaucaccgaggaguucuaccagagcaccugcagcgccgugagcaagggcuaccugagcgcccugagaaccggcugguacaccagcgugaucaccaucgagcugagcaacaucaaggagaacaagugcaacggcaccgacgccaaggugaagcugaucaagcaggagcuggacaaguacaagaacgccgugaccgagcugcagcugcugaugcagagcacccccgccaccggcagcggcagcgccaucgccagcggcguggccgugugcaaggugcugcaccuggagggcgaggugaacaagaucaagagcgcccugcugagcaccaacaaggccguggugagccugagcggcugcggcgugagcgugcugaccuucaaggugcuggaccugaagaacuacaucgacaagcagcugcugcccauccugaacaagcagagcugcagcaucagcaacaucgagaccgugaucgaguuccagcagaagaacaacagacugcuggagaucaccagagaguucagcgugaacgccggcgugaccacccccgugagcaccuacaugcugaccaacagcgagcugcugagccugaucaacgacaugcccaucaccaacgaccagaagaagcugaugagcaacaacgugcagaucgugagacagcagagcuacagcaucaugugcaucaucaaggaggaggugcuggccuacguggugcagcugccccuguacggcgugaucgacacccccugcuggaagcugcacaccagcccccugugcaccaccaacaccaaggagggcagcaacaucugccugaccagaaccgacagaggcugguacugcgacaacgccggcagcgugagcuucuucccccaggccgagaccugcaaggugcagagcaacagaguguucugcgacaccaugaacagcagaacccugcccagcgaggugaaccugugcaacguggacaucuucaaccccaaguacgacugcaagaucaugaccagcaagaccgacgugagcagcagcgugaucaccagccugggcgccaucgugagcugcuacggcaagaccaagugcaccgccagcaacaagugcagaggcaucaucaagaccuucagcaacggcugcgacuacgugagcaacaagggcguggacaccgugagcgugggcaacacccuguacuacgugaacaagcaggagggcaagagccuguacgugaagggcgagcccaucaucaacuucuacgacccccugguguuccccagcgacgaguucgacgccagcaucagccaggugaacgagaagaucaaccagagccuggccuucaucagaaagagcgacgagcugcugcacaacgugaacgccggcaagagcaccaccaacaucaugaucaccaccaucaucaucgugaucaucgugauccugcugagccugaucgccgugggccugcugcuguacugcaaggccagaugaggacuagucccuguucccagagcccacuuuuuuuucuuuuuuugaaauaaaauagccugucuuucagaucuaaaaaaaaaaaaaaaaaaaaaaaaaaaaaaaaaaaaaaaaaaaaaaaaaaaaaaaaaaaaaaaaugcaucccccccccccccccccccccccccccccccaaaggcucuuuucagagccaccagaauu

SEQ ID NO: 5821 - RNA, 1837 nt, Artificial Sequence
  mRNA product Design c-5 comprising derived and/or modified sequence from HRSV(A2)__F-del_DSCav1_mut5 (opt5)
gggagagcggcucggccauuuugucccagucaguccggaggcugcggcugcagaaguaccgccugcggaguaacugcaaagaagcuuaccauggagcugcucauccugaaggccaacgcuauuaccacaauccuuacggccgugaccuucugcuuugcgagcggccagaauauuacagaagaguucuaccaauccaccuguucugcugucagcaaaggguaucuguccgcccucagaacaggaugguacaccucuguuaucacaauugaacugagcaacaucaaggagaauaaaugcaacggcaccgacgccaaggugaaacuuaucaagcaggaacuggauaaguauaaaaaugcugugacggagcuccagcugcugaugcaguccacccccgccacagggucuggaagcgcuauugccuccggcgucgcgguguguaagguucuccaccuggagggggaagugaacaaaaucaagagcgcccuucugucuaccaauaaagcugucgugucccucagcggaugcggcguuucugugcugacauuuaagguccuugaccugaagaacuacauugauaaacaacuccugccuauccugaauaagcaguccuguagcauuucuaacaucgagaccgugauugaguuccagcagaaaaauaaccggcuccuggaaaucacgcgcgaguuuuccgugaaugccggcgucacaaccccgguuagcacauauaugcuuaccaacuccgaacugcucucucugaucaaugacaugcccauuaccaacgaucaaaagaaacuuaugagcaacaaugugcagaucgugagacagcaguccuacagcauuaugugcaucauuaaggaggaaguccuggcuuaugugguucaacucccucuguacggggugaucgacacacccuguuggaaacugcauacgucuccucucugcaccacaaacaccaaggagggauccaauaucugucugacacggaccgaucgcggcugguacugcgacaacgccgggagcgucucuuucuuuccccaggcggaaacguguaaggugcagagcaauagaguuuucugcgauacaaugaacuccagaacccugccuucugaggugaaucucugcaacgucgacauuuuuaauccgaaauaugauuguaagaucaugaccagcaaaacagacguguccagcucugucauuaccucccugggagccaucgugagcugcuacggcaagacaaaauguacggcuucuaacaagugccgggggauuaucaagaccuucuccaauggaugugauuauguuagcaacaaaggcguggacacagucuccgugggcaauacccuuuacuauguuaacaagcaagaggggaaaucucuguacgugaagggagaacccaucauuaauuuuuaugacccucucgucuuccccagcgaugaguuugacgccuccaucucucaggugaacgagaaaauuaaccagagccuggcuuucauccgcaaguccgaugaacugcuccacaaugugaacgccggcaagagcacaaccaauauuaugaucacgaccauuaucaucguuauuaucgucauucugcuuucucugaucgccguggggcuccugcuguacugcaaagcuagaugaggacuagucccuguucccagagcccacuuuuuuuucuuuuuuugaaauaaaauagccugucuuucagaucuaaaaaaaaaaaaaaaaaaaaaaaaaaaaaaaaaaaaaaaaaaaaaaaaaaaaaaaaaaaaaaaaugcaucccccccccccccccccccccccccccccccaaaggcucuuuucagagccaccagaauu

SEQ ID NO: 5822 - RNA, 1837 nt, Artificial Sequence
  mRNA product Design c-5 comprising derived and/or modified sequence from HRSV(A2)__F-del_DSCav1_mut5 (opt6)
gggagagcggcucggccauuuugucccagucaguccggaggcugcggcugcagaaguaccgccugcggaguaacugcaaagaagcuuaccauggaacuuuuaauacugaaagcaaaugccaucacaaccauacuaacugccgucacauucugcuuugcaucaggacaaaacauaacagaagaauuuuaccaauccacaugcucagcaguaucaaaaggauaucuaucggcacuuagaacuggaugguacacaaguguuauaacuauagaacucucaaacauaaaagaaaacaaaugcaauggaacagacgcaaaaguaaaacuaauaaaacaagaacucgauaaauauaaaaaugcaguaaccgaacuacaacuauuaaugcaaagcacacccgcaacaggcagcggaucagcaauagcaagcggagucgcaguauguaaaguacuacaucuagaaggagaagucaacaaaaucaaaucugcacuucuauccacaaacaaagcuguaguaucccuauccggaugcggagucucaguauuaacuuuuaaaguacuagaccuuaaaaacuacauagauaaacaacuauuaccaauacuaaauaaacaaucaugcagcauauccaauauagagacaguaauugaauuucaacaaaaaaacaacagauuacuagaaauuacucgugaauuuuccguaaaugccggagucacaacaccaguaucaaccuauaugcuaacaaacagcgaacuacuuagcuuaauaaaugacaugccaauaacaaaugaccaaaaaaaacuuaugucaaauaacguacaaaucgucagacaacaauccuacucuauaauguguauaauuaaagaagaaguccuagcauacguaguucaauuaccacucuauggaguaauagauacaccaugcuggaaacuacacacgucaccacuauguacaacaaacacaaaagaaggauccaauauaugccuaacaagaaccgacagaggcugguauugugacaacgcaggauccguuucauucuucccacaagcagaaaccuguaaaguacaaucuaauagaguauuuugcgacacaaugaacaguagaacacuaccaagcgagguuaaucuauguaacguagacauauucaauccaaaauaugauugcaaaauaaugacaucaaaaacagauguaucgucgaguguaauaacaagucugggagcuauaguaagcugcuacggcaagacgaaauguaccgcuucaaauaaaugcagaggaaucauuaaaacauucucgaacggaugcgacuacguaaguaauaaaggugucgacaccguaucaguagggaauacauuauacuacgucaacaaacaagaaggaaaaucucuauauguaaaaggagaaccaauaauaaauuucuaugacccucuaguauucccaucagaugaauuugacgcuuccauaucacaaguaaacgaaaaaaucaaucaaucuuuagcauucauacgaaaaagugaugaacuccuacacaacgucaacgcaggaaaaagcacaacaaauauaaugaucacaacaaucaucauaguaauaauaguaauacuacuaucauuaauagcaguaggauuauugcuuuacugcaaagcacgauagggacuagucccuguucccagagcccacuuuuuuuucuuuuuuugaaauaaaauagccugucuuucagaucuaaaaaaaaaaaaaaaaaaaaaaaaaaaaaaaaaaaaaaaaaaaaaaaaaaaaaaaaaaaaaaaaugcaucccccccccccccccccccccccccccccccaaaggcucuuuucagagccaccagaauu

SEQ ID NO: 5823 - RNA, 1837 nt, Artificial Sequence
  mRNA product Design c-5 comprising derived and/or modified sequence from HRSV(A2)__F-del_DSCav1_mut5 (opt11)
gggagagcggcucggccauuuugucccagucaguccggaggcugcggcugcagaaguaccgccugcggaguaacugcaaagaagcuuaccauggaacuccucauccucaaagccaacgccauaaccacaauacucaccgccguaaccuucugcuuugcgucgggacaaaacaucaccgaagaguucuaccaauccacuugcuccgcaguaagcaaaggauaccucuccgcccugcgaaccgguugguacacaucagucaucacaaucgaacucucaaacauaaaagaaaacaaaugcaacggcaccgacgcaaaggucaaauuaaucaagcaagaacuagacaaauacaaaaacgccgucacagaacuccagcugcuaaugcagagcacacccgcaacuggcagcggauccgccaucgcaucaggagucgccgugugcaaaguccuacaccucgaaggagaagugaacaaaaucaaaucagcccuacucuccaccaacaaggccgucgucucccucuccggcugcggugucuccguccuaaccuucaaagugcuagaccucaagaacuacaucgacaaacaacuccuaccaauacucaacaagcaaucuugcuccaucuccaacaucgaaaccguaaucgaguuccaacagaagaacaaccgccuccucgaaaucacccgcgaguucucugucaacgcaggggucaccacucccgucuccacauacaugcucacaaacuccgaacuccucagccucaucaacgacaugcccauaaccaacgaccagaaaaagcuaaugagcaauaacguccaaaucguuagacaacaaaguuauuccaucaugugcaucaucaaagaagaaguccucgccuacgucguacaacucccccucuauggcgucaucgacacccccugcuggaaacugcacacaucaccccucugcaccacaaacaccaaagaaggcucaaacaucugccuaacucgcaccgaccgcggcugguacugcgacaacgccggcagcguaucauucuuuccccaagccgaaacaugcaaaguucaauccaaccgcgucuucugcgacacaaugaacuccagaacgcuccccagcgaagucaaccucuguaacguagacaucuucaacccuaaguacgacugcaaaaucaugaccuccaaaacugauguauccuccuccgucaucacaucccugggcgccaucgucagcugcuacggcaaaacaaaaugcacugccucaaacaaaugccgagguaucauaaagaccuucucaaacggaugcgauuacgucagcaacaaaggcgucgacaccgucagugucggcaacacccucuacuacgucaacaaacaagaaggaaaaucccucuacgucaaaggcgaacccaucaucaacuucuacgacccccucgucuuccccagcgacgaguucgacgccuccaucucacaagucaacgaaaagauaaaccaaucucuagccuucauccgcaaauccgaugaacuccugcauaacgucaacgccggcaaauccaccacaaacaucaugaucacuaccauaaucaucgucauaaucguaauccuccuaucucuuaucgcagucggccuacuacucuacugcaaagcccgcuaaggacuagucccuguucccagagcccacuuuuuuuucuuuuuuugaaauaaaauagccugucuuucagaucuaaaaaaaaaaaaaaaaaaaaaaaaaaaaaaaaaaaaaaaaaaaaaaaaaaaaaaaaaaaaaaaaugcaucccccccccccccccccccccccccccccccaaaggcucuuuucagagccaccagaauu

SEQ ID NO: 5824 - RNA, 1846 nt, Artificial Sequence
  mRNA product Design d-1 comprising derived and/or modified sequence from HRSV(A2)__F-del_DSCav1_mut5 (opt1)
gggagacccgugacccggaaguuguacggcuacgcgacuuucccucccacaaacccucgcgcccuuccuuuccuacuugggcccggcagaaagcuuaccauggagcugcucauccugaaggccaacgccaucaccaccauccugacggcggugaccuucugcuucgccagcggccagaacaucaccgaggaguucuaccaguccacgugcagcgccgucuccaagggguaccucagcgcccugcggaccggcugguacaccuccgugaucaccaucgagcugagcaacaucaaggagaacaagugcaacgggaccgacgccaaggugaagcucaucaagcaggagcuggacaaguacaagaacgcggucacggagcugcagcuccugaugcaguccaccccggcaaccggcuccggcuccgccaucgcgagcggcgucgccgugugcaaggugcugcaccucgagggggaggucaacaagaucaagagcgcccugcuguccaccaacaaggccguggugagccucuccggcugcggcgucagcgugcugaccuucaaggugcuggaccucaagaacuacaucgacaagcagcugcugcccauccugaacaagcagagcugcuccaucagcaacaucgagacggugaucgaguuccagcagaagaacaaccggcuccuggagaucacccgcgaguucagcgugaacgccggggucaccacccccguguccacguacaugcugaccaacagcgagcuccugucccugaucaacgacaugccgaucaccaacgaccagaagaagcucaugagcaacaacgugcagaucguccggcagcaguccuacagcaucaugugcaucaucaaggaggaggugcuggcguacgugguccagcugccccucuacggcgugaucgacacccccugcuggaagcugcacacgagcccccugugcaccaccaacaccaaggagggguccaacaucugccucacgcgcaccgaccggggcugguacugcgacaacgccggcagcgucuccuucuucccgcaggccgagaccugcaaggugcagagcaaccgcguguucugcgacaccaugaacucccggacgcugcccagcgagguaaaccucugcaacgucgacaucuucaaccccaaguacgacugcaagaucaugaccuccaagaccgacgugagcuccagcgugaucaccucccugggggccaucgucagcugcuacggcaagacgaagugcaccgccagcaacaagugccgggggaucaucaagaccuucuccaacggcugcgacuacgugagcaacaagggcguggacaccguguccgucgggaacacccuguacuacgugaacaagcaggagggcaagagccucuacgugaagggggagcccaucaucaacuucuacgacccgcuggucuuccccuccgacgaguucgacgcgagcaucucccaggugaacgagaagaucaaccagagccuggccuucauccgcaaguccgacgagcugcuccacaacgugaacgccggcaagagcacgaccaacaucaugaucaccaccaucaucaucgucaucaucgugauccugcugucccucaucgccguggggcugcugcucuacugcaaggcccggugaggacuagucccuguucccagagcccacuuuuuuuucuuuuuuugaaauaaaauagccugucuuucagaucuaaaaaaaaaaaaaaaaaaaaaaaaaaaaaaaaaaaaaaaaaaaaaaaaaaaaaaaaaaaaaaaaugcaucccccccccccccccccccccccccccccccaaaggcucuuuucagagccaccagaauu

SEQ ID NO: 5825 - RNA, 1846 nt, Artificial Sequence
  mRNA product Design d-1 comprising derived and/or modified sequence from HRSV(A2)__F-del_DSCav1_mut5 (opt1)
gggagacccgugacccggaaguuguacggcuacgcgacuuucccucccacaaacccucgcgcccuuccuuuccuacuugggcccggcagaaagcuuaccauggagcugcucauccugaaggccaacgccaucaccaccauccugacggcggugaccuucugcuucgccagcggccagaacaucaccgaggaguucuaccaguccacgugcagcgccgucuccaagggguaccucagcgcccugcgcaccggcugguacaccuccgugaucaccaucgagcugagcaacaucaaggagaacaagugcaacgggaccgacgccaaggugaagcucaucaagcaggagcuggacaaguacaagaacgcggucacggagcugcagcuccugaugcaguccacccccgccaccggcagcggguccgccaucgccagcggcguggcggugugcaagguccugcaccucgagggcgaggugaacaagaucaaguccgcccugcugagcaccaacaaggccguggucucccucagcgggugcggcguguccgugcugacguucaagguccuggaccucaagaacuacaucgacaagcagcugcugccgauccucaacaagcagagcugcuccaucagcaacaucgagaccgugaucgaguuccagcagaagaacaaccggcugcuggagaucacccgcgaguucuccgugaacgccggggucaccacgcccgugagcaccuacaugcucaccaacagcgagcugcugucccucaucaacgacaugcccaucaccaacgaccagaagaagcugaugagcaacaacgugcagaucguccggcagcaguccuacagcaucaugugcaucaucaaggaggaggugcuggccuacgugguccagcucccccuguacggcgugaucgacacgccgugcuggaagcugcacaccagcccccucugcaccaccaacacgaaggagggguccaacaucugccugacccgcaccgaccggggcugguacugcgacaacgcgggcuccgugagcuucuucccccaggccgagaccugcaagguccaguccaaccgcguguucugcgacacgaugaacagccggacccuccccuccgaggucaaccugugcaacguggacaucuucaacccgaaguacgacugcaagaucaugaccagcaagaccgacguguccagcuccgucaucacgagccugggggccaucguguccugcuacggcaagaccaagugcaccgccagcaacaagugccgggggaucaucaagaccuucuccaacggcugcgacuacgugagcaacaagggcgucgacacggugagcguggggaacacccucuacuacgucaacaagcaggagggcaagucccuguacgugaagggggagcccaucaucaacuucuacgacccccugguguuccccagcgacgaguucgacgccuccaucagccaggucaacgagaagaucaaccagucccucgcguucauccgcaagagcgacgagcugcugcacaacgugaacgccggcaaguccaccaccaacaucaugaucaccacgaucaucaucgugaucaucgucauccuccugagccugaucgccguggggcuccugcuguacugcaaggcccggugaggacuagucccuguucccagagcccacuuuuuuuucuuuuuuugaaauaaaauagccugucuuucagaucuaaaaaaaaaaaaaaaaaaaaaaaaaaaaaaaaaaaaaaaaaaaaaaaaaaaaaaaaaaaaaaaaugcaucccccccccccccccccccccccccccccccaaaggcucuuuucagagccaccagaauu

SEQ ID NO: 5826 - RNA, 1846 nt, Artificial Sequence
  mRNA product Design d-1 comprising derived and/or modified sequence from HRSV(A2)__F-del_DSCav1_mut5 (opt2)
gggagacccgugacccggaaguuguacggcuacgcgacuuucccucccacaaacccucgcgcccuuccuuuccuacuugggcccggcagaaagcuuaccauggagcuccucauccucaaggccaacgccaucaccaccauccucaccgccgucaccuucugcuucgccuccggccagaacaucaccgaggaguucuaccaguccaccugcuccgccgucuccaagggcuaccucuccgcccuccgcaccggcugguacaccuccgucaucaccaucgagcucuccaacaucaaggagaacaagugcaacggcaccgacgccaaggucaagcucaucaagcaggagcucgacaaguacaagaacgccgucaccgagcuccagcuccucaugcaguccacccccgccaccggcuccggcuccgccaucgccuccggcgucgccgucugcaagguccuccaccucgagggcgaggucaacaagaucaaguccgcccuccucuccaccaacaaggccgucgucucccucuccggcugcggcgucuccguccucaccuucaagguccucgaccucaagaacuacaucgacaagcagcuccuccccauccucaacaagcaguccugcuccaucuccaacaucgagaccgucaucgaguuccagcagaagaacaaccgccuccucgagaucacccgcgaguucuccgucaacgccggcgucaccacccccgucuccaccuacaugcucaccaacuccgagcuccucucccucaucaacgacaugcccaucaccaacgaccagaagaagcucauguccaacaacguccagaucguccgccagcaguccuacuccaucaugugcaucaucaaggaggagguccucgccuacgucguccagcucccccucuacggcgucaucgacacccccugcuggaagcuccacaccuccccccucugcaccaccaacaccaaggagggcuccaacaucugccucacccgcaccgaccgcggcugguacugcgacaacgccggcuccgucuccuucuucccccaggccgagaccugcaagguccaguccaaccgcgucuucugcgacaccaugaacucccgcacccuccccuccgaggucaaccucugcaacgucgacaucuucaaccccaaguacgacugcaagaucaugaccuccaagaccgacgucuccuccuccgucaucaccucccucggcgccaucgucuccugcuacggcaagaccaagugcaccgccuccaacaagugccgcggcaucaucaagaccuucuccaacggcugcgacuacgucuccaacaagggcgucgacaccgucuccgucggcaacacccucuacuacgucaacaagcaggagggcaagucccucuacgucaagggcgagcccaucaucaacuucuacgacccccucgucuuccccuccgacgaguucgacgccuccaucucccaggucaacgagaagaucaaccagucccucgccuucauccgcaaguccgacgagcuccuccacaacgucaacgccggcaaguccaccaccaacaucaugaucaccaccaucaucaucgucaucaucgucauccuccucucccucaucgccgucggccuccuccucuacugcaaggcccgcugaggacuagucccuguucccagagcccacuuuuuuuucuuuuuuugaaauaaaauagccugucuuucagaucuaaaaaaaaaaaaaaaaaaaaaaaaaaaaaaaaaaaaaaaaaaaaaaaaaaaaaaaaaaaaaaaaugcaucccccccccccccccccccccccccccccccaaaggcucuuuucagagccaccagaauu

SEQ ID NO: 5827 - RNA, 1846 nt, Artificial Sequence
  mRNA product Design d-1 comprising derived and/or modified sequence from HRSV(A2)__F-del_DSCav1_mut5 (opt3)
gggagacccgugacccggaaguuguacggcuacgcgacuuucccucccacaaacccucgcgcccuuccuuuccuacuugggcccggcagaaagcuuaccauggagcugcucauccuuaaggccaacgcuauuaccacaauacugacugcagugacguucugcuuugccagcggccagaauaucaccgaagaguucuaccaauccacauguucugcggucucaaaaggguauuugagugcuuuaagaacuggaugguacaccagcguuauuacaaucgaacuguccaacauuaaggagaauaaaugcaacgguaccgacgccaaggugaaacuaaucaagcaggaacucgauaaguauaaaaaugcaguaacugagcugcagcuucugaugcagucuacacccgccaccggcucggggucagcuauagcaagcggaguggccgucuguaagguguugcaccucgagggcgaaguuaacaaaaucaagagugcucugcuguccacgaauaaagccguggucucucucagcgguugcgggguguccguauuaacuuuuaagguucuggaccuuaagaacuacauugauaaacaauugcugccuauccuaaauaagcagucauguaguauuagcaacaucgagaccgugauagaguuccagcagaaaaauaacaggcuccuggaaauuacacgggaguuuucugucaaugcgggagugacuaccccaguguccacauauaugcuuaccaacucagaacuguugagccucaucaaugacaugccgauuacgaacgaucaaaagaaacugaugaguaacaauguccagaucguucgccagcagucuuacuccaucaugugcauuauaaaggaggaaguguuagcauauguagugcaacugccccucuacggcgucaucgacacuccuuguuggaaacuucauacaagcccacugugcaccacuaacacaaaggagggcucgaauauuuguuugacccgaacggaucgugggugguacugcgacaacgccggaucuguguccuucuuuccccaggcugaaaccuguaagguucagucaaauagaguguucugcgauacaaugaacaguagaacucugccuagcgaggucaaucucugcaacguggacaucuuuaauccaaaauaugauuguaagauaaugaccuccaaaacagacguaucuagcucaguuauuaccagucugggugccaucguguccugcuacggcaagacuaaauguacagcaagcaacaagugcagggggaucauuaagaccuucucuaauggaugugauuaugucucaaacaaaggcguggacacugucaguguggguaauacgcuuuacuauguuaacaagcaagaggggaaaagccuguacgugaagggagaacccaucauuaauuuuuaugacccuuugguauucccauccgaugaguuugacgcuucuauaucgcaggucaacgagaaaaucaaccagagccucgccuucauucggaaguccgaugaacuguuacacaaugugaacgcgggcaagucaacaaccaauaucaugaucacuaccauuauaaucguuauuaucgugauucugcuaagucucaucgccgucggccugcuuuuguacugcaaagcacgcugaggacuagucccuguucccagagcccacuuuuuuuucuuuuuuugaaauaaaauagccugucuuucagaucuaaaaaaaaaaaaaaaaaaaaaaaaaaaaaaaaaaaaaaaaaaaaaaaaaaaaaaaaaaaaaaaaugcaucccccccccccccccccccccccccccccccaaaggcucuuuucagagccaccagaauu

SEQ ID NO: 5828 - RNA, 1846 nt, Artificial Sequence
  mRNA product Design d-1 comprising derived and/or modified sequence from HRSV(A2)__F-del_DSCav1_mut5 (opt4)
gggagacccgugacccggaaguuguacggcuacgcgacuuucccucccacaaacccucgcgcccuuccuuuccuacuugggcccggcagaaagcuuaccauggagcugcugauccugaaggccaacgccaucaccaccauccugaccgccgugaccuucugcuucgccagcggccagaacaucaccgaggaguucuaccagagcaccugcagcgccgugagcaagggcuaccugagcgcccugagaaccggcugguacaccagcgugaucaccaucgagcugagcaacaucaaggagaacaagugcaacggcaccgacgccaaggugaagcugaucaagcaggagcuggacaaguacaagaacgccgugaccgagcugcagcugcugaugcagagcacccccgccaccggcagcggcagcgccaucgccagcggcguggccgugugcaaggugcugcaccuggagggcgaggugaacaagaucaagagcgcccugcugagcaccaacaaggccguggugagccugagcggcugcggcgugagcgugcugaccuucaaggugcuggaccugaagaacuacaucgacaagcagcugcugcccauccugaacaagcagagcugcagcaucagcaacaucgagaccgugaucgaguuccagcagaagaacaacagacugcuggagaucaccagagaguucagcgugaacgccggcgugaccacccccgugagcaccuacaugcugaccaacagcgagcugcugagccugaucaacgacaugcccaucaccaacgaccagaagaagcugaugagcaacaacgugcagaucgugagacagcagagcuacagcaucaugugcaucaucaaggaggaggugcuggccuacguggugcagcugccccuguacggcgugaucgacacccccugcuggaagcugcacaccagcccccugugcaccaccaacaccaaggagggcagcaacaucugccugaccagaaccgacagaggcugguacugcgacaacgccggcagcgugagcuucuucccccaggccgagaccugcaaggugcagagcaacagaguguucugcgacaccaugaacagcagaacccugcccagcgaggugaaccugugcaacguggacaucuucaaccccaaguacgacugcaagaucaugaccagcaagaccgacgugagcagcagcgugaucaccagccugggcgccaucgugagcugcuacggcaagaccaagugcaccgccagcaacaagugcagaggcaucaucaagaccuucagcaacggcugcgacuacgugagcaacaagggcguggacaccgugagcgugggcaacacccuguacuacgugaacaagcaggagggcaagagccuguacgugaagggcgagcccaucaucaacuucuacgacccccugguguuccccagcgacgaguucgacgccagcaucagccaggugaacgagaagaucaaccagagccuggccuucaucagaaagagcgacgagcugcugcacaacgugaacgccggcaagagcaccaccaacaucaugaucaccaccaucaucaucgugaucaucgugauccugcugagccugaucgccgugggccugcugcuguacugcaaggccagaugaggacuagucccuguucccagagcccacuuuuuuuucuuuuuuugaaauaaaauagccugucuuucagaucuaaaaaaaaaaaaaaaaaaaaaaaaaaaaaaaaaaaaaaaaaaaaaaaaaaaaaaaaaaaaaaaaugcaucccccccccccccccccccccccccccccccaaaggcucuuuucagagccaccagaauu

SEQ ID NO: 5829 - RNA, 1846 nt, Artificial Sequence
  mRNA product Design d-1 comprising derived and/or modified sequence from HRSV(A2)__F-del_DSCav1_mut5 (opt5)
gggagacccgugacccggaaguuguacggcuacgcgacuuucccucccacaaacccucgcgcccuuccuuuccuacuugggcccggcagaaagcuuaccauggagcugcucauccugaaggccaacgcuauuaccacaauccuuacggccgugaccuucugcuuugcgagcggccagaauauuacagaagaguucuaccaauccaccuguucugcugucagcaaaggguaucuguccgcccucagaacaggaugguacaccucuguuaucacaauugaacugagcaacaucaaggagaauaaaugcaacggcaccgacgccaaggugaaacuuaucaagcaggaacuggauaaguauaaaaaugcugugacggagcuccagcugcugaugcaguccacccccgccacagggucuggaagcgcuauugccuccggcgucgcgguguguaagguucuccaccuggagggggaagugaacaaaaucaagagcgcccuucugucuaccaauaaagcugucgugucccucagcggaugcggcguuucugugcugacauuuaagguccuugaccugaagaacuacauugauaaacaacuccugccuauccugaauaagcaguccuguagcauuucuaacaucgagaccgugauugaguuccagcagaaaaauaaccggcuccuggaaaucacgcgcgaguuuuccgugaaugccggcgucacaaccccgguuagcacauauaugcuuaccaacuccgaacugcucucucugaucaaugacaugcccauuaccaacgaucaaaagaaacuuaugagcaacaaugugcagaucgugagacagcaguccuacagcauuaugugcaucauuaaggaggaaguccuggcuuaugugguucaacucccucuguacggggugaucgacacacccuguuggaaacugcauacgucuccucucugcaccacaaacaccaaggagggauccaauaucugucugacacggaccgaucgcggcugguacugcgacaacgccgggagcgucucuuucuuuccccaggcggaaacguguaaggugcagagcaauagaguuuucugcgauacaaugaacuccagaacccugccuucugaggugaaucucugcaacgucgacauuuuuaauccgaaauaugauuguaagaucaugaccagcaaaacagacguguccagcucugucauuaccucccugggagccaucgugagcugcuacggcaagacaaaauguacggcuucuaacaagugccgggggauuaucaagaccuucuccaauggaugugauuauguuagcaacaaaggcguggacacagucuccgugggcaauacccuuuacuauguuaacaagcaagaggggaaaucucuguacgugaagggagaacccaucauuaauuuuuaugacccucucgucuuccccagcgaugaguuugacgccuccaucucucaggugaacgagaaaauuaaccagagccuggcuuucauccgcaaguccgaugaacugcuccacaaugugaacgccggcaagagcacaaccaauauuaugaucacgaccauuaucaucguuauuaucgucauucugcuuucucugaucgccguggggcuccugcuguacugcaaagcuagaugaggacuagucccuguucccagagcccacuuuuuuuucuuuuuuugaaauaaaauagccugucuuucagaucuaaaaaaaaaaaaaaaaaaaaaaaaaaaaaaaaaaaaaaaaaaaaaaaaaaaaaaaaaaaaaaaaugcaucccccccccccccccccccccccccccccccaaaggcucuuuucagagccaccagaauu

SEQ ID NO: 5830 - RNA, 1846 nt, Artificial Sequence
  mRNA product Design d-1 comprising derived and/or modified sequence from HRSV(A2)__F-del_DSCav1_mut5 (opt6)
gggagacccgugacccggaaguuguacggcuacgcgacuuucccucccacaaacccucgcgcccuuccuuuccuacuugggcccggcagaaagcuuaccauggaacuuuuaauacugaaagcaaaugccaucacaaccauacuaacugccgucacauucugcuuugcaucaggacaaaacauaacagaagaauuuuaccaauccacaugcucagcaguaucaaaaggauaucuaucggcacuuagaacuggaugguacacaaguguuauaacuauagaacucucaaacauaaaagaaaacaaaugcaauggaacagacgcaaaaguaaaacuaauaaaacaagaacucgauaaauauaaaaaugcaguaaccgaacuacaacuauuaaugcaaagcacacccgcaacaggcagcggaucagcaauagcaagcggagucgcaguauguaaaguacuacaucuagaaggagaagucaacaaaaucaaaucugcacuucuauccacaaacaaagcuguaguaucccuauccggaugcggagucucaguauuaacuuuuaaaguacuagaccuuaaaaacuacauagauaaacaacuauuaccaauacuaaauaaacaaucaugcagcauauccaauauagagacaguaauugaauuucaacaaaaaaacaacagauuacuagaaauuacucgugaauuuuccguaaaugccggagucacaacaccaguaucaaccuauaugcuaacaaacagcgaacuacuuagcuuaauaaaugacaugccaauaacaaaugaccaaaaaaaacuuaugucaaauaacguacaaaucgucagacaacaauccuacucuauaauguguauaauuaaagaagaaguccuagcauacguaguucaauuaccacucuauggaguaauagauacaccaugcuggaaacuacacacgucaccacuauguacaacaaacacaaaagaaggauccaauauaugccuaacaagaaccgacagaggcugguauugugacaacgcaggauccguuucauucuucccacaagcagaaaccuguaaaguacaaucuaauagaguauuuugcgacacaaugaacaguagaacacuaccaagcgagguuaaucuauguaacguagacauauucaauccaaaauaugauugcaaaauaaugacaucaaaaacagauguaucgucgaguguaauaacaagucugggagcuauaguaagcugcuacggcaagacgaaauguaccgcuucaaauaaaugcagaggaaucauuaaaacauucucgaacggaugcgacuacguaaguaauaaaggugucgacaccguaucaguagggaauacauuauacuacgucaacaaacaagaaggaaaaucucuauauguaaaaggagaaccaauaauaaauuucuaugacccucuaguauucccaucagaugaauuugacgcuuccauaucacaaguaaacgaaaaaaucaaucaaucuuuagcauucauacgaaaaagugaugaacuccuacacaacgucaacgcaggaaaaagcacaacaaauauaaugaucacaacaaucaucauaguaauaauaguaauacuacuaucauuaauagcaguaggauuauugcuuuacugcaaagcacgauagggacuagucccuguucccagagcccacuuuuuuuucuuuuuuugaaauaaaauagccugucuuucagaucuaaaaaaaaaaaaaaaaaaaaaaaaaaaaaaaaaaaaaaaaaaaaaaaaaaaaaaaaaaaaaaaaugcaucccccccccccccccccccccccccccccccaaaggcucuuuucagagccaccagaauu

SEQ ID NO: 5831 - RNA, 1846 nt, Artificial Sequence
  mRNA product Design d-1 comprising derived and/or modified sequence from HRSV(A2)__F-del_DSCav1_mut5 (opt11)
gggagacccgugacccggaaguuguacggcuacgcgacuuucccucccacaaacccucgcgcccuuccuuuccuacuugggcccggcagaaagcuuaccauggaacuccucauccucaaagccaacgccauaaccacaauacucaccgccguaaccuucugcuuugcgucgggacaaaacaucaccgaagaguucuaccaauccacuugcuccgcaguaagcaaaggauaccucuccgcccugcgaaccgguugguacacaucagucaucacaaucgaacucucaaacauaaaagaaaacaaaugcaacggcaccgacgcaaaggucaaauuaaucaagcaagaacuagacaaauacaaaaacgccgucacagaacuccagcugcuaaugcagagcacacccgcaacuggcagcggauccgccaucgcaucaggagucgccgugugcaaaguccuacaccucgaaggagaagugaacaaaaucaaaucagcccuacucuccaccaacaaggccgucgucucccucuccggcugcggugucuccguccuaaccuucaaagugcuagaccucaagaacuacaucgacaaacaacuccuaccaauacucaacaagcaaucuugcuccaucuccaacaucgaaaccguaaucgaguuccaacagaagaacaaccgccuccucgaaaucacccgcgaguucucugucaacgcaggggucaccacucccgucuccacauacaugcucacaaacuccgaacuccucagccucaucaacgacaugcccauaaccaacgaccagaaaaagcuaaugagcaauaacguccaaaucguuagacaacaaaguuauuccaucaugugcaucaucaaagaagaaguccucgccuacgucguacaacucccccucuauggcgucaucgacacccccugcuggaaacugcacacaucaccccucugcaccacaaacaccaaagaaggcucaaacaucugccuaacucgcaccgaccgcggcugguacugcgacaacgccggcagcguaucauucuuuccccaagccgaaacaugcaaaguucaauccaaccgcgucuucugcgacacaaugaacuccagaacgcuccccagcgaagucaaccucuguaacguagacaucuucaacccuaaguacgacugcaaaaucaugaccuccaaaacugauguauccuccuccgucaucacaucccugggcgccaucgucagcugcuacggcaaaacaaaaugcacugccucaaacaaaugccgagguaucauaaagaccuucucaaacggaugcgauuacgucagcaacaaaggcgucgacaccgucagugucggcaacacccucuacuacgucaacaaacaagaaggaaaaucccucuacgucaaaggcgaacccaucaucaacuucuacgacccccucgucuuccccagcgacgaguucgacgccuccaucucacaagucaacgaaaagauaaaccaaucucuagccuucauccgcaaauccgaugaacuccugcauaacgucaacgccggcaaauccaccacaaacaucaugaucacuaccauaaucaucgucauaaucguaauccuccuaucucuuaucgcagucggccuacuacucuacugcaaagcccgcuaaggacuagucccuguucccagagcccacuuuuuuuucuuuuuuugaaauaaaauagccugucuuucagaucuaaaaaaaaaaaaaaaaaaaaaaaaaaaaaaaaaaaaaaaaaaaaaaaaaaaaaaaaaaaaaaaaugcaucccccccccccccccccccccccccccccccaaaggcucuuuucagagccaccagaauu

SEQ ID NO: 5832 - RNA, 1901 nt, Artificial Sequence
  mRNA product Design d-2 comprising derived and/or modified sequence from HRSV(A2)__F-del_DSCav1_mut5 (opt1)
gggagagcggcucggccauuuugucccagucaguccggaggcugcggcugcagaaguaccgccugcggaguaacugcaaagaagcuuaccauggagcugcucauccugaaggccaacgccaucaccaccauccugacggcggugaccuucugcuucgccagcggccagaacaucaccgaggaguucuaccaguccacgugcagcgccgucuccaagggguaccucagcgcccugcggaccggcugguacaccuccgugaucaccaucgagcugagcaacaucaaggagaacaagugcaacgggaccgacgccaaggugaagcucaucaagcaggagcuggacaaguacaagaacgcggucacggagcugcagcuccugaugcaguccaccccggcaaccggcuccggcuccgccaucgcgagcggcgucgccgugugcaaggugcugcaccucgagggggaggucaacaagaucaagagcgcccugcuguccaccaacaaggccguggugagccucuccggcugcggcgucagcgugcugaccuucaaggugcuggaccucaagaacuacaucgacaagcagcugcugcccauccugaacaagcagagcugcuccaucagcaacaucgagacggugaucgaguuccagcagaagaacaaccggcuccuggagaucacccgcgaguucagcgugaacgccggggucaccacccccguguccacguacaugcugaccaacagcgagcuccugucccugaucaacgacaugccgaucaccaacgaccagaagaagcucaugagcaacaacgugcagaucguccggcagcaguccuacagcaucaugugcaucaucaaggaggaggugcuggcguacgugguccagcugccccucuacggcgugaucgacacccccugcuggaagcugcacacgagcccccugugcaccaccaacaccaaggagggguccaacaucugccucacgcgcaccgaccggggcugguacugcgacaacgccggcagcgucuccuucuucccgcaggccgagaccugcaaggugcagagcaaccgcguguucugcgacaccaugaacucccggacgcugcccagcgagguaaaccucugcaacgucgacaucuucaaccccaaguacgacugcaagaucaugaccuccaagaccgacgugagcuccagcgugaucaccucccugggggccaucgucagcugcuacggcaagacgaagugcaccgccagcaacaagugccgggggaucaucaagaccuucuccaacggcugcgacuacgugagcaacaagggcguggacaccguguccgucgggaacacccuguacuacgugaacaagcaggagggcaagagccucuacgugaagggggagcccaucaucaacuucuacgacccgcuggucuuccccuccgacgaguucgacgcgagcaucucccaggugaacgagaagaucaaccagagccuggccuucauccgcaaguccgacgagcugcuccacaacgugaacgccggcaagagcacgaccaacaucaugaucaccaccaucaucaucgucaucaucgugauccugcugucccucaucgccguggggcugcugcucuacugcaaggcccggugaggacuaguaauaaggaaacuguaugaaugucugugggcaggaagugaagagauccuucuguaaagguuuuuggaauuaugucugcugaauaauaaacuuuuuugaaauaauaaaucugguagaaaaaugagaucuaaaaaaaaaaaaaaaaaaaaaaaaaaaaaaaaaaaaaaaaaaaaaaaaaaaaaaaaaaaaaaaaugcaucccccccccccccccccccccccccccccccaaaggcucuuuucagagccaccagaauu

SEQ ID NO: 5833 - RNA, 1901 nt, Artificial Sequence
  mRNA product Design d-2 comprising derived and/or modified sequence from HRSV(A2)__F-del_DSCav1_mut5 (opt1)
gggagagcggcucggccauuuugucccagucaguccggaggcugcggcugcagaaguaccgccugcggaguaacugcaaagaagcuuaccauggagcugcucauccugaaggccaacgccaucaccaccauccugacggcggugaccuucugcuucgccagcggccagaacaucaccgaggaguucuaccaguccacgugcagcgccgucuccaagggguaccucagcgcccugcgcaccggcugguacaccuccgugaucaccaucgagcugagcaacaucaaggagaacaagugcaacgggaccgacgccaaggugaagcucaucaagcaggagcuggacaaguacaagaacgcggucacggagcugcagcuccugaugcaguccacccccgccaccggcagcggguccgccaucgccagcggcguggcggugugcaagguccugcaccucgagggcgaggugaacaagaucaaguccgcccugcugagcaccaacaaggccguggucucccucagcgggugcggcguguccgugcugacguucaagguccuggaccucaagaacuacaucgacaagcagcugcugccgauccucaacaagcagagcugcuccaucagcaacaucgagaccgugaucgaguuccagcagaagaacaaccggcugcuggagaucacccgcgaguucuccgugaacgccggggucaccacgcccgugagcaccuacaugcucaccaacagcgagcugcugucccucaucaacgacaugcccaucaccaacgaccagaagaagcugaugagcaacaacgugcagaucguccggcagcaguccuacagcaucaugugcaucaucaaggaggaggugcuggccuacgugguccagcucccccuguacggcgugaucgacacgccgugcuggaagcugcacaccagcccccucugcaccaccaacacgaaggagggguccaacaucugccugacccgcaccgaccggggcugguacugcgacaacgcgggcuccgugagcuucuucccccaggccgagaccugcaagguccaguccaaccgcguguucugcgacacgaugaacagccggacccuccccuccgaggucaaccugugcaacguggacaucuucaacccgaaguacgacugcaagaucaugaccagcaagaccgacguguccagcuccgucaucacgagccugggggccaucguguccugcuacggcaagaccaagugcaccgccagcaacaagugccgggggaucaucaagaccuucuccaacggcugcgacuacgugagcaacaagggcgucgacacggugagcguggggaacacccucuacuacgucaacaagcaggagggcaagucccuguacgugaagggggagcccaucaucaacuucuacgacccccugguguuccccagcgacgaguucgacgccuccaucagccaggucaacgagaagaucaaccagucccucgcguucauccgcaagagcgacgagcugcugcacaacgugaacgccggcaaguccaccaccaacaucaugaucaccacgaucaucaucgugaucaucgucauccuccugagccugaucgccguggggcuccugcuguacugcaaggcccggugaggacuaguaauaaggaaacuguaugaaugucugugggcaggaagugaagagauccuucuguaaagguuuuuggaauuaugucugcugaauaauaaacuuuuuugaaauaauaaaucugguagaaaaaugagaucuaaaaaaaaaaaaaaaaaaaaaaaaaaaaaaaaaaaaaaaaaaaaaaaaaaaaaaaaaaaaaaaaugcaucccccccccccccccccccccccccccccccaaaggcucuuuucagagccaccagaauu

SEQ ID NO: 5834 - RNA, 1901 nt, Artificial Sequence
  mRNA product Design d-2 comprising derived and/or modified sequence from HRSV(A2)__F-del_DSCav1_mut5 (opt2)
gggagagcggcucggccauuuugucccagucaguccggaggcugcggcugcagaaguaccgccugcggaguaacugcaaagaagcuuaccauggagcuccucauccucaaggccaacgccaucaccaccauccucaccgccgucaccuucugcuucgccuccggccagaacaucaccgaggaguucuaccaguccaccugcuccgccgucuccaagggcuaccucuccgcccuccgcaccggcugguacaccuccgucaucaccaucgagcucuccaacaucaaggagaacaagugcaacggcaccgacgccaaggucaagcucaucaagcaggagcucgacaaguacaagaacgccgucaccgagcuccagcuccucaugcaguccacccccgccaccggcuccggcuccgccaucgccuccggcgucgccgucugcaagguccuccaccucgagggcgaggucaacaagaucaaguccgcccuccucuccaccaacaaggccgucgucucccucuccggcugcggcgucuccguccucaccuucaagguccucgaccucaagaacuacaucgacaagcagcuccuccccauccucaacaagcaguccugcuccaucuccaacaucgagaccgucaucgaguuccagcagaagaacaaccgccuccucgagaucacccgcgaguucuccgucaacgccggcgucaccacccccgucuccaccuacaugcucaccaacuccgagcuccucucccucaucaacgacaugcccaucaccaacgaccagaagaagcucauguccaacaacguccagaucguccgccagcaguccuacuccaucaugugcaucaucaaggaggagguccucgccuacgucguccagcucccccucuacggcgucaucgacacccccugcuggaagcuccacaccuccccccucugcaccaccaacaccaaggagggcuccaacaucugccucacccgcaccgaccgcggcugguacugcgacaacgccggcuccgucuccuucuucccccaggccgagaccugcaagguccaguccaaccgcgucuucugcgacaccaugaacucccgcacccuccccuccgaggucaaccucugcaacgucgacaucuucaaccccaaguacgacugcaagaucaugaccuccaagaccgacgucuccuccuccgucaucaccucccucggcgccaucgucuccugcuacggcaagaccaagugcaccgccuccaacaagugccgcggcaucaucaagaccuucuccaacggcugcgacuacgucuccaacaagggcgucgacaccgucuccgucggcaacacccucuacuacgucaacaagcaggagggcaagucccucuacgucaagggcgagcccaucaucaacuucuacgacccccucgucuuccccuccgacgaguucgacgccuccaucucccaggucaacgagaagaucaaccagucccucgccuucauccgcaaguccgacgagcuccuccacaacgucaacgccggcaaguccaccaccaacaucaugaucaccaccaucaucaucgucaucaucgucauccuccucucccucaucgccgucggccuccuccucuacugcaaggcccgcugaggacuaguaauaaggaaacuguaugaaugucugugggcaggaagugaagagauccuucuguaaagguuuuuggaauuaugucugcugaauaauaaacuuuuuugaaauaauaaaucugguagaaaaaugagaucuaaaaaaaaaaaaaaaaaaaaaaaaaaaaaaaaaaaaaaaaaaaaaaaaaaaaaaaaaaaaaaaaugcaucccccccccccccccccccccccccccccccaaaggcucuuuucagagccaccagaauu

SEQ ID NO: 5835 - RNA, 1901 nt, Artificial Sequence
  mRNA product Design d-2 comprising derived and/or modified sequence from HRSV(A2)__F-del_DSCav1_mut5 (opt3)
gggagagcggcucggccauuuugucccagucaguccggaggcugcggcugcagaaguaccgccugcggaguaacugcaaagaagcuuaccauggagcugcucauccuuaaggccaacgcuauuaccacaauacugacugcagugacguucugcuuugccagcggccagaauaucaccgaagaguucuaccaauccacauguucugcggucucaaaaggguauuugagugcuuuaagaacuggaugguacaccagcguuauuacaaucgaacuguccaacauuaaggagaauaaaugcaacgguaccgacgccaaggugaaacuaaucaagcaggaacucgauaaguauaaaaaugcaguaacugagcugcagcuucugaugcagucuacacccgccaccggcucggggucagcuauagcaagcggaguggccgucuguaagguguugcaccucgagggcgaaguuaacaaaaucaagagugcucugcuguccacgaauaaagccguggucucucucagcgguugcgggguguccguauuaacuuuuaagguucuggaccuuaagaacuacauugauaaacaauugcugccuauccuaaauaagcagucauguaguauuagcaacaucgagaccgugauagaguuccagcagaaaaauaacaggcuccuggaaauuacacgggaguuuucugucaaugcgggagugacuaccccaguguccacauauaugcuuaccaacucagaacuguugagccucaucaaugacaugccgauuacgaacgaucaaaagaaacugaugaguaacaauguccagaucguucgccagcagucuuacuccaucaugugcauuauaaaggaggaaguguuagcauauguagugcaacugccccucuacggcgucaucgacacuccuuguuggaaacuucauacaagcccacugugcaccacuaacacaaaggagggcucgaauauuuguuugacccgaacggaucgugggugguacugcgacaacgccggaucuguguccuucuuuccccaggcugaaaccuguaagguucagucaaauagaguguucugcgauacaaugaacaguagaacucugccuagcgaggucaaucucugcaacguggacaucuuuaauccaaaauaugauuguaagauaaugaccuccaaaacagacguaucuagcucaguuauuaccagucugggugccaucguguccugcuacggcaagacuaaauguacagcaagcaacaagugcagggggaucauuaagaccuucucuaauggaugugauuaugucucaaacaaaggcguggacacugucaguguggguaauacgcuuuacuauguuaacaagcaagaggggaaaagccuguacgugaagggagaacccaucauuaauuuuuaugacccuuugguauucccauccgaugaguuugacgcuucuauaucgcaggucaacgagaaaaucaaccagagccucgccuucauucggaaguccgaugaacuguuacacaaugugaacgcgggcaagucaacaaccaauaucaugaucacuaccauuauaaucguuauuaucgugauucugcuaagucucaucgccgucggccugcuuuuguacugcaaagcacgcugaggacuaguaauaaggaaacuguaugaaugucugugggcaggaagugaagagauccuucuguaaagguuuuuggaauuaugucugcugaauaauaaacuuuuuugaaauaauaaaucugguagaaaaaugagaucuaaaaaaaaaaaaaaaaaaaaaaaaaaaaaaaaaaaaaaaaaaaaaaaaaaaaaaaaaaaaaaaaugcaucccccccccccccccccccccccccccccccaaaggcucuuuucagagccaccagaauu

SEQ ID NO: 5836 - RNA, 1901 nt, Artificial Sequence
  mRNA product Design d-2 comprising derived and/or modified sequence from HRSV(A2)__F-del_DSCav1_mut5 (opt4)
gggagagcggcucggccauuuugucccagucaguccggaggcugcggcugcagaaguaccgccugcggaguaacugcaaagaagcuuaccauggagcugcugauccugaaggccaacgccaucaccaccauccugaccgccgugaccuucugcuucgccagcggccagaacaucaccgaggaguucuaccagagcaccugcagcgccgugagcaagggcuaccugagcgcccugagaaccggcugguacaccagcgugaucaccaucgagcugagcaacaucaaggagaacaagugcaacggcaccgacgccaaggugaagcugaucaagcaggagcuggacaaguacaagaacgccgugaccgagcugcagcugcugaugcagagcacccccgccaccggcagcggcagcgccaucgccagcggcguggccgugugcaaggugcugcaccuggagggcgaggugaacaagaucaagagcgcccugcugagcaccaacaaggccguggugagccugagcggcugcggcgugagcgugcugaccuucaaggugcuggaccugaagaacuacaucgacaagcagcugcugcccauccugaacaagcagagcugcagcaucagcaacaucgagaccgugaucgaguuccagcagaagaacaacagacugcuggagaucaccagagaguucagcgugaacgccggcgugaccacccccgugagcaccuacaugcugaccaacagcgagcugcugagccugaucaacgacaugcccaucaccaacgaccagaagaagcugaugagcaacaacgugcagaucgugagacagcagagcuacagcaucaugugcaucaucaaggaggaggugcuggccuacguggugcagcugccccuguacggcgugaucgacacccccugcuggaagcugcacaccagcccccugugcaccaccaacaccaaggagggcagcaacaucugccugaccagaaccgacagaggcugguacugcgacaacgccggcagcgugagcuucuucccccaggccgagaccugcaaggugcagagcaacagaguguucugcgacaccaugaacagcagaacccugcccagcgaggugaaccugugcaacguggacaucuucaaccccaaguacgacugcaagaucaugaccagcaagaccgacgugagcagcagcgugaucaccagccugggcgccaucgugagcugcuacggcaagaccaagugcaccgccagcaacaagugcagaggcaucaucaagaccuucagcaacggcugcgacuacgugagcaacaagggcguggacaccgugagcgugggcaacacccuguacuacgugaacaagcaggagggcaagagccuguacgugaagggcgagcccaucaucaacuucuacgacccccugguguuccccagcgacgaguucgacgccagcaucagccaggugaacgagaagaucaaccagagccuggccuucaucagaaagagcgacgagcugcugcacaacgugaacgccggcaagagcaccaccaacaucaugaucaccaccaucaucaucgugaucaucgugauccugcugagccugaucgccgugggccugcugcuguacugcaaggccagaugaggacuaguaauaaggaaacuguaugaaugucugugggcaggaagugaagagauccuucuguaaagguuuuuggaauuaugucugcugaauaauaaacuuuuuugaaauaauaaaucugguagaaaaaugagaucuaaaaaaaaaaaaaaaaaaaaaaaaaaaaaaaaaaaaaaaaaaaaaaaaaaaaaaaaaaaaaaaaugcaucccccccccccccccccccccccccccccccaaaggcucuuuucagagccaccagaauu

SEQ ID NO: 5837 - RNA, 1901 nt, Artificial Sequence
  mRNA product Design d-2 comprising derived and/or modified sequence from HRSV(A2)__F-del_DSCav1_mut5 (opt5)
gggagagcggcucggccauuuugucccagucaguccggaggcugcggcugcagaaguaccgccugcggaguaacugcaaagaagcuuaccauggagcugcucauccugaaggccaacgcuauuaccacaauccuuacggccgugaccuucugcuuugcgagcggccagaauauuacagaagaguucuaccaauccaccuguucugcugucagcaaaggguaucuguccgcccucagaacaggaugguacaccucuguuaucacaauugaacugagcaacaucaaggagaauaaaugcaacggcaccgacgccaaggugaaacuuaucaagcaggaacuggauaaguauaaaaaugcugugacggagcuccagcugcugaugcaguccacccccgccacagggucuggaagcgcuauugccuccggcgucgcgguguguaagguucuccaccuggagggggaagugaacaaaaucaagagcgcccuucugucuaccaauaaagcugucgugucccucagcggaugcggcguuucugugcugacauuuaagguccuugaccugaagaacuacauugauaaacaacuccugccuauccugaauaagcaguccuguagcauuucuaacaucgagaccgugauugaguuccagcagaaaaauaaccggcuccuggaaaucacgcgcgaguuuuccgugaaugccggcgucacaaccccgguuagcacauauaugcuuaccaacuccgaacugcucucucugaucaaugacaugcccauuaccaacgaucaaaagaaacuuaugagcaacaaugugcagaucgugagacagcaguccuacagcauuaugugcaucauuaaggaggaaguccuggcuuaugugguucaacucccucuguacggggugaucgacacacccuguuggaaacugcauacgucuccucucugcaccacaaacaccaaggagggauccaauaucugucugacacggaccgaucgcggcugguacugcgacaacgccgggagcgucucuuucuuuccccaggcggaaacguguaaggugcagagcaauagaguuuucugcgauacaaugaacuccagaacccugccuucugaggugaaucucugcaacgucgacauuuuuaauccgaaauaugauuguaagaucaugaccagcaaaacagacguguccagcucugucauuaccucccugggagccaucgugagcugcuacggcaagacaaaauguacggcuucuaacaagugccgggggauuaucaagaccuucuccaauggaugugauuauguuagcaacaaaggcguggacacagucuccgugggcaauacccuuuacuauguuaacaagcaagaggggaaaucucuguacgugaagggagaacccaucauuaauuuuuaugacccucucgucuuccccagcgaugaguuugacgccuccaucucucaggugaacgagaaaauuaaccagagccuggcuuucauccgcaaguccgaugaacugcuccacaaugugaacgccggcaagagcacaaccaauauuaugaucacgaccauuaucaucguuauuaucgucauucugcuuucucugaucgccguggggcuccugcuguacugcaaagcuagaugaggacuaguaauaaggaaacuguaugaaugucugugggcaggaagugaagagauccuucuguaaagguuuuuggaauuaugucugcugaauaauaaacuuuuuugaaauaauaaaucugguagaaaaaugagaucuaaaaaaaaaaaaaaaaaaaaaaaaaaaaaaaaaaaaaaaaaaaaaaaaaaaaaaaaaaaaaaaaugcaucccccccccccccccccccccccccccccccaaaggcucuuuucagagccaccagaauu

SEQ ID NO: 5838 - RNA, 1901 nt, Artificial Sequence
  mRNA product Design d-2 comprising derived and/or modified sequence from HRSV(A2)__F-del_DSCav1_mut5 (opt6)
gggagagcggcucggccauuuugucccagucaguccggaggcugcggcugcagaaguaccgccugcggaguaacugcaaagaagcuuaccauggaacuuuuaauacugaaagcaaaugccaucacaaccauacuaacugccgucacauucugcuuugcaucaggacaaaacauaacagaagaauuuuaccaauccacaugcucagcaguaucaaaaggauaucuaucggcacuuagaacuggaugguacacaaguguuauaacuauagaacucucaaacauaaaagaaaacaaaugcaauggaacagacgcaaaaguaaaacuaauaaaacaagaacucgauaaauauaaaaaugcaguaaccgaacuacaacuauuaaugcaaagcacacccgcaacaggcagcggaucagcaauagcaagcggagucgcaguauguaaaguacuacaucuagaaggagaagucaacaaaaucaaaucugcacuucuauccacaaacaaagcuguaguaucccuauccggaugcggagucucaguauuaacuuuuaaaguacuagaccuuaaaaacuacauagauaaacaacuauuaccaauacuaaauaaacaaucaugcagcauauccaauauagagacaguaauugaauuucaacaaaaaaacaacagauuacuagaaauuacucgugaauuuuccguaaaugccggagucacaacaccaguaucaaccuauaugcuaacaaacagcgaacuacuuagcuuaauaaaugacaugccaauaacaaaugaccaaaaaaaacuuaugucaaauaacguacaaaucgucagacaacaauccuacucuauaauguguauaauuaaagaagaaguccuagcauacguaguucaauuaccacucuauggaguaauagauacaccaugcuggaaacuacacacgucaccacuauguacaacaaacacaaaagaaggauccaauauaugccuaacaagaaccgacagaggcugguauugugacaacgcaggauccguuucauucuucccacaagcagaaaccuguaaaguacaaucuaauagaguauuuugcgacacaaugaacaguagaacacuaccaagcgagguuaaucuauguaacguagacauauucaauccaaaauaugauugcaaaauaaugacaucaaaaacagauguaucgucgaguguaauaacaagucugggagcuauaguaagcugcuacggcaagacgaaauguaccgcuucaaauaaaugcagaggaaucauuaaaacauucucgaacggaugcgacuacguaaguaauaaaggugucgacaccguaucaguagggaauacauuauacuacgucaacaaacaagaaggaaaaucucuauauguaaaaggagaaccaauaauaaauuucuaugacccucuaguauucccaucagaugaauuugacgcuuccauaucacaaguaaacgaaaaaaucaaucaaucuuuagcauucauacgaaaaagugaugaacuccuacacaacgucaacgcaggaaaaagcacaacaaauauaaugaucacaacaaucaucauaguaauaauaguaauacuacuaucauuaauagcaguaggauuauugcuuuacugcaaagcacgauagggacuaguaauaaggaaacuguaugaaugucugugggcaggaagugaagagauccuucuguaaagguuuuuggaauuaugucugcugaauaauaaacuuuuuugaaauaauaaaucugguagaaaaaugagaucuaaaaaaaaaaaaaaaaaaaaaaaaaaaaaaaaaaaaaaaaaaaaaaaaaaaaaaaaaaaaaaaaugcaucccccccccccccccccccccccccccccccaaaggcucuuuucagagccaccagaauu

SEQ ID NO: 5839 - RNA, 1901 nt, Artificial Sequence
  mRNA product Design d-2 comprising derived and/or modified sequence from HRSV(A2)__F-del_DSCav1_mut5 (opt11)
gggagagcggcucggccauuuugucccagucaguccggaggcugcggcugcagaaguaccgccugcggaguaacugcaaagaagcuuaccauggaacuccucauccucaaagccaacgccauaaccacaauacucaccgccguaaccuucugcuuugcgucgggacaaaacaucaccgaagaguucuaccaauccacuugcuccgcaguaagcaaaggauaccucuccgcccugcgaaccgguugguacacaucagucaucacaaucgaacucucaaacauaaaagaaaacaaaugcaacggcaccgacgcaaaggucaaauuaaucaagcaagaacuagacaaauacaaaaacgccgucacagaacuccagcugcuaaugcagagcacacccgcaacuggcagcggauccgccaucgcaucaggagucgccgugugcaaaguccuacaccucgaaggagaagugaacaaaaucaaaucagcccuacucuccaccaacaaggccgucgucucccucuccggcugcggugucuccguccuaaccuucaaagugcuagaccucaagaacuacaucgacaaacaacuccuaccaauacucaacaagcaaucuugcuccaucuccaacaucgaaaccguaaucgaguuccaacagaagaacaaccgccuccucgaaaucacccgcgaguucucugucaacgcaggggucaccacucccgucuccacauacaugcucacaaacuccgaacuccucagccucaucaacgacaugcccauaaccaacgaccagaaaaagcuaaugagcaauaacguccaaaucguuagacaacaaaguuauuccaucaugugcaucaucaaagaagaaguccucgccuacgucguacaacucccccucuauggcgucaucgacacccccugcuggaaacugcacacaucaccccucugcaccacaaacaccaaagaaggcucaaacaucugccuaacucgcaccgaccgcggcugguacugcgacaacgccggcagcguaucauucuuuccccaagccgaaacaugcaaaguucaauccaaccgcgucuucugcgacacaaugaacuccagaacgcuccccagcgaagucaaccucuguaacguagacaucuucaacccuaaguacgacugcaaaaucaugaccuccaaaacugauguauccuccuccgucaucacaucccugggcgccaucgucagcugcuacggcaaaacaaaaugcacugccucaaacaaaugccgagguaucauaaagaccuucucaaacggaugcgauuacgucagcaacaaaggcgucgacaccgucagugucggcaacacccucuacuacgucaacaaacaagaaggaaaaucccucuacgucaaaggcgaacccaucaucaacuucuacgacccccucgucuuccccagcgacgaguucgacgccuccaucucacaagucaacgaaaagauaaaccaaucucuagccuucauccgcaaauccgaugaacuccugcauaacgucaacgccggcaaauccaccacaaacaucaugaucacuaccauaaucaucgucauaaucguaauccuccuaucucuuaucgcagucggccuacuacucuacugcaaagcccgcuaaggacuaguaauaaggaaacuguaugaaugucugugggcaggaagugaagagauccuucuguaaagguuuuuggaauuaugucugcugaauaauaaacuuuuuugaaauaauaaaucugguagaaaaaugagaucuaaaaaaaaaaaaaaaaaaaaaaaaaaaaaaaaaaaaaaaaaaaaaaaaaaaaaaaaaaaaaaaaugcaucccccccccccccccccccccccccccccccaaaggcucuuuucagagccaccagaauu

SEQ ID NO: 5840 - RNA, 2217 nt, Artificial Sequence
  mRNA product Design d-3 comprising derived and/or modified sequence from HRSV(A2)__F-del_DSCav1_mut5 (opt1)
gggagagggcgcuuggcuugcaaggacccugagcugcggcauugaagcacacccaacccaacucgacugaagucagccucacugaaccggaucugagaaucuucucucucugggcuugccagggcucuccgaaccuagcuagcauccucuucaauuccaacuagaaagcuuaccauggagcugcucauccugaaggccaacgccaucaccaccauccugacggcggugaccuucugcuucgccagcggccagaacaucaccgaggaguucuaccaguccacgugcagcgccgucuccaagggguaccucagcgcccugcggaccggcugguacaccuccgugaucaccaucgagcugagcaacaucaaggagaacaagugcaacgggaccgacgccaaggugaagcucaucaagcaggagcuggacaaguacaagaacgcggucacggagcugcagcuccugaugcaguccaccccggcaaccggcuccggcuccgccaucgcgagcggcgucgccgugugcaaggugcugcaccucgagggggaggucaacaagaucaagagcgcccugcuguccaccaacaaggccguggugagccucuccggcugcggcgucagcgugcugaccuucaaggugcuggaccucaagaacuacaucgacaagcagcugcugcccauccugaacaagcagagcugcuccaucagcaacaucgagacggugaucgaguuccagcagaagaacaaccggcuccuggagaucacccgcgaguucagcgugaacgccggggucaccacccccguguccacguacaugcugaccaacagcgagcuccugucccugaucaacgacaugccgaucaccaacgaccagaagaagcucaugagcaacaacgugcagaucguccggcagcaguccuacagcaucaugugcaucaucaaggaggaggugcuggcguacgugguccagcugccccucuacggcgugaucgacacccccugcuggaagcugcacacgagcccccugugcaccaccaacaccaaggagggguccaacaucugccucacgcgcaccgaccggggcugguacugcgacaacgccggcagcgucuccuucuucccgcaggccgagaccugcaaggugcagagcaaccgcguguucugcgacaccaugaacucccggacgcugcccagcgagguaaaccucugcaacgucgacaucuucaaccccaaguacgacugcaagaucaugaccuccaagaccgacgugagcuccagcgugaucaccucccugggggccaucgucagcugcuacggcaagacgaagugcaccgccagcaacaagugccgggggaucaucaagaccuucuccaacggcugcgacuacgugagcaacaagggcguggacaccguguccgucgggaacacccuguacuacgugaacaagcaggagggcaagagccucuacgugaagggggagcccaucaucaacuucuacgacccgcuggucuuccccuccgacgaguucgacgcgagcaucucccaggugaacgagaagaucaaccagagccuggccuucauccgcaaguccgacgagcugcuccacaacgugaacgccggcaagagcacgaccaacaucaugaucaccaccaucaucaucgucaucaucgugauccugcugucccucaucgccguggggcugcugcucuacugcaaggcccggugaggacuagugaagggaacacccaaauuuaauucagccuuaagcacaauuaauuaagagugaaacguaauuguacaagcaguuggucacccaccauagggcaugaucaacaccgcaaccuuuccuuuuucccccagugauucugaaaaaccccucuucccuucagcuugcuuagauguuccaaauuuaguaagcuuaaggcggccuacagaagaaaaagaaaaaaaaggccacaaaaguucccucucacuuucaguaaauaaaauaaaagcagcaacagaaauaaagaaauaaaugaaauucaaaaugaaauaaauauuguguugugcagcauuaaaaaaucaauaaaaauuaaaaaugagcaagaucuaaaaaaaaaaaaaaaaaaaaaaaaaaaaaaaaaaaaaaaaaaaaaaaaaaaaaaaaaaaaaaaaugcaucccccccccccccccccccccccccccccccaaaggcucuuuucagagccaccagaauu

SEQ ID NO: 5841 - RNA, 2217 nt, Artificial Sequence
  mRNA product Design d-3 comprising derived and/or modified sequence from HRSV(A2)__F-del_DSCav1_mut5 (opt1)
gggagagggcgcuuggcuugcaaggacccugagcugcggcauugaagcacacccaacccaacucgacugaagucagccucacugaaccggaucugagaaucuucucucucugggcuugccagggcucuccgaaccuagcuagcauccucuucaauuccaacuagaaagcuuaccauggagcugcucauccugaaggccaacgccaucaccaccauccugacggcggugaccuucugcuucgccagcggccagaacaucaccgaggaguucuaccaguccacgugcagcgccgucuccaagggguaccucagcgcccugcgcaccggcugguacaccuccgugaucaccaucgagcugagcaacaucaaggagaacaagugcaacgggaccgacgccaaggugaagcucaucaagcaggagcuggacaaguacaagaacgcggucacggagcugcagcuccugaugcaguccacccccgccaccggcagcggguccgccaucgccagcggcguggcggugugcaagguccugcaccucgagggcgaggugaacaagaucaaguccgcccugcugagcaccaacaaggccguggucucccucagcgggugcggcguguccgugcugacguucaagguccuggaccucaagaacuacaucgacaagcagcugcugccgauccucaacaagcagagcugcuccaucagcaacaucgagaccgugaucgaguuccagcagaagaacaaccggcugcuggagaucacccgcgaguucuccgugaacgccggggucaccacgcccgugagcaccuacaugcucaccaacagcgagcugcugucccucaucaacgacaugcccaucaccaacgaccagaagaagcugaugagcaacaacgugcagaucguccggcagcaguccuacagcaucaugugcaucaucaaggaggaggugcuggccuacgugguccagcucccccuguacggcgugaucgacacgccgugcuggaagcugcacaccagcccccucugcaccaccaacacgaaggagggguccaacaucugccugacccgcaccgaccggggcugguacugcgacaacgcgggcuccgugagcuucuucccccaggccgagaccugcaagguccaguccaaccgcguguucugcgacacgaugaacagccggacccuccccuccgaggucaaccugugcaacguggacaucuucaacccgaaguacgacugcaagaucaugaccagcaagaccgacguguccagcuccgucaucacgagccugggggccaucguguccugcuacggcaagaccaagugcaccgccagcaacaagugccgggggaucaucaagaccuucuccaacggcugcgacuacgugagcaacaagggcgucgacacggugagcguggggaacacccucuacuacgucaacaagcaggagggcaagucccuguacgugaagggggagcccaucaucaacuucuacgacccccugguguuccccagcgacgaguucgacgccuccaucagccaggucaacgagaagaucaaccagucccucgcguucauccgcaagagcgacgagcugcugcacaacgugaacgccggcaaguccaccaccaacaucaugaucaccacgaucaucaucgugaucaucgucauccuccugagccugaucgccguggggcuccugcuguacugcaaggcccggugaggacuagugaagggaacacccaaauuuaauucagccuuaagcacaauuaauuaagagugaaacguaauuguacaagcaguuggucacccaccauagggcaugaucaacaccgcaaccuuuccuuuuucccccagugauucugaaaaaccccucuucccuucagcuugcuuagauguuccaaauuuaguaagcuuaaggcggccuacagaagaaaaagaaaaaaaaggccacaaaaguucccucucacuuucaguaaauaaaauaaaagcagcaacagaaauaaagaaauaaaugaaauucaaaaugaaauaaauauuguguugugcagcauuaaaaaaucaauaaaaauuaaaaaugagcaagaucuaaaaaaaaaaaaaaaaaaaaaaaaaaaaaaaaaaaaaaaaaaaaaaaaaaaaaaaaaaaaaaaaugcaucccccccccccccccccccccccccccccccaaaggcucuuuucagagccaccagaauu

SEQ ID NO: 5842 - RNA, 2217 nt, Artificial Sequence
  mRNA product Design d-3 comprising derived and/or modified sequence from HRSV(A2)__F-del_DSCav1_mut5 (opt2)
gggagagggcgcuuggcuugcaaggacccugagcugcggcauugaagcacacccaacccaacucgacugaagucagccucacugaaccggaucugagaaucuucucucucugggcuugccagggcucuccgaaccuagcuagcauccucuucaauuccaacuagaaagcuuaccauggagcuccucauccucaaggccaacgccaucaccaccauccucaccgccgucaccuucugcuucgccuccggccagaacaucaccgaggaguucuaccaguccaccugcuccgccgucuccaagggcuaccucuccgcccuccgcaccggcugguacaccuccgucaucaccaucgagcucuccaacaucaaggagaacaagugcaacggcaccgacgccaaggucaagcucaucaagcaggagcucgacaaguacaagaacgccgucaccgagcuccagcuccucaugcaguccacccccgccaccggcuccggcuccgccaucgccuccggcgucgccgucugcaagguccuccaccucgagggcgaggucaacaagaucaaguccgcccuccucuccaccaacaaggccgucgucucccucuccggcugcggcgucuccguccucaccuucaagguccucgaccucaagaacuacaucgacaagcagcuccuccccauccucaacaagcaguccugcuccaucuccaacaucgagaccgucaucgaguuccagcagaagaacaaccgccuccucgagaucacccgcgaguucuccgucaacgccggcgucaccacccccgucuccaccuacaugcucaccaacuccgagcuccucucccucaucaacgacaugcccaucaccaacgaccagaagaagcucauguccaacaacguccagaucguccgccagcaguccuacuccaucaugugcaucaucaaggaggagguccucgccuacgucguccagcucccccucuacggcgucaucgacacccccugcuggaagcuccacaccuccccccucugcaccaccaacaccaaggagggcuccaacaucugccucacccgcaccgaccgcggcugguacugcgacaacgccggcuccgucuccuucuucccccaggccgagaccugcaagguccaguccaaccgcgucuucugcgacaccaugaacucccgcacccuccccuccgaggucaaccucugcaacgucgacaucuucaaccccaaguacgacugcaagaucaugaccuccaagaccgacgucuccuccuccgucaucaccucccucggcgccaucgucuccugcuacggcaagaccaagugcaccgccuccaacaagugccgcggcaucaucaagaccuucuccaacggcugcgacuacgucuccaacaagggcgucgacaccgucuccgucggcaacacccucuacuacgucaacaagcaggagggcaagucccucuacgucaagggcgagcccaucaucaacuucuacgacccccucgucuuccccuccgacgaguucgacgccuccaucucccaggucaacgagaagaucaaccagucccucgccuucauccgcaaguccgacgagcuccuccacaacgucaacgccggcaaguccaccaccaacaucaugaucaccaccaucaucaucgucaucaucgucauccuccucucccucaucgccgucggccuccuccucuacugcaaggcccgcugaggacuagugaagggaacacccaaauuuaauucagccuuaagcacaauuaauuaagagugaaacguaauuguacaagcaguuggucacccaccauagggcaugaucaacaccgcaaccuuuccuuuuucccccagugauucugaaaaaccccucuucccuucagcuugcuuagauguuccaaauuuaguaagcuuaaggcggccuacagaagaaaaagaaaaaaaaggccacaaaaguucccucucacuuucaguaaauaaaauaaaagcagcaacagaaauaaagaaauaaaugaaauucaaaaugaaauaaauauuguguugugcagcauuaaaaaaucaauaaaaauuaaaaaugagcaagaucuaaaaaaaaaaaaaaaaaaaaaaaaaaaaaaaaaaaaaaaaaaaaaaaaaaaaaaaaaaaaaaaaugcaucccccccccccccccccccccccccccccccaaaggcucuuuucagagccaccagaauu

SEQ ID NO: 5843 - RNA, 2217 nt, Artificial Sequence
  mRNA product Design d-3 comprising derived and/or modified sequence from HRSV(A2)__F-del_DSCav1_mut5 (opt3)
gggagagggcgcuuggcuugcaaggacccugagcugcggcauugaagcacacccaacccaacucgacugaagucagccucacugaaccggaucugagaaucuucucucucugggcuugccagggcucuccgaaccuagcuagcauccucuucaauuccaacuagaaagcuuaccauggagcugcucauccuuaaggccaacgcuauuaccacaauacugacugcagugacguucugcuuugccagcggccagaauaucaccgaagaguucuaccaauccacauguucugcggucucaaaaggguauuugagugcuuuaagaacuggaugguacaccagcguuauuacaaucgaacuguccaacauuaaggagaauaaaugcaacgguaccgacgccaaggugaaacuaaucaagcaggaacucgauaaguauaaaaaugcaguaacugagcugcagcuucugaugcagucuacacccgccaccggcucggggucagcuauagcaagcggaguggccgucuguaagguguugcaccucgagggcgaaguuaacaaaaucaagagugcucugcuguccacgaauaaagccguggucucucucagcgguugcgggguguccguauuaacuuuuaagguucuggaccuuaagaacuacauugauaaacaauugcugccuauccuaaauaagcagucauguaguauuagcaacaucgagaccgugauagaguuccagcagaaaaauaacaggcuccuggaaauuacacgggaguuuucugucaaugcgggagugacuaccccaguguccacauauaugcuuaccaacucagaacuguugagccucaucaaugacaugccgauuacgaacgaucaaaagaaacugaugaguaacaauguccagaucguucgccagcagucuuacuccaucaugugcauuauaaaggaggaaguguuagcauauguagugcaacugccccucuacggcgucaucgacacuccuuguuggaaacuucauacaagcccacugugcaccacuaacacaaaggagggcucgaauauuuguuugacccgaacggaucgugggugguacugcgacaacgccggaucuguguccuucuuuccccaggcugaaaccuguaagguucagucaaauagaguguucugcgauacaaugaacaguagaacucugccuagcgaggucaaucucugcaacguggacaucuuuaauccaaaauaugauuguaagauaaugaccuccaaaacagacguaucuagcucaguuauuaccagucugggugccaucguguccugcuacggcaagacuaaauguacagcaagcaacaagugcagggggaucauuaagaccuucucuaauggaugugauuaugucucaaacaaaggcguggacacugucaguguggguaauacgcuuuacuauguuaacaagcaagaggggaaaagccuguacgugaagggagaacccaucauuaauuuuuaugacccuuugguauucccauccgaugaguuugacgcuucuauaucgcaggucaacgagaaaaucaaccagagccucgccuucauucggaaguccgaugaacuguuacacaaugugaacgcgggcaagucaacaaccaauaucaugaucacuaccauuauaaucguuauuaucgugauucugcuaagucucaucgccgucggccugcuuuuguacugcaaagcacgcugaggacuagugaagggaacacccaaauuuaauucagccuuaagcacaauuaauuaagagugaaacguaauuguacaagcaguuggucacccaccauagggcaugaucaacaccgcaaccuuuccuuuuucccccagugauucugaaaaaccccucuucccuucagcuugcuuagauguuccaaauuuaguaagcuuaaggcggccuacagaagaaaaagaaaaaaaaggccacaaaaguucccucucacuuucaguaaauaaaauaaaagcagcaacagaaauaaagaaauaaaugaaauucaaaaugaaauaaauauuguguugugcagcauuaaaaaaucaauaaaaauuaaaaaugagcaagaucuaaaaaaaaaaaaaaaaaaaaaaaaaaaaaaaaaaaaaaaaaaaaaaaaaaaaaaaaaaaaaaaaugcaucccccccccccccccccccccccccccccccaaaggcucuuuucagagccaccagaauu

SEQ ID NO: 5844 - RNA, 2217 nt, Artificial Sequence
  mRNA product Design d-3 comprising derived and/or modified sequence from HRSV(A2)__F-del_DSCav1_mut5 (opt4)
gggagagggcgcuuggcuugcaaggacccugagcugcggcauugaagcacacccaacccaacucgacugaagucagccucacugaaccggaucugagaaucuucucucucugggcuugccagggcucuccgaaccuagcuagcauccucuucaauuccaacuagaaagcuuaccauggagcugcugauccugaaggccaacgccaucaccaccauccugaccgccgugaccuucugcuucgccagcggccagaacaucaccgaggaguucuaccagagcaccugcagcgccgugagcaagggcuaccugagcgcccugagaaccggcugguacaccagcgugaucaccaucgagcugagcaacaucaaggagaacaagugcaacggcaccgacgccaaggugaagcugaucaagcaggagcuggacaaguacaagaacgccgugaccgagcugcagcugcugaugcagagcacccccgccaccggcagcggcagcgccaucgccagcggcguggccgugugcaaggugcugcaccuggagggcgaggugaacaagaucaagagcgcccugcugagcaccaacaaggccguggugagccugagcggcugcggcgugagcgugcugaccuucaaggugcuggaccugaagaacuacaucgacaagcagcugcugcccauccugaacaagcagagcugcagcaucagcaacaucgagaccgugaucgaguuccagcagaagaacaacagacugcuggagaucaccagagaguucagcgugaacgccggcgugaccacccccgugagcaccuacaugcugaccaacagcgagcugcugagccugaucaacgacaugcccaucaccaacgaccagaagaagcugaugagcaacaacgugcagaucgugagacagcagagcuacagcaucaugugcaucaucaaggaggaggugcuggccuacguggugcagcugccccuguacggcgugaucgacacccccugcuggaagcugcacaccagcccccugugcaccaccaacaccaaggagggcagcaacaucugccugaccagaaccgacagaggcugguacugcgacaacgccggcagcgugagcuucuucccccaggccgagaccugcaaggugcagagcaacagaguguucugcgacaccaugaacagcagaacccugcccagcgaggugaaccugugcaacguggacaucuucaaccccaaguacgacugcaagaucaugaccagcaagaccgacgugagcagcagcgugaucaccagccugggcgccaucgugagcugcuacggcaagaccaagugcaccgccagcaacaagugcagaggcaucaucaagaccuucagcaacggcugcgacuacgugagcaacaagggcguggacaccgugagcgugggcaacacccuguacuacgugaacaagcaggagggcaagagccuguacgugaagggcgagcccaucaucaacuucuacgacccccugguguuccccagcgacgaguucgacgccagcaucagccaggugaacgagaagaucaaccagagccuggccuucaucagaaagagcgacgagcugcugcacaacgugaacgccggcaagagcaccaccaacaucaugaucaccaccaucaucaucgugaucaucgugauccugcugagccugaucgccgugggccugcugcuguacugcaaggccagaugaggacuagugaagggaacacccaaauuuaauucagccuuaagcacaauuaauuaagagugaaacguaauuguacaagcaguuggucacccaccauagggcaugaucaacaccgcaaccuuuccuuuuucccccagugauucugaaaaaccccucuucccuucagcuugcuuagauguuccaaauuuaguaagcuuaaggcggccuacagaagaaaaagaaaaaaaaggccacaaaaguucccucucacuuucaguaaauaaaauaaaagcagcaacagaaauaaagaaauaaaugaaauucaaaaugaaauaaauauuguguugugcagcauuaaaaaaucaauaaaaauuaaaaaugagcaagaucuaaaaaaaaaaaaaaaaaaaaaaaaaaaaaaaaaaaaaaaaaaaaaaaaaaaaaaaaaaaaaaaaugcaucccccccccccccccccccccccccccccccaaaggcucuuuucagagccaccagaauu

SEQ ID NO: 5845 - RNA, 2217 nt, Artificial Sequence
  mRNA product Design d-3 comprising derived and/or modified sequence from HRSV(A2)__F-del_DSCav1_mut5 (opt5)
gggagagggcgcuuggcuugcaaggacccugagcugcggcauugaagcacacccaacccaacucgacugaagucagccucacugaaccggaucugagaaucuucucucucugggcuugccagggcucuccgaaccuagcuagcauccucuucaauuccaacuagaaagcuuaccauggagcugcucauccugaaggccaacgcuauuaccacaauccuuacggccgugaccuucugcuuugcgagcggccagaauauuacagaagaguucuaccaauccaccuguucugcugucagcaaaggguaucuguccgcccucagaacaggaugguacaccucuguuaucacaauugaacugagcaacaucaaggagaauaaaugcaacggcaccgacgccaaggugaaacuuaucaagcaggaacuggauaaguauaaaaaugcugugacggagcuccagcugcugaugcaguccacccccgccacagggucuggaagcgcuauugccuccggcgucgcgguguguaagguucuccaccuggagggggaagugaacaaaaucaagagcgcccuucugucuaccaauaaagcugucgugucccucagcggaugcggcguuucugugcugacauuuaagguccuugaccugaagaacuacauugauaaacaacuccugccuauccugaauaagcaguccuguagcauuucuaacaucgagaccgugauugaguuccagcagaaaaauaaccggcuccuggaaaucacgcgcgaguuuuccgugaaugccggcgucacaaccccgguuagcacauauaugcuuaccaacuccgaacugcucucucugaucaaugacaugcccauuaccaacgaucaaaagaaacuuaugagcaacaaugugcagaucgugagacagcaguccuacagcauuaugugcaucauuaaggaggaaguccuggcuuaugugguucaacucccucuguacggggugaucgacacacccuguuggaaacugcauacgucuccucucugcaccacaaacaccaaggagggauccaauaucugucugacacggaccgaucgcggcugguacugcgacaacgccgggagcgucucuuucuuuccccaggcggaaacguguaaggugcagagcaauagaguuuucugcgauacaaugaacuccagaacccugccuucugaggugaaucucugcaacgucgacauuuuuaauccgaaauaugauuguaagaucaugaccagcaaaacagacguguccagcucugucauuaccucccugggagccaucgugagcugcuacggcaagacaaaauguacggcuucuaacaagugccgggggauuaucaagaccuucuccaauggaugugauuauguuagcaacaaaggcguggacacagucuccgugggcaauacccuuuacuauguuaacaagcaagaggggaaaucucuguacgugaagggagaacccaucauuaauuuuuaugacccucucgucuuccccagcgaugaguuugacgccuccaucucucaggugaacgagaaaauuaaccagagccuggcuuucauccgcaaguccgaugaacugcuccacaaugugaacgccggcaagagcacaaccaauauuaugaucacgaccauuaucaucguuauuaucgucauucugcuuucucugaucgccguggggcuccugcuguacugcaaagcuagaugaggacuagugaagggaacacccaaauuuaauucagccuuaagcacaauuaauuaagagugaaacguaauuguacaagcaguuggucacccaccauagggcaugaucaacaccgcaaccuuuccuuuuucccccagugauucugaaaaaccccucuucccuucagcuugcuuagauguuccaaauuuaguaagcuuaaggcggccuacagaagaaaaagaaaaaaaaggccacaaaaguucccucucacuuucaguaaauaaaauaaaagcagcaacagaaauaaagaaauaaaugaaauucaaaaugaaauaaauauuguguugugcagcauuaaaaaaucaauaaaaauuaaaaaugagcaagaucuaaaaaaaaaaaaaaaaaaaaaaaaaaaaaaaaaaaaaaaaaaaaaaaaaaaaaaaaaaaaaaaaugcaucccccccccccccccccccccccccccccccaaaggcucuuuucagagccaccagaauu

SEQ ID NO: 5846 - RNA, 2217 nt, Artificial Sequence
  mRNA product Design d-3 comprising derived and/or modified sequence from HRSV(A2)__F-del_DSCav1_mut5 (opt6)
gggagagggcgcuuggcuugcaaggacccugagcugcggcauugaagcacacccaacccaacucgacugaagucagccucacugaaccggaucugagaaucuucucucucugggcuugccagggcucuccgaaccuagcuagcauccucuucaauuccaacuagaaagcuuaccauggaacuuuuaauacugaaagcaaaugccaucacaaccauacuaacugccgucacauucugcuuugcaucaggacaaaacauaacagaagaauuuuaccaauccacaugcucagcaguaucaaaaggauaucuaucggcacuuagaacuggaugguacacaaguguuauaacuauagaacucucaaacauaaaagaaaacaaaugcaauggaacagacgcaaaaguaaaacuaauaaaacaagaacucgauaaauauaaaaaugcaguaaccgaacuacaacuauuaaugcaaagcacacccgcaacaggcagcggaucagcaauagcaagcggagucgcaguauguaaaguacuacaucuagaaggagaagucaacaaaaucaaaucugcacuucuauccacaaacaaagcuguaguaucccuauccggaugcggagucucaguauuaacuuuuaaaguacuagaccuuaaaaacuacauagauaaacaacuauuaccaauacuaaauaaacaaucaugcagcauauccaauauagagacaguaauugaauuucaacaaaaaaacaacagauuacuagaaauuacucgugaauuuuccguaaaugccggagucacaacaccaguaucaaccuauaugcuaacaaacagcgaacuacuuagcuuaauaaaugacaugccaauaacaaaugaccaaaaaaaacuuaugucaaauaacguacaaaucgucagacaacaauccuacucuauaauguguauaauuaaagaagaaguccuagcauacguaguucaauuaccacucuauggaguaauagauacaccaugcuggaaacuacacacgucaccacuauguacaacaaacacaaaagaaggauccaauauaugccuaacaagaaccgacagaggcugguauugugacaacgcaggauccguuucauucuucccacaagcagaaaccuguaaaguacaaucuaauagaguauuuugcgacacaaugaacaguagaacacuaccaagcgagguuaaucuauguaacguagacauauucaauccaaaauaugauugcaaaauaaugacaucaaaaacagauguaucgucgaguguaauaacaagucugggagcuauaguaagcugcuacggcaagacgaaauguaccgcuucaaauaaaugcagaggaaucauuaaaacauucucgaacggaugcgacuacguaaguaauaaaggugucgacaccguaucaguagggaauacauuauacuacgucaacaaacaagaaggaaaaucucuauauguaaaaggagaaccaauaauaaauuucuaugacccucuaguauucccaucagaugaauuugacgcuuccauaucacaaguaaacgaaaaaaucaaucaaucuuuagcauucauacgaaaaagugaugaacuccuacacaacgucaacgcaggaaaaagcacaacaaauauaaugaucacaacaaucaucauaguaauaauaguaauacuacuaucauuaauagcaguaggauuauugcuuuacugcaaagcacgauagggacuagugaagggaacacccaaauuuaauucagccuuaagcacaauuaauuaagagugaaacguaauuguacaagcaguuggucacccaccauagggcaugaucaacaccgcaaccuuuccuuuuucccccagugauucugaaaaaccccucuucccuucagcuugcuuagauguuccaaauuuaguaagcuuaaggcggccuacagaagaaaaagaaaaaaaaggccacaaaaguucccucucacuuucaguaaauaaaauaaaagcagcaacagaaauaaagaaauaaaugaaauucaaaaugaaauaaauauuguguugugcagcauuaaaaaaucaauaaaaauuaaaaaugagcaagaucuaaaaaaaaaaaaaaaaaaaaaaaaaaaaaaaaaaaaaaaaaaaaaaaaaaaaaaaaaaaaaaaaugcaucccccccccccccccccccccccccccccccaaaggcucuuuucagagccaccagaauu

SEQ ID NO: 5847 - RNA, 2217 nt, Artificial Sequence
  mRNA product Design d-3 comprising derived and/or modified sequence from HRSV(A2)__F-del_DSCav1_mut5 (opt11)
gggagagggcgcuuggcuugcaaggacccugagcugcggcauugaagcacacccaacccaacucgacugaagucagccucacugaaccggaucugagaaucuucucucucugggcuugccagggcucuccgaaccuagcuagcauccucuucaauuccaacuagaaagcuuaccauggaacuccucauccucaaagccaacgccauaaccacaauacucaccgccguaaccuucugcuuugcgucgggacaaaacaucaccgaagaguucuaccaauccacuugcuccgcaguaagcaaaggauaccucuccgcccugcgaaccgguugguacacaucagucaucacaaucgaacucucaaacauaaaagaaaacaaaugcaacggcaccgacgcaaaggucaaauuaaucaagcaagaacuagacaaauacaaaaacgccgucacagaacuccagcugcuaaugcagagcacacccgcaacuggcagcggauccgccaucgcaucaggagucgccgugugcaaaguccuacaccucgaaggagaagugaacaaaaucaaaucagcccuacucuccaccaacaaggccgucgucucccucuccggcugcggugucuccguccuaaccuucaaagugcuagaccucaagaacuacaucgacaaacaacuccuaccaauacucaacaagcaaucuugcuccaucuccaacaucgaaaccguaaucgaguuccaacagaagaacaaccgccuccucgaaaucacccgcgaguucucugucaacgcaggggucaccacucccgucuccacauacaugcucacaaacuccgaacuccucagccucaucaacgacaugcccauaaccaacgaccagaaaaagcuaaugagcaauaacguccaaaucguuagacaacaaaguuauuccaucaugugcaucaucaaagaagaaguccucgccuacgucguacaacucccccucuauggcgucaucgacacccccugcuggaaacugcacacaucaccccucugcaccacaaacaccaaagaaggcucaaacaucugccuaacucgcaccgaccgcggcugguacugcgacaacgccggcagcguaucauucuuuccccaagccgaaacaugcaaaguucaauccaaccgcgucuucugcgacacaaugaacuccagaacgcuccccagcgaagucaaccucuguaacguagacaucuucaacccuaaguacgacugcaaaaucaugaccuccaaaacugauguauccuccuccgucaucacaucccugggcgccaucgucagcugcuacggcaaaacaaaaugcacugccucaaacaaaugccgagguaucauaaagaccuucucaaacggaugcgauuacgucagcaacaaaggcgucgacaccgucagugucggcaacacccucuacuacgucaacaaacaagaaggaaaaucccucuacgucaaaggcgaacccaucaucaacuucuacgacccccucgucuuccccagcgacgaguucgacgccuccaucucacaagucaacgaaaagauaaaccaaucucuagccuucauccgcaaauccgaugaacuccugcauaacgucaacgccggcaaauccaccacaaacaucaugaucacuaccauaaucaucgucauaaucguaauccuccuaucucuuaucgcagucggccuacuacucuacugcaaagcccgcuaaggacuagugaagggaacacccaaauuuaauucagccuuaagcacaauuaauuaagagugaaacguaauuguacaagcaguuggucacccaccauagggcaugaucaacaccgcaaccuuuccuuuuucccccagugauucugaaaaaccccucuucccuucagcuugcuuagauguuccaaauuuaguaagcuuaaggcggccuacagaagaaaaagaaaaaaaaggccacaaaaguucccucucacuuucaguaaauaaaauaaaagcagcaacagaaauaaagaaauaaaugaaauucaaaaugaaauaaauauuguguugugcagcauuaaaaaaucaauaaaaauuaaaaaugagcaagaucuaaaaaaaaaaaaaaaaaaaaaaaaaaaaaaaaaaaaaaaaaaaaaaaaaaaaaaaaaaaaaaaaugcaucccccccccccccccccccccccccccccccaaaggcucuuuucagagccaccagaauu

SEQ ID NO: 5848 - RNA, 1900 nt, Artificial Sequence
  mRNA product Design d-4 comprising derived and/or modified sequence from HRSV(A2)__F-del_DSCav1_mut5 (opt1)
gggagagucccgcagucggcguccagcggcucugcuuguucgugugugugucguugcaggccuuauucaagcuuaccauggagcugcucauccugaaggccaacgccaucaccaccauccugacggcggugaccuucugcuucgccagcggccagaacaucaccgaggaguucuaccaguccacgugcagcgccgucuccaagggguaccucagcgcccugcggaccggcugguacaccuccgugaucaccaucgagcugagcaacaucaaggagaacaagugcaacgggaccgacgccaaggugaagcucaucaagcaggagcuggacaaguacaagaacgcggucacggagcugcagcuccugaugcaguccaccccggcaaccggcuccggcuccgccaucgcgagcggcgucgccgugugcaaggugcugcaccucgagggggaggucaacaagaucaagagcgcccugcuguccaccaacaaggccguggugagccucuccggcugcggcgucagcgugcugaccuucaaggugcuggaccucaagaacuacaucgacaagcagcugcugcccauccugaacaagcagagcugcuccaucagcaacaucgagacggugaucgaguuccagcagaagaacaaccggcuccuggagaucacccgcgaguucagcgugaacgccggggucaccacccccguguccacguacaugcugaccaacagcgagcuccugucccugaucaacgacaugccgaucaccaacgaccagaagaagcucaugagcaacaacgugcagaucguccggcagcaguccuacagcaucaugugcaucaucaaggaggaggugcuggcguacgugguccagcugccccucuacggcgugaucgacacccccugcuggaagcugcacacgagcccccugugcaccaccaacaccaaggagggguccaacaucugccucacgcgcaccgaccggggcugguacugcgacaacgccggcagcgucuccuucuucccgcaggccgagaccugcaaggugcagagcaaccgcguguucugcgacaccaugaacucccggacgcugcccagcgagguaaaccucugcaacgucgacaucuucaaccccaaguacgacugcaagaucaugaccuccaagaccgacgugagcuccagcgugaucaccucccugggggccaucgucagcugcuacggcaagacgaagugcaccgccagcaacaagugccgggggaucaucaagaccuucuccaacggcugcgacuacgugagcaacaagggcguggacaccguguccgucgggaacacccuguacuacgugaacaagcaggagggcaagagccucuacgugaagggggagcccaucaucaacuucuacgacccgcuggucuuccccuccgacgaguucgacgcgagcaucucccaggugaacgagaagaucaaccagagccuggccuucauccgcaaguccgacgagcugcuccacaacgugaacgccggcaagagcacgaccaacaucaugaucaccaccaucaucaucgucaucaucgugauccugcugucccucaucgccguggggcugcugcucuacugcaaggcccggugaggacuaguggaagcauuuuccuggcugauuaaaagaaauuacucagcuauggucaucuguuccuguuagaaggcuaugcagcauauuauauacuaugcgcauguuaugaaaugcauaauaaaaaauuuuaaaaaaucuaaaagaucuaaaaaaaaaaaaaaaaaaaaaaaaaaaaaaaaaaaaaaaaaaaaaaaaaaaaaaaaaaaaaaaaugcaucccccccccccccccccccccccccccccccaaaggcucuuuucagagccaccagaauu

SEQ ID NO: 5849 - RNA, 1900 nt, Artificial Sequence
  mRNA product Design d-4 comprising derived and/or modified sequence from HRSV(A2)__F-del_DSCav1_mut5 (opt1)
gggagagucccgcagucggcguccagcggcucugcuuguucgugugugugucguugcaggccuuauucaagcuuaccauggagcugcucauccugaaggccaacgccaucaccaccauccugacggcggugaccuucugcuucgccagcggccagaacaucaccgaggaguucuaccaguccacgugcagcgccgucuccaagggguaccucagcgcccugcgcaccggcugguacaccuccgugaucaccaucgagcugagcaacaucaaggagaacaagugcaacgggaccgacgccaaggugaagcucaucaagcaggagcuggacaaguacaagaacgcggucacggagcugcagcuccugaugcaguccacccccgccaccggcagcggguccgccaucgccagcggcguggcggugugcaagguccugcaccucgagggcgaggugaacaagaucaaguccgcccugcugagcaccaacaaggccguggucucccucagcgggugcggcguguccgugcugacguucaagguccuggaccucaagaacuacaucgacaagcagcugcugccgauccucaacaagcagagcugcuccaucagcaacaucgagaccgugaucgaguuccagcagaagaacaaccggcugcuggagaucacccgcgaguucuccgugaacgccggggucaccacgcccgugagcaccuacaugcucaccaacagcgagcugcugucccucaucaacgacaugcccaucaccaacgaccagaagaagcugaugagcaacaacgugcagaucguccggcagcaguccuacagcaucaugugcaucaucaaggaggaggugcuggccuacgugguccagcucccccuguacggcgugaucgacacgccgugcuggaagcugcacaccagcccccucugcaccaccaacacgaaggagggguccaacaucugccugacccgcaccgaccggggcugguacugcgacaacgcgggcuccgugagcuucuucccccaggccgagaccugcaagguccaguccaaccgcguguucugcgacacgaugaacagccggacccuccccuccgaggucaaccugugcaacguggacaucuucaacccgaaguacgacugcaagaucaugaccagcaagaccgacguguccagcuccgucaucacgagccugggggccaucguguccugcuacggcaagaccaagugcaccgccagcaacaagugccgggggaucaucaagaccuucuccaacggcugcgacuacgugagcaacaagggcgucgacacggugagcguggggaacacccucuacuacgucaacaagcaggagggcaagucccuguacgugaagggggagcccaucaucaacuucuacgacccccugguguuccccagcgacgaguucgacgccuccaucagccaggucaacgagaagaucaaccagucccucgcguucauccgcaagagcgacgagcugcugcacaacgugaacgccggcaaguccaccaccaacaucaugaucaccacgaucaucaucgugaucaucgucauccuccugagccugaucgccguggggcuccugcuguacugcaaggcccggugaggacuaguggaagcauuuuccuggcugauuaaaagaaauuacucagcuauggucaucuguuccuguuagaaggcuaugcagcauauuauauacuaugcgcauguuaugaaaugcauaauaaaaaauuuuaaaaaaucuaaaagaucuaaaaaaaaaaaaaaaaaaaaaaaaaaaaaaaaaaaaaaaaaaaaaaaaaaaaaaaaaaaaaaaaugcaucccccccccccccccccccccccccccccccaaaggcucuuuucagagccaccagaauu

SEQ ID NO: 5850 - RNA, 1900 nt, Artificial Sequence
  mRNA product Design d-4 comprising derived and/or modified sequence from HRSV(A2)__F-del_DSCav1_mut5 (opt2)
gggagagucccgcagucggcguccagcggcucugcuuguucgugugugugucguugcaggccuuauucaagcuuaccauggagcuccucauccucaaggccaacgccaucaccaccauccucaccgccgucaccuucugcuucgccuccggccagaacaucaccgaggaguucuaccaguccaccugcuccgccgucuccaagggcuaccucuccgcccuccgcaccggcugguacaccuccgucaucaccaucgagcucuccaacaucaaggagaacaagugcaacggcaccgacgccaaggucaagcucaucaagcaggagcucgacaaguacaagaacgccgucaccgagcuccagcuccucaugcaguccacccccgccaccggcuccggcuccgccaucgccuccggcgucgccgucugcaagguccuccaccucgagggcgaggucaacaagaucaaguccgcccuccucuccaccaacaaggccgucgucucccucuccggcugcggcgucuccguccucaccuucaagguccucgaccucaagaacuacaucgacaagcagcuccuccccauccucaacaagcaguccugcuccaucuccaacaucgagaccgucaucgaguuccagcagaagaacaaccgccuccucgagaucacccgcgaguucuccgucaacgccggcgucaccacccccgucuccaccuacaugcucaccaacuccgagcuccucucccucaucaacgacaugcccaucaccaacgaccagaagaagcucauguccaacaacguccagaucguccgccagcaguccuacuccaucaugugcaucaucaaggaggagguccucgccuacgucguccagcucccccucuacggcgucaucgacacccccugcuggaagcuccacaccuccccccucugcaccaccaacaccaaggagggcuccaacaucugccucacccgcaccgaccgcggcugguacugcgacaacgccggcuccgucuccuucuucccccaggccgagaccugcaagguccaguccaaccgcgucuucugcgacaccaugaacucccgcacccuccccuccgaggucaaccucugcaacgucgacaucuucaaccccaaguacgacugcaagaucaugaccuccaagaccgacgucuccuccuccgucaucaccucccucggcgccaucgucuccugcuacggcaagaccaagugcaccgccuccaacaagugccgcggcaucaucaagaccuucuccaacggcugcgacuacgucuccaacaagggcgucgacaccgucuccgucggcaacacccucuacuacgucaacaagcaggagggcaagucccucuacgucaagggcgagcccaucaucaacuucuacgacccccucgucuuccccuccgacgaguucgacgccuccaucucccaggucaacgagaagaucaaccagucccucgccuucauccgcaaguccgacgagcuccuccacaacgucaacgccggcaaguccaccaccaacaucaugaucaccaccaucaucaucgucaucaucgucauccuccucucccucaucgccgucggccuccuccucuacugcaaggcccgcugaggacuaguggaagcauuuuccuggcugauuaaaagaaauuacucagcuauggucaucuguuccuguuagaaggcuaugcagcauauuauauacuaugcgcauguuaugaaaugcauaauaaaaaauuuuaaaaaaucuaaaagaucuaaaaaaaaaaaaaaaaaaaaaaaaaaaaaaaaaaaaaaaaaaaaaaaaaaaaaaaaaaaaaaaaugcaucccccccccccccccccccccccccccccccaaaggcucuuuucagagccaccagaauu

SEQ ID NO: 5851 - RNA, 1900 nt, Artificial Sequence
  mRNA product Design d-4 comprising derived and/or modified sequence from HRSV(A2)__F-del_DSCav1_mut5 (opt3)
gggagagucccgcagucggcguccagcggcucugcuuguucgugugugugucguugcaggccuuauucaagcuuaccauggagcugcucauccuuaaggccaacgcuauuaccacaauacugacugcagugacguucugcuuugccagcggccagaauaucaccgaagaguucuaccaauccacauguucugcggucucaaaaggguauuugagugcuuuaagaacuggaugguacaccagcguuauuacaaucgaacuguccaacauuaaggagaauaaaugcaacgguaccgacgccaaggugaaacuaaucaagcaggaacucgauaaguauaaaaaugcaguaacugagcugcagcuucugaugcagucuacacccgccaccggcucggggucagcuauagcaagcggaguggccgucuguaagguguugcaccucgagggcgaaguuaacaaaaucaagagugcucugcuguccacgaauaaagccguggucucucucagcgguugcgggguguccguauuaacuuuuaagguucuggaccuuaagaacuacauugauaaacaauugcugccuauccuaaauaagcagucauguaguauuagcaacaucgagaccgugauagaguuccagcagaaaaauaacaggcuccuggaaauuacacgggaguuuucugucaaugcgggagugacuaccccaguguccacauauaugcuuaccaacucagaacuguugagccucaucaaugacaugccgauuacgaacgaucaaaagaaacugaugaguaacaauguccagaucguucgccagcagucuuacuccaucaugugcauuauaaaggaggaaguguuagcauauguagugcaacugccccucuacggcgucaucgacacuccuuguuggaaacuucauacaagcccacugugcaccacuaacacaaaggagggcucgaauauuuguuugacccgaacggaucgugggugguacugcgacaacgccggaucuguguccuucuuuccccaggcugaaaccuguaagguucagucaaauagaguguucugcgauacaaugaacaguagaacucugccuagcgaggucaaucucugcaacguggacaucuuuaauccaaaauaugauuguaagauaaugaccuccaaaacagacguaucuagcucaguuauuaccagucugggugccaucguguccugcuacggcaagacuaaauguacagcaagcaacaagugcagggggaucauuaagaccuucucuaauggaugugauuaugucucaaacaaaggcguggacacugucaguguggguaauacgcuuuacuauguuaacaagcaagaggggaaaagccuguacgugaagggagaacccaucauuaauuuuuaugacccuuugguauucccauccgaugaguuugacgcuucuauaucgcaggucaacgagaaaaucaaccagagccucgccuucauucggaaguccgaugaacuguuacacaaugugaacgcgggcaagucaacaaccaauaucaugaucacuaccauuauaaucguuauuaucgugauucugcuaagucucaucgccgucggccugcuuuuguacugcaaagcacgcugaggacuaguggaagcauuuuccuggcugauuaaaagaaauuacucagcuauggucaucuguuccuguuagaaggcuaugcagcauauuauauacuaugcgcauguuaugaaaugcauaauaaaaaauuuuaaaaaaucuaaaagaucuaaaaaaaaaaaaaaaaaaaaaaaaaaaaaaaaaaaaaaaaaaaaaaaaaaaaaaaaaaaaaaaaugcaucccccccccccccccccccccccccccccccaaaggcucuuuucagagccaccagaauu

SEQ ID NO: 5852 - RNA, 1900 nt, Artificial Sequence
  mRNA product Design d-4 comprising derived and/or modified sequence from HRSV(A2)__F-del_DSCav1_mut5 (opt4)
gggagagucccgcagucggcguccagcggcucugcuuguucgugugugugucguugcaggccuuauucaagcuuaccauggagcugcugauccugaaggccaacgccaucaccaccauccugaccgccgugaccuucugcuucgccagcggccagaacaucaccgaggaguucuaccagagcaccugcagcgccgugagcaagggcuaccugagcgcccugagaaccggcugguacaccagcgugaucaccaucgagcugagcaacaucaaggagaacaagugcaacggcaccgacgccaaggugaagcugaucaagcaggagcuggacaaguacaagaacgccgugaccgagcugcagcugcugaugcagagcacccccgccaccggcagcggcagcgccaucgccagcggcguggccgugugcaaggugcugcaccuggagggcgaggugaacaagaucaagagcgcccugcugagcaccaacaaggccguggugagccugagcggcugcggcgugagcgugcugaccuucaaggugcuggaccugaagaacuacaucgacaagcagcugcugcccauccugaacaagcagagcugcagcaucagcaacaucgagaccgugaucgaguuccagcagaagaacaacagacugcuggagaucaccagagaguucagcgugaacgccggcgugaccacccccgugagcaccuacaugcugaccaacagcgagcugcugagccugaucaacgacaugcccaucaccaacgaccagaagaagcugaugagcaacaacgugcagaucgugagacagcagagcuacagcaucaugugcaucaucaaggaggaggugcuggccuacguggugcagcugccccuguacggcgugaucgacacccccugcuggaagcugcacaccagcccccugugcaccaccaacaccaaggagggcagcaacaucugccugaccagaaccgacagaggcugguacugcgacaacgccggcagcgugagcuucuucccccaggccgagaccugcaaggugcagagcaacagaguguucugcgacaccaugaacagcagaacccugcccagcgaggugaaccugugcaacguggacaucuucaaccccaaguacgacugcaagaucaugaccagcaagaccgacgugagcagcagcgugaucaccagccugggcgccaucgugagcugcuacggcaagaccaagugcaccgccagcaacaagugcagaggcaucaucaagaccuucagcaacggcugcgacuacgugagcaacaagggcguggacaccgugagcgugggcaacacccuguacuacgugaacaagcaggagggcaagagccuguacgugaagggcgagcccaucaucaacuucuacgacccccugguguuccccagcgacgaguucgacgccagcaucagccaggugaacgagaagaucaaccagagccuggccuucaucagaaagagcgacgagcugcugcacaacgugaacgccggcaagagcaccaccaacaucaugaucaccaccaucaucaucgugaucaucgugauccugcugagccugaucgccgugggccugcugcuguacugcaaggccagaugaggacuaguggaagcauuuuccuggcugauuaaaagaaauuacucagcuauggucaucuguuccuguuagaaggcuaugcagcauauuauauacuaugcgcauguuaugaaaugcauaauaaaaaauuuuaaaaaaucuaaaagaucuaaaaaaaaaaaaaaaaaaaaaaaaaaaaaaaaaaaaaaaaaaaaaaaaaaaaaaaaaaaaaaaaugcaucccccccccccccccccccccccccccccccaaaggcucuuuucagagccaccagaauu

SEQ ID NO: 5853 - RNA, 1900 nt, Artificial Sequence
  mRNA product Design d-4 comprising derived and/or modified sequence from HRSV(A2)__F-del_DSCav1_mut5 (opt5)
gggagagucccgcagucggcguccagcggcucugcuuguucgugugugugucguugcaggccuuauucaagcuuaccauggagcugcucauccugaaggccaacgcuauuaccacaauccuuacggccgugaccuucugcuuugcgagcggccagaauauuacagaagaguucuaccaauccaccuguucugcugucagcaaaggguaucuguccgcccucagaacaggaugguacaccucuguuaucacaauugaacugagcaacaucaaggagaauaaaugcaacggcaccgacgccaaggugaaacuuaucaagcaggaacuggauaaguauaaaaaugcugugacggagcuccagcugcugaugcaguccacccccgccacagggucuggaagcgcuauugccuccggcgucgcgguguguaagguucuccaccuggagggggaagugaacaaaaucaagagcgcccuucugucuaccaauaaagcugucgugucccucagcggaugcggcguuucugugcugacauuuaagguccuugaccugaagaacuacauugauaaacaacuccugccuauccugaauaagcaguccuguagcauuucuaacaucgagaccgugauugaguuccagcagaaaaauaaccggcuccuggaaaucacgcgcgaguuuuccgugaaugccggcgucacaaccccgguuagcacauauaugcuuaccaacuccgaacugcucucucugaucaaugacaugcccauuaccaacgaucaaaagaaacuuaugagcaacaaugugcagaucgugagacagcaguccuacagcauuaugugcaucauuaaggaggaaguccuggcuuaugugguucaacucccucuguacggggugaucgacacacccuguuggaaacugcauacgucuccucucugcaccacaaacaccaaggagggauccaauaucugucugacacggaccgaucgcggcugguacugcgacaacgccgggagcgucucuuucuuuccccaggcggaaacguguaaggugcagagcaauagaguuuucugcgauacaaugaacuccagaacccugccuucugaggugaaucucugcaacgucgacauuuuuaauccgaaauaugauuguaagaucaugaccagcaaaacagacguguccagcucugucauuaccucccugggagccaucgugagcugcuacggcaagacaaaauguacggcuucuaacaagugccgggggauuaucaagaccuucuccaauggaugugauuauguuagcaacaaaggcguggacacagucuccgugggcaauacccuuuacuauguuaacaagcaagaggggaaaucucuguacgugaagggagaacccaucauuaauuuuuaugacccucucgucuuccccagcgaugaguuugacgccuccaucucucaggugaacgagaaaauuaaccagagccuggcuuucauccgcaaguccgaugaacugcuccacaaugugaacgccggcaagagcacaaccaauauuaugaucacgaccauuaucaucguuauuaucgucauucugcuuucucugaucgccguggggcuccugcuguacugcaaagcuagaugaggacuaguggaagcauuuuccuggcugauuaaaagaaauuacucagcuauggucaucuguuccuguuagaaggcuaugcagcauauuauauacuaugcgcauguuaugaaaugcauaauaaaaaauuuuaaaaaaucuaaaagaucuaaaaaaaaaaaaaaaaaaaaaaaaaaaaaaaaaaaaaaaaaaaaaaaaaaaaaaaaaaaaaaaaugcaucccccccccccccccccccccccccccccccaaaggcucuuuucagagccaccagaauu

SEQ ID NO: 5854 - RNA, 1900 nt, Artificial Sequence
  mRNA product Design d-4 comprising derived and/or modified sequence from HRSV(A2)__F-del_DSCav1_mut5 (opt6)
gggagagucccgcagucggcguccagcggcucugcuuguucgugugugugucguugcaggccuuauucaagcuuaccauggaacuuuuaauacugaaagcaaaugccaucacaaccauacuaacugccgucacauucugcuuugcaucaggacaaaacauaacagaagaauuuuaccaauccacaugcucagcaguaucaaaaggauaucuaucggcacuuagaacuggaugguacacaaguguuauaacuauagaacucucaaacauaaaagaaaacaaaugcaauggaacagacgcaaaaguaaaacuaauaaaacaagaacucgauaaauauaaaaaugcaguaaccgaacuacaacuauuaaugcaaagcacacccgcaacaggcagcggaucagcaauagcaagcggagucgcaguauguaaaguacuacaucuagaaggagaagucaacaaaaucaaaucugcacuucuauccacaaacaaagcuguaguaucccuauccggaugcggagucucaguauuaacuuuuaaaguacuagaccuuaaaaacuacauagauaaacaacuauuaccaauacuaaauaaacaaucaugcagcauauccaauauagagacaguaauugaauuucaacaaaaaaacaacagauuacuagaaauuacucgugaauuuuccguaaaugccggagucacaacaccaguaucaaccuauaugcuaacaaacagcgaacuacuuagcuuaauaaaugacaugccaauaacaaaugaccaaaaaaaacuuaugucaaauaacguacaaaucgucagacaacaauccuacucuauaauguguauaauuaaagaagaaguccuagcauacguaguucaauuaccacucuauggaguaauagauacaccaugcuggaaacuacacacgucaccacuauguacaacaaacacaaaagaaggauccaauauaugccuaacaagaaccgacagaggcugguauugugacaacgcaggauccguuucauucuucccacaagcagaaaccuguaaaguacaaucuaauagaguauuuugcgacacaaugaacaguagaacacuaccaagcgagguuaaucuauguaacguagacauauucaauccaaaauaugauugcaaaauaaugacaucaaaaacagauguaucgucgaguguaauaacaagucugggagcuauaguaagcugcuacggcaagacgaaauguaccgcuucaaauaaaugcagaggaaucauuaaaacauucucgaacggaugcgacuacguaaguaauaaaggugucgacaccguaucaguagggaauacauuauacuacgucaacaaacaagaaggaaaaucucuauauguaaaaggagaaccaauaauaaauuucuaugacccucuaguauucccaucagaugaauuugacgcuuccauaucacaaguaaacgaaaaaaucaaucaaucuuuagcauucauacgaaaaagugaugaacuccuacacaacgucaacgcaggaaaaagcacaacaaauauaaugaucacaacaaucaucauaguaauaauaguaauacuacuaucauuaauagcaguaggauuauugcuuuacugcaaagcacgauagggacuaguggaagcauuuuccuggcugauuaaaagaaauuacucagcuauggucaucuguuccuguuagaaggcuaugcagcauauuauauacuaugcgcauguuaugaaaugcauaauaaaaaauuuuaaaaaaucuaaaagaucuaaaaaaaaaaaaaaaaaaaaaaaaaaaaaaaaaaaaaaaaaaaaaaaaaaaaaaaaaaaaaaaaugcaucccccccccccccccccccccccccccccccaaaggcucuuuucagagccaccagaauu

SEQ ID NO: 5855 - RNA, 1900 nt, Artificial Sequence
  mRNA product Design d-4 comprising derived and/or modified sequence from HRSV(A2)__F-del_DSCav1_mut5 (opt11)
gggagagucccgcagucggcguccagcggcucugcuuguucgugugugugucguugcaggccuuauucaagcuuaccauggaacuccucauccucaaagccaacgccauaaccacaauacucaccgccguaaccuucugcuuugcgucgggacaaaacaucaccgaagaguucuaccaauccacuugcuccgcaguaagcaaaggauaccucuccgcccugcgaaccgguugguacacaucagucaucacaaucgaacucucaaacauaaaagaaaacaaaugcaacggcaccgacgcaaaggucaaauuaaucaagcaagaacuagacaaauacaaaaacgccgucacagaacuccagcugcuaaugcagagcacacccgcaacuggcagcggauccgccaucgcaucaggagucgccgugugcaaaguccuacaccucgaaggagaagugaacaaaaucaaaucagcccuacucuccaccaacaaggccgucgucucccucuccggcugcggugucuccguccuaaccuucaaagugcuagaccucaagaacuacaucgacaaacaacuccuaccaauacucaacaagcaaucuugcuccaucuccaacaucgaaaccguaaucgaguuccaacagaagaacaaccgccuccucgaaaucacccgcgaguucucugucaacgcaggggucaccacucccgucuccacauacaugcucacaaacuccgaacuccucagccucaucaacgacaugcccauaaccaacgaccagaaaaagcuaaugagcaauaacguccaaaucguuagacaacaaaguuauuccaucaugugcaucaucaaagaagaaguccucgccuacgucguacaacucccccucuauggcgucaucgacacccccugcuggaaacugcacacaucaccccucugcaccacaaacaccaaagaaggcucaaacaucugccuaacucgcaccgaccgcggcugguacugcgacaacgccggcagcguaucauucuuuccccaagccgaaacaugcaaaguucaauccaaccgcgucuucugcgacacaaugaacuccagaacgcuccccagcgaagucaaccucuguaacguagacaucuucaacccuaaguacgacugcaaaaucaugaccuccaaaacugauguauccuccuccgucaucacaucccugggcgccaucgucagcugcuacggcaaaacaaaaugcacugccucaaacaaaugccgagguaucauaaagaccuucucaaacggaugcgauuacgucagcaacaaaggcgucgacaccgucagugucggcaacacccucuacuacgucaacaaacaagaaggaaaaucccucuacgucaaaggcgaacccaucaucaacuucuacgacccccucgucuuccccagcgacgaguucgacgccuccaucucacaagucaacgaaaagauaaaccaaucucuagccuucauccgcaaauccgaugaacuccugcauaacgucaacgccggcaaauccaccacaaacaucaugaucacuaccauaaucaucgucauaaucguaauccuccuaucucuuaucgcagucggccuacuacucuacugcaaagcccgcuaaggacuaguggaagcauuuuccuggcugauuaaaagaaauuacucagcuauggucaucuguuccuguuagaaggcuaugcagcauauuauauacuaugcgcauguuaugaaaugcauaauaaaaaauuuuaaaaaaucuaaaagaucuaaaaaaaaaaaaaaaaaaaaaaaaaaaaaaaaaaaaaaaaaaaaaaaaaaaaaaaaaaaaaaaaugcaucccccccccccccccccccccccccccccccaaaggcucuuuucagagccaccagaauu

SEQ ID NO: 5856 - RNA, 1997 nt, Artificial Sequence
  mRNA product Design d-5 comprising derived and/or modified sequence from HRSV(A2)__F-del_DSCav1_mut5 (opt1)
gggagagggcgcuuggcuugcaaggacccugagcugcggcauugaagcacacccaacccaacucgacugaagucagccucacugaaccggaucugagaaucuucucucucugggcuugccagggcucuccgaaccuagcuagcauccucuucaauuccaacuagaaagcuuaccauggagcugcucauccugaaggccaacgccaucaccaccauccugacggcggugaccuucugcuucgccagcggccagaacaucaccgaggaguucuaccaguccacgugcagcgccgucuccaagggguaccucagcgcccugcggaccggcugguacaccuccgugaucaccaucgagcugagcaacaucaaggagaacaagugcaacgggaccgacgccaaggugaagcucaucaagcaggagcuggacaaguacaagaacgcggucacggagcugcagcuccugaugcaguccaccccggcaaccggcuccggcuccgccaucgcgagcggcgucgccgugugcaaggugcugcaccucgagggggaggucaacaagaucaagagcgcccugcuguccaccaacaaggccguggugagccucuccggcugcggcgucagcgugcugaccuucaaggugcuggaccucaagaacuacaucgacaagcagcugcugcccauccugaacaagcagagcugcuccaucagcaacaucgagacggugaucgaguuccagcagaagaacaaccggcuccuggagaucacccgcgaguucagcgugaacgccggggucaccacccccguguccacguacaugcugaccaacagcgagcuccugucccugaucaacgacaugccgaucaccaacgaccagaagaagcucaugagcaacaacgugcagaucguccggcagcaguccuacagcaucaugugcaucaucaaggaggaggugcuggcguacgugguccagcugccccucuacggcgugaucgacacccccugcuggaagcugcacacgagcccccugugcaccaccaacaccaaggagggguccaacaucugccucacgcgcaccgaccggggcugguacugcgacaacgccggcagcgucuccuucuucccgcaggccgagaccugcaaggugcagagcaaccgcguguucugcgacaccaugaacucccggacgcugcccagcgagguaaaccucugcaacgucgacaucuucaaccccaaguacgacugcaagaucaugaccuccaagaccgacgugagcuccagcgugaucaccucccugggggccaucgucagcugcuacggcaagacgaagugcaccgccagcaacaagugccgggggaucaucaagaccuucuccaacggcugcgacuacgugagcaacaagggcguggacaccguguccgucgggaacacccuguacuacgugaacaagcaggagggcaagagccucuacgugaagggggagcccaucaucaacuucuacgacccgcuggucuuccccuccgacgaguucgacgcgagcaucucccaggugaacgagaagaucaaccagagccuggccuucauccgcaaguccgacgagcugcuccacaacgugaacgccggcaagagcacgaccaacaucaugaucaccaccaucaucaucgucaucaucgugauccugcugucccucaucgccguggggcugcugcucuacugcaaggcccggugaggacuaguggaagcauuuuccuggcugauuaaaagaaauuacucagcuauggucaucuguuccuguuagaaggcuaugcagcauauuauauacuaugcgcauguuaugaaaugcauaauaaaaaauuuuaaaaaaucuaaaagaucuaaaaaaaaaaaaaaaaaaaaaaaaaaaaaaaaaaaaaaaaaaaaaaaaaaaaaaaaaaaaaaaaugcaucccccccccccccccccccccccccccccccaaaggcucuuuucagagccaccagaauu

SEQ ID NO: 5857 - RNA, 1997 nt, Artificial Sequence
  mRNA product Design d-5 comprising derived and/or modified sequence from HRSV(A2)__F-del_DSCav1_mut5 (opt1)
gggagagggcgcuuggcuugcaaggacccugagcugcggcauugaagcacacccaacccaacucgacugaagucagccucacugaaccggaucugagaaucuucucucucugggcuugccagggcucuccgaaccuagcuagcauccucuucaauuccaacuagaaagcuuaccauggagcugcucauccugaaggccaacgccaucaccaccauccugacggcggugaccuucugcuucgccagcggccagaacaucaccgaggaguucuaccaguccacgugcagcgccgucuccaagggguaccucagcgcccugcgcaccggcugguacaccuccgugaucaccaucgagcugagcaacaucaaggagaacaagugcaacgggaccgacgccaaggugaagcucaucaagcaggagcuggacaaguacaagaacgcggucacggagcugcagcuccugaugcaguccacccccgccaccggcagcggguccgccaucgccagcggcguggcggugugcaagguccugcaccucgagggcgaggugaacaagaucaaguccgcccugcugagcaccaacaaggccguggucucccucagcgggugcggcguguccgugcugacguucaagguccuggaccucaagaacuacaucgacaagcagcugcugccgauccucaacaagcagagcugcuccaucagcaacaucgagaccgugaucgaguuccagcagaagaacaaccggcugcuggagaucacccgcgaguucuccgugaacgccggggucaccacgcccgugagcaccuacaugcucaccaacagcgagcugcugucccucaucaacgacaugcccaucaccaacgaccagaagaagcugaugagcaacaacgugcagaucguccggcagcaguccuacagcaucaugugcaucaucaaggaggaggugcuggccuacgugguccagcucccccuguacggcgugaucgacacgccgugcuggaagcugcacaccagcccccucugcaccaccaacacgaaggagggguccaacaucugccugacccgcaccgaccggggcugguacugcgacaacgcgggcuccgugagcuucuucccccaggccgagaccugcaagguccaguccaaccgcguguucugcgacacgaugaacagccggacccuccccuccgaggucaaccugugcaacguggacaucuucaacccgaaguacgacugcaagaucaugaccagcaagaccgacguguccagcuccgucaucacgagccugggggccaucguguccugcuacggcaagaccaagugcaccgccagcaacaagugccgggggaucaucaagaccuucuccaacggcugcgacuacgugagcaacaagggcgucgacacggugagcguggggaacacccucuacuacgucaacaagcaggagggcaagucccuguacgugaagggggagcccaucaucaacuucuacgacccccugguguuccccagcgacgaguucgacgccuccaucagccaggucaacgagaagaucaaccagucccucgcguucauccgcaagagcgacgagcugcugcacaacgugaacgccggcaaguccaccaccaacaucaugaucaccacgaucaucaucgugaucaucgucauccuccugagccugaucgccguggggcuccugcuguacugcaaggcccggugaggacuaguggaagcauuuuccuggcugauuaaaagaaauuacucagcuauggucaucuguuccuguuagaaggcuaugcagcauauuauauacuaugcgcauguuaugaaaugcauaauaaaaaauuuuaaaaaaucuaaaagaucuaaaaaaaaaaaaaaaaaaaaaaaaaaaaaaaaaaaaaaaaaaaaaaaaaaaaaaaaaaaaaaaaugcaucccccccccccccccccccccccccccccccaaaggcucuuuucagagccaccagaauu

SEQ ID NO: 5858 - RNA, 1997 nt, Artificial Sequence
  mRNA product Design d-5 comprising derived and/or modified sequence from HRSV(A2)__F-del_DSCav1_mut5 (opt2)
gggagagggcgcuuggcuugcaaggacccugagcugcggcauugaagcacacccaacccaacucgacugaagucagccucacugaaccggaucugagaaucuucucucucugggcuugccagggcucuccgaaccuagcuagcauccucuucaauuccaacuagaaagcuuaccauggagcuccucauccucaaggccaacgccaucaccaccauccucaccgccgucaccuucugcuucgccuccggccagaacaucaccgaggaguucuaccaguccaccugcuccgccgucuccaagggcuaccucuccgcccuccgcaccggcugguacaccuccgucaucaccaucgagcucuccaacaucaaggagaacaagugcaacggcaccgacgccaaggucaagcucaucaagcaggagcucgacaaguacaagaacgccgucaccgagcuccagcuccucaugcaguccacccccgccaccggcuccggcuccgccaucgccuccggcgucgccgucugcaagguccuccaccucgagggcgaggucaacaagaucaaguccgcccuccucuccaccaacaaggccgucgucucccucuccggcugcggcgucuccguccucaccuucaagguccucgaccucaagaacuacaucgacaagcagcuccuccccauccucaacaagcaguccugcuccaucuccaacaucgagaccgucaucgaguuccagcagaagaacaaccgccuccucgagaucacccgcgaguucuccgucaacgccggcgucaccacccccgucuccaccuacaugcucaccaacuccgagcuccucucccucaucaacgacaugcccaucaccaacgaccagaagaagcucauguccaacaacguccagaucguccgccagcaguccuacuccaucaugugcaucaucaaggaggagguccucgccuacgucguccagcucccccucuacggcgucaucgacacccccugcuggaagcuccacaccuccccccucugcaccaccaacaccaaggagggcuccaacaucugccucacccgcaccgaccgcggcugguacugcgacaacgccggcuccgucuccuucuucccccaggccgagaccugcaagguccaguccaaccgcgucuucugcgacaccaugaacucccgcacccuccccuccgaggucaaccucugcaacgucgacaucuucaaccccaaguacgacugcaagaucaugaccuccaagaccgacgucuccuccuccgucaucaccucccucggcgccaucgucuccugcuacggcaagaccaagugcaccgccuccaacaagugccgcggcaucaucaagaccuucuccaacggcugcgacuacgucuccaacaagggcgucgacaccgucuccgucggcaacacccucuacuacgucaacaagcaggagggcaagucccucuacgucaagggcgagcccaucaucaacuucuacgacccccucgucuuccccuccgacgaguucgacgccuccaucucccaggucaacgagaagaucaaccagucccucgccuucauccgcaaguccgacgagcuccuccacaacgucaacgccggcaaguccaccaccaacaucaugaucaccaccaucaucaucgucaucaucgucauccuccucucccucaucgccgucggccuccuccucuacugcaaggcccgcugaggacuaguggaagcauuuuccuggcugauuaaaagaaauuacucagcuauggucaucuguuccuguuagaaggcuaugcagcauauuauauacuaugcgcauguuaugaaaugcauaauaaaaaauuuuaaaaaaucuaaaagaucuaaaaaaaaaaaaaaaaaaaaaaaaaaaaaaaaaaaaaaaaaaaaaaaaaaaaaaaaaaaaaaaaugcaucccccccccccccccccccccccccccccccaaaggcucuuuucagagccaccagaauu

SEQ ID NO: 5859 - RNA, 1997 nt, Artificial Sequence
  mRNA product Design d-5 comprising derived and/or modified sequence from HRSV(A2)__F-del_DSCav1_mut5 (opt3)
gggagagggcgcuuggcuugcaaggacccugagcugcggcauugaagcacacccaacccaacucgacugaagucagccucacugaaccggaucugagaaucuucucucucugggcuugccagggcucuccgaaccuagcuagcauccucuucaauuccaacuagaaagcuuaccauggagcugcucauccuuaaggccaacgcuauuaccacaauacugacugcagugacguucugcuuugccagcggccagaauaucaccgaagaguucuaccaauccacauguucugcggucucaaaaggguauuugagugcuuuaagaacuggaugguacaccagcguuauuacaaucgaacuguccaacauuaaggagaauaaaugcaacgguaccgacgccaaggugaaacuaaucaagcaggaacucgauaaguauaaaaaugcaguaacugagcugcagcuucugaugcagucuacacccgccaccggcucggggucagcuauagcaagcggaguggccgucuguaagguguugcaccucgagggcgaaguuaacaaaaucaagagugcucugcuguccacgaauaaagccguggucucucucagcgguugcgggguguccguauuaacuuuuaagguucuggaccuuaagaacuacauugauaaacaauugcugccuauccuaaauaagcagucauguaguauuagcaacaucgagaccgugauagaguuccagcagaaaaauaacaggcuccuggaaauuacacgggaguuuucugucaaugcgggagugacuaccccaguguccacauauaugcuuaccaacucagaacuguugagccucaucaaugacaugccgauuacgaacgaucaaaagaaacugaugaguaacaauguccagaucguucgccagcagucuuacuccaucaugugcauuauaaaggaggaaguguuagcauauguagugcaacugccccucuacggcgucaucgacacuccuuguuggaaacuucauacaagcccacugugcaccacuaacacaaaggagggcucgaauauuuguuugacccgaacggaucgugggugguacugcgacaacgccggaucuguguccuucuuuccccaggcugaaaccuguaagguucagucaaauagaguguucugcgauacaaugaacaguagaacucugccuagcgaggucaaucucugcaacguggacaucuuuaauccaaaauaugauuguaagauaaugaccuccaaaacagacguaucuagcucaguuauuaccagucugggugccaucguguccugcuacggcaagacuaaauguacagcaagcaacaagugcagggggaucauuaagaccuucucuaauggaugugauuaugucucaaacaaaggcguggacacugucaguguggguaauacgcuuuacuauguuaacaagcaagaggggaaaagccuguacgugaagggagaacccaucauuaauuuuuaugacccuuugguauucccauccgaugaguuugacgcuucuauaucgcaggucaacgagaaaaucaaccagagccucgccuucauucggaaguccgaugaacuguuacacaaugugaacgcgggcaagucaacaaccaauaucaugaucacuaccauuauaaucguuauuaucgugauucugcuaagucucaucgccgucggccugcuuuuguacugcaaagcacgcugaggacuaguggaagcauuuuccuggcugauuaaaagaaauuacucagcuauggucaucuguuccuguuagaaggcuaugcagcauauuauauacuaugcgcauguuaugaaaugcauaauaaaaaauuuuaaaaaaucuaaaagaucuaaaaaaaaaaaaaaaaaaaaaaaaaaaaaaaaaaaaaaaaaaaaaaaaaaaaaaaaaaaaaaaaugcaucccccccccccccccccccccccccccccccaaaggcucuuuucagagccaccagaauu

SEQ ID NO: 5860 - RNA, 1997 nt, Artificial Sequence
  mRNA product Design d-5 comprising derived and/or modified sequence from HRSV(A2)__F-del_DSCav1_mut5 (opt4)
gggagagggcgcuuggcuugcaaggacccugagcugcggcauugaagcacacccaacccaacucgacugaagucagccucacugaaccggaucugagaaucuucucucucugggcuugccagggcucuccgaaccuagcuagcauccucuucaauuccaacuagaaagcuuaccauggagcugcugauccugaaggccaacgccaucaccaccauccugaccgccgugaccuucugcuucgccagcggccagaacaucaccgaggaguucuaccagagcaccugcagcgccgugagcaagggcuaccugagcgcccugagaaccggcugguacaccagcgugaucaccaucgagcugagcaacaucaaggagaacaagugcaacggcaccgacgccaaggugaagcugaucaagcaggagcuggacaaguacaagaacgccgugaccgagcugcagcugcugaugcagagcacccccgccaccggcagcggcagcgccaucgccagcggcguggccgugugcaaggugcugcaccuggagggcgaggugaacaagaucaagagcgcccugcugagcaccaacaaggccguggugagccugagcggcugcggcgugagcgugcugaccuucaaggugcuggaccugaagaacuacaucgacaagcagcugcugcccauccugaacaagcagagcugcagcaucagcaacaucgagaccgugaucgaguuccagcagaagaacaacagacugcuggagaucaccagagaguucagcgugaacgccggcgugaccacccccgugagcaccuacaugcugaccaacagcgagcugcugagccugaucaacgacaugcccaucaccaacgaccagaagaagcugaugagcaacaacgugcagaucgugagacagcagagcuacagcaucaugugcaucaucaaggaggaggugcuggccuacguggugcagcugccccuguacggcgugaucgacacccccugcuggaagcugcacaccagcccccugugcaccaccaacaccaaggagggcagcaacaucugccugaccagaaccgacagaggcugguacugcgacaacgccggcagcgugagcuucuucccccaggccgagaccugcaaggugcagagcaacagaguguucugcgacaccaugaacagcagaacccugcccagcgaggugaaccugugcaacguggacaucuucaaccccaaguacgacugcaagaucaugaccagcaagaccgacgugagcagcagcgugaucaccagccugggcgccaucgugagcugcuacggcaagaccaagugcaccgccagcaacaagugcagaggcaucaucaagaccuucagcaacggcugcgacuacgugagcaacaagggcguggacaccgugagcgugggcaacacccuguacuacgugaacaagcaggagggcaagagccuguacgugaagggcgagcccaucaucaacuucuacgacccccugguguuccccagcgacgaguucgacgccagcaucagccaggugaacgagaagaucaaccagagccuggccuucaucagaaagagcgacgagcugcugcacaacgugaacgccggcaagagcaccaccaacaucaugaucaccaccaucaucaucgugaucaucgugauccugcugagccugaucgccgugggccugcugcuguacugcaaggccagaugaggacuaguggaagcauuuuccuggcugauuaaaagaaauuacucagcuauggucaucuguuccuguuagaaggcuaugcagcauauuauauacuaugcgcauguuaugaaaugcauaauaaaaaauuuuaaaaaaucuaaaagaucuaaaaaaaaaaaaaaaaaaaaaaaaaaaaaaaaaaaaaaaaaaaaaaaaaaaaaaaaaaaaaaaaugcaucccccccccccccccccccccccccccccccaaaggcucuuuucagagccaccagaauu

SEQ ID NO: 5861 - RNA, 1997 nt, Artificial Sequence
  mRNA product Design d-5 comprising derived and/or modified sequence from HRSV(A2)__F-del_DSCav1_mut5 (opt5)
gggagagggcgcuuggcuugcaaggacccugagcugcggcauugaagcacacccaacccaacucgacugaagucagccucacugaaccggaucugagaaucuucucucucugggcuugccagggcucuccgaaccuagcuagcauccucuucaauuccaacuagaaagcuuaccauggagcugcucauccugaaggccaacgcuauuaccacaauccuuacggccgugaccuucugcuuugcgagcggccagaauauuacagaagaguucuaccaauccaccuguucugcugucagcaaaggguaucuguccgcccucagaacaggaugguacaccucuguuaucacaauugaacugagcaacaucaaggagaauaaaugcaacggcaccgacgccaaggugaaacuuaucaagcaggaacuggauaaguauaaaaaugcugugacggagcuccagcugcugaugcaguccacccccgccacagggucuggaagcgcuauugccuccggcgucgcgguguguaagguucuccaccuggagggggaagugaacaaaaucaagagcgcccuucugucuaccaauaaagcugucgugucccucagcggaugcggcguuucugugcugacauuuaagguccuugaccugaagaacuacauugauaaacaacuccugccuauccugaauaagcaguccuguagcauuucuaacaucgagaccgugauugaguuccagcagaaaaauaaccggcuccuggaaaucacgcgcgaguuuuccgugaaugccggcgucacaaccccgguuagcacauauaugcuuaccaacuccgaacugcucucucugaucaaugacaugcccauuaccaacgaucaaaagaaacuuaugagcaacaaugugcagaucgugagacagcaguccuacagcauuaugugcaucauuaaggaggaaguccuggcuuaugugguucaacucccucuguacggggugaucgacacacccuguuggaaacugcauacgucuccucucugcaccacaaacaccaaggagggauccaauaucugucugacacggaccgaucgcggcugguacugcgacaacgccgggagcgucucuuucuuuccccaggcggaaacguguaaggugcagagcaauagaguuuucugcgauacaaugaacuccagaacccugccuucugaggugaaucucugcaacgucgacauuuuuaauccgaaauaugauuguaagaucaugaccagcaaaacagacguguccagcucugucauuaccucccugggagccaucgugagcugcuacggcaagacaaaauguacggcuucuaacaagugccgggggauuaucaagaccuucuccaauggaugugauuauguuagcaacaaaggcguggacacagucuccgugggcaauacccuuuacuauguuaacaagcaagaggggaaaucucuguacgugaagggagaacccaucauuaauuuuuaugacccucucgucuuccccagcgaugaguuugacgccuccaucucucaggugaacgagaaaauuaaccagagccuggcuuucauccgcaaguccgaugaacugcuccacaaugugaacgccggcaagagcacaaccaauauuaugaucacgaccauuaucaucguuauuaucgucauucugcuuucucugaucgccguggggcuccugcuguacugcaaagcuagaugaggacuaguggaagcauuuuccuggcugauuaaaagaaauuacucagcuauggucaucuguuccuguuagaaggcuaugcagcauauuauauacuaugcgcauguuaugaaaugcauaauaaaaaauuuuaaaaaaucuaaaagaucuaaaaaaaaaaaaaaaaaaaaaaaaaaaaaaaaaaaaaaaaaaaaaaaaaaaaaaaaaaaaaaaaugcaucccccccccccccccccccccccccccccccaaaggcucuuuucagagccaccagaauu

SEQ ID NO: 5862 - RNA, 1997 nt, Artificial Sequence
  mRNA product Design d-5 comprising derived and/or modified sequence from HRSV(A2)__F-del_DSCav1_mut5 (opt6)
gggagagggcgcuuggcuugcaaggacccugagcugcggcauugaagcacacccaacccaacucgacugaagucagccucacugaaccggaucugagaaucuucucucucugggcuugccagggcucuccgaaccuagcuagcauccucuucaauuccaacuagaaagcuuaccauggaacuuuuaauacugaaagcaaaugccaucacaaccauacuaacugccgucacauucugcuuugcaucaggacaaaacauaacagaagaauuuuaccaauccacaugcucagcaguaucaaaaggauaucuaucggcacuuagaacuggaugguacacaaguguuauaacuauagaacucucaaacauaaaagaaaacaaaugcaauggaacagacgcaaaaguaaaacuaauaaaacaagaacucgauaaauauaaaaaugcaguaaccgaacuacaacuauuaaugcaaagcacacccgcaacaggcagcggaucagcaauagcaagcggagucgcaguauguaaaguacuacaucuagaaggagaagucaacaaaaucaaaucugcacuucuauccacaaacaaagcuguaguaucccuauccggaugcggagucucaguauuaacuuuuaaaguacuagaccuuaaaaacuacauagauaaacaacuauuaccaauacuaaauaaacaaucaugcagcauauccaauauagagacaguaauugaauuucaacaaaaaaacaacagauuacuagaaauuacucgugaauuuuccguaaaugccggagucacaacaccaguaucaaccuauaugcuaacaaacagcgaacuacuuagcuuaauaaaugacaugccaauaacaaaugaccaaaaaaaacuuaugucaaauaacguacaaaucgucagacaacaauccuacucuauaauguguauaauuaaagaagaaguccuagcauacguaguucaauuaccacucuauggaguaauagauacaccaugcuggaaacuacacacgucaccacuauguacaacaaacacaaaagaaggauccaauauaugccuaacaagaaccgacagaggcugguauugugacaacgcaggauccguuucauucuucccacaagcagaaaccuguaaaguacaaucuaauagaguauuuugcgacacaaugaacaguagaacacuaccaagcgagguuaaucuauguaacguagacauauucaauccaaaauaugauugcaaaauaaugacaucaaaaacagauguaucgucgaguguaauaacaagucugggagcuauaguaagcugcuacggcaagacgaaauguaccgcuucaaauaaaugcagaggaaucauuaaaacauucucgaacggaugcgacuacguaaguaauaaaggugucgacaccguaucaguagggaauacauuauacuacgucaacaaacaagaaggaaaaucucuauauguaaaaggagaaccaauaauaaauuucuaugacccucuaguauucccaucagaugaauuugacgcuuccauaucacaaguaaacgaaaaaaucaaucaaucuuuagcauucauacgaaaaagugaugaacuccuacacaacgucaacgcaggaaaaagcacaacaaauauaaugaucacaacaaucaucauaguaauaauaguaauacuacuaucauuaauagcaguaggauuauugcuuuacugcaaagcacgauagggacuaguggaagcauuuuccuggcugauuaaaagaaauuacucagcuauggucaucuguuccuguuagaaggcuaugcagcauauuauauacuaugcgcauguuaugaaaugcauaauaaaaaauuuuaaaaaaucuaaaagaucuaaaaaaaaaaaaaaaaaaaaaaaaaaaaaaaaaaaaaaaaaaaaaaaaaaaaaaaaaaaaaaaaugcaucccccccccccccccccccccccccccccccaaaggcucuuuucagagccaccagaauu

SEQ ID NO: 5863 - RNA, 1997 nt, Artificial Sequence
  mRNA product Design d-5 comprising derived and/or modified sequence from HRSV(A2)__F-del_DSCav1_mut5 (opt11)
gggagagggcgcuuggcuugcaaggacccugagcugcggcauugaagcacacccaacccaacucgacugaagucagccucacugaaccggaucugagaaucuucucucucugggcuugccagggcucuccgaaccuagcuagcauccucuucaauuccaacuagaaagcuuaccauggaacuccucauccucaaagccaacgccauaaccacaauacucaccgccguaaccuucugcuuugcgucgggacaaaacaucaccgaagaguucuaccaauccacuugcuccgcaguaagcaaaggauaccucuccgcccugcgaaccgguugguacacaucagucaucacaaucgaacucucaaacauaaaagaaaacaaaugcaacggcaccgacgcaaaggucaaauuaaucaagcaagaacuagacaaauacaaaaacgccgucacagaacuccagcugcuaaugcagagcacacccgcaacuggcagcggauccgccaucgcaucaggagucgccgugugcaaaguccuacaccucgaaggagaagugaacaaaaucaaaucagcccuacucuccaccaacaaggccgucgucucccucuccggcugcggugucuccguccuaaccuucaaagugcuagaccucaagaacuacaucgacaaacaacuccuaccaauacucaacaagcaaucuugcuccaucuccaacaucgaaaccguaaucgaguuccaacagaagaacaaccgccuccucgaaaucacccgcgaguucucugucaacgcaggggucaccacucccgucuccacauacaugcucacaaacuccgaacuccucagccucaucaacgacaugcccauaaccaacgaccagaaaaagcuaaugagcaauaacguccaaaucguuagacaacaaaguuauuccaucaugugcaucaucaaagaagaaguccucgccuacgucguacaacucccccucuauggcgucaucgacacccccugcuggaaacugcacacaucaccccucugcaccacaaacaccaaagaaggcucaaacaucugccuaacucgcaccgaccgcggcugguacugcgacaacgccggcagcguaucauucuuuccccaagccgaaacaugcaaaguucaauccaaccgcgucuucugcgacacaaugaacuccagaacgcuccccagcgaagucaaccucuguaacguagacaucuucaacccuaaguacgacugcaaaaucaugaccuccaaaacugauguauccuccuccgucaucacaucccugggcgccaucgucagcugcuacggcaaaacaaaaugcacugccucaaacaaaugccgagguaucauaaagaccuucucaaacggaugcgauuacgucagcaacaaaggcgucgacaccgucagugucggcaacacccucuacuacgucaacaaacaagaaggaaaaucccucuacgucaaaggcgaacccaucaucaacuucuacgacccccucgucuuccccagcgacgaguucgacgccuccaucucacaagucaacgaaaagauaaaccaaucucuagccuucauccgcaaauccgaugaacuccugcauaacgucaacgccggcaaauccaccacaaacaucaugaucacuaccauaaucaucgucauaaucguaauccuccuaucucuuaucgcagucggccuacuacucuacugcaaagcccgcuaaggacuaguggaagcauuuuccuggcugauuaaaagaaauuacucagcuauggucaucuguuccuguuagaaggcuaugcagcauauuauauacuaugcgcauguuaugaaaugcauaauaaaaaauuuuaaaaaaucuaaaagaucuaaaaaaaaaaaaaaaaaaaaaaaaaaaaaaaaaaaaaaaaaaaaaaaaaaaaaaaaaaaaaaaaugcaucccccccccccccccccccccccccccccccaaaggcucuuuucagagccaccagaauu

SEQ ID NO: 5864 - RNA, 1877 nt, Artificial Sequence
  mRNA product Design e-1 comprising derived and/or modified sequence from HRSV(A2)__F-del_DSCav1_mut5 (opt1)
gggagaauauaagcguuggcggagcgucgguuguagcacucugcgcgcccgcucuucugcugcuguuugucuacuuccuccugcuuccccgccgccgccgccgccaucaagcuuaccauggagcugcucauccugaaggccaacgccaucaccaccauccugacggcggugaccuucugcuucgccagcggccagaacaucaccgaggaguucuaccaguccacgugcagcgccgucuccaagggguaccucagcgcccugcggaccggcugguacaccuccgugaucaccaucgagcugagcaacaucaaggagaacaagugcaacgggaccgacgccaaggugaagcucaucaagcaggagcuggacaaguacaagaacgcggucacggagcugcagcuccugaugcaguccaccccggcaaccggcuccggcuccgccaucgcgagcggcgucgccgugugcaaggugcugcaccucgagggggaggucaacaagaucaagagcgcccugcuguccaccaacaaggccguggugagccucuccggcugcggcgucagcgugcugaccuucaaggugcuggaccucaagaacuacaucgacaagcagcugcugcccauccugaacaagcagagcugcuccaucagcaacaucgagacggugaucgaguuccagcagaagaacaaccggcuccuggagaucacccgcgaguucagcgugaacgccggggucaccacccccguguccacguacaugcugaccaacagcgagcuccugucccugaucaacgacaugccgaucaccaacgaccagaagaagcucaugagcaacaacgugcagaucguccggcagcaguccuacagcaucaugugcaucaucaaggaggaggugcuggcguacgugguccagcugccccucuacggcgugaucgacacccccugcuggaagcugcacacgagcccccugugcaccaccaacaccaaggagggguccaacaucugccucacgcgcaccgaccggggcugguacugcgacaacgccggcagcgucuccuucuucccgcaggccgagaccugcaaggugcagagcaaccgcguguucugcgacaccaugaacucccggacgcugcccagcgagguaaaccucugcaacgucgacaucuucaaccccaaguacgacugcaagaucaugaccuccaagaccgacgugagcuccagcgugaucaccucccugggggccaucgucagcugcuacggcaagacgaagugcaccgccagcaacaagugccgggggaucaucaagaccuucuccaacggcugcgacuacgugagcaacaagggcguggacaccguguccgucgggaacacccuguacuacgugaacaagcaggagggcaagagccucuacgugaagggggagcccaucaucaacuucuacgacccgcuggucuuccccuccgacgaguucgacgcgagcaucucccaggugaacgagaagaucaaccagagccuggccuucauccgcaaguccgacgagcugcuccacaacgugaacgccggcaagagcacgaccaacaucaugaucaccaccaucaucaucgucaucaucgugauccugcugucccucaucgccguggggcugcugcucuacugcaaggcccggugaggacuaguguccaccugucccuccugggcugcuggauugucucguuuuccugccaaauaaacaggaucagcgcuuuacagaucuaaaaaaaaaaaaaaaaaaaaaaaaaaaaaaaaaaaaaaaaaaaaaaaaaaaaaaaaaaaaaaaaugcaucccccccccccccccccccccccccccccccaaaggcucuuuucagagccaccagaauu

SEQ ID NO: 5865 - RNA, 1877 nt, Artificial Sequence
  mRNA product Design e-1 comprising derived and/or modified sequence from HRSV(A2)__F-del_DSCav1_mut5 (opt1)
gggagaauauaagcguuggcggagcgucgguuguagcacucugcgcgcccgcucuucugcugcuguuugucuacuuccuccugcuuccccgccgccgccgccgccaucaagcuuaccauggagcugcucauccugaaggccaacgccaucaccaccauccugacggcggugaccuucugcuucgccagcggccagaacaucaccgaggaguucuaccaguccacgugcagcgccgucuccaagggguaccucagcgcccugcgcaccggcugguacaccuccgugaucaccaucgagcugagcaacaucaaggagaacaagugcaacgggaccgacgccaaggugaagcucaucaagcaggagcuggacaaguacaagaacgcggucacggagcugcagcuccugaugcaguccacccccgccaccggcagcggguccgccaucgccagcggcguggcggugugcaagguccugcaccucgagggcgaggugaacaagaucaaguccgcccugcugagcaccaacaaggccguggucucccucagcgggugcggcguguccgugcugacguucaagguccuggaccucaagaacuacaucgacaagcagcugcugccgauccucaacaagcagagcugcuccaucagcaacaucgagaccgugaucgaguuccagcagaagaacaaccggcugcuggagaucacccgcgaguucuccgugaacgccggggucaccacgcccgugagcaccuacaugcucaccaacagcgagcugcugucccucaucaacgacaugcccaucaccaacgaccagaagaagcugaugagcaacaacgugcagaucguccggcagcaguccuacagcaucaugugcaucaucaaggaggaggugcuggccuacgugguccagcucccccuguacggcgugaucgacacgccgugcuggaagcugcacaccagcccccucugcaccaccaacacgaaggagggguccaacaucugccugacccgcaccgaccggggcugguacugcgacaacgcgggcuccgugagcuucuucccccaggccgagaccugcaagguccaguccaaccgcguguucugcgacacgaugaacagccggacccuccccuccgaggucaaccugugcaacguggacaucuucaacccgaaguacgacugcaagaucaugaccagcaagaccgacguguccagcuccgucaucacgagccugggggccaucguguccugcuacggcaagaccaagugcaccgccagcaacaagugccgggggaucaucaagaccuucuccaacggcugcgacuacgugagcaacaagggcgucgacacggugagcguggggaacacccucuacuacgucaacaagcaggagggcaagucccuguacgugaagggggagcccaucaucaacuucuacgacccccugguguuccccagcgacgaguucgacgccuccaucagccaggucaacgagaagaucaaccagucccucgcguucauccgcaagagcgacgagcugcugcacaacgugaacgccggcaaguccaccaccaacaucaugaucaccacgaucaucaucgugaucaucgucauccuccugagccugaucgccguggggcuccugcuguacugcaaggcccggugaggacuaguguccaccugucccuccugggcugcuggauugucucguuuuccugccaaauaaacaggaucagcgcuuuacagaucuaaaaaaaaaaaaaaaaaaaaaaaaaaaaaaaaaaaaaaaaaaaaaaaaaaaaaaaaaaaaaaaaugcaucccccccccccccccccccccccccccccccaaaggcucuuuucagagccaccagaauu

SEQ ID NO: 5866 - RNA, 1877 nt, Artificial Sequence
  mRNA product Design e-1 comprising derived and/or modified sequence from HRSV(A2)__F-del_DSCav1_mut5 (opt2)
gggagaauauaagcguuggcggagcgucgguuguagcacucugcgcgcccgcucuucugcugcuguuugucuacuuccuccugcuuccccgccgccgccgccgccaucaagcuuaccauggagcuccucauccucaaggccaacgccaucaccaccauccucaccgccgucaccuucugcuucgccuccggccagaacaucaccgaggaguucuaccaguccaccugcuccgccgucuccaagggcuaccucuccgcccuccgcaccggcugguacaccuccgucaucaccaucgagcucuccaacaucaaggagaacaagugcaacggcaccgacgccaaggucaagcucaucaagcaggagcucgacaaguacaagaacgccgucaccgagcuccagcuccucaugcaguccacccccgccaccggcuccggcuccgccaucgccuccggcgucgccgucugcaagguccuccaccucgagggcgaggucaacaagaucaaguccgcccuccucuccaccaacaaggccgucgucucccucuccggcugcggcgucuccguccucaccuucaagguccucgaccucaagaacuacaucgacaagcagcuccuccccauccucaacaagcaguccugcuccaucuccaacaucgagaccgucaucgaguuccagcagaagaacaaccgccuccucgagaucacccgcgaguucuccgucaacgccggcgucaccacccccgucuccaccuacaugcucaccaacuccgagcuccucucccucaucaacgacaugcccaucaccaacgaccagaagaagcucauguccaacaacguccagaucguccgccagcaguccuacuccaucaugugcaucaucaaggaggagguccucgccuacgucguccagcucccccucuacggcgucaucgacacccccugcuggaagcuccacaccuccccccucugcaccaccaacaccaaggagggcuccaacaucugccucacccgcaccgaccgcggcugguacugcgacaacgccggcuccgucuccuucuucccccaggccgagaccugcaagguccaguccaaccgcgucuucugcgacaccaugaacucccgcacccuccccuccgaggucaaccucugcaacgucgacaucuucaaccccaaguacgacugcaagaucaugaccuccaagaccgacgucuccuccuccgucaucaccucccucggcgccaucgucuccugcuacggcaagaccaagugcaccgccuccaacaagugccgcggcaucaucaagaccuucuccaacggcugcgacuacgucuccaacaagggcgucgacaccgucuccgucggcaacacccucuacuacgucaacaagcaggagggcaagucccucuacgucaagggcgagcccaucaucaacuucuacgacccccucgucuuccccuccgacgaguucgacgccuccaucucccaggucaacgagaagaucaaccagucccucgccuucauccgcaaguccgacgagcuccuccacaacgucaacgccggcaaguccaccaccaacaucaugaucaccaccaucaucaucgucaucaucgucauccuccucucccucaucgccgucggccuccuccucuacugcaaggcccgcugaggacuaguguccaccugucccuccugggcugcuggauugucucguuuuccugccaaauaaacaggaucagcgcuuuacagaucuaaaaaaaaaaaaaaaaaaaaaaaaaaaaaaaaaaaaaaaaaaaaaaaaaaaaaaaaaaaaaaaaugcaucccccccccccccccccccccccccccccccaaaggcucuuuucagagccaccagaauu

SEQ ID NO: 5867 - RNA, 1877 nt, Artificial Sequence
  mRNA product Design e-1 comprising derived and/or modified sequence from HRSV(A2)__F-del_DSCav1_mut5 (opt3)
gggagaauauaagcguuggcggagcgucgguuguagcacucugcgcgcccgcucuucugcugcuguuugucuacuuccuccugcuuccccgccgccgccgccgccaucaagcuuaccauggagcugcucauccuuaaggccaacgcuauuaccacaauacugacugcagugacguucugcuuugccagcggccagaauaucaccgaagaguucuaccaauccacauguucugcggucucaaaaggguauuugagugcuuuaagaacuggaugguacaccagcguuauuacaaucgaacuguccaacauuaaggagaauaaaugcaacgguaccgacgccaaggugaaacuaaucaagcaggaacucgauaaguauaaaaaugcaguaacugagcugcagcuucugaugcagucuacacccgccaccggcucggggucagcuauagcaagcggaguggccgucuguaagguguugcaccucgagggcgaaguuaacaaaaucaagagugcucugcuguccacgaauaaagccguggucucucucagcgguugcgggguguccguauuaacuuuuaagguucuggaccuuaagaacuacauugauaaacaauugcugccuauccuaaauaagcagucauguaguauuagcaacaucgagaccgugauagaguuccagcagaaaaauaacaggcuccuggaaauuacacgggaguuuucugucaaugcgggagugacuaccccaguguccacauauaugcuuaccaacucagaacuguugagccucaucaaugacaugccgauuacgaacgaucaaaagaaacugaugaguaacaauguccagaucguucgccagcagucuuacuccaucaugugcauuauaaaggaggaaguguuagcauauguagugcaacugccccucuacggcgucaucgacacuccuuguuggaaacuucauacaagcccacugugcaccacuaacacaaaggagggcucgaauauuuguuugacccgaacggaucgugggugguacugcgacaacgccggaucuguguccuucuuuccccaggcugaaaccuguaagguucagucaaauagaguguucugcgauacaaugaacaguagaacucugccuagcgaggucaaucucugcaacguggacaucuuuaauccaaaauaugauuguaagauaaugaccuccaaaacagacguaucuagcucaguuauuaccagucugggugccaucguguccugcuacggcaagacuaaauguacagcaagcaacaagugcagggggaucauuaagaccuucucuaauggaugugauuaugucucaaacaaaggcguggacacugucaguguggguaauacgcuuuacuauguuaacaagcaagaggggaaaagccuguacgugaagggagaacccaucauuaauuuuuaugacccuuugguauucccauccgaugaguuugacgcuucuauaucgcaggucaacgagaaaaucaaccagagccucgccuucauucggaaguccgaugaacuguuacacaaugugaacgcgggcaagucaacaaccaauaucaugaucacuaccauuauaaucguuauuaucgugauucugcuaagucucaucgccgucggccugcuuuuguacugcaaagcacgcugaggacuaguguccaccugucccuccugggcugcuggauugucucguuuuccugccaaauaaacaggaucagcgcuuuacagaucuaaaaaaaaaaaaaaaaaaaaaaaaaaaaaaaaaaaaaaaaaaaaaaaaaaaaaaaaaaaaaaaaugcaucccccccccccccccccccccccccccccccaaaggcucuuuucagagccaccagaauu

SEQ ID NO: 5868 - RNA, 1877 nt, Artificial Sequence
  mRNA product Design e-1 comprising derived and/or modified sequence from HRSV(A2)__F-del_DSCav1_mut5 (opt4)
gggagaauauaagcguuggcggagcgucgguuguagcacucugcgcgcccgcucuucugcugcuguuugucuacuuccuccugcuuccccgccgccgccgccgccaucaagcuuaccauggagcugcugauccugaaggccaacgccaucaccaccauccugaccgccgugaccuucugcuucgccagcggccagaacaucaccgaggaguucuaccagagcaccugcagcgccgugagcaagggcuaccugagcgcccugagaaccggcugguacaccagcgugaucaccaucgagcugagcaacaucaaggagaacaagugcaacggcaccgacgccaaggugaagcugaucaagcaggagcuggacaaguacaagaacgccgugaccgagcugcagcugcugaugcagagcacccccgccaccggcagcggcagcgccaucgccagcggcguggccgugugcaaggugcugcaccuggagggcgaggugaacaagaucaagagcgcccugcugagcaccaacaaggccguggugagccugagcggcugcggcgugagcgugcugaccuucaaggugcuggaccugaagaacuacaucgacaagcagcugcugcccauccugaacaagcagagcugcagcaucagcaacaucgagaccgugaucgaguuccagcagaagaacaacagacugcuggagaucaccagagaguucagcgugaacgccggcgugaccacccccgugagcaccuacaugcugaccaacagcgagcugcugagccugaucaacgacaugcccaucaccaacgaccagaagaagcugaugagcaacaacgugcagaucgugagacagcagagcuacagcaucaugugcaucaucaaggaggaggugcuggccuacguggugcagcugccccuguacggcgugaucgacacccccugcuggaagcugcacaccagcccccugugcaccaccaacaccaaggagggcagcaacaucugccugaccagaaccgacagaggcugguacugcgacaacgccggcagcgugagcuucuucccccaggccgagaccugcaaggugcagagcaacagaguguucugcgacaccaugaacagcagaacccugcccagcgaggugaaccugugcaacguggacaucuucaaccccaaguacgacugcaagaucaugaccagcaagaccgacgugagcagcagcgugaucaccagccugggcgccaucgugagcugcuacggcaagaccaagugcaccgccagcaacaagugcagaggcaucaucaagaccuucagcaacggcugcgacuacgugagcaacaagggcguggacaccgugagcgugggcaacacccuguacuacgugaacaagcaggagggcaagagccuguacgugaagggcgagcccaucaucaacuucuacgacccccugguguuccccagcgacgaguucgacgccagcaucagccaggugaacgagaagaucaaccagagccuggccuucaucagaaagagcgacgagcugcugcacaacgugaacgccggcaagagcaccaccaacaucaugaucaccaccaucaucaucgugaucaucgugauccugcugagccugaucgccgugggccugcugcuguacugcaaggccagaugaggacuaguguccaccugucccuccugggcugcuggauugucucguuuuccugccaaauaaacaggaucagcgcuuuacagaucuaaaaaaaaaaaaaaaaaaaaaaaaaaaaaaaaaaaaaaaaaaaaaaaaaaaaaaaaaaaaaaaaugcaucccccccccccccccccccccccccccccccaaaggcucuuuucagagccaccagaauu

SEQ ID NO: 5869 - RNA, 1877 nt, Artificial Sequence
  mRNA product Design e-1 comprising derived and/or modified sequence from HRSV(A2)__F-del_DSCav1_mut5 (opt5)
gggagaauauaagcguuggcggagcgucgguuguagcacucugcgcgcccgcucuucugcugcuguuugucuacuuccuccugcuuccccgccgccgccgccgccaucaagcuuaccauggagcugcucauccugaaggccaacgcuauuaccacaauccuuacggccgugaccuucugcuuugcgagcggccagaauauuacagaagaguucuaccaauccaccuguucugcugucagcaaaggguaucuguccgcccucagaacaggaugguacaccucuguuaucacaauugaacugagcaacaucaaggagaauaaaugcaacggcaccgacgccaaggugaaacuuaucaagcaggaacuggauaaguauaaaaaugcugugacggagcuccagcugcugaugcaguccacccccgccacagggucuggaagcgcuauugccuccggcgucgcgguguguaagguucuccaccuggagggggaagugaacaaaaucaagagcgcccuucugucuaccaauaaagcugucgugucccucagcggaugcggcguuucugugcugacauuuaagguccuugaccugaagaacuacauugauaaacaacuccugccuauccugaauaagcaguccuguagcauuucuaacaucgagaccgugauugaguuccagcagaaaaauaaccggcuccuggaaaucacgcgcgaguuuuccgugaaugccggcgucacaaccccgguuagcacauauaugcuuaccaacuccgaacugcucucucugaucaaugacaugcccauuaccaacgaucaaaagaaacuuaugagcaacaaugugcagaucgugagacagcaguccuacagcauuaugugcaucauuaaggaggaaguccuggcuuaugugguucaacucccucuguacggggugaucgacacacccuguuggaaacugcauacgucuccucucugcaccacaaacaccaaggagggauccaauaucugucugacacggaccgaucgcggcugguacugcgacaacgccgggagcgucucuuucuuuccccaggcggaaacguguaaggugcagagcaauagaguuuucugcgauacaaugaacuccagaacccugccuucugaggugaaucucugcaacgucgacauuuuuaauccgaaauaugauuguaagaucaugaccagcaaaacagacguguccagcucugucauuaccucccugggagccaucgugagcugcuacggcaagacaaaauguacggcuucuaacaagugccgggggauuaucaagaccuucuccaauggaugugauuauguuagcaacaaaggcguggacacagucuccgugggcaauacccuuuacuauguuaacaagcaagaggggaaaucucuguacgugaagggagaacccaucauuaauuuuuaugacccucucgucuuccccagcgaugaguuugacgccuccaucucucaggugaacgagaaaauuaaccagagccuggcuuucauccgcaaguccgaugaacugcuccacaaugugaacgccggcaagagcacaaccaauauuaugaucacgaccauuaucaucguuauuaucgucauucugcuuucucugaucgccguggggcuccugcuguacugcaaagcuagaugaggacuaguguccaccugucccuccugggcugcuggauugucucguuuuccugccaaauaaacaggaucagcgcuuuacagaucuaaaaaaaaaaaaaaaaaaaaaaaaaaaaaaaaaaaaaaaaaaaaaaaaaaaaaaaaaaaaaaaaugcaucccccccccccccccccccccccccccccccaaaggcucuuuucagagccaccagaauu

SEQ ID NO: 5870 - RNA, 1877 nt, Artificial Sequence
  mRNA product Design e-1 comprising derived and/or modified sequence from HRSV(A2)__F-del_DSCav1_mut5 (opt6)
gggagaauauaagcguuggcggagcgucgguuguagcacucugcgcgcccgcucuucugcugcuguuugucuacuuccuccugcuuccccgccgccgccgccgccaucaagcuuaccauggaacuuuuaauacugaaagcaaaugccaucacaaccauacuaacugccgucacauucugcuuugcaucaggacaaaacauaacagaagaauuuuaccaauccacaugcucagcaguaucaaaaggauaucuaucggcacuuagaacuggaugguacacaaguguuauaacuauagaacucucaaacauaaaagaaaacaaaugcaauggaacagacgcaaaaguaaaacuaauaaaacaagaacucgauaaauauaaaaaugcaguaaccgaacuacaacuauuaaugcaaagcacacccgcaacaggcagcggaucagcaauagcaagcggagucgcaguauguaaaguacuacaucuagaaggagaagucaacaaaaucaaaucugcacuucuauccacaaacaaagcuguaguaucccuauccggaugcggagucucaguauuaacuuuuaaaguacuagaccuuaaaaacuacauagauaaacaacuauuaccaauacuaaauaaacaaucaugcagcauauccaauauagagacaguaauugaauuucaacaaaaaaacaacagauuacuagaaauuacucgugaauuuuccguaaaugccggagucacaacaccaguaucaaccuauaugcuaacaaacagcgaacuacuuagcuuaauaaaugacaugccaauaacaaaugaccaaaaaaaacuuaugucaaauaacguacaaaucgucagacaacaauccuacucuauaauguguauaauuaaagaagaaguccuagcauacguaguucaauuaccacucuauggaguaauagauacaccaugcuggaaacuacacacgucaccacuauguacaacaaacacaaaagaaggauccaauauaugccuaacaagaaccgacagaggcugguauugugacaacgcaggauccguuucauucuucccacaagcagaaaccuguaaaguacaaucuaauagaguauuuugcgacacaaugaacaguagaacacuaccaagcgagguuaaucuauguaacguagacauauucaauccaaaauaugauugcaaaauaaugacaucaaaaacagauguaucgucgaguguaauaacaagucugggagcuauaguaagcugcuacggcaagacgaaauguaccgcuucaaauaaaugcagaggaaucauuaaaacauucucgaacggaugcgacuacguaaguaauaaaggugucgacaccguaucaguagggaauacauuauacuacgucaacaaacaagaaggaaaaucucuauauguaaaaggagaaccaauaauaaauuucuaugacccucuaguauucccaucagaugaauuugacgcuuccauaucacaaguaaacgaaaaaaucaaucaaucuuuagcauucauacgaaaaagugaugaacuccuacacaacgucaacgcaggaaaaagcacaacaaauauaaugaucacaacaaucaucauaguaauaauaguaauacuacuaucauuaauagcaguaggauuauugcuuuacugcaaagcacgauagggacuaguguccaccugucccuccugggcugcuggauugucucguuuuccugccaaauaaacaggaucagcgcuuuacagaucuaaaaaaaaaaaaaaaaaaaaaaaaaaaaaaaaaaaaaaaaaaaaaaaaaaaaaaaaaaaaaaaaugcaucccccccccccccccccccccccccccccccaaaggcucuuuucagagccaccagaauu

SEQ ID NO: 5871 - RNA, 1877 nt, Artificial Sequence
  mRNA product Design e-1 comprising derived and/or modified sequence from HRSV(A2)__F-del_DSCav1_mut5 (opt11)
gggagaauauaagcguuggcggagcgucgguuguagcacucugcgcgcccgcucuucugcugcuguuugucuacuuccuccugcuuccccgccgccgccgccgccaucaagcuuaccauggaacuccucauccucaaagccaacgccauaaccacaauacucaccgccguaaccuucugcuuugcgucgggacaaaacaucaccgaagaguucuaccaauccacuugcuccgcaguaagcaaaggauaccucuccgcccugcgaaccgguugguacacaucagucaucacaaucgaacucucaaacauaaaagaaaacaaaugcaacggcaccgacgcaaaggucaaauuaaucaagcaagaacuagacaaauacaaaaacgccgucacagaacuccagcugcuaaugcagagcacacccgcaacuggcagcggauccgccaucgcaucaggagucgccgugugcaaaguccuacaccucgaaggagaagugaacaaaaucaaaucagcccuacucuccaccaacaaggccgucgucucccucuccggcugcggugucuccguccuaaccuucaaagugcuagaccucaagaacuacaucgacaaacaacuccuaccaauacucaacaagcaaucuugcuccaucuccaacaucgaaaccguaaucgaguuccaacagaagaacaaccgccuccucgaaaucacccgcgaguucucugucaacgcaggggucaccacucccgucuccacauacaugcucacaaacuccgaacuccucagccucaucaacgacaugcccauaaccaacgaccagaaaaagcuaaugagcaauaacguccaaaucguuagacaacaaaguuauuccaucaugugcaucaucaaagaagaaguccucgccuacgucguacaacucccccucuauggcgucaucgacacccccugcuggaaacugcacacaucaccccucugcaccacaaacaccaaagaaggcucaaacaucugccuaacucgcaccgaccgcggcugguacugcgacaacgccggcagcguaucauucuuuccccaagccgaaacaugcaaaguucaauccaaccgcgucuucugcgacacaaugaacuccagaacgcuccccagcgaagucaaccucuguaacguagacaucuucaacccuaaguacgacugcaaaaucaugaccuccaaaacugauguauccuccuccgucaucacaucccugggcgccaucgucagcugcuacggcaaaacaaaaugcacugccucaaacaaaugccgagguaucauaaagaccuucucaaacggaugcgauuacgucagcaacaaaggcgucgacaccgucagugucggcaacacccucuacuacgucaacaaacaagaaggaaaaucccucuacgucaaaggcgaacccaucaucaacuucuacgacccccucgucuuccccagcgacgaguucgacgccuccaucucacaagucaacgaaaagauaaaccaaucucuagccuucauccgcaaauccgaugaacuccugcauaacgucaacgccggcaaauccaccacaaacaucaugaucacuaccauaaucaucgucauaaucguaauccuccuaucucuuaucgcagucggccuacuacucuacugcaaagcccgcuaaggacuaguguccaccugucccuccugggcugcuggauugucucguuuuccugccaaauaaacaggaucagcgcuuuacagaucuaaaaaaaaaaaaaaaaaaaaaaaaaaaaaaaaaaaaaaaaaaaaaaaaaaaaaaaaaaaaaaaaugcaucccccccccccccccccccccccccccccccaaaggcucuuuucagagccaccagaauu

SEQ ID NO: 5872 - RNA, 1859 nt, Artificial Sequence
  mRNA product Design e-2 comprising derived and/or modified sequence from HRSV(A2)__F-del_DSCav1_mut5 (opt1)
gggagacccgugacccggaaguuguacggcuacgcgacuuucccucccacaaacccucgcgcccuuccuuuccuacuugggcccggcagaaagcuuaccauggagcugcucauccugaaggccaacgccaucaccaccauccugacggcggugaccuucugcuucgccagcggccagaacaucaccgaggaguucuaccaguccacgugcagcgccgucuccaagggguaccucagcgcccugcggaccggcugguacaccuccgugaucaccaucgagcugagcaacaucaaggagaacaagugcaacgggaccgacgccaaggugaagcucaucaagcaggagcuggacaaguacaagaacgcggucacggagcugcagcuccugaugcaguccaccccggcaaccggcuccggcuccgccaucgcgagcggcgucgccgugugcaaggugcugcaccucgagggggaggucaacaagaucaagagcgcccugcuguccaccaacaaggccguggugagccucuccggcugcggcgucagcgugcugaccuucaaggugcuggaccucaagaacuacaucgacaagcagcugcugcccauccugaacaagcagagcugcuccaucagcaacaucgagacggugaucgaguuccagcagaagaacaaccggcuccuggagaucacccgcgaguucagcgugaacgccggggucaccacccccguguccacguacaugcugaccaacagcgagcuccugucccugaucaacgacaugccgaucaccaacgaccagaagaagcucaugagcaacaacgugcagaucguccggcagcaguccuacagcaucaugugcaucaucaaggaggaggugcuggcguacgugguccagcugccccucuacggcgugaucgacacccccugcuggaagcugcacacgagcccccugugcaccaccaacaccaaggagggguccaacaucugccucacgcgcaccgaccggggcugguacugcgacaacgccggcagcgucuccuucuucccgcaggccgagaccugcaaggugcagagcaaccgcguguucugcgacaccaugaacucccggacgcugcccagcgagguaaaccucugcaacgucgacaucuucaaccccaaguacgacugcaagaucaugaccuccaagaccgacgugagcuccagcgugaucaccucccugggggccaucgucagcugcuacggcaagacgaagugcaccgccagcaacaagugccgggggaucaucaagaccuucuccaacggcugcgacuacgugagcaacaagggcguggacaccguguccgucgggaacacccuguacuacgugaacaagcaggagggcaagagccucuacgugaagggggagcccaucaucaacuucuacgacccgcuggucuuccccuccgacgaguucgacgcgagcaucucccaggugaacgagaagaucaaccagagccuggccuucauccgcaaguccgacgagcugcuccacaacgugaacgccggcaagagcacgaccaacaucaugaucaccaccaucaucaucgucaucaucgugauccugcugucccucaucgccguggggcugcugcucuacugcaaggcccggugaggacuaguguccaccugucccuccugggcugcuggauugucucguuuuccugccaaauaaacaggaucagcgcuuuacagaucuaaaaaaaaaaaaaaaaaaaaaaaaaaaaaaaaaaaaaaaaaaaaaaaaaaaaaaaaaaaaaaaaugcaucccccccccccccccccccccccccccccccaaaggcucuuuucagagccaccagaauu

SEQ ID NO: 5873 - RNA, 1859 nt, Artificial Sequence
  mRNA product Design e-2 comprising derived and/or modified sequence from HRSV(A2)__F-del_DSCav1_mut5 (opt1)
gggagacccgugacccggaaguuguacggcuacgcgacuuucccucccacaaacccucgcgcccuuccuuuccuacuugggcccggcagaaagcuuaccauggagcugcucauccugaaggccaacgccaucaccaccauccugacggcggugaccuucugcuucgccagcggccagaacaucaccgaggaguucuaccaguccacgugcagcgccgucuccaagggguaccucagcgcccugcgcaccggcugguacaccuccgugaucaccaucgagcugagcaacaucaaggagaacaagugcaacgggaccgacgccaaggugaagcucaucaagcaggagcuggacaaguacaagaacgcggucacggagcugcagcuccugaugcaguccacccccgccaccggcagcggguccgccaucgccagcggcguggcggugugcaagguccugcaccucgagggcgaggugaacaagaucaaguccgcccugcugagcaccaacaaggccguggucucccucagcgggugcggcguguccgugcugacguucaagguccuggaccucaagaacuacaucgacaagcagcugcugccgauccucaacaagcagagcugcuccaucagcaacaucgagaccgugaucgaguuccagcagaagaacaaccggcugcuggagaucacccgcgaguucuccgugaacgccggggucaccacgcccgugagcaccuacaugcucaccaacagcgagcugcugucccucaucaacgacaugcccaucaccaacgaccagaagaagcugaugagcaacaacgugcagaucguccggcagcaguccuacagcaucaugugcaucaucaaggaggaggugcuggccuacgugguccagcucccccuguacggcgugaucgacacgccgugcuggaagcugcacaccagcccccucugcaccaccaacacgaaggagggguccaacaucugccugacccgcaccgaccggggcugguacugcgacaacgcgggcuccgugagcuucuucccccaggccgagaccugcaagguccaguccaaccgcguguucugcgacacgaugaacagccggacccuccccuccgaggucaaccugugcaacguggacaucuucaacccgaaguacgacugcaagaucaugaccagcaagaccgacguguccagcuccgucaucacgagccugggggccaucguguccugcuacggcaagaccaagugcaccgccagcaacaagugccgggggaucaucaagaccuucuccaacggcugcgacuacgugagcaacaagggcgucgacacggugagcguggggaacacccucuacuacgucaacaagcaggagggcaagucccuguacgugaagggggagcccaucaucaacuucuacgacccccugguguuccccagcgacgaguucgacgccuccaucagccaggucaacgagaagaucaaccagucccucgcguucauccgcaagagcgacgagcugcugcacaacgugaacgccggcaaguccaccaccaacaucaugaucaccacgaucaucaucgugaucaucgucauccuccugagccugaucgccguggggcuccugcuguacugcaaggcccggugaggacuaguguccaccugucccuccugggcugcuggauugucucguuuuccugccaaauaaacaggaucagcgcuuuacagaucuaaaaaaaaaaaaaaaaaaaaaaaaaaaaaaaaaaaaaaaaaaaaaaaaaaaaaaaaaaaaaaaaugcaucccccccccccccccccccccccccccccccaaaggcucuuuucagagccaccagaauu

SEQ ID NO: 5874 - RNA, 1859 nt, Artificial Sequence
  mRNA product Design e-2 comprising derived and/or modified sequence from HRSV(A2)__F-del_DSCav1_mut5 (opt2)
gggagacccgugacccggaaguuguacggcuacgcgacuuucccucccacaaacccucgcgcccuuccuuuccuacuugggcccggcagaaagcuuaccauggagcuccucauccucaaggccaacgccaucaccaccauccucaccgccgucaccuucugcuucgccuccggccagaacaucaccgaggaguucuaccaguccaccugcuccgccgucuccaagggcuaccucuccgcccuccgcaccggcugguacaccuccgucaucaccaucgagcucuccaacaucaaggagaacaagugcaacggcaccgacgccaaggucaagcucaucaagcaggagcucgacaaguacaagaacgccgucaccgagcuccagcuccucaugcaguccacccccgccaccggcuccggcuccgccaucgccuccggcgucgccgucugcaagguccuccaccucgagggcgaggucaacaagaucaaguccgcccuccucuccaccaacaaggccgucgucucccucuccggcugcggcgucuccguccucaccuucaagguccucgaccucaagaacuacaucgacaagcagcuccuccccauccucaacaagcaguccugcuccaucuccaacaucgagaccgucaucgaguuccagcagaagaacaaccgccuccucgagaucacccgcgaguucuccgucaacgccggcgucaccacccccgucuccaccuacaugcucaccaacuccgagcuccucucccucaucaacgacaugcccaucaccaacgaccagaagaagcucauguccaacaacguccagaucguccgccagcaguccuacuccaucaugugcaucaucaaggaggagguccucgccuacgucguccagcucccccucuacggcgucaucgacacccccugcuggaagcuccacaccuccccccucugcaccaccaacaccaaggagggcuccaacaucugccucacccgcaccgaccgcggcugguacugcgacaacgccggcuccgucuccuucuucccccaggccgagaccugcaagguccaguccaaccgcgucuucugcgacaccaugaacucccgcacccuccccuccgaggucaaccucugcaacgucgacaucuucaaccccaaguacgacugcaagaucaugaccuccaagaccgacgucuccuccuccgucaucaccucccucggcgccaucgucuccugcuacggcaagaccaagugcaccgccuccaacaagugccgcggcaucaucaagaccuucuccaacggcugcgacuacgucuccaacaagggcgucgacaccgucuccgucggcaacacccucuacuacgucaacaagcaggagggcaagucccucuacgucaagggcgagcccaucaucaacuucuacgacccccucgucuuccccuccgacgaguucgacgccuccaucucccaggucaacgagaagaucaaccagucccucgccuucauccgcaaguccgacgagcuccuccacaacgucaacgccggcaaguccaccaccaacaucaugaucaccaccaucaucaucgucaucaucgucauccuccucucccucaucgccgucggccuccuccucuacugcaaggcccgcugaggacuaguguccaccugucccuccugggcugcuggauugucucguuuuccugccaaauaaacaggaucagcgcuuuacagaucuaaaaaaaaaaaaaaaaaaaaaaaaaaaaaaaaaaaaaaaaaaaaaaaaaaaaaaaaaaaaaaaaugcaucccccccccccccccccccccccccccccccaaaggcucuuuucagagccaccagaauu

SEQ ID NO: 5875 - RNA, 1859 nt, Artificial Sequence
  mRNA product Design e-2 comprising derived and/or modified sequence from HRSV(A2)__F-del_DSCav1_mut5 (opt3)
gggagacccgugacccggaaguuguacggcuacgcgacuuucccucccacaaacccucgcgcccuuccuuuccuacuugggcccggcagaaagcuuaccauggagcugcucauccuuaaggccaacgcuauuaccacaauacugacugcagugacguucugcuuugccagcggccagaauaucaccgaagaguucuaccaauccacauguucugcggucucaaaaggguauuugagugcuuuaagaacuggaugguacaccagcguuauuacaaucgaacuguccaacauuaaggagaauaaaugcaacgguaccgacgccaaggugaaacuaaucaagcaggaacucgauaaguauaaaaaugcaguaacugagcugcagcuucugaugcagucuacacccgccaccggcucggggucagcuauagcaagcggaguggccgucuguaagguguugcaccucgagggcgaaguuaacaaaaucaagagugcucugcuguccacgaauaaagccguggucucucucagcgguugcgggguguccguauuaacuuuuaagguucuggaccuuaagaacuacauugauaaacaauugcugccuauccuaaauaagcagucauguaguauuagcaacaucgagaccgugauagaguuccagcagaaaaauaacaggcuccuggaaauuacacgggaguuuucugucaaugcgggagugacuaccccaguguccacauauaugcuuaccaacucagaacuguugagccucaucaaugacaugccgauuacgaacgaucaaaagaaacugaugaguaacaauguccagaucguucgccagcagucuuacuccaucaugugcauuauaaaggaggaaguguuagcauauguagugcaacugccccucuacggcgucaucgacacuccuuguuggaaacuucauacaagcccacugugcaccacuaacacaaaggagggcucgaauauuuguuugacccgaacggaucgugggugguacugcgacaacgccggaucuguguccuucuuuccccaggcugaaaccuguaagguucagucaaauagaguguucugcgauacaaugaacaguagaacucugccuagcgaggucaaucucugcaacguggacaucuuuaauccaaaauaugauuguaagauaaugaccuccaaaacagacguaucuagcucaguuauuaccagucugggugccaucguguccugcuacggcaagacuaaauguacagcaagcaacaagugcagggggaucauuaagaccuucucuaauggaugugauuaugucucaaacaaaggcguggacacugucaguguggguaauacgcuuuacuauguuaacaagcaagaggggaaaagccuguacgugaagggagaacccaucauuaauuuuuaugacccuuugguauucccauccgaugaguuugacgcuucuauaucgcaggucaacgagaaaaucaaccagagccucgccuucauucggaaguccgaugaacuguuacacaaugugaacgcgggcaagucaacaaccaauaucaugaucacuaccauuauaaucguuauuaucgugauucugcuaagucucaucgccgucggccugcuuuuguacugcaaagcacgcugaggacuaguguccaccugucccuccugggcugcuggauugucucguuuuccugccaaauaaacaggaucagcgcuuuacagaucuaaaaaaaaaaaaaaaaaaaaaaaaaaaaaaaaaaaaaaaaaaaaaaaaaaaaaaaaaaaaaaaaugcaucccccccccccccccccccccccccccccccaaaggcucuuuucagagccaccagaauu

SEQ ID NO: 5876 - RNA, 1859 nt, Artificial Sequence
  mRNA product Design e-2 comprising derived and/or modified sequence from HRSV(A2)__F-del_DSCav1_mut5 (opt4)
gggagacccgugacccggaaguuguacggcuacgcgacuuucccucccacaaacccucgcgcccuuccuuuccuacuugggcccggcagaaagcuuaccauggagcugcugauccugaaggccaacgccaucaccaccauccugaccgccgugaccuucugcuucgccagcggccagaacaucaccgaggaguucuaccagagcaccugcagcgccgugagcaagggcuaccugagcgcccugagaaccggcugguacaccagcgugaucaccaucgagcugagcaacaucaaggagaacaagugcaacggcaccgacgccaaggugaagcugaucaagcaggagcuggacaaguacaagaacgccgugaccgagcugcagcugcugaugcagagcacccccgccaccggcagcggcagcgccaucgccagcggcguggccgugugcaaggugcugcaccuggagggcgaggugaacaagaucaagagcgcccugcugagcaccaacaaggccguggugagccugagcggcugcggcgugagcgugcugaccuucaaggugcuggaccugaagaacuacaucgacaagcagcugcugcccauccugaacaagcagagcugcagcaucagcaacaucgagaccgugaucgaguuccagcagaagaacaacagacugcuggagaucaccagagaguucagcgugaacgccggcgugaccacccccgugagcaccuacaugcugaccaacagcgagcugcugagccugaucaacgacaugcccaucaccaacgaccagaagaagcugaugagcaacaacgugcagaucgugagacagcagagcuacagcaucaugugcaucaucaaggaggaggugcuggccuacguggugcagcugccccuguacggcgugaucgacacccccugcuggaagcugcacaccagcccccugugcaccaccaacaccaaggagggcagcaacaucugccugaccagaaccgacagaggcugguacugcgacaacgccggcagcgugagcuucuucccccaggccgagaccugcaaggugcagagcaacagaguguucugcgacaccaugaacagcagaacccugcccagcgaggugaaccugugcaacguggacaucuucaaccccaaguacgacugcaagaucaugaccagcaagaccgacgugagcagcagcgugaucaccagccugggcgccaucgugagcugcuacggcaagaccaagugcaccgccagcaacaagugcagaggcaucaucaagaccuucagcaacggcugcgacuacgugagcaacaagggcguggacaccgugagcgugggcaacacccuguacuacgugaacaagcaggagggcaagagccuguacgugaagggcgagcccaucaucaacuucuacgacccccugguguuccccagcgacgaguucgacgccagcaucagccaggugaacgagaagaucaaccagagccuggccuucaucagaaagagcgacgagcugcugcacaacgugaacgccggcaagagcaccaccaacaucaugaucaccaccaucaucaucgugaucaucgugauccugcugagccugaucgccgugggccugcugcuguacugcaaggccagaugaggacuaguguccaccugucccuccugggcugcuggauugucucguuuuccugccaaauaaacaggaucagcgcuuuacagaucuaaaaaaaaaaaaaaaaaaaaaaaaaaaaaaaaaaaaaaaaaaaaaaaaaaaaaaaaaaaaaaaaugcaucccccccccccccccccccccccccccccccaaaggcucuuuucagagccaccagaauu

SEQ ID NO: 5877 - RNA, 1859 nt, Artificial Sequence
  mRNA product Design e-2 comprising derived and/or modified sequence from HRSV(A2)__F-del_DSCav1_mut5 (opt5)
gggagacccgugacccggaaguuguacggcuacgcgacuuucccucccacaaacccucgcgcccuuccuuuccuacuugggcccggcagaaagcuuaccauggagcugcucauccugaaggccaacgcuauuaccacaauccuuacggccgugaccuucugcuuugcgagcggccagaauauuacagaagaguucuaccaauccaccuguucugcugucagcaaaggguaucuguccgcccucagaacaggaugguacaccucuguuaucacaauugaacugagcaacaucaaggagaauaaaugcaacggcaccgacgccaaggugaaacuuaucaagcaggaacuggauaaguauaaaaaugcugugacggagcuccagcugcugaugcaguccacccccgccacagggucuggaagcgcuauugccuccggcgucgcgguguguaagguucuccaccuggagggggaagugaacaaaaucaagagcgcccuucugucuaccaauaaagcugucgugucccucagcggaugcggcguuucugugcugacauuuaagguccuugaccugaagaacuacauugauaaacaacuccugccuauccugaauaagcaguccuguagcauuucuaacaucgagaccgugauugaguuccagcagaaaaauaaccggcuccuggaaaucacgcgcgaguuuuccgugaaugccggcgucacaaccccgguuagcacauauaugcuuaccaacuccgaacugcucucucugaucaaugacaugcccauuaccaacgaucaaaagaaacuuaugagcaacaaugugcagaucgugagacagcaguccuacagcauuaugugcaucauuaaggaggaaguccuggcuuaugugguucaacucccucuguacggggugaucgacacacccuguuggaaacugcauacgucuccucucugcaccacaaacaccaaggagggauccaauaucugucugacacggaccgaucgcggcugguacugcgacaacgccgggagcgucucuuucuuuccccaggcggaaacguguaaggugcagagcaauagaguuuucugcgauacaaugaacuccagaacccugccuucugaggugaaucucugcaacgucgacauuuuuaauccgaaauaugauuguaagaucaugaccagcaaaacagacguguccagcucugucauuaccucccugggagccaucgugagcugcuacggcaagacaaaauguacggcuucuaacaagugccgggggauuaucaagaccuucuccaauggaugugauuauguuagcaacaaaggcguggacacagucuccgugggcaauacccuuuacuauguuaacaagcaagaggggaaaucucuguacgugaagggagaacccaucauuaauuuuuaugacccucucgucuuccccagcgaugaguuugacgccuccaucucucaggugaacgagaaaauuaaccagagccuggcuuucauccgcaaguccgaugaacugcuccacaaugugaacgccggcaagagcacaaccaauauuaugaucacgaccauuaucaucguuauuaucgucauucugcuuucucugaucgccguggggcuccugcuguacugcaaagcuagaugaggacuaguguccaccugucccuccugggcugcuggauugucucguuuuccugccaaauaaacaggaucagcgcuuuacagaucuaaaaaaaaaaaaaaaaaaaaaaaaaaaaaaaaaaaaaaaaaaaaaaaaaaaaaaaaaaaaaaaaugcaucccccccccccccccccccccccccccccccaaaggcucuuuucagagccaccagaauu

SEQ ID NO: 5878 - RNA, 1859 nt, Artificial Sequence
  mRNA product Design e-2 comprising derived and/or modified sequence from HRSV(A2)__F-del_DSCav1_mut5 (opt6)
gggagacccgugacccggaaguuguacggcuacgcgacuuucccucccacaaacccucgcgcccuuccuuuccuacuugggcccggcagaaagcuuaccauggaacuuuuaauacugaaagcaaaugccaucacaaccauacuaacugccgucacauucugcuuugcaucaggacaaaacauaacagaagaauuuuaccaauccacaugcucagcaguaucaaaaggauaucuaucggcacuuagaacuggaugguacacaaguguuauaacuauagaacucucaaacauaaaagaaaacaaaugcaauggaacagacgcaaaaguaaaacuaauaaaacaagaacucgauaaauauaaaaaugcaguaaccgaacuacaacuauuaaugcaaagcacacccgcaacaggcagcggaucagcaauagcaagcggagucgcaguauguaaaguacuacaucuagaaggagaagucaacaaaaucaaaucugcacuucuauccacaaacaaagcuguaguaucccuauccggaugcggagucucaguauuaacuuuuaaaguacuagaccuuaaaaacuacauagauaaacaacuauuaccaauacuaaauaaacaaucaugcagcauauccaauauagagacaguaauugaauuucaacaaaaaaacaacagauuacuagaaauuacucgugaauuuuccguaaaugccggagucacaacaccaguaucaaccuauaugcuaacaaacagcgaacuacuuagcuuaauaaaugacaugccaauaacaaaugaccaaaaaaaacuuaugucaaauaacguacaaaucgucagacaacaauccuacucuauaauguguauaauuaaagaagaaguccuagcauacguaguucaauuaccacucuauggaguaauagauacaccaugcuggaaacuacacacgucaccacuauguacaacaaacacaaaagaaggauccaauauaugccuaacaagaaccgacagaggcugguauugugacaacgcaggauccguuucauucuucccacaagcagaaaccuguaaaguacaaucuaauagaguauuuugcgacacaaugaacaguagaacacuaccaagcgagguuaaucuauguaacguagacauauucaauccaaaauaugauugcaaaauaaugacaucaaaaacagauguaucgucgaguguaauaacaagucugggagcuauaguaagcugcuacggcaagacgaaauguaccgcuucaaauaaaugcagaggaaucauuaaaacauucucgaacggaugcgacuacguaaguaauaaaggugucgacaccguaucaguagggaauacauuauacuacgucaacaaacaagaaggaaaaucucuauauguaaaaggagaaccaauaauaaauuucuaugacccucuaguauucccaucagaugaauuugacgcuuccauaucacaaguaaacgaaaaaaucaaucaaucuuuagcauucauacgaaaaagugaugaacuccuacacaacgucaacgcaggaaaaagcacaacaaauauaaugaucacaacaaucaucauaguaauaauaguaauacuacuaucauuaauagcaguaggauuauugcuuuacugcaaagcacgauagggacuaguguccaccugucccuccugggcugcuggauugucucguuuuccugccaaauaaacaggaucagcgcuuuacagaucuaaaaaaaaaaaaaaaaaaaaaaaaaaaaaaaaaaaaaaaaaaaaaaaaaaaaaaaaaaaaaaaaugcaucccccccccccccccccccccccccccccccaaaggcucuuuucagagccaccagaauu

SEQ ID NO: 5879 - RNA, 1859 nt, Artificial Sequence
  mRNA product Design e-2 comprising derived and/or modified sequence from HRSV(A2)__F-del_DSCav1_mut5 (opt11)
gggagacccgugacccggaaguuguacggcuacgcgacuuucccucccacaaacccucgcgcccuuccuuuccuacuugggcccggcagaaagcuuaccauggaacuccucauccucaaagccaacgccauaaccacaauacucaccgccguaaccuucugcuuugcgucgggacaaaacaucaccgaagaguucuaccaauccacuugcuccgcaguaagcaaaggauaccucuccgcccugcgaaccgguugguacacaucagucaucacaaucgaacucucaaacauaaaagaaaacaaaugcaacggcaccgacgcaaaggucaaauuaaucaagcaagaacuagacaaauacaaaaacgccgucacagaacuccagcugcuaaugcagagcacacccgcaacuggcagcggauccgccaucgcaucaggagucgccgugugcaaaguccuacaccucgaaggagaagugaacaaaaucaaaucagcccuacucuccaccaacaaggccgucgucucccucuccggcugcggugucuccguccuaaccuucaaagugcuagaccucaagaacuacaucgacaaacaacuccuaccaauacucaacaagcaaucuugcuccaucuccaacaucgaaaccguaaucgaguuccaacagaagaacaaccgccuccucgaaaucacccgcgaguucucugucaacgcaggggucaccacucccgucuccacauacaugcucacaaacuccgaacuccucagccucaucaacgacaugcccauaaccaacgaccagaaaaagcuaaugagcaauaacguccaaaucguuagacaacaaaguuauuccaucaugugcaucaucaaagaagaaguccucgccuacgucguacaacucccccucuauggcgucaucgacacccccugcuggaaacugcacacaucaccccucugcaccacaaacaccaaagaaggcucaaacaucugccuaacucgcaccgaccgcggcugguacugcgacaacgccggcagcguaucauucuuuccccaagccgaaacaugcaaaguucaauccaaccgcgucuucugcgacacaaugaacuccagaacgcuccccagcgaagucaaccucuguaacguagacaucuucaacccuaaguacgacugcaaaaucaugaccuccaaaacugauguauccuccuccgucaucacaucccugggcgccaucgucagcugcuacggcaaaacaaaaugcacugccucaaacaaaugccgagguaucauaaagaccuucucaaacggaugcgauuacgucagcaacaaaggcgucgacaccgucagugucggcaacacccucuacuacgucaacaaacaagaaggaaaaucccucuacgucaaaggcgaacccaucaucaacuucuacgacccccucgucuuccccagcgacgaguucgacgccuccaucucacaagucaacgaaaagauaaaccaaucucuagccuucauccgcaaauccgaugaacuccugcauaacgucaacgccggcaaauccaccacaaacaucaugaucacuaccauaaucaucgucauaaucguaauccuccuaucucuuaucgcagucggccuacuacucuacugcaaagcccgcuaaggacuaguguccaccugucccuccugggcugcuggauugucucguuuuccugccaaauaaacaggaucagcgcuuuacagaucuaaaaaaaaaaaaaaaaaaaaaaaaaaaaaaaaaaaaaaaaaaaaaaaaaaaaaaaaaaaaaaaaugcaucccccccccccccccccccccccccccccccaaaggcucuuuucagagccaccagaauu

SEQ ID NO: 5880 - RNA, 1829 nt, Artificial Sequence
  mRNA product Design e-3 comprising derived and/or modified sequence from HRSV(A2)__F-del_DSCav1_mut5 (opt1)
gggagacuuucccauucuguagcagaauuugguguugccuguggucuuggucccgcggagaagcuuaccauggagcugcucauccugaaggccaacgccaucaccaccauccugacggcggugaccuucugcuucgccagcggccagaacaucaccgaggaguucuaccaguccacgugcagcgccgucuccaagggguaccucagcgcccugcggaccggcugguacaccuccgugaucaccaucgagcugagcaacaucaaggagaacaagugcaacgggaccgacgccaaggugaagcucaucaagcaggagcuggacaaguacaagaacgcggucacggagcugcagcuccugaugcaguccaccccggcaaccggcuccggcuccgccaucgcgagcggcgucgccgugugcaaggugcugcaccucgagggggaggucaacaagaucaagagcgcccugcuguccaccaacaaggccguggugagccucuccggcugcggcgucagcgugcugaccuucaaggugcuggaccucaagaacuacaucgacaagcagcugcugcccauccugaacaagcagagcugcuccaucagcaacaucgagacggugaucgaguuccagcagaagaacaaccggcuccuggagaucacccgcgaguucagcgugaacgccggggucaccacccccguguccacguacaugcugaccaacagcgagcuccugucccugaucaacgacaugccgaucaccaacgaccagaagaagcucaugagcaacaacgugcagaucguccggcagcaguccuacagcaucaugugcaucaucaaggaggaggugcuggcguacgugguccagcugccccucuacggcgugaucgacacccccugcuggaagcugcacacgagcccccugugcaccaccaacaccaaggagggguccaacaucugccucacgcgcaccgaccggggcugguacugcgacaacgccggcagcgucuccuucuucccgcaggccgagaccugcaaggugcagagcaaccgcguguucugcgacaccaugaacucccggacgcugcccagcgagguaaaccucugcaacgucgacaucuucaaccccaaguacgacugcaagaucaugaccuccaagaccgacgugagcuccagcgugaucaccucccugggggccaucgucagcugcuacggcaagacgaagugcaccgccagcaacaagugccgggggaucaucaagaccuucuccaacggcugcgacuacgugagcaacaagggcguggacaccguguccgucgggaacacccuguacuacgugaacaagcaggagggcaagagccucuacgugaagggggagcccaucaucaacuucuacgacccgcuggucuuccccuccgacgaguucgacgcgagcaucucccaggugaacgagaagaucaaccagagccuggccuucauccgcaaguccgacgagcugcuccacaacgugaacgccggcaagagcacgaccaacaucaugaucaccaccaucaucaucgucaucaucgugauccugcugucccucaucgccguggggcugcugcucuacugcaaggcccggugaggacuaguguccaccugucccuccugggcugcuggauugucucguuuuccugccaaauaaacaggaucagcgcuuuacagaucuaaaaaaaaaaaaaaaaaaaaaaaaaaaaaaaaaaaaaaaaaaaaaaaaaaaaaaaaaaaaaaaaugcaucccccccccccccccccccccccccccccccaaaggcucuuuucagagccaccagaauu

SEQ ID NO: 5881 - RNA, 1829 nt, Artificial Sequence
  mRNA product Design e-3 comprising derived and/or modified sequence from HRSV(A2)__F-del_DSCav1_mut5 (opt1)
gggagacuuucccauucuguagcagaauuugguguugccuguggucuuggucccgcggagaagcuuaccauggagcugcucauccugaaggccaacgccaucaccaccauccugacggcggugaccuucugcuucgccagcggccagaacaucaccgaggaguucuaccaguccacgugcagcgccgucuccaagggguaccucagcgcccugcgcaccggcugguacaccuccgugaucaccaucgagcugagcaacaucaaggagaacaagugcaacgggaccgacgccaaggugaagcucaucaagcaggagcuggacaaguacaagaacgcggucacggagcugcagcuccugaugcaguccacccccgccaccggcagcggguccgccaucgccagcggcguggcggugugcaagguccugcaccucgagggcgaggugaacaagaucaaguccgcccugcugagcaccaacaaggccguggucucccucagcgggugcggcguguccgugcugacguucaagguccuggaccucaagaacuacaucgacaagcagcugcugccgauccucaacaagcagagcugcuccaucagcaacaucgagaccgugaucgaguuccagcagaagaacaaccggcugcuggagaucacccgcgaguucuccgugaacgccggggucaccacgcccgugagcaccuacaugcucaccaacagcgagcugcugucccucaucaacgacaugcccaucaccaacgaccagaagaagcugaugagcaacaacgugcagaucguccggcagcaguccuacagcaucaugugcaucaucaaggaggaggugcuggccuacgugguccagcucccccuguacggcgugaucgacacgccgugcuggaagcugcacaccagcccccucugcaccaccaacacgaaggagggguccaacaucugccugacccgcaccgaccggggcugguacugcgacaacgcgggcuccgugagcuucuucccccaggccgagaccugcaagguccaguccaaccgcguguucugcgacacgaugaacagccggacccuccccuccgaggucaaccugugcaacguggacaucuucaacccgaaguacgacugcaagaucaugaccagcaagaccgacguguccagcuccgucaucacgagccugggggccaucguguccugcuacggcaagaccaagugcaccgccagcaacaagugccgggggaucaucaagaccuucuccaacggcugcgacuacgugagcaacaagggcgucgacacggugagcguggggaacacccucuacuacgucaacaagcaggagggcaagucccuguacgugaagggggagcccaucaucaacuucuacgacccccugguguuccccagcgacgaguucgacgccuccaucagccaggucaacgagaagaucaaccagucccucgcguucauccgcaagagcgacgagcugcugcacaacgugaacgccggcaaguccaccaccaacaucaugaucaccacgaucaucaucgugaucaucgucauccuccugagccugaucgccguggggcuccugcuguacugcaaggcccggugaggacuaguguccaccugucccuccugggcugcuggauugucucguuuuccugccaaauaaacaggaucagcgcuuuacagaucuaaaaaaaaaaaaaaaaaaaaaaaaaaaaaaaaaaaaaaaaaaaaaaaaaaaaaaaaaaaaaaaaugcaucccccccccccccccccccccccccccccccaaaggcucuuuucagagccaccagaauu

SEQ ID NO: 5882 - RNA, 1829 nt, Artificial Sequence
  mRNA product Design e-3 comprising derived and/or modified sequence from HRSV(A2)__F-del_DSCav1_mut5 (opt2)
gggagacuuucccauucuguagcagaauuugguguugccuguggucuuggucccgcggagaagcuuaccauggagcuccucauccucaaggccaacgccaucaccaccauccucaccgccgucaccuucugcuucgccuccggccagaacaucaccgaggaguucuaccaguccaccugcuccgccgucuccaagggcuaccucuccgcccuccgcaccggcugguacaccuccgucaucaccaucgagcucuccaacaucaaggagaacaagugcaacggcaccgacgccaaggucaagcucaucaagcaggagcucgacaaguacaagaacgccgucaccgagcuccagcuccucaugcaguccacccccgccaccggcuccggcuccgccaucgccuccggcgucgccgucugcaagguccuccaccucgagggcgaggucaacaagaucaaguccgcccuccucuccaccaacaaggccgucgucucccucuccggcugcggcgucuccguccucaccuucaagguccucgaccucaagaacuacaucgacaagcagcuccuccccauccucaacaagcaguccugcuccaucuccaacaucgagaccgucaucgaguuccagcagaagaacaaccgccuccucgagaucacccgcgaguucuccgucaacgccggcgucaccacccccgucuccaccuacaugcucaccaacuccgagcuccucucccucaucaacgacaugcccaucaccaacgaccagaagaagcucauguccaacaacguccagaucguccgccagcaguccuacuccaucaugugcaucaucaaggaggagguccucgccuacgucguccagcucccccucuacggcgucaucgacacccccugcuggaagcuccacaccuccccccucugcaccaccaacaccaaggagggcuccaacaucugccucacccgcaccgaccgcggcugguacugcgacaacgccggcuccgucuccuucuucccccaggccgagaccugcaagguccaguccaaccgcgucuucugcgacaccaugaacucccgcacccuccccuccgaggucaaccucugcaacgucgacaucuucaaccccaaguacgacugcaagaucaugaccuccaagaccgacgucuccuccuccgucaucaccucccucggcgccaucgucuccugcuacggcaagaccaagugcaccgccuccaacaagugccgcggcaucaucaagaccuucuccaacggcugcgacuacgucuccaacaagggcgucgacaccgucuccgucggcaacacccucuacuacgucaacaagcaggagggcaagucccucuacgucaagggcgagcccaucaucaacuucuacgacccccucgucuuccccuccgacgaguucgacgccuccaucucccaggucaacgagaagaucaaccagucccucgccuucauccgcaaguccgacgagcuccuccacaacgucaacgccggcaaguccaccaccaacaucaugaucaccaccaucaucaucgucaucaucgucauccuccucucccucaucgccgucggccuccuccucuacugcaaggcccgcugaggacuaguguccaccugucccuccugggcugcuggauugucucguuuuccugccaaauaaacaggaucagcgcuuuacagaucuaaaaaaaaaaaaaaaaaaaaaaaaaaaaaaaaaaaaaaaaaaaaaaaaaaaaaaaaaaaaaaaaugcaucccccccccccccccccccccccccccccccaaaggcucuuuucagagccaccagaauu

SEQ ID NO: 5883 - RNA, 1829 nt, Artificial Sequence
  mRNA product Design e-3 comprising derived and/or modified sequence from HRSV(A2)__F-del_DSCav1_mut5 (opt3)
gggagacuuucccauucuguagcagaauuugguguugccuguggucuuggucccgcggagaagcuuaccauggagcugcucauccuuaaggccaacgcuauuaccacaauacugacugcagugacguucugcuuugccagcggccagaauaucaccgaagaguucuaccaauccacauguucugcggucucaaaaggguauuugagugcuuuaagaacuggaugguacaccagcguuauuacaaucgaacuguccaacauuaaggagaauaaaugcaacgguaccgacgccaaggugaaacuaaucaagcaggaacucgauaaguauaaaaaugcaguaacugagcugcagcuucugaugcagucuacacccgccaccggcucggggucagcuauagcaagcggaguggccgucuguaagguguugcaccucgagggcgaaguuaacaaaaucaagagugcucugcuguccacgaauaaagccguggucucucucagcgguugcgggguguccguauuaacuuuuaagguucuggaccuuaagaacuacauugauaaacaauugcugccuauccuaaauaagcagucauguaguauuagcaacaucgagaccgugauagaguuccagcagaaaaauaacaggcuccuggaaauuacacgggaguuuucugucaaugcgggagugacuaccccaguguccacauauaugcuuaccaacucagaacuguugagccucaucaaugacaugccgauuacgaacgaucaaaagaaacugaugaguaacaauguccagaucguucgccagcagucuuacuccaucaugugcauuauaaaggaggaaguguuagcauauguagugcaacugccccucuacggcgucaucgacacuccuuguuggaaacuucauacaagcccacugugcaccacuaacacaaaggagggcucgaauauuuguuugacccgaacggaucgugggugguacugcgacaacgccggaucuguguccuucuuuccccaggcugaaaccuguaagguucagucaaauagaguguucugcgauacaaugaacaguagaacucugccuagcgaggucaaucucugcaacguggacaucuuuaauccaaaauaugauuguaagauaaugaccuccaaaacagacguaucuagcucaguuauuaccagucugggugccaucguguccugcuacggcaagacuaaauguacagcaagcaacaagugcagggggaucauuaagaccuucucuaauggaugugauuaugucucaaacaaaggcguggacacugucaguguggguaauacgcuuuacuauguuaacaagcaagaggggaaaagccuguacgugaagggagaacccaucauuaauuuuuaugacccuuugguauucccauccgaugaguuugacgcuucuauaucgcaggucaacgagaaaaucaaccagagccucgccuucauucggaaguccgaugaacuguuacacaaugugaacgcgggcaagucaacaaccaauaucaugaucacuaccauuauaaucguuauuaucgugauucugcuaagucucaucgccgucggccugcuuuuguacugcaaagcacgcugaggacuaguguccaccugucccuccugggcugcuggauugucucguuuuccugccaaauaaacaggaucagcgcuuuacagaucuaaaaaaaaaaaaaaaaaaaaaaaaaaaaaaaaaaaaaaaaaaaaaaaaaaaaaaaaaaaaaaaaugcaucccccccccccccccccccccccccccccccaaaggcucuuuucagagccaccagaauu

SEQ ID NO: 5884 - RNA, 1829 nt, Artificial Sequence
  mRNA product Design e-3 comprising derived and/or modified sequence from HRSV(A2)__F-del_DSCav1_mut5 (opt4)
gggagacuuucccauucuguagcagaauuugguguugccuguggucuuggucccgcggagaagcuuaccauggagcugcugauccugaaggccaacgccaucaccaccauccugaccgccgugaccuucugcuucgccagcggccagaacaucaccgaggaguucuaccagagcaccugcagcgccgugagcaagggcuaccugagcgcccugagaaccggcugguacaccagcgugaucaccaucgagcugagcaacaucaaggagaacaagugcaacggcaccgacgccaaggugaagcugaucaagcaggagcuggacaaguacaagaacgccgugaccgagcugcagcugcugaugcagagcacccccgccaccggcagcggcagcgccaucgccagcggcguggccgugugcaaggugcugcaccuggagggcgaggugaacaagaucaagagcgcccugcugagcaccaacaaggccguggugagccugagcggcugcggcgugagcgugcugaccuucaaggugcuggaccugaagaacuacaucgacaagcagcugcugcccauccugaacaagcagagcugcagcaucagcaacaucgagaccgugaucgaguuccagcagaagaacaacagacugcuggagaucaccagagaguucagcgugaacgccggcgugaccacccccgugagcaccuacaugcugaccaacagcgagcugcugagccugaucaacgacaugcccaucaccaacgaccagaagaagcugaugagcaacaacgugcagaucgugagacagcagagcuacagcaucaugugcaucaucaaggaggaggugcuggccuacguggugcagcugccccuguacggcgugaucgacacccccugcuggaagcugcacaccagcccccugugcaccaccaacaccaaggagggcagcaacaucugccugaccagaaccgacagaggcugguacugcgacaacgccggcagcgugagcuucuucccccaggccgagaccugcaaggugcagagcaacagaguguucugcgacaccaugaacagcagaacccugcccagcgaggugaaccugugcaacguggacaucuucaaccccaaguacgacugcaagaucaugaccagcaagaccgacgugagcagcagcgugaucaccagccugggcgccaucgugagcugcuacggcaagaccaagugcaccgccagcaacaagugcagaggcaucaucaagaccuucagcaacggcugcgacuacgugagcaacaagggcguggacaccgugagcgugggcaacacccuguacuacgugaacaagcaggagggcaagagccuguacgugaagggcgagcccaucaucaacuucuacgacccccugguguuccccagcgacgaguucgacgccagcaucagccaggugaacgagaagaucaaccagagccuggccuucaucagaaagagcgacgagcugcugcacaacgugaacgccggcaagagcaccaccaacaucaugaucaccaccaucaucaucgugaucaucgugauccugcugagccugaucgccgugggccugcugcuguacugcaaggccagaugaggacuaguguccaccugucccuccugggcugcuggauugucucguuuuccugccaaauaaacaggaucagcgcuuuacagaucuaaaaaaaaaaaaaaaaaaaaaaaaaaaaaaaaaaaaaaaaaaaaaaaaaaaaaaaaaaaaaaaaugcaucccccccccccccccccccccccccccccccaaaggcucuuuucagagccaccagaauu

SEQ ID NO: 5885 - RNA, 1829 nt, Artificial Sequence
  mRNA product Design e-3 comprising derived and/or modified sequence from HRSV(A2)__F-del_DSCav1_mut5 (opt5)
gggagacuuucccauucuguagcagaauuugguguugccuguggucuuggucccgcggagaagcuuaccauggagcugcucauccugaaggccaacgcuauuaccacaauccuuacggccgugaccuucugcuuugcgagcggccagaauauuacagaagaguucuaccaauccaccuguucugcugucagcaaaggguaucuguccgcccucagaacaggaugguacaccucuguuaucacaauugaacugagcaacaucaaggagaauaaaugcaacggcaccgacgccaaggugaaacuuaucaagcaggaacuggauaaguauaaaaaugcugugacggagcuccagcugcugaugcaguccacccccgccacagggucuggaagcgcuauugccuccggcgucgcgguguguaagguucuccaccuggagggggaagugaacaaaaucaagagcgcccuucugucuaccaauaaagcugucgugucccucagcggaugcggcguuucugugcugacauuuaagguccuugaccugaagaacuacauugauaaacaacuccugccuauccugaauaagcaguccuguagcauuucuaacaucgagaccgugauugaguuccagcagaaaaauaaccggcuccuggaaaucacgcgcgaguuuuccgugaaugccggcgucacaaccccgguuagcacauauaugcuuaccaacuccgaacugcucucucugaucaaugacaugcccauuaccaacgaucaaaagaaacuuaugagcaacaaugugcagaucgugagacagcaguccuacagcauuaugugcaucauuaaggaggaaguccuggcuuaugugguucaacucccucuguacggggugaucgacacacccuguuggaaacugcauacgucuccucucugcaccacaaacaccaaggagggauccaauaucugucugacacggaccgaucgcggcugguacugcgacaacgccgggagcgucucuuucuuuccccaggcggaaacguguaaggugcagagcaauagaguuuucugcgauacaaugaacuccagaacccugccuucugaggugaaucucugcaacgucgacauuuuuaauccgaaauaugauuguaagaucaugaccagcaaaacagacguguccagcucugucauuaccucccugggagccaucgugagcugcuacggcaagacaaaauguacggcuucuaacaagugccgggggauuaucaagaccuucuccaauggaugugauuauguuagcaacaaaggcguggacacagucuccgugggcaauacccuuuacuauguuaacaagcaagaggggaaaucucuguacgugaagggagaacccaucauuaauuuuuaugacccucucgucuuccccagcgaugaguuugacgccuccaucucucaggugaacgagaaaauuaaccagagccuggcuuucauccgcaaguccgaugaacugcuccacaaugugaacgccggcaagagcacaaccaauauuaugaucacgaccauuaucaucguuauuaucgucauucugcuuucucugaucgccguggggcuccugcuguacugcaaagcuagaugaggacuaguguccaccugucccuccugggcugcuggauugucucguuuuccugccaaauaaacaggaucagcgcuuuacagaucuaaaaaaaaaaaaaaaaaaaaaaaaaaaaaaaaaaaaaaaaaaaaaaaaaaaaaaaaaaaaaaaaugcaucccccccccccccccccccccccccccccccaaaggcucuuuucagagccaccagaauu

SEQ ID NO: 5886 - RNA, 1829 nt, Artificial Sequence
  mRNA product Design e-3 comprising derived and/or modified sequence from HRSV(A2)__F-del_DSCav1_mut5 (opt6)
gggagacuuucccauucuguagcagaauuugguguugccuguggucuuggucccgcggagaagcuuaccauggaacuuuuaauacugaaagcaaaugccaucacaaccauacuaacugccgucacauucugcuuugcaucaggacaaaacauaacagaagaauuuuaccaauccacaugcucagcaguaucaaaaggauaucuaucggcacuuagaacuggaugguacacaaguguuauaacuauagaacucucaaacauaaaagaaaacaaaugcaauggaacagacgcaaaaguaaaacuaauaaaacaagaacucgauaaauauaaaaaugcaguaaccgaacuacaacuauuaaugcaaagcacacccgcaacaggcagcggaucagcaauagcaagcggagucgcaguauguaaaguacuacaucuagaaggagaagucaacaaaaucaaaucugcacuucuauccacaaacaaagcuguaguaucccuauccggaugcggagucucaguauuaacuuuuaaaguacuagaccuuaaaaacuacauagauaaacaacuauuaccaauacuaaauaaacaaucaugcagcauauccaauauagagacaguaauugaauuucaacaaaaaaacaacagauuacuagaaauuacucgugaauuuuccguaaaugccggagucacaacaccaguaucaaccuauaugcuaacaaacagcgaacuacuuagcuuaauaaaugacaugccaauaacaaaugaccaaaaaaaacuuaugucaaauaacguacaaaucgucagacaacaauccuacucuauaauguguauaauuaaagaagaaguccuagcauacguaguucaauuaccacucuauggaguaauagauacaccaugcuggaaacuacacacgucaccacuauguacaacaaacacaaaagaaggauccaauauaugccuaacaagaaccgacagaggcugguauugugacaacgcaggauccguuucauucuucccacaagcagaaaccuguaaaguacaaucuaauagaguauuuugcgacacaaugaacaguagaacacuaccaagcgagguuaaucuauguaacguagacauauucaauccaaaauaugauugcaaaauaaugacaucaaaaacagauguaucgucgaguguaauaacaagucugggagcuauaguaagcugcuacggcaagacgaaauguaccgcuucaaauaaaugcagaggaaucauuaaaacauucucgaacggaugcgacuacguaaguaauaaaggugucgacaccguaucaguagggaauacauuauacuacgucaacaaacaagaaggaaaaucucuauauguaaaaggagaaccaauaauaaauuucuaugacccucuaguauucccaucagaugaauuugacgcuuccauaucacaaguaaacgaaaaaaucaaucaaucuuuagcauucauacgaaaaagugaugaacuccuacacaacgucaacgcaggaaaaagcacaacaaauauaaugaucacaacaaucaucauaguaauaauaguaauacuacuaucauuaauagcaguaggauuauugcuuuacugcaaagcacgauagggacuaguguccaccugucccuccugggcugcuggauugucucguuuuccugccaaauaaacaggaucagcgcuuuacagaucuaaaaaaaaaaaaaaaaaaaaaaaaaaaaaaaaaaaaaaaaaaaaaaaaaaaaaaaaaaaaaaaaugcaucccccccccccccccccccccccccccccccaaaggcucuuuucagagccaccagaauu

SEQ ID NO: 5887 - RNA, 1829 nt, Artificial Sequence
  mRNA product Design e-3 comprising derived and/or modified sequence from HRSV(A2)__F-del_DSCav1_mut5 (opt11)
gggagacuuucccauucuguagcagaauuugguguugccuguggucuuggucccgcggagaagcuuaccauggaacuccucauccucaaagccaacgccauaaccacaauacucaccgccguaaccuucugcuuugcgucgggacaaaacaucaccgaagaguucuaccaauccacuugcuccgcaguaagcaaaggauaccucuccgcccugcgaaccgguugguacacaucagucaucacaaucgaacucucaaacauaaaagaaaacaaaugcaacggcaccgacgcaaaggucaaauuaaucaagcaagaacuagacaaauacaaaaacgccgucacagaacuccagcugcuaaugcagagcacacccgcaacuggcagcggauccgccaucgcaucaggagucgccgugugcaaaguccuacaccucgaaggagaagugaacaaaaucaaaucagcccuacucuccaccaacaaggccgucgucucccucuccggcugcggugucuccguccuaaccuucaaagugcuagaccucaagaacuacaucgacaaacaacuccuaccaauacucaacaagcaaucuugcuccaucuccaacaucgaaaccguaaucgaguuccaacagaagaacaaccgccuccucgaaaucacccgcgaguucucugucaacgcaggggucaccacucccgucuccacauacaugcucacaaacuccgaacuccucagccucaucaacgacaugcccauaaccaacgaccagaaaaagcuaaugagcaauaacguccaaaucguuagacaacaaaguuauuccaucaugugcaucaucaaagaagaaguccucgccuacgucguacaacucccccucuauggcgucaucgacacccccugcuggaaacugcacacaucaccccucugcaccacaaacaccaaagaaggcucaaacaucugccuaacucgcaccgaccgcggcugguacugcgacaacgccggcagcguaucauucuuuccccaagccgaaacaugcaaaguucaauccaaccgcgucuucugcgacacaaugaacuccagaacgcuccccagcgaagucaaccucuguaacguagacaucuucaacccuaaguacgacugcaaaaucaugaccuccaaaacugauguauccuccuccgucaucacaucccugggcgccaucgucagcugcuacggcaaaacaaaaugcacugccucaaacaaaugccgagguaucauaaagaccuucucaaacggaugcgauuacgucagcaacaaaggcgucgacaccgucagugucggcaacacccucuacuacgucaacaaacaagaaggaaaaucccucuacgucaaaggcgaacccaucaucaacuucuacgacccccucgucuuccccagcgacgaguucgacgccuccaucucacaagucaacgaaaagauaaaccaaucucuagccuucauccgcaaauccgaugaacuccugcauaacgucaacgccggcaaauccaccacaaacaucaugaucacuaccauaaucaucgucauaaucguaauccuccuaucucuuaucgcagucggccuacuacucuacugcaaagcccgcuaaggacuaguguccaccugucccuccugggcugcuggauugucucguuuuccugccaaauaaacaggaucagcgcuuuacagaucuaaaaaaaaaaaaaaaaaaaaaaaaaaaaaaaaaaaaaaaaaaaaaaaaaaaaaaaaaaaaaaaaugcaucccccccccccccccccccccccccccccccaaaggcucuuuucagagccaccagaauu

SEQ ID NO: 5888 - RNA, 1883 nt, Artificial Sequence
  mRNA product Design e-4 comprising derived and/or modified sequence from HRSV(A2)__F-del_DSCav1_mut5 (opt1)
gggagacuccugucgggcggaaguaggaggaguagaguuuaaaaacaguacucuuuuuccgguucgggacguaguugaagcaacgacaagccggauaaccgcucuugagacaggaagcuuaccauggagcugcucauccugaaggccaacgccaucaccaccauccugacggcggugaccuucugcuucgccagcggccagaacaucaccgaggaguucuaccaguccacgugcagcgccgucuccaagggguaccucagcgcccugcggaccggcugguacaccuccgugaucaccaucgagcugagcaacaucaaggagaacaagugcaacgggaccgacgccaaggugaagcucaucaagcaggagcuggacaaguacaagaacgcggucacggagcugcagcuccugaugcaguccaccccggcaaccggcuccggcuccgccaucgcgagcggcgucgccgugugcaaggugcugcaccucgagggggaggucaacaagaucaagagcgcccugcuguccaccaacaaggccguggugagccucuccggcugcggcgucagcgugcugaccuucaaggugcuggaccucaagaacuacaucgacaagcagcugcugcccauccugaacaagcagagcugcuccaucagcaacaucgagacggugaucgaguuccagcagaagaacaaccggcuccuggagaucacccgcgaguucagcgugaacgccggggucaccacccccguguccacguacaugcugaccaacagcgagcuccugucccugaucaacgacaugccgaucaccaacgaccagaagaagcucaugagcaacaacgugcagaucguccggcagcaguccuacagcaucaugugcaucaucaaggaggaggugcuggcguacgugguccagcugccccucuacggcgugaucgacacccccugcuggaagcugcacacgagcccccugugcaccaccaacaccaaggagggguccaacaucugccucacgcgcaccgaccggggcugguacugcgacaacgccggcagcgucuccuucuucccgcaggccgagaccugcaaggugcagagcaaccgcguguucugcgacaccaugaacucccggacgcugcccagcgagguaaaccucugcaacgucgacaucuucaaccccaaguacgacugcaagaucaugaccuccaagaccgacgugagcuccagcgugaucaccucccugggggccaucgucagcugcuacggcaagacgaagugcaccgccagcaacaagugccgggggaucaucaagaccuucuccaacggcugcgacuacgugagcaacaagggcguggacaccguguccgucgggaacacccuguacuacgugaacaagcaggagggcaagagccucuacgugaagggggagcccaucaucaacuucuacgacccgcuggucuuccccuccgacgaguucgacgcgagcaucucccaggugaacgagaagaucaaccagagccuggccuucauccgcaaguccgacgagcugcuccacaacgugaacgccggcaagagcacgaccaacaucaugaucaccaccaucaucaucgucaucaucgugauccugcugucccucaucgccguggggcugcugcucuacugcaaggcccggugaggacuaguguccaccugucccuccugggcugcuggauugucucguuuuccugccaaauaaacaggaucagcgcuuuacagaucuaaaaaaaaaaaaaaaaaaaaaaaaaaaaaaaaaaaaaaaaaaaaaaaaaaaaaaaaaaaaaaaaugcaucccccccccccccccccccccccccccccccaaaggcucuuuucagagccaccagaauu

SEQ ID NO: 5889 - RNA, 1883 nt, Artificial Sequence
  mRNA product Design e-4 comprising derived and/or modified sequence from HRSV(A2)__F-del_DSCav1_mut5 (opt1)
gggagacuccugucgggcggaaguaggaggaguagaguuuaaaaacaguacucuuuuuccgguucgggacguaguugaagcaacgacaagccggauaaccgcucuugagacaggaagcuuaccauggagcugcucauccugaaggccaacgccaucaccaccauccugacggcggugaccuucugcuucgccagcggccagaacaucaccgaggaguucuaccaguccacgugcagcgccgucuccaagggguaccucagcgcccugcgcaccggcugguacaccuccgugaucaccaucgagcugagcaacaucaaggagaacaagugcaacgggaccgacgccaaggugaagcucaucaagcaggagcuggacaaguacaagaacgcggucacggagcugcagcuccugaugcaguccacccccgccaccggcagcggguccgccaucgccagcggcguggcggugugcaagguccugcaccucgagggcgaggugaacaagaucaaguccgcccugcugagcaccaacaaggccguggucucccucagcgggugcggcguguccgugcugacguucaagguccuggaccucaagaacuacaucgacaagcagcugcugccgauccucaacaagcagagcugcuccaucagcaacaucgagaccgugaucgaguuccagcagaagaacaaccggcugcuggagaucacccgcgaguucuccgugaacgccggggucaccacgcccgugagcaccuacaugcucaccaacagcgagcugcugucccucaucaacgacaugcccaucaccaacgaccagaagaagcugaugagcaacaacgugcagaucguccggcagcaguccuacagcaucaugugcaucaucaaggaggaggugcuggccuacgugguccagcucccccuguacggcgugaucgacacgccgugcuggaagcugcacaccagcccccucugcaccaccaacacgaaggagggguccaacaucugccugacccgcaccgaccggggcugguacugcgacaacgcgggcuccgugagcuucuucccccaggccgagaccugcaagguccaguccaaccgcguguucugcgacacgaugaacagccggacccuccccuccgaggucaaccugugcaacguggacaucuucaacccgaaguacgacugcaagaucaugaccagcaagaccgacguguccagcuccgucaucacgagccugggggccaucguguccugcuacggcaagaccaagugcaccgccagcaacaagugccgggggaucaucaagaccuucuccaacggcugcgacuacgugagcaacaagggcgucgacacggugagcguggggaacacccucuacuacgucaacaagcaggagggcaagucccuguacgugaagggggagcccaucaucaacuucuacgacccccugguguuccccagcgacgaguucgacgccuccaucagccaggucaacgagaagaucaaccagucccucgcguucauccgcaagagcgacgagcugcugcacaacgugaacgccggcaaguccaccaccaacaucaugaucaccacgaucaucaucgugaucaucgucauccuccugagccugaucgccguggggcuccugcuguacugcaaggcccggugaggacuaguguccaccugucccuccugggcugcuggauugucucguuuuccugccaaauaaacaggaucagcgcuuuacagaucuaaaaaaaaaaaaaaaaaaaaaaaaaaaaaaaaaaaaaaaaaaaaaaaaaaaaaaaaaaaaaaaaugcaucccccccccccccccccccccccccccccccaaaggcucuuuucagagccaccagaauu

SEQ ID NO: 5890 - RNA, 1883 nt, Artificial Sequence
  mRNA product Design e-4 comprising derived and/or modified sequence from HRSV(A2)__F-del_DSCav1_mut5 (opt2)
gggagacuccugucgggcggaaguaggaggaguagaguuuaaaaacaguacucuuuuuccgguucgggacguaguugaagcaacgacaagccggauaaccgcucuugagacaggaagcuuaccauggagcuccucauccucaaggccaacgccaucaccaccauccucaccgccgucaccuucugcuucgccuccggccagaacaucaccgaggaguucuaccaguccaccugcuccgccgucuccaagggcuaccucuccgcccuccgcaccggcugguacaccuccgucaucaccaucgagcucuccaacaucaaggagaacaagugcaacggcaccgacgccaaggucaagcucaucaagcaggagcucgacaaguacaagaacgccgucaccgagcuccagcuccucaugcaguccacccccgccaccggcuccggcuccgccaucgccuccggcgucgccgucugcaagguccuccaccucgagggcgaggucaacaagaucaaguccgcccuccucuccaccaacaaggccgucgucucccucuccggcugcggcgucuccguccucaccuucaagguccucgaccucaagaacuacaucgacaagcagcuccuccccauccucaacaagcaguccugcuccaucuccaacaucgagaccgucaucgaguuccagcagaagaacaaccgccuccucgagaucacccgcgaguucuccgucaacgccggcgucaccacccccgucuccaccuacaugcucaccaacuccgagcuccucucccucaucaacgacaugcccaucaccaacgaccagaagaagcucauguccaacaacguccagaucguccgccagcaguccuacuccaucaugugcaucaucaaggaggagguccucgccuacgucguccagcucccccucuacggcgucaucgacacccccugcuggaagcuccacaccuccccccucugcaccaccaacaccaaggagggcuccaacaucugccucacccgcaccgaccgcggcugguacugcgacaacgccggcuccgucuccuucuucccccaggccgagaccugcaagguccaguccaaccgcgucuucugcgacaccaugaacucccgcacccuccccuccgaggucaaccucugcaacgucgacaucuucaaccccaaguacgacugcaagaucaugaccuccaagaccgacgucuccuccuccgucaucaccucccucggcgccaucgucuccugcuacggcaagaccaagugcaccgccuccaacaagugccgcggcaucaucaagaccuucuccaacggcugcgacuacgucuccaacaagggcgucgacaccgucuccgucggcaacacccucuacuacgucaacaagcaggagggcaagucccucuacgucaagggcgagcccaucaucaacuucuacgacccccucgucuuccccuccgacgaguucgacgccuccaucucccaggucaacgagaagaucaaccagucccucgccuucauccgcaaguccgacgagcuccuccacaacgucaacgccggcaaguccaccaccaacaucaugaucaccaccaucaucaucgucaucaucgucauccuccucucccucaucgccgucggccuccuccucuacugcaaggcccgcugaggacuaguguccaccugucccuccugggcugcuggauugucucguuuuccugccaaauaaacaggaucagcgcuuuacagaucuaaaaaaaaaaaaaaaaaaaaaaaaaaaaaaaaaaaaaaaaaaaaaaaaaaaaaaaaaaaaaaaaugcaucccccccccccccccccccccccccccccccaaaggcucuuuucagagccaccagaauu

SEQ ID NO: 5891 - RNA, 1883 nt, Artificial Sequence
  mRNA product Design e-4 comprising derived and/or modified sequence from HRSV(A2)__F-del_DSCav1_mut5 (opt3)
gggagacuccugucgggcggaaguaggaggaguagaguuuaaaaacaguacucuuuuuccgguucgggacguaguugaagcaacgacaagccggauaaccgcucuugagacaggaagcuuaccauggagcugcucauccuuaaggccaacgcuauuaccacaauacugacugcagugacguucugcuuugccagcggccagaauaucaccgaagaguucuaccaauccacauguucugcggucucaaaaggguauuugagugcuuuaagaacuggaugguacaccagcguuauuacaaucgaacuguccaacauuaaggagaauaaaugcaacgguaccgacgccaaggugaaacuaaucaagcaggaacucgauaaguauaaaaaugcaguaacugagcugcagcuucugaugcagucuacacccgccaccggcucggggucagcuauagcaagcggaguggccgucuguaagguguugcaccucgagggcgaaguuaacaaaaucaagagugcucugcuguccacgaauaaagccguggucucucucagcgguugcgggguguccguauuaacuuuuaagguucuggaccuuaagaacuacauugauaaacaauugcugccuauccuaaauaagcagucauguaguauuagcaacaucgagaccgugauagaguuccagcagaaaaauaacaggcuccuggaaauuacacgggaguuuucugucaaugcgggagugacuaccccaguguccacauauaugcuuaccaacucagaacuguugagccucaucaaugacaugccgauuacgaacgaucaaaagaaacugaugaguaacaauguccagaucguucgccagcagucuuacuccaucaugugcauuauaaaggaggaaguguuagcauauguagugcaacugccccucuacggcgucaucgacacuccuuguuggaaacuucauacaagcccacugugcaccacuaacacaaaggagggcucgaauauuuguuugacccgaacggaucgugggugguacugcgacaacgccggaucuguguccuucuuuccccaggcugaaaccuguaagguucagucaaauagaguguucugcgauacaaugaacaguagaacucugccuagcgaggucaaucucugcaacguggacaucuuuaauccaaaauaugauuguaagauaaugaccuccaaaacagacguaucuagcucaguuauuaccagucugggugccaucguguccugcuacggcaagacuaaauguacagcaagcaacaagugcagggggaucauuaagaccuucucuaauggaugugauuaugucucaaacaaaggcguggacacugucaguguggguaauacgcuuuacuauguuaacaagcaagaggggaaaagccuguacgugaagggagaacccaucauuaauuuuuaugacccuuugguauucccauccgaugaguuugacgcuucuauaucgcaggucaacgagaaaaucaaccagagccucgccuucauucggaaguccgaugaacuguuacacaaugugaacgcgggcaagucaacaaccaauaucaugaucacuaccauuauaaucguuauuaucgugauucugcuaagucucaucgccgucggccugcuuuuguacugcaaagcacgcugaggacuaguguccaccugucccuccugggcugcuggauugucucguuuuccugccaaauaaacaggaucagcgcuuuacagaucuaaaaaaaaaaaaaaaaaaaaaaaaaaaaaaaaaaaaaaaaaaaaaaaaaaaaaaaaaaaaaaaaugcaucccccccccccccccccccccccccccccccaaaggcucuuuucagagccaccagaauu

SEQ ID NO: 5892 - RNA, 1883 nt, Artificial Sequence
  mRNA product Design e-4 comprising derived and/or modified sequence from HRSV(A2)__F-del_DSCav1_mut5 (opt4)
gggagacuccugucgggcggaaguaggaggaguagaguuuaaaaacaguacucuuuuuccgguucgggacguaguugaagcaacgacaagccggauaaccgcucuugagacaggaagcuuaccauggagcugcugauccugaaggccaacgccaucaccaccauccugaccgccgugaccuucugcuucgccagcggccagaacaucaccgaggaguucuaccagagcaccugcagcgccgugagcaagggcuaccugagcgcccugagaaccggcugguacaccagcgugaucaccaucgagcugagcaacaucaaggagaacaagugcaacggcaccgacgccaaggugaagcugaucaagcaggagcuggacaaguacaagaacgccgugaccgagcugcagcugcugaugcagagcacccccgccaccggcagcggcagcgccaucgccagcggcguggccgugugcaaggugcugcaccuggagggcgaggugaacaagaucaagagcgcccugcugagcaccaacaaggccguggugagccugagcggcugcggcgugagcgugcugaccuucaaggugcuggaccugaagaacuacaucgacaagcagcugcugcccauccugaacaagcagagcugcagcaucagcaacaucgagaccgugaucgaguuccagcagaagaacaacagacugcuggagaucaccagagaguucagcgugaacgccggcgugaccacccccgugagcaccuacaugcugaccaacagcgagcugcugagccugaucaacgacaugcccaucaccaacgaccagaagaagcugaugagcaacaacgugcagaucgugagacagcagagcuacagcaucaugugcaucaucaaggaggaggugcuggccuacguggugcagcugccccuguacggcgugaucgacacccccugcuggaagcugcacaccagcccccugugcaccaccaacaccaaggagggcagcaacaucugccugaccagaaccgacagaggcugguacugcgacaacgccggcagcgugagcuucuucccccaggccgagaccugcaaggugcagagcaacagaguguucugcgacaccaugaacagcagaacccugcccagcgaggugaaccugugcaacguggacaucuucaaccccaaguacgacugcaagaucaugaccagcaagaccgacgugagcagcagcgugaucaccagccugggcgccaucgugagcugcuacggcaagaccaagugcaccgccagcaacaagugcagaggcaucaucaagaccuucagcaacggcugcgacuacgugagcaacaagggcguggacaccgugagcgugggcaacacccuguacuacgugaacaagcaggagggcaagagccuguacgugaagggcgagcccaucaucaacuucuacgacccccugguguuccccagcgacgaguucgacgccagcaucagccaggugaacgagaagaucaaccagagccuggccuucaucagaaagagcgacgagcugcugcacaacgugaacgccggcaagagcaccaccaacaucaugaucaccaccaucaucaucgugaucaucgugauccugcugagccugaucgccgugggccugcugcuguacugcaaggccagaugaggacuaguguccaccugucccuccugggcugcuggauugucucguuuuccugccaaauaaacaggaucagcgcuuuacagaucuaaaaaaaaaaaaaaaaaaaaaaaaaaaaaaaaaaaaaaaaaaaaaaaaaaaaaaaaaaaaaaaaugcaucccccccccccccccccccccccccccccccaaaggcucuuuucagagccaccagaauu

SEQ ID NO: 5893 - RNA, 1883 nt, Artificial Sequence
  mRNA product Design e-4 comprising derived and/or modified sequence from HRSV(A2)__F-del_DSCav1_mut5 (opt5)
gggagacuccugucgggcggaaguaggaggaguagaguuuaaaaacaguacucuuuuuccgguucgggacguaguugaagcaacgacaagccggauaaccgcucuugagacaggaagcuuaccauggagcugcucauccugaaggccaacgcuauuaccacaauccuuacggccgugaccuucugcuuugcgagcggccagaauauuacagaagaguucuaccaauccaccuguucugcugucagcaaaggguaucuguccgcccucagaacaggaugguacaccucuguuaucacaauugaacugagcaacaucaaggagaauaaaugcaacggcaccgacgccaaggugaaacuuaucaagcaggaacuggauaaguauaaaaaugcugugacggagcuccagcugcugaugcaguccacccccgccacagggucuggaagcgcuauugccuccggcgucgcgguguguaagguucuccaccuggagggggaagugaacaaaaucaagagcgcccuucugucuaccaauaaagcugucgugucccucagcggaugcggcguuucugugcugacauuuaagguccuugaccugaagaacuacauugauaaacaacuccugccuauccugaauaagcaguccuguagcauuucuaacaucgagaccgugauugaguuccagcagaaaaauaaccggcuccuggaaaucacgcgcgaguuuuccgugaaugccggcgucacaaccccgguuagcacauauaugcuuaccaacuccgaacugcucucucugaucaaugacaugcccauuaccaacgaucaaaagaaacuuaugagcaacaaugugcagaucgugagacagcaguccuacagcauuaugugcaucauuaaggaggaaguccuggcuuaugugguucaacucccucuguacggggugaucgacacacccuguuggaaacugcauacgucuccucucugcaccacaaacaccaaggagggauccaauaucugucugacacggaccgaucgcggcugguacugcgacaacgccgggagcgucucuuucuuuccccaggcggaaacguguaaggugcagagcaauagaguuuucugcgauacaaugaacuccagaacccugccuucugaggugaaucucugcaacgucgacauuuuuaauccgaaauaugauuguaagaucaugaccagcaaaacagacguguccagcucugucauuaccucccugggagccaucgugagcugcuacggcaagacaaaauguacggcuucuaacaagugccgggggauuaucaagaccuucuccaauggaugugauuauguuagcaacaaaggcguggacacagucuccgugggcaauacccuuuacuauguuaacaagcaagaggggaaaucucuguacgugaagggagaacccaucauuaauuuuuaugacccucucgucuuccccagcgaugaguuugacgccuccaucucucaggugaacgagaaaauuaaccagagccuggcuuucauccgcaaguccgaugaacugcuccacaaugugaacgccggcaagagcacaaccaauauuaugaucacgaccauuaucaucguuauuaucgucauucugcuuucucugaucgccguggggcuccugcuguacugcaaagcuagaugaggacuaguguccaccugucccuccugggcugcuggauugucucguuuuccugccaaauaaacaggaucagcgcuuuacagaucuaaaaaaaaaaaaaaaaaaaaaaaaaaaaaaaaaaaaaaaaaaaaaaaaaaaaaaaaaaaaaaaaugcaucccccccccccccccccccccccccccccccaaaggcucuuuucagagccaccagaauu

SEQ ID NO: 5894 - RNA, 1883 nt, Artificial Sequence
  mRNA product Design e-4 comprising derived and/or modified sequence from HRSV(A2)__F-del_DSCav1_mut5 (opt6)
gggagacuccugucgggcggaaguaggaggaguagaguuuaaaaacaguacucuuuuuccgguucgggacguaguugaagcaacgacaagccggauaaccgcucuugagacaggaagcuuaccauggaacuuuuaauacugaaagcaaaugccaucacaaccauacuaacugccgucacauucugcuuugcaucaggacaaaacauaacagaagaauuuuaccaauccacaugcucagcaguaucaaaaggauaucuaucggcacuuagaacuggaugguacacaaguguuauaacuauagaacucucaaacauaaaagaaaacaaaugcaauggaacagacgcaaaaguaaaacuaauaaaacaagaacucgauaaauauaaaaaugcaguaaccgaacuacaacuauuaaugcaaagcacacccgcaacaggcagcggaucagcaauagcaagcggagucgcaguauguaaaguacuacaucuagaaggagaagucaacaaaaucaaaucugcacuucuauccacaaacaaagcuguaguaucccuauccggaugcggagucucaguauuaacuuuuaaaguacuagaccuuaaaaacuacauagauaaacaacuauuaccaauacuaaauaaacaaucaugcagcauauccaauauagagacaguaauugaauuucaacaaaaaaacaacagauuacuagaaauuacucgugaauuuuccguaaaugccggagucacaacaccaguaucaaccuauaugcuaacaaacagcgaacuacuuagcuuaauaaaugacaugccaauaacaaaugaccaaaaaaaacuuaugucaaauaacguacaaaucgucagacaacaauccuacucuauaauguguauaauuaaagaagaaguccuagcauacguaguucaauuaccacucuauggaguaauagauacaccaugcuggaaacuacacacgucaccacuauguacaacaaacacaaaagaaggauccaauauaugccuaacaagaaccgacagaggcugguauugugacaacgcaggauccguuucauucuucccacaagcagaaaccuguaaaguacaaucuaauagaguauuuugcgacacaaugaacaguagaacacuaccaagcgagguuaaucuauguaacguagacauauucaauccaaaauaugauugcaaaauaaugacaucaaaaacagauguaucgucgaguguaauaacaagucugggagcuauaguaagcugcuacggcaagacgaaauguaccgcuucaaauaaaugcagaggaaucauuaaaacauucucgaacggaugcgacuacguaaguaauaaaggugucgacaccguaucaguagggaauacauuauacuacgucaacaaacaagaaggaaaaucucuauauguaaaaggagaaccaauaauaaauuucuaugacccucuaguauucccaucagaugaauuugacgcuuccauaucacaaguaaacgaaaaaaucaaucaaucuuuagcauucauacgaaaaagugaugaacuccuacacaacgucaacgcaggaaaaagcacaacaaauauaaugaucacaacaaucaucauaguaauaauaguaauacuacuaucauuaauagcaguaggauuauugcuuuacugcaaagcacgauagggacuaguguccaccugucccuccugggcugcuggauugucucguuuuccugccaaauaaacaggaucagcgcuuuacagaucuaaaaaaaaaaaaaaaaaaaaaaaaaaaaaaaaaaaaaaaaaaaaaaaaaaaaaaaaaaaaaaaaugcaucccccccccccccccccccccccccccccccaaaggcucuuuucagagccaccagaauu

SEQ ID NO: 5895 - RNA, 1883 nt, Artificial Sequence
  mRNA product Design e-4 comprising derived and/or modified sequence from HRSV(A2)__F-del_DSCav1_mut5 (opt11)
gggagacuccugucgggcggaaguaggaggaguagaguuuaaaaacaguacucuuuuuccgguucgggacguaguugaagcaacgacaagccggauaaccgcucuugagacaggaagcuuaccauggaacuccucauccucaaagccaacgccauaaccacaauacucaccgccguaaccuucugcuuugcgucgggacaaaacaucaccgaagaguucuaccaauccacuugcuccgcaguaagcaaaggauaccucuccgcccugcgaaccgguugguacacaucagucaucacaaucgaacucucaaacauaaaagaaaacaaaugcaacggcaccgacgcaaaggucaaauuaaucaagcaagaacuagacaaauacaaaaacgccgucacagaacuccagcugcuaaugcagagcacacccgcaacuggcagcggauccgccaucgcaucaggagucgccgugugcaaaguccuacaccucgaaggagaagugaacaaaaucaaaucagcccuacucuccaccaacaaggccgucgucucccucuccggcugcggugucuccguccuaaccuucaaagugcuagaccucaagaacuacaucgacaaacaacuccuaccaauacucaacaagcaaucuugcuccaucuccaacaucgaaaccguaaucgaguuccaacagaagaacaaccgccuccucgaaaucacccgcgaguucucugucaacgcaggggucaccacucccgucuccacauacaugcucacaaacuccgaacuccucagccucaucaacgacaugcccauaaccaacgaccagaaaaagcuaaugagcaauaacguccaaaucguuagacaacaaaguuauuccaucaugugcaucaucaaagaagaaguccucgccuacgucguacaacucccccucuauggcgucaucgacacccccugcuggaaacugcacacaucaccccucugcaccacaaacaccaaagaaggcucaaacaucugccuaacucgcaccgaccgcggcugguacugcgacaacgccggcagcguaucauucuuuccccaagccgaaacaugcaaaguucaauccaaccgcgucuucugcgacacaaugaacuccagaacgcuccccagcgaagucaaccucuguaacguagacaucuucaacccuaaguacgacugcaaaaucaugaccuccaaaacugauguauccuccuccgucaucacaucccugggcgccaucgucagcugcuacggcaaaacaaaaugcacugccucaaacaaaugccgagguaucauaaagaccuucucaaacggaugcgauuacgucagcaacaaaggcgucgacaccgucagugucggcaacacccucuacuacgucaacaaacaagaaggaaaaucccucuacgucaaaggcgaacccaucaucaacuucuacgacccccucgucuuccccagcgacgaguucgacgccuccaucucacaagucaacgaaaagauaaaccaaucucuagccuucauccgcaaauccgaugaacuccugcauaacgucaacgccggcaaauccaccacaaacaucaugaucacuaccauaaucaucgucauaaucguaauccuccuaucucuuaucgcagucggccuacuacucuacugcaaagcccgcuaaggacuaguguccaccugucccuccugggcugcuggauugucucguuuuccugccaaauaaacaggaucagcgcuuuacagaucuaaaaaaaaaaaaaaaaaaaaaaaaaaaaaaaaaaaaaaaaaaaaaaaaaaaaaaaaaaaaaaaaugcaucccccccccccccccccccccccccccccccaaaggcucuuuucagagccaccagaauu

SEQ ID NO: 5896 - RNA, 1850 nt, Artificial Sequence
  mRNA product Design e-5 comprising derived and/or modified sequence from HRSV(A2)__F-del_DSCav1_mut5 (opt1)
gggagagcggcucggccauuuugucccagucaguccggaggcugcggcugcagaaguaccgccugcggaguaacugcaaagaagcuuaccauggagcugcucauccugaaggccaacgccaucaccaccauccugacggcggugaccuucugcuucgccagcggccagaacaucaccgaggaguucuaccaguccacgugcagcgccgucuccaagggguaccucagcgcccugcggaccggcugguacaccuccgugaucaccaucgagcugagcaacaucaaggagaacaagugcaacgggaccgacgccaaggugaagcucaucaagcaggagcuggacaaguacaagaacgcggucacggagcugcagcuccugaugcaguccaccccggcaaccggcuccggcuccgccaucgcgagcggcgucgccgugugcaaggugcugcaccucgagggggaggucaacaagaucaagagcgcccugcuguccaccaacaaggccguggugagccucuccggcugcggcgucagcgugcugaccuucaaggugcuggaccucaagaacuacaucgacaagcagcugcugcccauccugaacaagcagagcugcuccaucagcaacaucgagacggugaucgaguuccagcagaagaacaaccggcuccuggagaucacccgcgaguucagcgugaacgccggggucaccacccccguguccacguacaugcugaccaacagcgagcuccugucccugaucaacgacaugccgaucaccaacgaccagaagaagcucaugagcaacaacgugcagaucguccggcagcaguccuacagcaucaugugcaucaucaaggaggaggugcuggcguacgugguccagcugccccucuacggcgugaucgacacccccugcuggaagcugcacacgagcccccugugcaccaccaacaccaaggagggguccaacaucugccucacgcgcaccgaccggggcugguacugcgacaacgccggcagcgucuccuucuucccgcaggccgagaccugcaaggugcagagcaaccgcguguucugcgacaccaugaacucccggacgcugcccagcgagguaaaccucugcaacgucgacaucuucaaccccaaguacgacugcaagaucaugaccuccaagaccgacgugagcuccagcgugaucaccucccugggggccaucgucagcugcuacggcaagacgaagugcaccgccagcaacaagugccgggggaucaucaagaccuucuccaacggcugcgacuacgugagcaacaagggcguggacaccguguccgucgggaacacccuguacuacgugaacaagcaggagggcaagagccucuacgugaagggggagcccaucaucaacuucuacgacccgcuggucuuccccuccgacgaguucgacgcgagcaucucccaggugaacgagaagaucaaccagagccuggccuucauccgcaaguccgacgagcugcuccacaacgugaacgccggcaagagcacgaccaacaucaugaucaccaccaucaucaucgucaucaucgugauccugcugucccucaucgccguggggcugcugcucuacugcaaggcccggugaggacuaguguccaccugucccuccugggcugcuggauugucucguuuuccugccaaauaaacaggaucagcgcuuuacagaucuaaaaaaaaaaaaaaaaaaaaaaaaaaaaaaaaaaaaaaaaaaaaaaaaaaaaaaaaaaaaaaaaugcaucccccccccccccccccccccccccccccccaaaggcucuuuucagagccaccagaauu

SEQ ID NO: 5897 - RNA, 1850 nt, Artificial Sequence
  mRNA product Design e-5 comprising derived and/or modified sequence from HRSV(A2)__F-del_DSCav1_mut5 (opt1)
gggagagcggcucggccauuuugucccagucaguccggaggcugcggcugcagaaguaccgccugcggaguaacugcaaagaagcuuaccauggagcugcucauccugaaggccaacgccaucaccaccauccugacggcggugaccuucugcuucgccagcggccagaacaucaccgaggaguucuaccaguccacgugcagcgccgucuccaagggguaccucagcgcccugcgcaccggcugguacaccuccgugaucaccaucgagcugagcaacaucaaggagaacaagugcaacgggaccgacgccaaggugaagcucaucaagcaggagcuggacaaguacaagaacgcggucacggagcugcagcuccugaugcaguccacccccgccaccggcagcggguccgccaucgccagcggcguggcggugugcaagguccugcaccucgagggcgaggugaacaagaucaaguccgcccugcugagcaccaacaaggccguggucucccucagcgggugcggcguguccgugcugacguucaagguccuggaccucaagaacuacaucgacaagcagcugcugccgauccucaacaagcagagcugcuccaucagcaacaucgagaccgugaucgaguuccagcagaagaacaaccggcugcuggagaucacccgcgaguucuccgugaacgccggggucaccacgcccgugagcaccuacaugcucaccaacagcgagcugcugucccucaucaacgacaugcccaucaccaacgaccagaagaagcugaugagcaacaacgugcagaucguccggcagcaguccuacagcaucaugugcaucaucaaggaggaggugcuggccuacgugguccagcucccccuguacggcgugaucgacacgccgugcuggaagcugcacaccagcccccucugcaccaccaacacgaaggagggguccaacaucugccugacccgcaccgaccggggcugguacugcgacaacgcgggcuccgugagcuucuucccccaggccgagaccugcaagguccaguccaaccgcguguucugcgacacgaugaacagccggacccuccccuccgaggucaaccugugcaacguggacaucuucaacccgaaguacgacugcaagaucaugaccagcaagaccgacguguccagcuccgucaucacgagccugggggccaucguguccugcuacggcaagaccaagugcaccgccagcaacaagugccgggggaucaucaagaccuucuccaacggcugcgacuacgugagcaacaagggcgucgacacggugagcguggggaacacccucuacuacgucaacaagcaggagggcaagucccuguacgugaagggggagcccaucaucaacuucuacgacccccugguguuccccagcgacgaguucgacgccuccaucagccaggucaacgagaagaucaaccagucccucgcguucauccgcaagagcgacgagcugcugcacaacgugaacgccggcaaguccaccaccaacaucaugaucaccacgaucaucaucgugaucaucgucauccuccugagccugaucgccguggggcuccugcuguacugcaaggcccggugaggacuaguguccaccugucccuccugggcugcuggauugucucguuuuccugccaaauaaacaggaucagcgcuuuacagaucuaaaaaaaaaaaaaaaaaaaaaaaaaaaaaaaaaaaaaaaaaaaaaaaaaaaaaaaaaaaaaaaaugcaucccccccccccccccccccccccccccccccaaaggcucuuuucagagccaccagaauu

SEQ ID NO: 5898 - RNA, 1850 nt, Artificial Sequence
  mRNA product Design e-5 comprising derived and/or modified sequence from HRSV(A2)__F-del_DSCav1_mut5 (opt2)
gggagagcggcucggccauuuugucccagucaguccggaggcugcggcugcagaaguaccgccugcggaguaacugcaaagaagcuuaccauggagcuccucauccucaaggccaacgccaucaccaccauccucaccgccgucaccuucugcuucgccuccggccagaacaucaccgaggaguucuaccaguccaccugcuccgccgucuccaagggcuaccucuccgcccuccgcaccggcugguacaccuccgucaucaccaucgagcucuccaacaucaaggagaacaagugcaacggcaccgacgccaaggucaagcucaucaagcaggagcucgacaaguacaagaacgccgucaccgagcuccagcuccucaugcaguccacccccgccaccggcuccggcuccgccaucgccuccggcgucgccgucugcaagguccuccaccucgagggcgaggucaacaagaucaaguccgcccuccucuccaccaacaaggccgucgucucccucuccggcugcggcgucuccguccucaccuucaagguccucgaccucaagaacuacaucgacaagcagcuccuccccauccucaacaagcaguccugcuccaucuccaacaucgagaccgucaucgaguuccagcagaagaacaaccgccuccucgagaucacccgcgaguucuccgucaacgccggcgucaccacccccgucuccaccuacaugcucaccaacuccgagcuccucucccucaucaacgacaugcccaucaccaacgaccagaagaagcucauguccaacaacguccagaucguccgccagcaguccuacuccaucaugugcaucaucaaggaggagguccucgccuacgucguccagcucccccucuacggcgucaucgacacccccugcuggaagcuccacaccuccccccucugcaccaccaacaccaaggagggcuccaacaucugccucacccgcaccgaccgcggcugguacugcgacaacgccggcuccgucuccuucuucccccaggccgagaccugcaagguccaguccaaccgcgucuucugcgacaccaugaacucccgcacccuccccuccgaggucaaccucugcaacgucgacaucuucaaccccaaguacgacugcaagaucaugaccuccaagaccgacgucuccuccuccgucaucaccucccucggcgccaucgucuccugcuacggcaagaccaagugcaccgccuccaacaagugccgcggcaucaucaagaccuucuccaacggcugcgacuacgucuccaacaagggcgucgacaccgucuccgucggcaacacccucuacuacgucaacaagcaggagggcaagucccucuacgucaagggcgagcccaucaucaacuucuacgacccccucgucuuccccuccgacgaguucgacgccuccaucucccaggucaacgagaagaucaaccagucccucgccuucauccgcaaguccgacgagcuccuccacaacgucaacgccggcaaguccaccaccaacaucaugaucaccaccaucaucaucgucaucaucgucauccuccucucccucaucgccgucggccuccuccucuacugcaaggcccgcugaggacuaguguccaccugucccuccugggcugcuggauugucucguuuuccugccaaauaaacaggaucagcgcuuuacagaucuaaaaaaaaaaaaaaaaaaaaaaaaaaaaaaaaaaaaaaaaaaaaaaaaaaaaaaaaaaaaaaaaugcaucccccccccccccccccccccccccccccccaaaggcucuuuucagagccaccagaauu

SEQ ID NO: 5899 - RNA, 1850 nt, Artificial Sequence
  mRNA product Design e-5 comprising derived and/or modified sequence from HRSV(A2)__F-del_DSCav1_mut5 (opt3)
gggagagcggcucggccauuuugucccagucaguccggaggcugcggcugcagaaguaccgccugcggaguaacugcaaagaagcuuaccauggagcugcucauccuuaaggccaacgcuauuaccacaauacugacugcagugacguucugcuuugccagcggccagaauaucaccgaagaguucuaccaauccacauguucugcggucucaaaaggguauuugagugcuuuaagaacuggaugguacaccagcguuauuacaaucgaacuguccaacauuaaggagaauaaaugcaacgguaccgacgccaaggugaaacuaaucaagcaggaacucgauaaguauaaaaaugcaguaacugagcugcagcuucugaugcagucuacacccgccaccggcucggggucagcuauagcaagcggaguggccgucuguaagguguugcaccucgagggcgaaguuaacaaaaucaagagugcucugcuguccacgaauaaagccguggucucucucagcgguugcgggguguccguauuaacuuuuaagguucuggaccuuaagaacuacauugauaaacaauugcugccuauccuaaauaagcagucauguaguauuagcaacaucgagaccgugauagaguuccagcagaaaaauaacaggcuccuggaaauuacacgggaguuuucugucaaugcgggagugacuaccccaguguccacauauaugcuuaccaacucagaacuguugagccucaucaaugacaugccgauuacgaacgaucaaaagaaacugaugaguaacaauguccagaucguucgccagcagucuuacuccaucaugugcauuauaaaggaggaaguguuagcauauguagugcaacugccccucuacggcgucaucgacacuccuuguuggaaacuucauacaagcccacugugcaccacuaacacaaaggagggcucgaauauuuguuugacccgaacggaucgugggugguacugcgacaacgccggaucuguguccuucuuuccccaggcugaaaccuguaagguucagucaaauagaguguucugcgauacaaugaacaguagaacucugccuagcgaggucaaucucugcaacguggacaucuuuaauccaaaauaugauuguaagauaaugaccuccaaaacagacguaucuagcucaguuauuaccagucugggugccaucguguccugcuacggcaagacuaaauguacagcaagcaacaagugcagggggaucauuaagaccuucucuaauggaugugauuaugucucaaacaaaggcguggacacugucaguguggguaauacgcuuuacuauguuaacaagcaagaggggaaaagccuguacgugaagggagaacccaucauuaauuuuuaugacccuuugguauucccauccgaugaguuugacgcuucuauaucgcaggucaacgagaaaaucaaccagagccucgccuucauucggaaguccgaugaacuguuacacaaugugaacgcgggcaagucaacaaccaauaucaugaucacuaccauuauaaucguuauuaucgugauucugcuaagucucaucgccgucggccugcuuuuguacugcaaagcacgcugaggacuaguguccaccugucccuccugggcugcuggauugucucguuuuccugccaaauaaacaggaucagcgcuuuacagaucuaaaaaaaaaaaaaaaaaaaaaaaaaaaaaaaaaaaaaaaaaaaaaaaaaaaaaaaaaaaaaaaaugcaucccccccccccccccccccccccccccccccaaaggcucuuuucagagccaccagaauu

SEQ ID NO: 5900 - RNA, 1850 nt, Artificial Sequence
  mRNA product Design e-5 comprising derived and/or modified sequence from HRSV(A2)__F-del_DSCav1_mut5 (opt4)
gggagagcggcucggccauuuugucccagucaguccggaggcugcggcugcagaaguaccgccugcggaguaacugcaaagaagcuuaccauggagcugcugauccugaaggccaacgccaucaccaccauccugaccgccgugaccuucugcuucgccagcggccagaacaucaccgaggaguucuaccagagcaccugcagcgccgugagcaagggcuaccugagcgcccugagaaccggcugguacaccagcgugaucaccaucgagcugagcaacaucaaggagaacaagugcaacggcaccgacgccaaggugaagcugaucaagcaggagcuggacaaguacaagaacgccgugaccgagcugcagcugcugaugcagagcacccccgccaccggcagcggcagcgccaucgccagcggcguggccgugugcaaggugcugcaccuggagggcgaggugaacaagaucaagagcgcccugcugagcaccaacaaggccguggugagccugagcggcugcggcgugagcgugcugaccuucaaggugcuggaccugaagaacuacaucgacaagcagcugcugcccauccugaacaagcagagcugcagcaucagcaacaucgagaccgugaucgaguuccagcagaagaacaacagacugcuggagaucaccagagaguucagcgugaacgccggcgugaccacccccgugagcaccuacaugcugaccaacagcgagcugcugagccugaucaacgacaugcccaucaccaacgaccagaagaagcugaugagcaacaacgugcagaucgugagacagcagagcuacagcaucaugugcaucaucaaggaggaggugcuggccuacguggugcagcugccccuguacggcgugaucgacacccccugcuggaagcugcacaccagcccccugugcaccaccaacaccaaggagggcagcaacaucugccugaccagaaccgacagaggcugguacugcgacaacgccggcagcgugagcuucuucccccaggccgagaccugcaaggugcagagcaacagaguguucugcgacaccaugaacagcagaacccugcccagcgaggugaaccugugcaacguggacaucuucaaccccaaguacgacugcaagaucaugaccagcaagaccgacgugagcagcagcgugaucaccagccugggcgccaucgugagcugcuacggcaagaccaagugcaccgccagcaacaagugcagaggcaucaucaagaccuucagcaacggcugcgacuacgugagcaacaagggcguggacaccgugagcgugggcaacacccuguacuacgugaacaagcaggagggcaagagccuguacgugaagggcgagcccaucaucaacuucuacgacccccugguguuccccagcgacgaguucgacgccagcaucagccaggugaacgagaagaucaaccagagccuggccuucaucagaaagagcgacgagcugcugcacaacgugaacgccggcaagagcaccaccaacaucaugaucaccaccaucaucaucgugaucaucgugauccugcugagccugaucgccgugggccugcugcuguacugcaaggccagaugaggacuaguguccaccugucccuccugggcugcuggauugucucguuuuccugccaaauaaacaggaucagcgcuuuacagaucuaaaaaaaaaaaaaaaaaaaaaaaaaaaaaaaaaaaaaaaaaaaaaaaaaaaaaaaaaaaaaaaaugcaucccccccccccccccccccccccccccccccaaaggcucuuuucagagccaccagaauu

SEQ ID NO: 5901 - RNA, 1850 nt, Artificial Sequence
  mRNA product Design e-5 comprising derived and/or modified sequence from HRSV(A2)__F-del_DSCav1_mut5 (opt5)
gggagagcggcucggccauuuugucccagucaguccggaggcugcggcugcagaaguaccgccugcggaguaacugcaaagaagcuuaccauggagcugcucauccugaaggccaacgcuauuaccacaauccuuacggccgugaccuucugcuuugcgagcggccagaauauuacagaagaguucuaccaauccaccuguucugcugucagcaaaggguaucuguccgcccucagaacaggaugguacaccucuguuaucacaauugaacugagcaacaucaaggagaauaaaugcaacggcaccgacgccaaggugaaacuuaucaagcaggaacuggauaaguauaaaaaugcugugacggagcuccagcugcugaugcaguccacccccgccacagggucuggaagcgcuauugccuccggcgucgcgguguguaagguucuccaccuggagggggaagugaacaaaaucaagagcgcccuucugucuaccaauaaagcugucgugucccucagcggaugcggcguuucugugcugacauuuaagguccuugaccugaagaacuacauugauaaacaacuccugccuauccugaauaagcaguccuguagcauuucuaacaucgagaccgugauugaguuccagcagaaaaauaaccggcuccuggaaaucacgcgcgaguuuuccgugaaugccggcgucacaaccccgguuagcacauauaugcuuaccaacuccgaacugcucucucugaucaaugacaugcccauuaccaacgaucaaaagaaacuuaugagcaacaaugugcagaucgugagacagcaguccuacagcauuaugugcaucauuaaggaggaaguccuggcuuaugugguucaacucccucuguacggggugaucgacacacccuguuggaaacugcauacgucuccucucugcaccacaaacaccaaggagggauccaauaucugucugacacggaccgaucgcggcugguacugcgacaacgccgggagcgucucuuucuuuccccaggcggaaacguguaaggugcagagcaauagaguuuucugcgauacaaugaacuccagaacccugccuucugaggugaaucucugcaacgucgacauuuuuaauccgaaauaugauuguaagaucaugaccagcaaaacagacguguccagcucugucauuaccucccugggagccaucgugagcugcuacggcaagacaaaauguacggcuucuaacaagugccgggggauuaucaagaccuucuccaauggaugugauuauguuagcaacaaaggcguggacacagucuccgugggcaauacccuuuacuauguuaacaagcaagaggggaaaucucuguacgugaagggagaacccaucauuaauuuuuaugacccucucgucuuccccagcgaugaguuugacgccuccaucucucaggugaacgagaaaauuaaccagagccuggcuuucauccgcaaguccgaugaacugcuccacaaugugaacgccggcaagagcacaaccaauauuaugaucacgaccauuaucaucguuauuaucgucauucugcuuucucugaucgccguggggcuccugcuguacugcaaagcuagaugaggacuaguguccaccugucccuccugggcugcuggauugucucguuuuccugccaaauaaacaggaucagcgcuuuacagaucuaaaaaaaaaaaaaaaaaaaaaaaaaaaaaaaaaaaaaaaaaaaaaaaaaaaaaaaaaaaaaaaaugcaucccccccccccccccccccccccccccccccaaaggcucuuuucagagccaccagaauu

SEQ ID NO: 5902 - RNA, 1850 nt, Artificial Sequence
  mRNA product Design e-5 comprising derived and/or modified sequence from HRSV(A2)__F-del_DSCav1_mut5 (opt6)
gggagagcggcucggccauuuugucccagucaguccggaggcugcggcugcagaaguaccgccugcggaguaacugcaaagaagcuuaccauggaacuuuuaauacugaaagcaaaugccaucacaaccauacuaacugccgucacauucugcuuugcaucaggacaaaacauaacagaagaauuuuaccaauccacaugcucagcaguaucaaaaggauaucuaucggcacuuagaacuggaugguacacaaguguuauaacuauagaacucucaaacauaaaagaaaacaaaugcaauggaacagacgcaaaaguaaaacuaauaaaacaagaacucgauaaauauaaaaaugcaguaaccgaacuacaacuauuaaugcaaagcacacccgcaacaggcagcggaucagcaauagcaagcggagucgcaguauguaaaguacuacaucuagaaggagaagucaacaaaaucaaaucugcacuucuauccacaaacaaagcuguaguaucccuauccggaugcggagucucaguauuaacuuuuaaaguacuagaccuuaaaaacuacauagauaaacaacuauuaccaauacuaaauaaacaaucaugcagcauauccaauauagagacaguaauugaauuucaacaaaaaaacaacagauuacuagaaauuacucgugaauuuuccguaaaugccggagucacaacaccaguaucaaccuauaugcuaacaaacagcgaacuacuuagcuuaauaaaugacaugccaauaacaaaugaccaaaaaaaacuuaugucaaauaacguacaaaucgucagacaacaauccuacucuauaauguguauaauuaaagaagaaguccuagcauacguaguucaauuaccacucuauggaguaauagauacaccaugcuggaaacuacacacgucaccacuauguacaacaaacacaaaagaaggauccaauauaugccuaacaagaaccgacagaggcugguauugugacaacgcaggauccguuucauucuucccacaagcagaaaccuguaaaguacaaucuaauagaguauuuugcgacacaaugaacaguagaacacuaccaagcgagguuaaucuauguaacguagacauauucaauccaaaauaugauugcaaaauaaugacaucaaaaacagauguaucgucgaguguaauaacaagucugggagcuauaguaagcugcuacggcaagacgaaauguaccgcuucaaauaaaugcagaggaaucauuaaaacauucucgaacggaugcgacuacguaaguaauaaaggugucgacaccguaucaguagggaauacauuauacuacgucaacaaacaagaaggaaaaucucuauauguaaaaggagaaccaauaauaaauuucuaugacccucuaguauucccaucagaugaauuugacgcuuccauaucacaaguaaacgaaaaaaucaaucaaucuuuagcauucauacgaaaaagugaugaacuccuacacaacgucaacgcaggaaaaagcacaacaaauauaaugaucacaacaaucaucauaguaauaauaguaauacuacuaucauuaauagcaguaggauuauugcuuuacugcaaagcacgauagggacuaguguccaccugucccuccugggcugcuggauugucucguuuuccugccaaauaaacaggaucagcgcuuuacagaucuaaaaaaaaaaaaaaaaaaaaaaaaaaaaaaaaaaaaaaaaaaaaaaaaaaaaaaaaaaaaaaaaugcaucccccccccccccccccccccccccccccccaaaggcucuuuucagagccaccagaauu

SEQ ID NO: 5903 - RNA, 1850 nt, Artificial Sequence
  mRNA product Design e-5 comprising derived and/or modified sequence from HRSV(A2)__F-del_DSCav1_mut5 (opt11)
gggagagcggcucggccauuuugucccagucaguccggaggcugcggcugcagaaguaccgccugcggaguaacugcaaagaagcuuaccauggaacuccucauccucaaagccaacgccauaaccacaauacucaccgccguaaccuucugcuuugcgucgggacaaaacaucaccgaagaguucuaccaauccacuugcuccgcaguaagcaaaggauaccucuccgcccugcgaaccgguugguacacaucagucaucacaaucgaacucucaaacauaaaagaaaacaaaugcaacggcaccgacgcaaaggucaaauuaaucaagcaagaacuagacaaauacaaaaacgccgucacagaacuccagcugcuaaugcagagcacacccgcaacuggcagcggauccgccaucgcaucaggagucgccgugugcaaaguccuacaccucgaaggagaagugaacaaaaucaaaucagcccuacucuccaccaacaaggccgucgucucccucuccggcugcggugucuccguccuaaccuucaaagugcuagaccucaagaacuacaucgacaaacaacuccuaccaauacucaacaagcaaucuugcuccaucuccaacaucgaaaccguaaucgaguuccaacagaagaacaaccgccuccucgaaaucacccgcgaguucucugucaacgcaggggucaccacucccgucuccacauacaugcucacaaacuccgaacuccucagccucaucaacgacaugcccauaaccaacgaccagaaaaagcuaaugagcaauaacguccaaaucguuagacaacaaaguuauuccaucaugugcaucaucaaagaagaaguccucgccuacgucguacaacucccccucuauggcgucaucgacacccccugcuggaaacugcacacaucaccccucugcaccacaaacaccaaagaaggcucaaacaucugccuaacucgcaccgaccgcggcugguacugcgacaacgccggcagcguaucauucuuuccccaagccgaaacaugcaaaguucaauccaaccgcgucuucugcgacacaaugaacuccagaacgcuccccagcgaagucaaccucuguaacguagacaucuucaacccuaaguacgacugcaaaaucaugaccuccaaaacugauguauccuccuccgucaucacaucccugggcgccaucgucagcugcuacggcaaaacaaaaugcacugccucaaacaaaugccgagguaucauaaagaccuucucaaacggaugcgauuacgucagcaacaaaggcgucgacaccgucagugucggcaacacccucuacuacgucaacaaacaagaaggaaaaucccucuacgucaaaggcgaacccaucaucaacuucuacgacccccucgucuuccccagcgacgaguucgacgccuccaucucacaagucaacgaaaagauaaaccaaucucuagccuucauccgcaaauccgaugaacuccugcauaacgucaacgccggcaaauccaccacaaacaucaugaucacuaccauaaucaucgucauaaucguaauccuccuaucucuuaucgcagucggccuacuacucuacugcaaagcccgcuaaggacuaguguccaccugucccuccugggcugcuggauugucucguuuuccugccaaauaaacaggaucagcgcuuuacagaucuaaaaaaaaaaaaaaaaaaaaaaaaaaaaaaaaaaaaaaaaaaaaaaaaaaaaaaaaaaaaaaaaugcaucccccccccccccccccccccccccccccccaaaggcucuuuucagagccaccagaauu

SEQ ID NO: 5904 - RNA, 1917 nt, Artificial Sequence
  mRNA product Design e-6 comprising derived and/or modified sequence from HRSV(A2)__F-del_DSCav1_mut5 (opt1)
gggagagcggcucggccauuuugucccagucaguccggaggcugcggcugcagaaguaccgccugcggaguaacugcaaagaagcuuaccauggagcugcucauccugaaggccaacgccaucaccaccauccugacggcggugaccuucugcuucgccagcggccagaacaucaccgaggaguucuaccaguccacgugcagcgccgucuccaagggguaccucagcgcccugcggaccggcugguacaccuccgugaucaccaucgagcugagcaacaucaaggagaacaagugcaacgggaccgacgccaaggugaagcucaucaagcaggagcuggacaaguacaagaacgcggucacggagcugcagcuccugaugcaguccaccccggcaaccggcuccggcuccgccaucgcgagcggcgucgccgugugcaaggugcugcaccucgagggggaggucaacaagaucaagagcgcccugcuguccaccaacaaggccguggugagccucuccggcugcggcgucagcgugcugaccuucaaggugcuggaccucaagaacuacaucgacaagcagcugcugcccauccugaacaagcagagcugcuccaucagcaacaucgagacggugaucgaguuccagcagaagaacaaccggcuccuggagaucacccgcgaguucagcgugaacgccggggucaccacccccguguccacguacaugcugaccaacagcgagcuccugucccugaucaacgacaugccgaucaccaacgaccagaagaagcucaugagcaacaacgugcagaucguccggcagcaguccuacagcaucaugugcaucaucaaggaggaggugcuggcguacgugguccagcugccccucuacggcgugaucgacacccccugcuggaagcugcacacgagcccccugugcaccaccaacaccaaggagggguccaacaucugccucacgcgcaccgaccggggcugguacugcgacaacgccggcagcgucuccuucuucccgcaggccgagaccugcaaggugcagagcaaccgcguguucugcgacaccaugaacucccggacgcugcccagcgagguaaaccucugcaacgucgacaucuucaaccccaaguacgacugcaagaucaugaccuccaagaccgacgugagcuccagcgugaucaccucccugggggccaucgucagcugcuacggcaagacgaagugcaccgccagcaacaagugccgggggaucaucaagaccuucuccaacggcugcgacuacgugagcaacaagggcguggacaccguguccgucgggaacacccuguacuacgugaacaagcaggagggcaagagccucuacgugaagggggagcccaucaucaacuucuacgacccgcuggucuuccccuccgacgaguucgacgcgagcaucucccaggugaacgagaagaucaaccagagccuggccuucauccgcaaguccgacgagcugcuccacaacgugaacgccggcaagagcacgaccaacaucaugaucaccaccaucaucaucgucaucaucgugauccugcugucccucaucgccguggggcugcugcucuacugcaaggcccggugaggacuaguacuggcugcaucucccuuuccucuguccuccauccuucucccaggauggugaagggggaccugguacccagugauccccaccccaggauccuaaaucaugacuuaccugcuaauaaaaacucauuggaaaagugagaagaucuaaaaaaaaaaaaaaaaaaaaaaaaaaaaaaaaaaaaaaaaaaaaaaaaaaaaaaaaaaaaaaaaugcaucccccccccccccccccccccccccccccccaaaggcucuuuucagagccaccagaauu

SEQ ID NO: 5905 - RNA, 1917 nt, Artificial Sequence
  mRNA product Design e-6 comprising derived and/or modified sequence from HRSV(A2)__F-del_DSCav1_mut5 (opt1)
gggagagcggcucggccauuuugucccagucaguccggaggcugcggcugcagaaguaccgccugcggaguaacugcaaagaagcuuaccauggagcugcucauccugaaggccaacgccaucaccaccauccugacggcggugaccuucugcuucgccagcggccagaacaucaccgaggaguucuaccaguccacgugcagcgccgucuccaagggguaccucagcgcccugcgcaccggcugguacaccuccgugaucaccaucgagcugagcaacaucaaggagaacaagugcaacgggaccgacgccaaggugaagcucaucaagcaggagcuggacaaguacaagaacgcggucacggagcugcagcuccugaugcaguccacccccgccaccggcagcggguccgccaucgccagcggcguggcggugugcaagguccugcaccucgagggcgaggugaacaagaucaaguccgcccugcugagcaccaacaaggccguggucucccucagcgggugcggcguguccgugcugacguucaagguccuggaccucaagaacuacaucgacaagcagcugcugccgauccucaacaagcagagcugcuccaucagcaacaucgagaccgugaucgaguuccagcagaagaacaaccggcugcuggagaucacccgcgaguucuccgugaacgccggggucaccacgcccgugagcaccuacaugcucaccaacagcgagcugcugucccucaucaacgacaugcccaucaccaacgaccagaagaagcugaugagcaacaacgugcagaucguccggcagcaguccuacagcaucaugugcaucaucaaggaggaggugcuggccuacgugguccagcucccccuguacggcgugaucgacacgccgugcuggaagcugcacaccagcccccucugcaccaccaacacgaaggagggguccaacaucugccugacccgcaccgaccggggcugguacugcgacaacgcgggcuccgugagcuucuucccccaggccgagaccugcaagguccaguccaaccgcguguucugcgacacgaugaacagccggacccuccccuccgaggucaaccugugcaacguggacaucuucaacccgaaguacgacugcaagaucaugaccagcaagaccgacguguccagcuccgucaucacgagccugggggccaucguguccugcuacggcaagaccaagugcaccgccagcaacaagugccgggggaucaucaagaccuucuccaacggcugcgacuacgugagcaacaagggcgucgacacggugagcguggggaacacccucuacuacgucaacaagcaggagggcaagucccuguacgugaagggggagcccaucaucaacuucuacgacccccugguguuccccagcgacgaguucgacgccuccaucagccaggucaacgagaagaucaaccagucccucgcguucauccgcaagagcgacgagcugcugcacaacgugaacgccggcaaguccaccaccaacaucaugaucaccacgaucaucaucgugaucaucgucauccuccugagccugaucgccguggggcuccugcuguacugcaaggcccggugaggacuaguacuggcugcaucucccuuuccucuguccuccauccuucucccaggauggugaagggggaccugguacccagugauccccaccccaggauccuaaaucaugacuuaccugcuaauaaaaacucauuggaaaagugagaagaucuaaaaaaaaaaaaaaaaaaaaaaaaaaaaaaaaaaaaaaaaaaaaaaaaaaaaaaaaaaaaaaaaugcaucccccccccccccccccccccccccccccccaaaggcucuuuucagagccaccagaauu

SEQ ID NO: 5906 - RNA, 1917 nt, Artificial Sequence
  mRNA product Design e-6 comprising derived and/or modified sequence from HRSV(A2)__F-del_DSCav1_mut5 (opt2)
gggagagcggcucggccauuuugucccagucaguccggaggcugcggcugcagaaguaccgccugcggaguaacugcaaagaagcuuaccauggagcuccucauccucaaggccaacgccaucaccaccauccucaccgccgucaccuucugcuucgccuccggccagaacaucaccgaggaguucuaccaguccaccugcuccgccgucuccaagggcuaccucuccgcccuccgcaccggcugguacaccuccgucaucaccaucgagcucuccaacaucaaggagaacaagugcaacggcaccgacgccaaggucaagcucaucaagcaggagcucgacaaguacaagaacgccgucaccgagcuccagcuccucaugcaguccacccccgccaccggcuccggcuccgccaucgccuccggcgucgccgucugcaagguccuccaccucgagggcgaggucaacaagaucaaguccgcccuccucuccaccaacaaggccgucgucucccucuccggcugcggcgucuccguccucaccuucaagguccucgaccucaagaacuacaucgacaagcagcuccuccccauccucaacaagcaguccugcuccaucuccaacaucgagaccgucaucgaguuccagcagaagaacaaccgccuccucgagaucacccgcgaguucuccgucaacgccggcgucaccacccccgucuccaccuacaugcucaccaacuccgagcuccucucccucaucaacgacaugcccaucaccaacgaccagaagaagcucauguccaacaacguccagaucguccgccagcaguccuacuccaucaugugcaucaucaaggaggagguccucgccuacgucguccagcucccccucuacggcgucaucgacacccccugcuggaagcuccacaccuccccccucugcaccaccaacaccaaggagggcuccaacaucugccucacccgcaccgaccgcggcugguacugcgacaacgccggcuccgucuccuucuucccccaggccgagaccugcaagguccaguccaaccgcgucuucugcgacaccaugaacucccgcacccuccccuccgaggucaaccucugcaacgucgacaucuucaaccccaaguacgacugcaagaucaugaccuccaagaccgacgucuccuccuccgucaucaccucccucggcgccaucgucuccugcuacggcaagaccaagugcaccgccuccaacaagugccgcggcaucaucaagaccuucuccaacggcugcgacuacgucuccaacaagggcgucgacaccgucuccgucggcaacacccucuacuacgucaacaagcaggagggcaagucccucuacgucaagggcgagcccaucaucaacuucuacgacccccucgucuuccccuccgacgaguucgacgccuccaucucccaggucaacgagaagaucaaccagucccucgccuucauccgcaaguccgacgagcuccuccacaacgucaacgccggcaaguccaccaccaacaucaugaucaccaccaucaucaucgucaucaucgucauccuccucucccucaucgccgucggccuccuccucuacugcaaggcccgcugaggacuaguacuggcugcaucucccuuuccucuguccuccauccuucucccaggauggugaagggggaccugguacccagugauccccaccccaggauccuaaaucaugacuuaccugcuaauaaaaacucauuggaaaagugagaagaucuaaaaaaaaaaaaaaaaaaaaaaaaaaaaaaaaaaaaaaaaaaaaaaaaaaaaaaaaaaaaaaaaugcaucccccccccccccccccccccccccccccccaaaggcucuuuucagagccaccagaauu

SEQ ID NO: 5907 - RNA, 1917 nt, Artificial Sequence
  mRNA product Design e-6 comprising derived and/or modified sequence from HRSV(A2)__F-del_DSCav1_mut5 (opt3)
gggagagcggcucggccauuuugucccagucaguccggaggcugcggcugcagaaguaccgccugcggaguaacugcaaagaagcuuaccauggagcugcucauccuuaaggccaacgcuauuaccacaauacugacugcagugacguucugcuuugccagcggccagaauaucaccgaagaguucuaccaauccacauguucugcggucucaaaaggguauuugagugcuuuaagaacuggaugguacaccagcguuauuacaaucgaacuguccaacauuaaggagaauaaaugcaacgguaccgacgccaaggugaaacuaaucaagcaggaacucgauaaguauaaaaaugcaguaacugagcugcagcuucugaugcagucuacacccgccaccggcucggggucagcuauagcaagcggaguggccgucuguaagguguugcaccucgagggcgaaguuaacaaaaucaagagugcucugcuguccacgaauaaagccguggucucucucagcgguugcgggguguccguauuaacuuuuaagguucuggaccuuaagaacuacauugauaaacaauugcugccuauccuaaauaagcagucauguaguauuagcaacaucgagaccgugauagaguuccagcagaaaaauaacaggcuccuggaaauuacacgggaguuuucugucaaugcgggagugacuaccccaguguccacauauaugcuuaccaacucagaacuguugagccucaucaaugacaugccgauuacgaacgaucaaaagaaacugaugaguaacaauguccagaucguucgccagcagucuuacuccaucaugugcauuauaaaggaggaaguguuagcauauguagugcaacugccccucuacggcgucaucgacacuccuuguuggaaacuucauacaagcccacugugcaccacuaacacaaaggagggcucgaauauuuguuugacccgaacggaucgugggugguacugcgacaacgccggaucuguguccuucuuuccccaggcugaaaccuguaagguucagucaaauagaguguucugcgauacaaugaacaguagaacucugccuagcgaggucaaucucugcaacguggacaucuuuaauccaaaauaugauuguaagauaaugaccuccaaaacagacguaucuagcucaguuauuaccagucugggugccaucguguccugcuacggcaagacuaaauguacagcaagcaacaagugcagggggaucauuaagaccuucucuaauggaugugauuaugucucaaacaaaggcguggacacugucaguguggguaauacgcuuuacuauguuaacaagcaagaggggaaaagccuguacgugaagggagaacccaucauuaauuuuuaugacccuuugguauucccauccgaugaguuugacgcuucuauaucgcaggucaacgagaaaaucaaccagagccucgccuucauucggaaguccgaugaacuguuacacaaugugaacgcgggcaagucaacaaccaauaucaugaucacuaccauuauaaucguuauuaucgugauucugcuaagucucaucgccgucggccugcuuuuguacugcaaagcacgcugaggacuaguacuggcugcaucucccuuuccucuguccuccauccuucucccaggauggugaagggggaccugguacccagugauccccaccccaggauccuaaaucaugacuuaccugcuaauaaaaacucauuggaaaagugagaagaucuaaaaaaaaaaaaaaaaaaaaaaaaaaaaaaaaaaaaaaaaaaaaaaaaaaaaaaaaaaaaaaaaugcaucccccccccccccccccccccccccccccccaaaggcucuuuucagagccaccagaauu

SEQ ID NO: 5908 - RNA, 1917 nt, Artificial Sequence
  mRNA product Design e-6 comprising derived and/or modified sequence from HRSV(A2)__F-del_DSCav1_mut5 (opt4)
gggagagcggcucggccauuuugucccagucaguccggaggcugcggcugcagaaguaccgccugcggaguaacugcaaagaagcuuaccauggagcugcugauccugaaggccaacgccaucaccaccauccugaccgccgugaccuucugcuucgccagcggccagaacaucaccgaggaguucuaccagagcaccugcagcgccgugagcaagggcuaccugagcgcccugagaaccggcugguacaccagcgugaucaccaucgagcugagcaacaucaaggagaacaagugcaacggcaccgacgccaaggugaagcugaucaagcaggagcuggacaaguacaagaacgccgugaccgagcugcagcugcugaugcagagcacccccgccaccggcagcggcagcgccaucgccagcggcguggccgugugcaaggugcugcaccuggagggcgaggugaacaagaucaagagcgcccugcugagcaccaacaaggccguggugagccugagcggcugcggcgugagcgugcugaccuucaaggugcuggaccugaagaacuacaucgacaagcagcugcugcccauccugaacaagcagagcugcagcaucagcaacaucgagaccgugaucgaguuccagcagaagaacaacagacugcuggagaucaccagagaguucagcgugaacgccggcgugaccacccccgugagcaccuacaugcugaccaacagcgagcugcugagccugaucaacgacaugcccaucaccaacgaccagaagaagcugaugagcaacaacgugcagaucgugagacagcagagcuacagcaucaugugcaucaucaaggaggaggugcuggccuacguggugcagcugccccuguacggcgugaucgacacccccugcuggaagcugcacaccagcccccugugcaccaccaacaccaaggagggcagcaacaucugccugaccagaaccgacagaggcugguacugcgacaacgccggcagcgugagcuucuucccccaggccgagaccugcaaggugcagagcaacagaguguucugcgacaccaugaacagcagaacccugcccagcgaggugaaccugugcaacguggacaucuucaaccccaaguacgacugcaagaucaugaccagcaagaccgacgugagcagcagcgugaucaccagccugggcgccaucgugagcugcuacggcaagaccaagugcaccgccagcaacaagugcagaggcaucaucaagaccuucagcaacggcugcgacuacgugagcaacaagggcguggacaccgugagcgugggcaacacccuguacuacgugaacaagcaggagggcaagagccuguacgugaagggcgagcccaucaucaacuucuacgacccccugguguuccccagcgacgaguucgacgccagcaucagccaggugaacgagaagaucaaccagagccuggccuucaucagaaagagcgacgagcugcugcacaacgugaacgccggcaagagcaccaccaacaucaugaucaccaccaucaucaucgugaucaucgugauccugcugagccugaucgccgugggccugcugcuguacugcaaggccagaugaggacuaguacuggcugcaucucccuuuccucuguccuccauccuucucccaggauggugaagggggaccugguacccagugauccccaccccaggauccuaaaucaugacuuaccugcuaauaaaaacucauuggaaaagugagaagaucuaaaaaaaaaaaaaaaaaaaaaaaaaaaaaaaaaaaaaaaaaaaaaaaaaaaaaaaaaaaaaaaaugcaucccccccccccccccccccccccccccccccaaaggcucuuuucagagccaccagaauu

SEQ ID NO: 5909 - RNA, 1917 nt, Artificial Sequence
  mRNA product Design e-6 comprising derived and/or modified sequence from HRSV(A2)__F-del_DSCav1_mut5 (opt5)
gggagagcggcucggccauuuugucccagucaguccggaggcugcggcugcagaaguaccgccugcggaguaacugcaaagaagcuuaccauggagcugcucauccugaaggccaacgcuauuaccacaauccuuacggccgugaccuucugcuuugcgagcggccagaauauuacagaagaguucuaccaauccaccuguucugcugucagcaaaggguaucuguccgcccucagaacaggaugguacaccucuguuaucacaauugaacugagcaacaucaaggagaauaaaugcaacggcaccgacgccaaggugaaacuuaucaagcaggaacuggauaaguauaaaaaugcugugacggagcuccagcugcugaugcaguccacccccgccacagggucuggaagcgcuauugccuccggcgucgcgguguguaagguucuccaccuggagggggaagugaacaaaaucaagagcgcccuucugucuaccaauaaagcugucgugucccucagcggaugcggcguuucugugcugacauuuaagguccuugaccugaagaacuacauugauaaacaacuccugccuauccugaauaagcaguccuguagcauuucuaacaucgagaccgugauugaguuccagcagaaaaauaaccggcuccuggaaaucacgcgcgaguuuuccgugaaugccggcgucacaaccccgguuagcacauauaugcuuaccaacuccgaacugcucucucugaucaaugacaugcccauuaccaacgaucaaaagaaacuuaugagcaacaaugugcagaucgugagacagcaguccuacagcauuaugugcaucauuaaggaggaaguccuggcuuaugugguucaacucccucuguacggggugaucgacacacccuguuggaaacugcauacgucuccucucugcaccacaaacaccaaggagggauccaauaucugucugacacggaccgaucgcggcugguacugcgacaacgccgggagcgucucuuucuuuccccaggcggaaacguguaaggugcagagcaauagaguuuucugcgauacaaugaacuccagaacccugccuucugaggugaaucucugcaacgucgacauuuuuaauccgaaauaugauuguaagaucaugaccagcaaaacagacguguccagcucugucauuaccucccugggagccaucgugagcugcuacggcaagacaaaauguacggcuucuaacaagugccgggggauuaucaagaccuucuccaauggaugugauuauguuagcaacaaaggcguggacacagucuccgugggcaauacccuuuacuauguuaacaagcaagaggggaaaucucuguacgugaagggagaacccaucauuaauuuuuaugacccucucgucuuccccagcgaugaguuugacgccuccaucucucaggugaacgagaaaauuaaccagagccuggcuuucauccgcaaguccgaugaacugcuccacaaugugaacgccggcaagagcacaaccaauauuaugaucacgaccauuaucaucguuauuaucgucauucugcuuucucugaucgccguggggcuccugcuguacugcaaagcuagaugaggacuaguacuggcugcaucucccuuuccucuguccuccauccuucucccaggauggugaagggggaccugguacccagugauccccaccccaggauccuaaaucaugacuuaccugcuaauaaaaacucauuggaaaagugagaagaucuaaaaaaaaaaaaaaaaaaaaaaaaaaaaaaaaaaaaaaaaaaaaaaaaaaaaaaaaaaaaaaaaugcaucccccccccccccccccccccccccccccccaaaggcucuuuucagagccaccagaauu

SEQ ID NO: 5910 - RNA, 1917 nt, Artificial Sequence
  mRNA product Design e-6 comprising derived and/or modified sequence from HRSV(A2)__F-del_DSCav1_mut5 (opt6)
gggagagcggcucggccauuuugucccagucaguccggaggcugcggcugcagaaguaccgccugcggaguaacugcaaagaagcuuaccauggaacuuuuaauacugaaagcaaaugccaucacaaccauacuaacugccgucacauucugcuuugcaucaggacaaaacauaacagaagaauuuuaccaauccacaugcucagcaguaucaaaaggauaucuaucggcacuuagaacuggaugguacacaaguguuauaacuauagaacucucaaacauaaaagaaaacaaaugcaauggaacagacgcaaaaguaaaacuaauaaaacaagaacucgauaaauauaaaaaugcaguaaccgaacuacaacuauuaaugcaaagcacacccgcaacaggcagcggaucagcaauagcaagcggagucgcaguauguaaaguacuacaucuagaaggagaagucaacaaaaucaaaucugcacuucuauccacaaacaaagcuguaguaucccuauccggaugcggagucucaguauuaacuuuuaaaguacuagaccuuaaaaacuacauagauaaacaacuauuaccaauacuaaauaaacaaucaugcagcauauccaauauagagacaguaauugaauuucaacaaaaaaacaacagauuacuagaaauuacucgugaauuuuccguaaaugccggagucacaacaccaguaucaaccuauaugcuaacaaacagcgaacuacuuagcuuaauaaaugacaugccaauaacaaaugaccaaaaaaaacuuaugucaaauaacguacaaaucgucagacaacaauccuacucuauaauguguauaauuaaagaagaaguccuagcauacguaguucaauuaccacucuauggaguaauagauacaccaugcuggaaacuacacacgucaccacuauguacaacaaacacaaaagaaggauccaauauaugccuaacaagaaccgacagaggcugguauugugacaacgcaggauccguuucauucuucccacaagcagaaaccuguaaaguacaaucuaauagaguauuuugcgacacaaugaacaguagaacacuaccaagcgagguuaaucuauguaacguagacauauucaauccaaaauaugauugcaaaauaaugacaucaaaaacagauguaucgucgaguguaauaacaagucugggagcuauaguaagcugcuacggcaagacgaaauguaccgcuucaaauaaaugcagaggaaucauuaaaacauucucgaacggaugcgacuacguaaguaauaaaggugucgacaccguaucaguagggaauacauuauacuacgucaacaaacaagaaggaaaaucucuauauguaaaaggagaaccaauaauaaauuucuaugacccucuaguauucccaucagaugaauuugacgcuuccauaucacaaguaaacgaaaaaaucaaucaaucuuuagcauucauacgaaaaagugaugaacuccuacacaacgucaacgcaggaaaaagcacaacaaauauaaugaucacaacaaucaucauaguaauaauaguaauacuacuaucauuaauagcaguaggauuauugcuuuacugcaaagcacgauagggacuaguacuggcugcaucucccuuuccucuguccuccauccuucucccaggauggugaagggggaccugguacccagugauccccaccccaggauccuaaaucaugacuuaccugcuaauaaaaacucauuggaaaagugagaagaucuaaaaaaaaaaaaaaaaaaaaaaaaaaaaaaaaaaaaaaaaaaaaaaaaaaaaaaaaaaaaaaaaugcaucccccccccccccccccccccccccccccccaaaggcucuuuucagagccaccagaauu

SEQ ID NO: 5911 - RNA, 1917 nt, Artificial Sequence
  mRNA product Design e-6 comprising derived and/or modified sequence from HRSV(A2)__F-del_DSCav1_mut5 (opt11)
gggagagcggcucggccauuuugucccagucaguccggaggcugcggcugcagaaguaccgccugcggaguaacugcaaagaagcuuaccauggaacuccucauccucaaagccaacgccauaaccacaauacucaccgccguaaccuucugcuuugcgucgggacaaaacaucaccgaagaguucuaccaauccacuugcuccgcaguaagcaaaggauaccucuccgcccugcgaaccgguugguacacaucagucaucacaaucgaacucucaaacauaaaagaaaacaaaugcaacggcaccgacgcaaaggucaaauuaaucaagcaagaacuagacaaauacaaaaacgccgucacagaacuccagcugcuaaugcagagcacacccgcaacuggcagcggauccgccaucgcaucaggagucgccgugugcaaaguccuacaccucgaaggagaagugaacaaaaucaaaucagcccuacucuccaccaacaaggccgucgucucccucuccggcugcggugucuccguccuaaccuucaaagugcuagaccucaagaacuacaucgacaaacaacuccuaccaauacucaacaagcaaucuugcuccaucuccaacaucgaaaccguaaucgaguuccaacagaagaacaaccgccuccucgaaaucacccgcgaguucucugucaacgcaggggucaccacucccgucuccacauacaugcucacaaacuccgaacuccucagccucaucaacgacaugcccauaaccaacgaccagaaaaagcuaaugagcaauaacguccaaaucguuagacaacaaaguuauuccaucaugugcaucaucaaagaagaaguccucgccuacgucguacaacucccccucuauggcgucaucgacacccccugcuggaaacugcacacaucaccccucugcaccacaaacaccaaagaaggcucaaacaucugccuaacucgcaccgaccgcggcugguacugcgacaacgccggcagcguaucauucuuuccccaagccgaaacaugcaaaguucaauccaaccgcgucuucugcgacacaaugaacuccagaacgcuccccagcgaagucaaccucuguaacguagacaucuucaacccuaaguacgacugcaaaaucaugaccuccaaaacugauguauccuccuccgucaucacaucccugggcgccaucgucagcugcuacggcaaaacaaaaugcacugccucaaacaaaugccgagguaucauaaagaccuucucaaacggaugcgauuacgucagcaacaaaggcgucgacaccgucagugucggcaacacccucuacuacgucaacaaacaagaaggaaaaucccucuacgucaaaggcgaacccaucaucaacuucuacgacccccucgucuuccccagcgacgaguucgacgccuccaucucacaagucaacgaaaagauaaaccaaucucuagccuucauccgcaaauccgaugaacuccugcauaacgucaacgccggcaaauccaccacaaacaucaugaucacuaccauaaucaucgucauaaucguaauccuccuaucucuuaucgcagucggccuacuacucuacugcaaagcccgcuaaggacuaguacuggcugcaucucccuuuccucuguccuccauccuucucccaggauggugaagggggaccugguacccagugauccccaccccaggauccuaaaucaugacuuaccugcuaauaaaaacucauuggaaaagugagaagaucuaaaaaaaaaaaaaaaaaaaaaaaaaaaaaaaaaaaaaaaaaaaaaaaaaaaaaaaaaaaaaaaaugcaucccccccccccccccccccccccccccccccaaaggcucuuuucagagccaccagaauu

SEQ ID NO: 5912 - RNA, 2133 nt, Artificial Sequence
  mRNA product Design f-1 comprising derived and/or modified sequence from HRSV(A2)__F-del_DSCav1_mut5 (opt1)
gggagagcggcucggccauuuugucccagucaguccggaggcugcggcugcagaaguaccgccugcggaguaacugcaaagaagcuuaccauggagcugcucauccugaaggccaacgccaucaccaccauccugacggcggugaccuucugcuucgccagcggccagaacaucaccgaggaguucuaccaguccacgugcagcgccgucuccaagggguaccucagcgcccugcggaccggcugguacaccuccgugaucaccaucgagcugagcaacaucaaggagaacaagugcaacgggaccgacgccaaggugaagcucaucaagcaggagcuggacaaguacaagaacgcggucacggagcugcagcuccugaugcaguccaccccggcaaccggcuccggcuccgccaucgcgagcggcgucgccgugugcaaggugcugcaccucgagggggaggucaacaagaucaagagcgcccugcuguccaccaacaaggccguggugagccucuccggcugcggcgucagcgugcugaccuucaaggugcuggaccucaagaacuacaucgacaagcagcugcugcccauccugaacaagcagagcugcuccaucagcaacaucgagacggugaucgaguuccagcagaagaacaaccggcuccuggagaucacccgcgaguucagcgugaacgccggggucaccacccccguguccacguacaugcugaccaacagcgagcuccugucccugaucaacgacaugccgaucaccaacgaccagaagaagcucaugagcaacaacgugcagaucguccggcagcaguccuacagcaucaugugcaucaucaaggaggaggugcuggcguacgugguccagcugccccucuacggcgugaucgacacccccugcuggaagcugcacacgagcccccugugcaccaccaacaccaaggagggguccaacaucugccucacgcgcaccgaccggggcugguacugcgacaacgccggcagcgucuccuucuucccgcaggccgagaccugcaaggugcagagcaaccgcguguucugcgacaccaugaacucccggacgcugcccagcgagguaaaccucugcaacgucgacaucuucaaccccaaguacgacugcaagaucaugaccuccaagaccgacgugagcuccagcgugaucaccucccugggggccaucgucagcugcuacggcaagacgaagugcaccgccagcaacaagugccgggggaucaucaagaccuucuccaacggcugcgacuacgugagcaacaagggcguggacaccguguccgucgggaacacccuguacuacgugaacaagcaggagggcaagagccucuacgugaagggggagcccaucaucaacuucuacgacccgcuggucuuccccuccgacgaguucgacgcgagcaucucccaggugaacgagaagaucaaccagagccuggccuucauccgcaaguccgacgagcugcuccacaacgugaacgccggcaagagcacgaccaacaucaugaucaccaccaucaucaucgucaucaucgugauccugcugucccucaucgccguggggcugcugcucuacugcaaggcccggugaggacuagugaagggaacacccaaauuuaauucagccuuaagcacaauuaauuaagagugaaacguaauuguacaagcaguuggucacccaccauagggcaugaucaacaccgcaaccuuuccuuuuucccccagugauucugaaaaaccccucuucccuucagcuugcuuagauguuccaaauuuaguaagcuuaaggcggccuacagaagaaaaagaaaaaaaaggccacaaaaguucccucucacuuucaguaaauaaaauaaaagcagcaacagaaauaaagaaauaaaugaaauucaaaaugaaauaaauauuguguugugcagcauuaaaaaaucaauaaaaauuaaaaaugagcaagaucuaaaaaaaaaaaaaaaaaaaaaaaaaaaaaaaaaaaaaaaaaaaaaaaaaaaaaaaaaaaaaaaaugcaucccccccccccccccccccccccccccccccaaaggcucuuuucagagccaccagaauu

SEQ ID NO: 5913 - RNA, 2133 nt, Artificial Sequence
  mRNA product Design f-1 comprising derived and/or modified sequence from HRSV(A2)__F-del_DSCav1_mut5 (opt1)
gggagagcggcucggccauuuugucccagucaguccggaggcugcggcugcagaaguaccgccugcggaguaacugcaaagaagcuuaccauggagcugcucauccugaaggccaacgccaucaccaccauccugacggcggugaccuucugcuucgccagcggccagaacaucaccgaggaguucuaccaguccacgugcagcgccgucuccaagggguaccucagcgcccugcgcaccggcugguacaccuccgugaucaccaucgagcugagcaacaucaaggagaacaagugcaacgggaccgacgccaaggugaagcucaucaagcaggagcuggacaaguacaagaacgcggucacggagcugcagcuccugaugcaguccacccccgccaccggcagcggguccgccaucgccagcggcguggcggugugcaagguccugcaccucgagggcgaggugaacaagaucaaguccgcccugcugagcaccaacaaggccguggucucccucagcgggugcggcguguccgugcugacguucaagguccuggaccucaagaacuacaucgacaagcagcugcugccgauccucaacaagcagagcugcuccaucagcaacaucgagaccgugaucgaguuccagcagaagaacaaccggcugcuggagaucacccgcgaguucuccgugaacgccggggucaccacgcccgugagcaccuacaugcucaccaacagcgagcugcugucccucaucaacgacaugcccaucaccaacgaccagaagaagcugaugagcaacaacgugcagaucguccggcagcaguccuacagcaucaugugcaucaucaaggaggaggugcuggccuacgugguccagcucccccuguacggcgugaucgacacgccgugcuggaagcugcacaccagcccccucugcaccaccaacacgaaggagggguccaacaucugccugacccgcaccgaccggggcugguacugcgacaacgcgggcuccgugagcuucuucccccaggccgagaccugcaagguccaguccaaccgcguguucugcgacacgaugaacagccggacccuccccuccgaggucaaccugugcaacguggacaucuucaacccgaaguacgacugcaagaucaugaccagcaagaccgacguguccagcuccgucaucacgagccugggggccaucguguccugcuacggcaagaccaagugcaccgccagcaacaagugccgggggaucaucaagaccuucuccaacggcugcgacuacgugagcaacaagggcgucgacacggugagcguggggaacacccucuacuacgucaacaagcaggagggcaagucccuguacgugaagggggagcccaucaucaacuucuacgacccccugguguuccccagcgacgaguucgacgccuccaucagccaggucaacgagaagaucaaccagucccucgcguucauccgcaagagcgacgagcugcugcacaacgugaacgccggcaaguccaccaccaacaucaugaucaccacgaucaucaucgugaucaucgucauccuccugagccugaucgccguggggcuccugcuguacugcaaggcccggugaggacuagugaagggaacacccaaauuuaauucagccuuaagcacaauuaauuaagagugaaacguaauuguacaagcaguuggucacccaccauagggcaugaucaacaccgcaaccuuuccuuuuucccccagugauucugaaaaaccccucuucccuucagcuugcuuagauguuccaaauuuaguaagcuuaaggcggccuacagaagaaaaagaaaaaaaaggccacaaaaguucccucucacuuucaguaaauaaaauaaaagcagcaacagaaauaaagaaauaaaugaaauucaaaaugaaauaaauauuguguugugcagcauuaaaaaaucaauaaaaauuaaaaaugagcaagaucuaaaaaaaaaaaaaaaaaaaaaaaaaaaaaaaaaaaaaaaaaaaaaaaaaaaaaaaaaaaaaaaaugcaucccccccccccccccccccccccccccccccaaaggcucuuuucagagccaccagaauu

SEQ ID NO: 5914 - RNA, 2133 nt, Artificial Sequence
  mRNA product Design f-1 comprising derived and/or modified sequence from HRSV(A2)__F-del_DSCav1_mut5 (opt2)
gggagagcggcucggccauuuugucccagucaguccggaggcugcggcugcagaaguaccgccugcggaguaacugcaaagaagcuuaccauggagcuccucauccucaaggccaacgccaucaccaccauccucaccgccgucaccuucugcuucgccuccggccagaacaucaccgaggaguucuaccaguccaccugcuccgccgucuccaagggcuaccucuccgcccuccgcaccggcugguacaccuccgucaucaccaucgagcucuccaacaucaaggagaacaagugcaacggcaccgacgccaaggucaagcucaucaagcaggagcucgacaaguacaagaacgccgucaccgagcuccagcuccucaugcaguccacccccgccaccggcuccggcuccgccaucgccuccggcgucgccgucugcaagguccuccaccucgagggcgaggucaacaagaucaaguccgcccuccucuccaccaacaaggccgucgucucccucuccggcugcggcgucuccguccucaccuucaagguccucgaccucaagaacuacaucgacaagcagcuccuccccauccucaacaagcaguccugcuccaucuccaacaucgagaccgucaucgaguuccagcagaagaacaaccgccuccucgagaucacccgcgaguucuccgucaacgccggcgucaccacccccgucuccaccuacaugcucaccaacuccgagcuccucucccucaucaacgacaugcccaucaccaacgaccagaagaagcucauguccaacaacguccagaucguccgccagcaguccuacuccaucaugugcaucaucaaggaggagguccucgccuacgucguccagcucccccucuacggcgucaucgacacccccugcuggaagcuccacaccuccccccucugcaccaccaacaccaaggagggcuccaacaucugccucacccgcaccgaccgcggcugguacugcgacaacgccggcuccgucuccuucuucccccaggccgagaccugcaagguccaguccaaccgcgucuucugcgacaccaugaacucccgcacccuccccuccgaggucaaccucugcaacgucgacaucuucaaccccaaguacgacugcaagaucaugaccuccaagaccgacgucuccuccuccgucaucaccucccucggcgccaucgucuccugcuacggcaagaccaagugcaccgccuccaacaagugccgcggcaucaucaagaccuucuccaacggcugcgacuacgucuccaacaagggcgucgacaccgucuccgucggcaacacccucuacuacgucaacaagcaggagggcaagucccucuacgucaagggcgagcccaucaucaacuucuacgacccccucgucuuccccuccgacgaguucgacgccuccaucucccaggucaacgagaagaucaaccagucccucgccuucauccgcaaguccgacgagcuccuccacaacgucaacgccggcaaguccaccaccaacaucaugaucaccaccaucaucaucgucaucaucgucauccuccucucccucaucgccgucggccuccuccucuacugcaaggcccgcugaggacuagugaagggaacacccaaauuuaauucagccuuaagcacaauuaauuaagagugaaacguaauuguacaagcaguuggucacccaccauagggcaugaucaacaccgcaaccuuuccuuuuucccccagugauucugaaaaaccccucuucccuucagcuugcuuagauguuccaaauuuaguaagcuuaaggcggccuacagaagaaaaagaaaaaaaaggccacaaaaguucccucucacuuucaguaaauaaaauaaaagcagcaacagaaauaaagaaauaaaugaaauucaaaaugaaauaaauauuguguugugcagcauuaaaaaaucaauaaaaauuaaaaaugagcaagaucuaaaaaaaaaaaaaaaaaaaaaaaaaaaaaaaaaaaaaaaaaaaaaaaaaaaaaaaaaaaaaaaaugcaucccccccccccccccccccccccccccccccaaaggcucuuuucagagccaccagaauu

SEQ ID NO: 5915 - RNA, 2133 nt, Artificial Sequence
  mRNA product Design f-1 comprising derived and/or modified sequence from HRSV(A2)__F-del_DSCav1_mut5 (opt3)
gggagagcggcucggccauuuugucccagucaguccggaggcugcggcugcagaaguaccgccugcggaguaacugcaaagaagcuuaccauggagcugcucauccuuaaggccaacgcuauuaccacaauacugacugcagugacguucugcuuugccagcggccagaauaucaccgaagaguucuaccaauccacauguucugcggucucaaaaggguauuugagugcuuuaagaacuggaugguacaccagcguuauuacaaucgaacuguccaacauuaaggagaauaaaugcaacgguaccgacgccaaggugaaacuaaucaagcaggaacucgauaaguauaaaaaugcaguaacugagcugcagcuucugaugcagucuacacccgccaccggcucggggucagcuauagcaagcggaguggccgucuguaagguguugcaccucgagggcgaaguuaacaaaaucaagagugcucugcuguccacgaauaaagccguggucucucucagcgguugcgggguguccguauuaacuuuuaagguucuggaccuuaagaacuacauugauaaacaauugcugccuauccuaaauaagcagucauguaguauuagcaacaucgagaccgugauagaguuccagcagaaaaauaacaggcuccuggaaauuacacgggaguuuucugucaaugcgggagugacuaccccaguguccacauauaugcuuaccaacucagaacuguugagccucaucaaugacaugccgauuacgaacgaucaaaagaaacugaugaguaacaauguccagaucguucgccagcagucuuacuccaucaugugcauuauaaaggaggaaguguuagcauauguagugcaacugccccucuacggcgucaucgacacuccuuguuggaaacuucauacaagcccacugugcaccacuaacacaaaggagggcucgaauauuuguuugacccgaacggaucgugggugguacugcgacaacgccggaucuguguccuucuuuccccaggcugaaaccuguaagguucagucaaauagaguguucugcgauacaaugaacaguagaacucugccuagcgaggucaaucucugcaacguggacaucuuuaauccaaaauaugauuguaagauaaugaccuccaaaacagacguaucuagcucaguuauuaccagucugggugccaucguguccugcuacggcaagacuaaauguacagcaagcaacaagugcagggggaucauuaagaccuucucuaauggaugugauuaugucucaaacaaaggcguggacacugucaguguggguaauacgcuuuacuauguuaacaagcaagaggggaaaagccuguacgugaagggagaacccaucauuaauuuuuaugacccuuugguauucccauccgaugaguuugacgcuucuauaucgcaggucaacgagaaaaucaaccagagccucgccuucauucggaaguccgaugaacuguuacacaaugugaacgcgggcaagucaacaaccaauaucaugaucacuaccauuauaaucguuauuaucgugauucugcuaagucucaucgccgucggccugcuuuuguacugcaaagcacgcugaggacuagugaagggaacacccaaauuuaauucagccuuaagcacaauuaauuaagagugaaacguaauuguacaagcaguuggucacccaccauagggcaugaucaacaccgcaaccuuuccuuuuucccccagugauucugaaaaaccccucuucccuucagcuugcuuagauguuccaaauuuaguaagcuuaaggcggccuacagaagaaaaagaaaaaaaaggccacaaaaguucccucucacuuucaguaaauaaaauaaaagcagcaacagaaauaaagaaauaaaugaaauucaaaaugaaauaaauauuguguugugcagcauuaaaaaaucaauaaaaauuaaaaaugagcaagaucuaaaaaaaaaaaaaaaaaaaaaaaaaaaaaaaaaaaaaaaaaaaaaaaaaaaaaaaaaaaaaaaaugcaucccccccccccccccccccccccccccccccaaaggcucuuuucagagccaccagaauu

SEQ ID NO: 5916 - RNA, 2133 nt, Artificial Sequence
  mRNA product Design f-1 comprising derived and/or modified sequence from HRSV(A2)__F-del_DSCav1_mut5 (opt4)
gggagagcggcucggccauuuugucccagucaguccggaggcugcggcugcagaaguaccgccugcggaguaacugcaaagaagcuuaccauggagcugcugauccugaaggccaacgccaucaccaccauccugaccgccgugaccuucugcuucgccagcggccagaacaucaccgaggaguucuaccagagcaccugcagcgccgugagcaagggcuaccugagcgcccugagaaccggcugguacaccagcgugaucaccaucgagcugagcaacaucaaggagaacaagugcaacggcaccgacgccaaggugaagcugaucaagcaggagcuggacaaguacaagaacgccgugaccgagcugcagcugcugaugcagagcacccccgccaccggcagcggcagcgccaucgccagcggcguggccgugugcaaggugcugcaccuggagggcgaggugaacaagaucaagagcgcccugcugagcaccaacaaggccguggugagccugagcggcugcggcgugagcgugcugaccuucaaggugcuggaccugaagaacuacaucgacaagcagcugcugcccauccugaacaagcagagcugcagcaucagcaacaucgagaccgugaucgaguuccagcagaagaacaacagacugcuggagaucaccagagaguucagcgugaacgccggcgugaccacccccgugagcaccuacaugcugaccaacagcgagcugcugagccugaucaacgacaugcccaucaccaacgaccagaagaagcugaugagcaacaacgugcagaucgugagacagcagagcuacagcaucaugugcaucaucaaggaggaggugcuggccuacguggugcagcugccccuguacggcgugaucgacacccccugcuggaagcugcacaccagcccccugugcaccaccaacaccaaggagggcagcaacaucugccugaccagaaccgacagaggcugguacugcgacaacgccggcagcgugagcuucuucccccaggccgagaccugcaaggugcagagcaacagaguguucugcgacaccaugaacagcagaacccugcccagcgaggugaaccugugcaacguggacaucuucaaccccaaguacgacugcaagaucaugaccagcaagaccgacgugagcagcagcgugaucaccagccugggcgccaucgugagcugcuacggcaagaccaagugcaccgccagcaacaagugcagaggcaucaucaagaccuucagcaacggcugcgacuacgugagcaacaagggcguggacaccgugagcgugggcaacacccuguacuacgugaacaagcaggagggcaagagccuguacgugaagggcgagcccaucaucaacuucuacgacccccugguguuccccagcgacgaguucgacgccagcaucagccaggugaacgagaagaucaaccagagccuggccuucaucagaaagagcgacgagcugcugcacaacgugaacgccggcaagagcaccaccaacaucaugaucaccaccaucaucaucgugaucaucgugauccugcugagccugaucgccgugggccugcugcuguacugcaaggccagaugaggacuagugaagggaacacccaaauuuaauucagccuuaagcacaauuaauuaagagugaaacguaauuguacaagcaguuggucacccaccauagggcaugaucaacaccgcaaccuuuccuuuuucccccagugauucugaaaaaccccucuucccuucagcuugcuuagauguuccaaauuuaguaagcuuaaggcggccuacagaagaaaaagaaaaaaaaggccacaaaaguucccucucacuuucaguaaauaaaauaaaagcagcaacagaaauaaagaaauaaaugaaauucaaaaugaaauaaauauuguguugugcagcauuaaaaaaucaauaaaaauuaaaaaugagcaagaucuaaaaaaaaaaaaaaaaaaaaaaaaaaaaaaaaaaaaaaaaaaaaaaaaaaaaaaaaaaaaaaaaugcaucccccccccccccccccccccccccccccccaaaggcucuuuucagagccaccagaauu

SEQ ID NO: 5917 - RNA, 2133 nt, Artificial Sequence
  mRNA product Design f-1 comprising derived and/or modified sequence from HRSV(A2)__F-del_DSCav1_mut5 (opt5)
gggagagcggcucggccauuuugucccagucaguccggaggcugcggcugcagaaguaccgccugcggaguaacugcaaagaagcuuaccauggagcugcucauccugaaggccaacgcuauuaccacaauccuuacggccgugaccuucugcuuugcgagcggccagaauauuacagaagaguucuaccaauccaccuguucugcugucagcaaaggguaucuguccgcccucagaacaggaugguacaccucuguuaucacaauugaacugagcaacaucaaggagaauaaaugcaacggcaccgacgccaaggugaaacuuaucaagcaggaacuggauaaguauaaaaaugcugugacggagcuccagcugcugaugcaguccacccccgccacagggucuggaagcgcuauugccuccggcgucgcgguguguaagguucuccaccuggagggggaagugaacaaaaucaagagcgcccuucugucuaccaauaaagcugucgugucccucagcggaugcggcguuucugugcugacauuuaagguccuugaccugaagaacuacauugauaaacaacuccugccuauccugaauaagcaguccuguagcauuucuaacaucgagaccgugauugaguuccagcagaaaaauaaccggcuccuggaaaucacgcgcgaguuuuccgugaaugccggcgucacaaccccgguuagcacauauaugcuuaccaacuccgaacugcucucucugaucaaugacaugcccauuaccaacgaucaaaagaaacuuaugagcaacaaugugcagaucgugagacagcaguccuacagcauuaugugcaucauuaaggaggaaguccuggcuuaugugguucaacucccucuguacggggugaucgacacacccuguuggaaacugcauacgucuccucucugcaccacaaacaccaaggagggauccaauaucugucugacacggaccgaucgcggcugguacugcgacaacgccgggagcgucucuuucuuuccccaggcggaaacguguaaggugcagagcaauagaguuuucugcgauacaaugaacuccagaacccugccuucugaggugaaucucugcaacgucgacauuuuuaauccgaaauaugauuguaagaucaugaccagcaaaacagacguguccagcucugucauuaccucccugggagccaucgugagcugcuacggcaagacaaaauguacggcuucuaacaagugccgggggauuaucaagaccuucuccaauggaugugauuauguuagcaacaaaggcguggacacagucuccgugggcaauacccuuuacuauguuaacaagcaagaggggaaaucucuguacgugaagggagaacccaucauuaauuuuuaugacccucucgucuuccccagcgaugaguuugacgccuccaucucucaggugaacgagaaaauuaaccagagccuggcuuucauccgcaaguccgaugaacugcuccacaaugugaacgccggcaagagcacaaccaauauuaugaucacgaccauuaucaucguuauuaucgucauucugcuuucucugaucgccguggggcuccugcuguacugcaaagcuagaugaggacuagugaagggaacacccaaauuuaauucagccuuaagcacaauuaauuaagagugaaacguaauuguacaagcaguuggucacccaccauagggcaugaucaacaccgcaaccuuuccuuuuucccccagugauucugaaaaaccccucuucccuucagcuugcuuagauguuccaaauuuaguaagcuuaaggcggccuacagaagaaaaagaaaaaaaaggccacaaaaguucccucucacuuucaguaaauaaaauaaaagcagcaacagaaauaaagaaauaaaugaaauucaaaaugaaauaaauauuguguugugcagcauuaaaaaaucaauaaaaauuaaaaaugagcaagaucuaaaaaaaaaaaaaaaaaaaaaaaaaaaaaaaaaaaaaaaaaaaaaaaaaaaaaaaaaaaaaaaaugcaucccccccccccccccccccccccccccccccaaaggcucuuuucagagccaccagaauu

SEQ ID NO: 5918 - RNA, 2133 nt, Artificial Sequence
  mRNA product Design f-1 comprising derived and/or modified sequence from HRSV(A2)__F-del_DSCav1_mut5 (opt6)
gggagagcggcucggccauuuugucccagucaguccggaggcugcggcugcagaaguaccgccugcggaguaacugcaaagaagcuuaccauggaacuuuuaauacugaaagcaaaugccaucacaaccauacuaacugccgucacauucugcuuugcaucaggacaaaacauaacagaagaauuuuaccaauccacaugcucagcaguaucaaaaggauaucuaucggcacuuagaacuggaugguacacaaguguuauaacuauagaacucucaaacauaaaagaaaacaaaugcaauggaacagacgcaaaaguaaaacuaauaaaacaagaacucgauaaauauaaaaaugcaguaaccgaacuacaacuauuaaugcaaagcacacccgcaacaggcagcggaucagcaauagcaagcggagucgcaguauguaaaguacuacaucuagaaggagaagucaacaaaaucaaaucugcacuucuauccacaaacaaagcuguaguaucccuauccggaugcggagucucaguauuaacuuuuaaaguacuagaccuuaaaaacuacauagauaaacaacuauuaccaauacuaaauaaacaaucaugcagcauauccaauauagagacaguaauugaauuucaacaaaaaaacaacagauuacuagaaauuacucgugaauuuuccguaaaugccggagucacaacaccaguaucaaccuauaugcuaacaaacagcgaacuacuuagcuuaauaaaugacaugccaauaacaaaugaccaaaaaaaacuuaugucaaauaacguacaaaucgucagacaacaauccuacucuauaauguguauaauuaaagaagaaguccuagcauacguaguucaauuaccacucuauggaguaauagauacaccaugcuggaaacuacacacgucaccacuauguacaacaaacacaaaagaaggauccaauauaugccuaacaagaaccgacagaggcugguauugugacaacgcaggauccguuucauucuucccacaagcagaaaccuguaaaguacaaucuaauagaguauuuugcgacacaaugaacaguagaacacuaccaagcgagguuaaucuauguaacguagacauauucaauccaaaauaugauugcaaaauaaugacaucaaaaacagauguaucgucgaguguaauaacaagucugggagcuauaguaagcugcuacggcaagacgaaauguaccgcuucaaauaaaugcagaggaaucauuaaaacauucucgaacggaugcgacuacguaaguaauaaaggugucgacaccguaucaguagggaauacauuauacuacgucaacaaacaagaaggaaaaucucuauauguaaaaggagaaccaauaauaaauuucuaugacccucuaguauucccaucagaugaauuugacgcuuccauaucacaaguaaacgaaaaaaucaaucaaucuuuagcauucauacgaaaaagugaugaacuccuacacaacgucaacgcaggaaaaagcacaacaaauauaaugaucacaacaaucaucauaguaauaauaguaauacuacuaucauuaauagcaguaggauuauugcuuuacugcaaagcacgauagggacuagugaagggaacacccaaauuuaauucagccuuaagcacaauuaauuaagagugaaacguaauuguacaagcaguuggucacccaccauagggcaugaucaacaccgcaaccuuuccuuuuucccccagugauucugaaaaaccccucuucccuucagcuugcuuagauguuccaaauuuaguaagcuuaaggcggccuacagaagaaaaagaaaaaaaaggccacaaaaguucccucucacuuucaguaaauaaaauaaaagcagcaacagaaauaaagaaauaaaugaaauucaaaaugaaauaaauauuguguugugcagcauuaaaaaaucaauaaaaauuaaaaaugagcaagaucuaaaaaaaaaaaaaaaaaaaaaaaaaaaaaaaaaaaaaaaaaaaaaaaaaaaaaaaaaaaaaaaaugcaucccccccccccccccccccccccccccccccaaaggcucuuuucagagccaccagaauu

SEQ ID NO: 5919 - RNA, 2133 nt, Artificial Sequence
  mRNA product Design f-1 comprising derived and/or modified sequence from HRSV(A2)__F-del_DSCav1_mut5 (opt11)
gggagagcggcucggccauuuugucccagucaguccggaggcugcggcugcagaaguaccgccugcggaguaacugcaaagaagcuuaccauggaacuccucauccucaaagccaacgccauaaccacaauacucaccgccguaaccuucugcuuugcgucgggacaaaacaucaccgaagaguucuaccaauccacuugcuccgcaguaagcaaaggauaccucuccgcccugcgaaccgguugguacacaucagucaucacaaucgaacucucaaacauaaaagaaaacaaaugcaacggcaccgacgcaaaggucaaauuaaucaagcaagaacuagacaaauacaaaaacgccgucacagaacuccagcugcuaaugcagagcacacccgcaacuggcagcggauccgccaucgcaucaggagucgccgugugcaaaguccuacaccucgaaggagaagugaacaaaaucaaaucagcccuacucuccaccaacaaggccgucgucucccucuccggcugcggugucuccguccuaaccuucaaagugcuagaccucaagaacuacaucgacaaacaacuccuaccaauacucaacaagcaaucuugcuccaucuccaacaucgaaaccguaaucgaguuccaacagaagaacaaccgccuccucgaaaucacccgcgaguucucugucaacgcaggggucaccacucccgucuccacauacaugcucacaaacuccgaacuccucagccucaucaacgacaugcccauaaccaacgaccagaaaaagcuaaugagcaauaacguccaaaucguuagacaacaaaguuauuccaucaugugcaucaucaaagaagaaguccucgccuacgucguacaacucccccucuauggcgucaucgacacccccugcuggaaacugcacacaucaccccucugcaccacaaacaccaaagaaggcucaaacaucugccuaacucgcaccgaccgcggcugguacugcgacaacgccggcagcguaucauucuuuccccaagccgaaacaugcaaaguucaauccaaccgcgucuucugcgacacaaugaacuccagaacgcuccccagcgaagucaaccucuguaacguagacaucuucaacccuaaguacgacugcaaaaucaugaccuccaaaacugauguauccuccuccgucaucacaucccugggcgccaucgucagcugcuacggcaaaacaaaaugcacugccucaaacaaaugccgagguaucauaaagaccuucucaaacggaugcgauuacgucagcaacaaaggcgucgacaccgucagugucggcaacacccucuacuacgucaacaaacaagaaggaaaaucccucuacgucaaaggcgaacccaucaucaacuucuacgacccccucgucuuccccagcgacgaguucgacgccuccaucucacaagucaacgaaaagauaaaccaaucucuagccuucauccgcaaauccgaugaacuccugcauaacgucaacgccggcaaauccaccacaaacaucaugaucacuaccauaaucaucgucauaaucguaauccuccuaucucuuaucgcagucggccuacuacucuacugcaaagcccgcuaaggacuagugaagggaacacccaaauuuaauucagccuuaagcacaauuaauuaagagugaaacguaauuguacaagcaguuggucacccaccauagggcaugaucaacaccgcaaccuuuccuuuuucccccagugauucugaaaaaccccucuucccuucagcuugcuuagauguuccaaauuuaguaagcuuaaggcggccuacagaagaaaaagaaaaaaaaggccacaaaaguucccucucacuuucaguaaauaaaauaaaagcagcaacagaaauaaagaaauaaaugaaauucaaaaugaaauaaauauuguguugugcagcauuaaaaaaucaauaaaaauuaaaaaugagcaagaucuaaaaaaaaaaaaaaaaaaaaaaaaaaaaaaaaaaaaaaaaaaaaaaaaaaaaaaaaaaaaaaaaugcaucccccccccccccccccccccccccccccccaaaggcucuuuucagagccaccagaauu

SEQ ID NO: 5920 - RNA, 1913 nt, Artificial Sequence
  mRNA product Design f-2 comprising derived and/or modified sequence from HRSV(A2)__F-del_DSCav1_mut5 (opt1)
gggagagcggcucggccauuuugucccagucaguccggaggcugcggcugcagaaguaccgccugcggaguaacugcaaagaagcuuaccauggagcugcucauccugaaggccaacgccaucaccaccauccugacggcggugaccuucugcuucgccagcggccagaacaucaccgaggaguucuaccaguccacgugcagcgccgucuccaagggguaccucagcgcccugcggaccggcugguacaccuccgugaucaccaucgagcugagcaacaucaaggagaacaagugcaacgggaccgacgccaaggugaagcucaucaagcaggagcuggacaaguacaagaacgcggucacggagcugcagcuccugaugcaguccaccccggcaaccggcuccggcuccgccaucgcgagcggcgucgccgugugcaaggugcugcaccucgagggggaggucaacaagaucaagagcgcccugcuguccaccaacaaggccguggugagccucuccggcugcggcgucagcgugcugaccuucaaggugcuggaccucaagaacuacaucgacaagcagcugcugcccauccugaacaagcagagcugcuccaucagcaacaucgagacggugaucgaguuccagcagaagaacaaccggcuccuggagaucacccgcgaguucagcgugaacgccggggucaccacccccguguccacguacaugcugaccaacagcgagcuccugucccugaucaacgacaugccgaucaccaacgaccagaagaagcucaugagcaacaacgugcagaucguccggcagcaguccuacagcaucaugugcaucaucaaggaggaggugcuggcguacgugguccagcugccccucuacggcgugaucgacacccccugcuggaagcugcacacgagcccccugugcaccaccaacaccaaggagggguccaacaucugccucacgcgcaccgaccggggcugguacugcgacaacgccggcagcgucuccuucuucccgcaggccgagaccugcaaggugcagagcaaccgcguguucugcgacaccaugaacucccggacgcugcccagcgagguaaaccucugcaacgucgacaucuucaaccccaaguacgacugcaagaucaugaccuccaagaccgacgugagcuccagcgugaucaccucccugggggccaucgucagcugcuacggcaagacgaagugcaccgccagcaacaagugccgggggaucaucaagaccuucuccaacggcugcgacuacgugagcaacaagggcguggacaccguguccgucgggaacacccuguacuacgugaacaagcaggagggcaagagccucuacgugaagggggagcccaucaucaacuucuacgacccgcuggucuuccccuccgacgaguucgacgcgagcaucucccaggugaacgagaagaucaaccagagccuggccuucauccgcaaguccgacgagcugcuccacaacgugaacgccggcaagagcacgaccaacaucaugaucaccaccaucaucaucgucaucaucgugauccugcugucccucaucgccguggggcugcugcucuacugcaaggcccggugaggacuaguggaagcauuuuccuggcugauuaaaagaaauuacucagcuauggucaucuguuccuguuagaaggcuaugcagcauauuauauacuaugcgcauguuaugaaaugcauaauaaaaaauuuuaaaaaaucuaaaagaucuaaaaaaaaaaaaaaaaaaaaaaaaaaaaaaaaaaaaaaaaaaaaaaaaaaaaaaaaaaaaaaaaugcaucccccccccccccccccccccccccccccccaaaggcucuuuucagagccaccagaauu

SEQ ID NO: 5921 - RNA, 1913 nt, Artificial Sequence
  mRNA product Design f-2 comprising derived and/or modified sequence from HRSV(A2)__F-del_DSCav1_mut5 (opt1)
gggagagcggcucggccauuuugucccagucaguccggaggcugcggcugcagaaguaccgccugcggaguaacugcaaagaagcuuaccauggagcugcucauccugaaggccaacgccaucaccaccauccugacggcggugaccuucugcuucgccagcggccagaacaucaccgaggaguucuaccaguccacgugcagcgccgucuccaagggguaccucagcgcccugcgcaccggcugguacaccuccgugaucaccaucgagcugagcaacaucaaggagaacaagugcaacgggaccgacgccaaggugaagcucaucaagcaggagcuggacaaguacaagaacgcggucacggagcugcagcuccugaugcaguccacccccgccaccggcagcggguccgccaucgccagcggcguggcggugugcaagguccugcaccucgagggcgaggugaacaagaucaaguccgcccugcugagcaccaacaaggccguggucucccucagcgggugcggcguguccgugcugacguucaagguccuggaccucaagaacuacaucgacaagcagcugcugccgauccucaacaagcagagcugcuccaucagcaacaucgagaccgugaucgaguuccagcagaagaacaaccggcugcuggagaucacccgcgaguucuccgugaacgccggggucaccacgcccgugagcaccuacaugcucaccaacagcgagcugcugucccucaucaacgacaugcccaucaccaacgaccagaagaagcugaugagcaacaacgugcagaucguccggcagcaguccuacagcaucaugugcaucaucaaggaggaggugcuggccuacgugguccagcucccccuguacggcgugaucgacacgccgugcuggaagcugcacaccagcccccucugcaccaccaacacgaaggagggguccaacaucugccugacccgcaccgaccggggcugguacugcgacaacgcgggcuccgugagcuucuucccccaggccgagaccugcaagguccaguccaaccgcguguucugcgacacgaugaacagccggacccuccccuccgaggucaaccugugcaacguggacaucuucaacccgaaguacgacugcaagaucaugaccagcaagaccgacguguccagcuccgucaucacgagccugggggccaucguguccugcuacggcaagaccaagugcaccgccagcaacaagugccgggggaucaucaagaccuucuccaacggcugcgacuacgugagcaacaagggcgucgacacggugagcguggggaacacccucuacuacgucaacaagcaggagggcaagucccuguacgugaagggggagcccaucaucaacuucuacgacccccugguguuccccagcgacgaguucgacgccuccaucagccaggucaacgagaagaucaaccagucccucgcguucauccgcaagagcgacgagcugcugcacaacgugaacgccggcaaguccaccaccaacaucaugaucaccacgaucaucaucgugaucaucgucauccuccugagccugaucgccguggggcuccugcuguacugcaaggcccggugaggacuaguggaagcauuuuccuggcugauuaaaagaaauuacucagcuauggucaucuguuccuguuagaaggcuaugcagcauauuauauacuaugcgcauguuaugaaaugcauaauaaaaaauuuuaaaaaaucuaaaagaucuaaaaaaaaaaaaaaaaaaaaaaaaaaaaaaaaaaaaaaaaaaaaaaaaaaaaaaaaaaaaaaaaugcaucccccccccccccccccccccccccccccccaaaggcucuuuucagagccaccagaauu

SEQ ID NO: 5922 - RNA, 1913 nt, Artificial Sequence
  mRNA product Design f-2 comprising derived and/or modified sequence from HRSV(A2)__F-del_DSCav1_mut5 (opt2)
gggagagcggcucggccauuuugucccagucaguccggaggcugcggcugcagaaguaccgccugcggaguaacugcaaagaagcuuaccauggagcuccucauccucaaggccaacgccaucaccaccauccucaccgccgucaccuucugcuucgccuccggccagaacaucaccgaggaguucuaccaguccaccugcuccgccgucuccaagggcuaccucuccgcccuccgcaccggcugguacaccuccgucaucaccaucgagcucuccaacaucaaggagaacaagugcaacggcaccgacgccaaggucaagcucaucaagcaggagcucgacaaguacaagaacgccgucaccgagcuccagcuccucaugcaguccacccccgccaccggcuccggcuccgccaucgccuccggcgucgccgucugcaagguccuccaccucgagggcgaggucaacaagaucaaguccgcccuccucuccaccaacaaggccgucgucucccucuccggcugcggcgucuccguccucaccuucaagguccucgaccucaagaacuacaucgacaagcagcuccuccccauccucaacaagcaguccugcuccaucuccaacaucgagaccgucaucgaguuccagcagaagaacaaccgccuccucgagaucacccgcgaguucuccgucaacgccggcgucaccacccccgucuccaccuacaugcucaccaacuccgagcuccucucccucaucaacgacaugcccaucaccaacgaccagaagaagcucauguccaacaacguccagaucguccgccagcaguccuacuccaucaugugcaucaucaaggaggagguccucgccuacgucguccagcucccccucuacggcgucaucgacacccccugcuggaagcuccacaccuccccccucugcaccaccaacaccaaggagggcuccaacaucugccucacccgcaccgaccgcggcugguacugcgacaacgccggcuccgucuccuucuucccccaggccgagaccugcaagguccaguccaaccgcgucuucugcgacaccaugaacucccgcacccuccccuccgaggucaaccucugcaacgucgacaucuucaaccccaaguacgacugcaagaucaugaccuccaagaccgacgucuccuccuccgucaucaccucccucggcgccaucgucuccugcuacggcaagaccaagugcaccgccuccaacaagugccgcggcaucaucaagaccuucuccaacggcugcgacuacgucuccaacaagggcgucgacaccgucuccgucggcaacacccucuacuacgucaacaagcaggagggcaagucccucuacgucaagggcgagcccaucaucaacuucuacgacccccucgucuuccccuccgacgaguucgacgccuccaucucccaggucaacgagaagaucaaccagucccucgccuucauccgcaaguccgacgagcuccuccacaacgucaacgccggcaaguccaccaccaacaucaugaucaccaccaucaucaucgucaucaucgucauccuccucucccucaucgccgucggccuccuccucuacugcaaggcccgcugaggacuaguggaagcauuuuccuggcugauuaaaagaaauuacucagcuauggucaucuguuccuguuagaaggcuaugcagcauauuauauacuaugcgcauguuaugaaaugcauaauaaaaaauuuuaaaaaaucuaaaagaucuaaaaaaaaaaaaaaaaaaaaaaaaaaaaaaaaaaaaaaaaaaaaaaaaaaaaaaaaaaaaaaaaugcaucccccccccccccccccccccccccccccccaaaggcucuuuucagagccaccagaauu

SEQ ID NO: 5923 - RNA, 1913 nt, Artificial Sequence
  mRNA product Design f-2 comprising derived and/or modified sequence from HRSV(A2)__F-del_DSCav1_mut5 (opt3)
gggagagcggcucggccauuuugucccagucaguccggaggcugcggcugcagaaguaccgccugcggaguaacugcaaagaagcuuaccauggagcugcucauccuuaaggccaacgcuauuaccacaauacugacugcagugacguucugcuuugccagcggccagaauaucaccgaagaguucuaccaauccacauguucugcggucucaaaaggguauuugagugcuuuaagaacuggaugguacaccagcguuauuacaaucgaacuguccaacauuaaggagaauaaaugcaacgguaccgacgccaaggugaaacuaaucaagcaggaacucgauaaguauaaaaaugcaguaacugagcugcagcuucugaugcagucuacacccgccaccggcucggggucagcuauagcaagcggaguggccgucuguaagguguugcaccucgagggcgaaguuaacaaaaucaagagugcucugcuguccacgaauaaagccguggucucucucagcgguugcgggguguccguauuaacuuuuaagguucuggaccuuaagaacuacauugauaaacaauugcugccuauccuaaauaagcagucauguaguauuagcaacaucgagaccgugauagaguuccagcagaaaaauaacaggcuccuggaaauuacacgggaguuuucugucaaugcgggagugacuaccccaguguccacauauaugcuuaccaacucagaacuguugagccucaucaaugacaugccgauuacgaacgaucaaaagaaacugaugaguaacaauguccagaucguucgccagcagucuuacuccaucaugugcauuauaaaggaggaaguguuagcauauguagugcaacugccccucuacggcgucaucgacacuccuuguuggaaacuucauacaagcccacugugcaccacuaacacaaaggagggcucgaauauuuguuugacccgaacggaucgugggugguacugcgacaacgccggaucuguguccuucuuuccccaggcugaaaccuguaagguucagucaaauagaguguucugcgauacaaugaacaguagaacucugccuagcgaggucaaucucugcaacguggacaucuuuaauccaaaauaugauuguaagauaaugaccuccaaaacagacguaucuagcucaguuauuaccagucugggugccaucguguccugcuacggcaagacuaaauguacagcaagcaacaagugcagggggaucauuaagaccuucucuaauggaugugauuaugucucaaacaaaggcguggacacugucaguguggguaauacgcuuuacuauguuaacaagcaagaggggaaaagccuguacgugaagggagaacccaucauuaauuuuuaugacccuuugguauucccauccgaugaguuugacgcuucuauaucgcaggucaacgagaaaaucaaccagagccucgccuucauucggaaguccgaugaacuguuacacaaugugaacgcgggcaagucaacaaccaauaucaugaucacuaccauuauaaucguuauuaucgugauucugcuaagucucaucgccgucggccugcuuuuguacugcaaagcacgcugaggacuaguggaagcauuuuccuggcugauuaaaagaaauuacucagcuauggucaucuguuccuguuagaaggcuaugcagcauauuauauacuaugcgcauguuaugaaaugcauaauaaaaaauuuuaaaaaaucuaaaagaucuaaaaaaaaaaaaaaaaaaaaaaaaaaaaaaaaaaaaaaaaaaaaaaaaaaaaaaaaaaaaaaaaugcaucccccccccccccccccccccccccccccccaaaggcucuuuucagagccaccagaauu

SEQ ID NO: 5924 - RNA, 1913 nt, Artificial Sequence
  mRNA product Design f-2 comprising derived and/or modified sequence from HRSV(A2)__F-del_DSCav1_mut5 (opt4)
gggagagcggcucggccauuuugucccagucaguccggaggcugcggcugcagaaguaccgccugcggaguaacugcaaagaagcuuaccauggagcugcugauccugaaggccaacgccaucaccaccauccugaccgccgugaccuucugcuucgccagcggccagaacaucaccgaggaguucuaccagagcaccugcagcgccgugagcaagggcuaccugagcgcccugagaaccggcugguacaccagcgugaucaccaucgagcugagcaacaucaaggagaacaagugcaacggcaccgacgccaaggugaagcugaucaagcaggagcuggacaaguacaagaacgccgugaccgagcugcagcugcugaugcagagcacccccgccaccggcagcggcagcgccaucgccagcggcguggccgugugcaaggugcugcaccuggagggcgaggugaacaagaucaagagcgcccugcugagcaccaacaaggccguggugagccugagcggcugcggcgugagcgugcugaccuucaaggugcuggaccugaagaacuacaucgacaagcagcugcugcccauccugaacaagcagagcugcagcaucagcaacaucgagaccgugaucgaguuccagcagaagaacaacagacugcuggagaucaccagagaguucagcgugaacgccggcgugaccacccccgugagcaccuacaugcugaccaacagcgagcugcugagccugaucaacgacaugcccaucaccaacgaccagaagaagcugaugagcaacaacgugcagaucgugagacagcagagcuacagcaucaugugcaucaucaaggaggaggugcuggccuacguggugcagcugccccuguacggcgugaucgacacccccugcuggaagcugcacaccagcccccugugcaccaccaacaccaaggagggcagcaacaucugccugaccagaaccgacagaggcugguacugcgacaacgccggcagcgugagcuucuucccccaggccgagaccugcaaggugcagagcaacagaguguucugcgacaccaugaacagcagaacccugcccagcgaggugaaccugugcaacguggacaucuucaaccccaaguacgacugcaagaucaugaccagcaagaccgacgugagcagcagcgugaucaccagccugggcgccaucgugagcugcuacggcaagaccaagugcaccgccagcaacaagugcagaggcaucaucaagaccuucagcaacggcugcgacuacgugagcaacaagggcguggacaccgugagcgugggcaacacccuguacuacgugaacaagcaggagggcaagagccuguacgugaagggcgagcccaucaucaacuucuacgacccccugguguuccccagcgacgaguucgacgccagcaucagccaggugaacgagaagaucaaccagagccuggccuucaucagaaagagcgacgagcugcugcacaacgugaacgccggcaagagcaccaccaacaucaugaucaccaccaucaucaucgugaucaucgugauccugcugagccugaucgccgugggccugcugcuguacugcaaggccagaugaggacuaguggaagcauuuuccuggcugauuaaaagaaauuacucagcuauggucaucuguuccuguuagaaggcuaugcagcauauuauauacuaugcgcauguuaugaaaugcauaauaaaaaauuuuaaaaaaucuaaaagaucuaaaaaaaaaaaaaaaaaaaaaaaaaaaaaaaaaaaaaaaaaaaaaaaaaaaaaaaaaaaaaaaaugcaucccccccccccccccccccccccccccccccaaaggcucuuuucagagccaccagaauu

SEQ ID NO: 5925 - RNA, 1913 nt, Artificial Sequence
  mRNA product Design f-2 comprising derived and/or modified sequence from HRSV(A2)__F-del_DSCav1_mut5 (opt5)
gggagagcggcucggccauuuugucccagucaguccggaggcugcggcugcagaaguaccgccugcggaguaacugcaaagaagcuuaccauggagcugcucauccugaaggccaacgcuauuaccacaauccuuacggccgugaccuucugcuuugcgagcggccagaauauuacagaagaguucuaccaauccaccuguucugcugucagcaaaggguaucuguccgcccucagaacaggaugguacaccucuguuaucacaauugaacugagcaacaucaaggagaauaaaugcaacggcaccgacgccaaggugaaacuuaucaagcaggaacuggauaaguauaaaaaugcugugacggagcuccagcugcugaugcaguccacccccgccacagggucuggaagcgcuauugccuccggcgucgcgguguguaagguucuccaccuggagggggaagugaacaaaaucaagagcgcccuucugucuaccaauaaagcugucgugucccucagcggaugcggcguuucugugcugacauuuaagguccuugaccugaagaacuacauugauaaacaacuccugccuauccugaauaagcaguccuguagcauuucuaacaucgagaccgugauugaguuccagcagaaaaauaaccggcuccuggaaaucacgcgcgaguuuuccgugaaugccggcgucacaaccccgguuagcacauauaugcuuaccaacuccgaacugcucucucugaucaaugacaugcccauuaccaacgaucaaaagaaacuuaugagcaacaaugugcagaucgugagacagcaguccuacagcauuaugugcaucauuaaggaggaaguccuggcuuaugugguucaacucccucuguacggggugaucgacacacccuguuggaaacugcauacgucuccucucugcaccacaaacaccaaggagggauccaauaucugucugacacggaccgaucgcggcugguacugcgacaacgccgggagcgucucuuucuuuccccaggcggaaacguguaaggugcagagcaauagaguuuucugcgauacaaugaacuccagaacccugccuucugaggugaaucucugcaacgucgacauuuuuaauccgaaauaugauuguaagaucaugaccagcaaaacagacguguccagcucugucauuaccucccugggagccaucgugagcugcuacggcaagacaaaauguacggcuucuaacaagugccgggggauuaucaagaccuucuccaauggaugugauuauguuagcaacaaaggcguggacacagucuccgugggcaauacccuuuacuauguuaacaagcaagaggggaaaucucuguacgugaagggagaacccaucauuaauuuuuaugacccucucgucuuccccagcgaugaguuugacgccuccaucucucaggugaacgagaaaauuaaccagagccuggcuuucauccgcaaguccgaugaacugcuccacaaugugaacgccggcaagagcacaaccaauauuaugaucacgaccauuaucaucguuauuaucgucauucugcuuucucugaucgccguggggcuccugcuguacugcaaagcuagaugaggacuaguggaagcauuuuccuggcugauuaaaagaaauuacucagcuauggucaucuguuccuguuagaaggcuaugcagcauauuauauacuaugcgcauguuaugaaaugcauaauaaaaaauuuuaaaaaaucuaaaagaucuaaaaaaaaaaaaaaaaaaaaaaaaaaaaaaaaaaaaaaaaaaaaaaaaaaaaaaaaaaaaaaaaugcaucccccccccccccccccccccccccccccccaaaggcucuuuucagagccaccagaauu

SEQ ID NO: 5926 - RNA, 1913 nt, Artificial Sequence
  mRNA product Design f-2 comprising derived and/or modified sequence from HRSV(A2)__F-del_DSCav1_mut5 (opt6)
gggagagcggcucggccauuuugucccagucaguccggaggcugcggcugcagaaguaccgccugcggaguaacugcaaagaagcuuaccauggaacuuuuaauacugaaagcaaaugccaucacaaccauacuaacugccgucacauucugcuuugcaucaggacaaaacauaacagaagaauuuuaccaauccacaugcucagcaguaucaaaaggauaucuaucggcacuuagaacuggaugguacacaaguguuauaacuauagaacucucaaacauaaaagaaaacaaaugcaauggaacagacgcaaaaguaaaacuaauaaaacaagaacucgauaaauauaaaaaugcaguaaccgaacuacaacuauuaaugcaaagcacacccgcaacaggcagcggaucagcaauagcaagcggagucgcaguauguaaaguacuacaucuagaaggagaagucaacaaaaucaaaucugcacuucuauccacaaacaaagcuguaguaucccuauccggaugcggagucucaguauuaacuuuuaaaguacuagaccuuaaaaacuacauagauaaacaacuauuaccaauacuaaauaaacaaucaugcagcauauccaauauagagacaguaauugaauuucaacaaaaaaacaacagauuacuagaaauuacucgugaauuuuccguaaaugccggagucacaacaccaguaucaaccuauaugcuaacaaacagcgaacuacuuagcuuaauaaaugacaugccaauaacaaaugaccaaaaaaaacuuaugucaaauaacguacaaaucgucagacaacaauccuacucuauaauguguauaauuaaagaagaaguccuagcauacguaguucaauuaccacucuauggaguaauagauacaccaugcuggaaacuacacacgucaccacuauguacaacaaacacaaaagaaggauccaauauaugccuaacaagaaccgacagaggcugguauugugacaacgcaggauccguuucauucuucccacaagcagaaaccuguaaaguacaaucuaauagaguauuuugcgacacaaugaacaguagaacacuaccaagcgagguuaaucuauguaacguagacauauucaauccaaaauaugauugcaaaauaaugacaucaaaaacagauguaucgucgaguguaauaacaagucugggagcuauaguaagcugcuacggcaagacgaaauguaccgcuucaaauaaaugcagaggaaucauuaaaacauucucgaacggaugcgacuacguaaguaauaaaggugucgacaccguaucaguagggaauacauuauacuacgucaacaaacaagaaggaaaaucucuauauguaaaaggagaaccaauaauaaauuucuaugacccucuaguauucccaucagaugaauuugacgcuuccauaucacaaguaaacgaaaaaaucaaucaaucuuuagcauucauacgaaaaagugaugaacuccuacacaacgucaacgcaggaaaaagcacaacaaauauaaugaucacaacaaucaucauaguaauaauaguaauacuacuaucauuaauagcaguaggauuauugcuuuacugcaaagcacgauagggacuaguggaagcauuuuccuggcugauuaaaagaaauuacucagcuauggucaucuguuccuguuagaaggcuaugcagcauauuauauacuaugcgcauguuaugaaaugcauaauaaaaaauuuuaaaaaaucuaaaagaucuaaaaaaaaaaaaaaaaaaaaaaaaaaaaaaaaaaaaaaaaaaaaaaaaaaaaaaaaaaaaaaaaugcaucccccccccccccccccccccccccccccccaaaggcucuuuucagagccaccagaauu

SEQ ID NO: 5927 - RNA, 1913 nt, Artificial Sequence
  mRNA product Design f-2 comprising derived and/or modified sequence from HRSV(A2)__F-del_DSCav1_mut5 (opt11)
gggagagcggcucggccauuuugucccagucaguccggaggcugcggcugcagaaguaccgccugcggaguaacugcaaagaagcuuaccauggaacuccucauccucaaagccaacgccauaaccacaauacucaccgccguaaccuucugcuuugcgucgggacaaaacaucaccgaagaguucuaccaauccacuugcuccgcaguaagcaaaggauaccucuccgcccugcgaaccgguugguacacaucagucaucacaaucgaacucucaaacauaaaagaaaacaaaugcaacggcaccgacgcaaaggucaaauuaaucaagcaagaacuagacaaauacaaaaacgccgucacagaacuccagcugcuaaugcagagcacacccgcaacuggcagcggauccgccaucgcaucaggagucgccgugugcaaaguccuacaccucgaaggagaagugaacaaaaucaaaucagcccuacucuccaccaacaaggccgucgucucccucuccggcugcggugucuccguccuaaccuucaaagugcuagaccucaagaacuacaucgacaaacaacuccuaccaauacucaacaagcaaucuugcuccaucuccaacaucgaaaccguaaucgaguuccaacagaagaacaaccgccuccucgaaaucacccgcgaguucucugucaacgcaggggucaccacucccgucuccacauacaugcucacaaacuccgaacuccucagccucaucaacgacaugcccauaaccaacgaccagaaaaagcuaaugagcaauaacguccaaaucguuagacaacaaaguuauuccaucaugugcaucaucaaagaagaaguccucgccuacgucguacaacucccccucuauggcgucaucgacacccccugcuggaaacugcacacaucaccccucugcaccacaaacaccaaagaaggcucaaacaucugccuaacucgcaccgaccgcggcugguacugcgacaacgccggcagcguaucauucuuuccccaagccgaaacaugcaaaguucaauccaaccgcgucuucugcgacacaaugaacuccagaacgcuccccagcgaagucaaccucuguaacguagacaucuucaacccuaaguacgacugcaaaaucaugaccuccaaaacugauguauccuccuccgucaucacaucccugggcgccaucgucagcugcuacggcaaaacaaaaugcacugccucaaacaaaugccgagguaucauaaagaccuucucaaacggaugcgauuacgucagcaacaaaggcgucgacaccgucagugucggcaacacccucuacuacgucaacaaacaagaaggaaaaucccucuacgucaaaggcgaacccaucaucaacuucuacgacccccucgucuuccccagcgacgaguucgacgccuccaucucacaagucaacgaaaagauaaaccaaucucuagccuucauccgcaaauccgaugaacuccugcauaacgucaacgccggcaaauccaccacaaacaucaugaucacuaccauaaucaucgucauaaucguaauccuccuaucucuuaucgcagucggccuacuacucuacugcaaagcccgcuaaggacuaguggaagcauuuuccuggcugauuaaaagaaauuacucagcuauggucaucuguuccuguuagaaggcuaugcagcauauuauauacuaugcgcauguuaugaaaugcauaauaaaaaauuuuaaaaaaucuaaaagaucuaaaaaaaaaaaaaaaaaaaaaaaaaaaaaaaaaaaaaaaaaaaaaaaaaaaaaaaaaaaaaaaaugcaucccccccccccccccccccccccccccccccaaaggcucuuuucagagccaccagaauu

SEQ ID NO: 5928 - RNA, 1904 nt, Artificial Sequence
  mRNA product Design f-3 comprising derived and/or modified sequence from HRSV(A2)__F-del_DSCav1_mut5 (opt1)
gggagagucccgcagucggcguccagcggcucugcuuguucgugugugugucguugcaggccuuauucaagcuuaccauggagcugcucauccugaaggccaacgccaucaccaccauccugacggcggugaccuucugcuucgccagcggccagaacaucaccgaggaguucuaccaguccacgugcagcgccgucuccaagggguaccucagcgcccugcggaccggcugguacaccuccgugaucaccaucgagcugagcaacaucaaggagaacaagugcaacgggaccgacgccaaggugaagcucaucaagcaggagcuggacaaguacaagaacgcggucacggagcugcagcuccugaugcaguccaccccggcaaccggcuccggcuccgccaucgcgagcggcgucgccgugugcaaggugcugcaccucgagggggaggucaacaagaucaagagcgcccugcuguccaccaacaaggccguggugagccucuccggcugcggcgucagcgugcugaccuucaaggugcuggaccucaagaacuacaucgacaagcagcugcugcccauccugaacaagcagagcugcuccaucagcaacaucgagacggugaucgaguuccagcagaagaacaaccggcuccuggagaucacccgcgaguucagcgugaacgccggggucaccacccccguguccacguacaugcugaccaacagcgagcuccugucccugaucaacgacaugccgaucaccaacgaccagaagaagcucaugagcaacaacgugcagaucguccggcagcaguccuacagcaucaugugcaucaucaaggaggaggugcuggcguacgugguccagcugccccucuacggcgugaucgacacccccugcuggaagcugcacacgagcccccugugcaccaccaacaccaaggagggguccaacaucugccucacgcgcaccgaccggggcugguacugcgacaacgccggcagcgucuccuucuucccgcaggccgagaccugcaaggugcagagcaaccgcguguucugcgacaccaugaacucccggacgcugcccagcgagguaaaccucugcaacgucgacaucuucaaccccaaguacgacugcaagaucaugaccuccaagaccgacgugagcuccagcgugaucaccucccugggggccaucgucagcugcuacggcaagacgaagugcaccgccagcaacaagugccgggggaucaucaagaccuucuccaacggcugcgacuacgugagcaacaagggcguggacaccguguccgucgggaacacccuguacuacgugaacaagcaggagggcaagagccucuacgugaagggggagcccaucaucaacuucuacgacccgcuggucuuccccuccgacgaguucgacgcgagcaucucccaggugaacgagaagaucaaccagagccuggccuucauccgcaaguccgacgagcugcuccacaacgugaacgccggcaagagcacgaccaacaucaugaucaccaccaucaucaucgucaucaucgugauccugcugucccucaucgccguggggcugcugcucuacugcaaggcccggugaggacuaguacuggcugcaucucccuuuccucuguccuccauccuucucccaggauggugaagggggaccugguacccagugauccccaccccaggauccuaaaucaugacuuaccugcuaauaaaaacucauuggaaaagugagaagaucuaaaaaaaaaaaaaaaaaaaaaaaaaaaaaaaaaaaaaaaaaaaaaaaaaaaaaaaaaaaaaaaaugcaucccccccccccccccccccccccccccccccaaaggcucuuuucagagccaccagaauu

SEQ ID NO: 5929 - RNA, 1904 nt, Artificial Sequence
  mRNA product Design f-3 comprising derived and/or modified sequence from HRSV(A2)__F-del_DSCav1_mut5 (opt1)
gggagagucccgcagucggcguccagcggcucugcuuguucgugugugugucguugcaggccuuauucaagcuuaccauggagcugcucauccugaaggccaacgccaucaccaccauccugacggcggugaccuucugcuucgccagcggccagaacaucaccgaggaguucuaccaguccacgugcagcgccgucuccaagggguaccucagcgcccugcgcaccggcugguacaccuccgugaucaccaucgagcugagcaacaucaaggagaacaagugcaacgggaccgacgccaaggugaagcucaucaagcaggagcuggacaaguacaagaacgcggucacggagcugcagcuccugaugcaguccacccccgccaccggcagcggguccgccaucgccagcggcguggcggugugcaagguccugcaccucgagggcgaggugaacaagaucaaguccgcccugcugagcaccaacaaggccguggucucccucagcgggugcggcguguccgugcugacguucaagguccuggaccucaagaacuacaucgacaagcagcugcugccgauccucaacaagcagagcugcuccaucagcaacaucgagaccgugaucgaguuccagcagaagaacaaccggcugcuggagaucacccgcgaguucuccgugaacgccggggucaccacgcccgugagcaccuacaugcucaccaacagcgagcugcugucccucaucaacgacaugcccaucaccaacgaccagaagaagcugaugagcaacaacgugcagaucguccggcagcaguccuacagcaucaugugcaucaucaaggaggaggugcuggccuacgugguccagcucccccuguacggcgugaucgacacgccgugcuggaagcugcacaccagcccccucugcaccaccaacacgaaggagggguccaacaucugccugacccgcaccgaccggggcugguacugcgacaacgcgggcuccgugagcuucuucccccaggccgagaccugcaagguccaguccaaccgcguguucugcgacacgaugaacagccggacccuccccuccgaggucaaccugugcaacguggacaucuucaacccgaaguacgacugcaagaucaugaccagcaagaccgacguguccagcuccgucaucacgagccugggggccaucguguccugcuacggcaagaccaagugcaccgccagcaacaagugccgggggaucaucaagaccuucuccaacggcugcgacuacgugagcaacaagggcgucgacacggugagcguggggaacacccucuacuacgucaacaagcaggagggcaagucccuguacgugaagggggagcccaucaucaacuucuacgacccccugguguuccccagcgacgaguucgacgccuccaucagccaggucaacgagaagaucaaccagucccucgcguucauccgcaagagcgacgagcugcugcacaacgugaacgccggcaaguccaccaccaacaucaugaucaccacgaucaucaucgugaucaucgucauccuccugagccugaucgccguggggcuccugcuguacugcaaggcccggugaggacuaguacuggcugcaucucccuuuccucuguccuccauccuucucccaggauggugaagggggaccugguacccagugauccccaccccaggauccuaaaucaugacuuaccugcuaauaaaaacucauuggaaaagugagaagaucuaaaaaaaaaaaaaaaaaaaaaaaaaaaaaaaaaaaaaaaaaaaaaaaaaaaaaaaaaaaaaaaaugcaucccccccccccccccccccccccccccccccaaaggcucuuuucagagccaccagaauu

SEQ ID NO: 5930 - RNA, 1904 nt, Artificial Sequence
  mRNA product Design f-3 comprising derived and/or modified sequence from HRSV(A2)__F-del_DSCav1_mut5 (opt2)
gggagagucccgcagucggcguccagcggcucugcuuguucgugugugugucguugcaggccuuauucaagcuuaccauggagcuccucauccucaaggccaacgccaucaccaccauccucaccgccgucaccuucugcuucgccuccggccagaacaucaccgaggaguucuaccaguccaccugcuccgccgucuccaagggcuaccucuccgcccuccgcaccggcugguacaccuccgucaucaccaucgagcucuccaacaucaaggagaacaagugcaacggcaccgacgccaaggucaagcucaucaagcaggagcucgacaaguacaagaacgccgucaccgagcuccagcuccucaugcaguccacccccgccaccggcuccggcuccgccaucgccuccggcgucgccgucugcaagguccuccaccucgagggcgaggucaacaagaucaaguccgcccuccucuccaccaacaaggccgucgucucccucuccggcugcggcgucuccguccucaccuucaagguccucgaccucaagaacuacaucgacaagcagcuccuccccauccucaacaagcaguccugcuccaucuccaacaucgagaccgucaucgaguuccagcagaagaacaaccgccuccucgagaucacccgcgaguucuccgucaacgccggcgucaccacccccgucuccaccuacaugcucaccaacuccgagcuccucucccucaucaacgacaugcccaucaccaacgaccagaagaagcucauguccaacaacguccagaucguccgccagcaguccuacuccaucaugugcaucaucaaggaggagguccucgccuacgucguccagcucccccucuacggcgucaucgacacccccugcuggaagcuccacaccuccccccucugcaccaccaacaccaaggagggcuccaacaucugccucacccgcaccgaccgcggcugguacugcgacaacgccggcuccgucuccuucuucccccaggccgagaccugcaagguccaguccaaccgcgucuucugcgacaccaugaacucccgcacccuccccuccgaggucaaccucugcaacgucgacaucuucaaccccaaguacgacugcaagaucaugaccuccaagaccgacgucuccuccuccgucaucaccucccucggcgccaucgucuccugcuacggcaagaccaagugcaccgccuccaacaagugccgcggcaucaucaagaccuucuccaacggcugcgacuacgucuccaacaagggcgucgacaccgucuccgucggcaacacccucuacuacgucaacaagcaggagggcaagucccucuacgucaagggcgagcccaucaucaacuucuacgacccccucgucuuccccuccgacgaguucgacgccuccaucucccaggucaacgagaagaucaaccagucccucgccuucauccgcaaguccgacgagcuccuccacaacgucaacgccggcaaguccaccaccaacaucaugaucaccaccaucaucaucgucaucaucgucauccuccucucccucaucgccgucggccuccuccucuacugcaaggcccgcugaggacuaguacuggcugcaucucccuuuccucuguccuccauccuucucccaggauggugaagggggaccugguacccagugauccccaccccaggauccuaaaucaugacuuaccugcuaauaaaaacucauuggaaaagugagaagaucuaaaaaaaaaaaaaaaaaaaaaaaaaaaaaaaaaaaaaaaaaaaaaaaaaaaaaaaaaaaaaaaaugcaucccccccccccccccccccccccccccccccaaaggcucuuuucagagccaccagaauu

SEQ ID NO: 5931 - RNA, 1904 nt, Artificial Sequence
  mRNA product Design f-3 comprising derived and/or modified sequence from HRSV(A2)__F-del_DSCav1_mut5 (opt3)
gggagagucccgcagucggcguccagcggcucugcuuguucgugugugugucguugcaggccuuauucaagcuuaccauggagcugcucauccuuaaggccaacgcuauuaccacaauacugacugcagugacguucugcuuugccagcggccagaauaucaccgaagaguucuaccaauccacauguucugcggucucaaaaggguauuugagugcuuuaagaacuggaugguacaccagcguuauuacaaucgaacuguccaacauuaaggagaauaaaugcaacgguaccgacgccaaggugaaacuaaucaagcaggaacucgauaaguauaaaaaugcaguaacugagcugcagcuucugaugcagucuacacccgccaccggcucggggucagcuauagcaagcggaguggccgucuguaagguguugcaccucgagggcgaaguuaacaaaaucaagagugcucugcuguccacgaauaaagccguggucucucucagcgguugcgggguguccguauuaacuuuuaagguucuggaccuuaagaacuacauugauaaacaauugcugccuauccuaaauaagcagucauguaguauuagcaacaucgagaccgugauagaguuccagcagaaaaauaacaggcuccuggaaauuacacgggaguuuucugucaaugcgggagugacuaccccaguguccacauauaugcuuaccaacucagaacuguugagccucaucaaugacaugccgauuacgaacgaucaaaagaaacugaugaguaacaauguccagaucguucgccagcagucuuacuccaucaugugcauuauaaaggaggaaguguuagcauauguagugcaacugccccucuacggcgucaucgacacuccuuguuggaaacuucauacaagcccacugugcaccacuaacacaaaggagggcucgaauauuuguuugacccgaacggaucgugggugguacugcgacaacgccggaucuguguccuucuuuccccaggcugaaaccuguaagguucagucaaauagaguguucugcgauacaaugaacaguagaacucugccuagcgaggucaaucucugcaacguggacaucuuuaauccaaaauaugauuguaagauaaugaccuccaaaacagacguaucuagcucaguuauuaccagucugggugccaucguguccugcuacggcaagacuaaauguacagcaagcaacaagugcagggggaucauuaagaccuucucuaauggaugugauuaugucucaaacaaaggcguggacacugucaguguggguaauacgcuuuacuauguuaacaagcaagaggggaaaagccuguacgugaagggagaacccaucauuaauuuuuaugacccuuugguauucccauccgaugaguuugacgcuucuauaucgcaggucaacgagaaaaucaaccagagccucgccuucauucggaaguccgaugaacuguuacacaaugugaacgcgggcaagucaacaaccaauaucaugaucacuaccauuauaaucguuauuaucgugauucugcuaagucucaucgccgucggccugcuuuuguacugcaaagcacgcugaggacuaguacuggcugcaucucccuuuccucuguccuccauccuucucccaggauggugaagggggaccugguacccagugauccccaccccaggauccuaaaucaugacuuaccugcuaauaaaaacucauuggaaaagugagaagaucuaaaaaaaaaaaaaaaaaaaaaaaaaaaaaaaaaaaaaaaaaaaaaaaaaaaaaaaaaaaaaaaaugcaucccccccccccccccccccccccccccccccaaaggcucuuuucagagccaccagaauu

SEQ ID NO: 5932 - RNA, 1904 nt, Artificial Sequence
  mRNA product Design f-3 comprising derived and/or modified sequence from HRSV(A2)__F-del_DSCav1_mut5 (opt4)
gggagagucccgcagucggcguccagcggcucugcuuguucgugugugugucguugcaggccuuauucaagcuuaccauggagcugcugauccugaaggccaacgccaucaccaccauccugaccgccgugaccuucugcuucgccagcggccagaacaucaccgaggaguucuaccagagcaccugcagcgccgugagcaagggcuaccugagcgcccugagaaccggcugguacaccagcgugaucaccaucgagcugagcaacaucaaggagaacaagugcaacggcaccgacgccaaggugaagcugaucaagcaggagcuggacaaguacaagaacgccgugaccgagcugcagcugcugaugcagagcacccccgccaccggcagcggcagcgccaucgccagcggcguggccgugugcaaggugcugcaccuggagggcgaggugaacaagaucaagagcgcccugcugagcaccaacaaggccguggugagccugagcggcugcggcgugagcgugcugaccuucaaggugcuggaccugaagaacuacaucgacaagcagcugcugcccauccugaacaagcagagcugcagcaucagcaacaucgagaccgugaucgaguuccagcagaagaacaacagacugcuggagaucaccagagaguucagcgugaacgccggcgugaccacccccgugagcaccuacaugcugaccaacagcgagcugcugagccugaucaacgacaugcccaucaccaacgaccagaagaagcugaugagcaacaacgugcagaucgugagacagcagagcuacagcaucaugugcaucaucaaggaggaggugcuggccuacguggugcagcugccccuguacggcgugaucgacacccccugcuggaagcugcacaccagcccccugugcaccaccaacaccaaggagggcagcaacaucugccugaccagaaccgacagaggcugguacugcgacaacgccggcagcgugagcuucuucccccaggccgagaccugcaaggugcagagcaacagaguguucugcgacaccaugaacagcagaacccugcccagcgaggugaaccugugcaacguggacaucuucaaccccaaguacgacugcaagaucaugaccagcaagaccgacgugagcagcagcgugaucaccagccugggcgccaucgugagcugcuacggcaagaccaagugcaccgccagcaacaagugcagaggcaucaucaagaccuucagcaacggcugcgacuacgugagcaacaagggcguggacaccgugagcgugggcaacacccuguacuacgugaacaagcaggagggcaagagccuguacgugaagggcgagcccaucaucaacuucuacgacccccugguguuccccagcgacgaguucgacgccagcaucagccaggugaacgagaagaucaaccagagccuggccuucaucagaaagagcgacgagcugcugcacaacgugaacgccggcaagagcaccaccaacaucaugaucaccaccaucaucaucgugaucaucgugauccugcugagccugaucgccgugggccugcugcuguacugcaaggccagaugaggacuaguacuggcugcaucucccuuuccucuguccuccauccuucucccaggauggugaagggggaccugguacccagugauccccaccccaggauccuaaaucaugacuuaccugcuaauaaaaacucauuggaaaagugagaagaucuaaaaaaaaaaaaaaaaaaaaaaaaaaaaaaaaaaaaaaaaaaaaaaaaaaaaaaaaaaaaaaaaugcaucccccccccccccccccccccccccccccccaaaggcucuuuucagagccaccagaauu

SEQ ID NO: 5933 - RNA, 1904 nt, Artificial Sequence
  mRNA product Design f-3 comprising derived and/or modified sequence from HRSV(A2)__F-del_DSCav1_mut5 (opt5)
gggagagucccgcagucggcguccagcggcucugcuuguucgugugugugucguugcaggccuuauucaagcuuaccauggagcugcucauccugaaggccaacgcuauuaccacaauccuuacggccgugaccuucugcuuugcgagcggccagaauauuacagaagaguucuaccaauccaccuguucugcugucagcaaaggguaucuguccgcccucagaacaggaugguacaccucuguuaucacaauugaacugagcaacaucaaggagaauaaaugcaacggcaccgacgccaaggugaaacuuaucaagcaggaacuggauaaguauaaaaaugcugugacggagcuccagcugcugaugcaguccacccccgccacagggucuggaagcgcuauugccuccggcgucgcgguguguaagguucuccaccuggagggggaagugaacaaaaucaagagcgcccuucugucuaccaauaaagcugucgugucccucagcggaugcggcguuucugugcugacauuuaagguccuugaccugaagaacuacauugauaaacaacuccugccuauccugaauaagcaguccuguagcauuucuaacaucgagaccgugauugaguuccagcagaaaaauaaccggcuccuggaaaucacgcgcgaguuuuccgugaaugccggcgucacaaccccgguuagcacauauaugcuuaccaacuccgaacugcucucucugaucaaugacaugcccauuaccaacgaucaaaagaaacuuaugagcaacaaugugcagaucgugagacagcaguccuacagcauuaugugcaucauuaaggaggaaguccuggcuuaugugguucaacucccucuguacggggugaucgacacacccuguuggaaacugcauacgucuccucucugcaccacaaacaccaaggagggauccaauaucugucugacacggaccgaucgcggcugguacugcgacaacgccgggagcgucucuuucuuuccccaggcggaaacguguaaggugcagagcaauagaguuuucugcgauacaaugaacuccagaacccugccuucugaggugaaucucugcaacgucgacauuuuuaauccgaaauaugauuguaagaucaugaccagcaaaacagacguguccagcucugucauuaccucccugggagccaucgugagcugcuacggcaagacaaaauguacggcuucuaacaagugccgggggauuaucaagaccuucuccaauggaugugauuauguuagcaacaaaggcguggacacagucuccgugggcaauacccuuuacuauguuaacaagcaagaggggaaaucucuguacgugaagggagaacccaucauuaauuuuuaugacccucucgucuuccccagcgaugaguuugacgccuccaucucucaggugaacgagaaaauuaaccagagccuggcuuucauccgcaaguccgaugaacugcuccacaaugugaacgccggcaagagcacaaccaauauuaugaucacgaccauuaucaucguuauuaucgucauucugcuuucucugaucgccguggggcuccugcuguacugcaaagcuagaugaggacuaguacuggcugcaucucccuuuccucuguccuccauccuucucccaggauggugaagggggaccugguacccagugauccccaccccaggauccuaaaucaugacuuaccugcuaauaaaaacucauuggaaaagugagaagaucuaaaaaaaaaaaaaaaaaaaaaaaaaaaaaaaaaaaaaaaaaaaaaaaaaaaaaaaaaaaaaaaaugcaucccccccccccccccccccccccccccccccaaaggcucuuuucagagccaccagaauu

SEQ ID NO: 5934 - RNA, 1904 nt, Artificial Sequence
  mRNA product Design f-3 comprising derived and/or modified sequence from HRSV(A2)__F-del_DSCav1_mut5 (opt6)
gggagagucccgcagucggcguccagcggcucugcuuguucgugugugugucguugcaggccuuauucaagcuuaccauggaacuuuuaauacugaaagcaaaugccaucacaaccauacuaacugccgucacauucugcuuugcaucaggacaaaacauaacagaagaauuuuaccaauccacaugcucagcaguaucaaaaggauaucuaucggcacuuagaacuggaugguacacaaguguuauaacuauagaacucucaaacauaaaagaaaacaaaugcaauggaacagacgcaaaaguaaaacuaauaaaacaagaacucgauaaauauaaaaaugcaguaaccgaacuacaacuauuaaugcaaagcacacccgcaacaggcagcggaucagcaauagcaagcggagucgcaguauguaaaguacuacaucuagaaggagaagucaacaaaaucaaaucugcacuucuauccacaaacaaagcuguaguaucccuauccggaugcggagucucaguauuaacuuuuaaaguacuagaccuuaaaaacuacauagauaaacaacuauuaccaauacuaaauaaacaaucaugcagcauauccaauauagagacaguaauugaauuucaacaaaaaaacaacagauuacuagaaauuacucgugaauuuuccguaaaugccggagucacaacaccaguaucaaccuauaugcuaacaaacagcgaacuacuuagcuuaauaaaugacaugccaauaacaaaugaccaaaaaaaacuuaugucaaauaacguacaaaucgucagacaacaauccuacucuauaauguguauaauuaaagaagaaguccuagcauacguaguucaauuaccacucuauggaguaauagauacaccaugcuggaaacuacacacgucaccacuauguacaacaaacacaaaagaaggauccaauauaugccuaacaagaaccgacagaggcugguauugugacaacgcaggauccguuucauucuucccacaagcagaaaccuguaaaguacaaucuaauagaguauuuugcgacacaaugaacaguagaacacuaccaagcgagguuaaucuauguaacguagacauauucaauccaaaauaugauugcaaaauaaugacaucaaaaacagauguaucgucgaguguaauaacaagucugggagcuauaguaagcugcuacggcaagacgaaauguaccgcuucaaauaaaugcagaggaaucauuaaaacauucucgaacggaugcgacuacguaaguaauaaaggugucgacaccguaucaguagggaauacauuauacuacgucaacaaacaagaaggaaaaucucuauauguaaaaggagaaccaauaauaaauuucuaugacccucuaguauucccaucagaugaauuugacgcuuccauaucacaaguaaacgaaaaaaucaaucaaucuuuagcauucauacgaaaaagugaugaacuccuacacaacgucaacgcaggaaaaagcacaacaaauauaaugaucacaacaaucaucauaguaauaauaguaauacuacuaucauuaauagcaguaggauuauugcuuuacugcaaagcacgauagggacuaguacuggcugcaucucccuuuccucuguccuccauccuucucccaggauggugaagggggaccugguacccagugauccccaccccaggauccuaaaucaugacuuaccugcuaauaaaaacucauuggaaaagugagaagaucuaaaaaaaaaaaaaaaaaaaaaaaaaaaaaaaaaaaaaaaaaaaaaaaaaaaaaaaaaaaaaaaaugcaucccccccccccccccccccccccccccccccaaaggcucuuuucagagccaccagaauu

SEQ ID NO: 5935 - RNA, 1904 nt, Artificial Sequence
  mRNA product Design f-3 comprising derived and/or modified sequence from HRSV(A2)__F-del_DSCav1_mut5 (opt11)
gggagagucccgcagucggcguccagcggcucugcuuguucgugugugugucguugcaggccuuauucaagcuuaccauggaacuccucauccucaaagccaacgccauaaccacaauacucaccgccguaaccuucugcuuugcgucgggacaaaacaucaccgaagaguucuaccaauccacuugcuccgcaguaagcaaaggauaccucuccgcccugcgaaccgguugguacacaucagucaucacaaucgaacucucaaacauaaaagaaaacaaaugcaacggcaccgacgcaaaggucaaauuaaucaagcaagaacuagacaaauacaaaaacgccgucacagaacuccagcugcuaaugcagagcacacccgcaacuggcagcggauccgccaucgcaucaggagucgccgugugcaaaguccuacaccucgaaggagaagugaacaaaaucaaaucagcccuacucuccaccaacaaggccgucgucucccucuccggcugcggugucuccguccuaaccuucaaagugcuagaccucaagaacuacaucgacaaacaacuccuaccaauacucaacaagcaaucuugcuccaucuccaacaucgaaaccguaaucgaguuccaacagaagaacaaccgccuccucgaaaucacccgcgaguucucugucaacgcaggggucaccacucccgucuccacauacaugcucacaaacuccgaacuccucagccucaucaacgacaugcccauaaccaacgaccagaaaaagcuaaugagcaauaacguccaaaucguuagacaacaaaguuauuccaucaugugcaucaucaaagaagaaguccucgccuacgucguacaacucccccucuauggcgucaucgacacccccugcuggaaacugcacacaucaccccucugcaccacaaacaccaaagaaggcucaaacaucugccuaacucgcaccgaccgcggcugguacugcgacaacgccggcagcguaucauucuuuccccaagccgaaacaugcaaaguucaauccaaccgcgucuucugcgacacaaugaacuccagaacgcuccccagcgaagucaaccucuguaacguagacaucuucaacccuaaguacgacugcaaaaucaugaccuccaaaacugauguauccuccuccgucaucacaucccugggcgccaucgucagcugcuacggcaaaacaaaaugcacugccucaaacaaaugccgagguaucauaaagaccuucucaaacggaugcgauuacgucagcaacaaaggcgucgacaccgucagugucggcaacacccucuacuacgucaacaaacaagaaggaaaaucccucuacgucaaaggcgaacccaucaucaacuucuacgacccccucgucuuccccagcgacgaguucgacgccuccaucucacaagucaacgaaaagauaaaccaaucucuagccuucauccgcaaauccgaugaacuccugcauaacgucaacgccggcaaauccaccacaaacaucaugaucacuaccauaaucaucgucauaaucguaauccuccuaucucuuaucgcagucggccuacuacucuacugcaaagcccgcuaaggacuaguacuggcugcaucucccuuuccucuguccuccauccuucucccaggauggugaagggggaccugguacccagugauccccaccccaggauccuaaaucaugacuuaccugcuaauaaaaacucauuggaaaagugagaagaucuaaaaaaaaaaaaaaaaaaaaaaaaaaaaaaaaaaaaaaaaaaaaaaaaaaaaaaaaaaaaaaaaugcaucccccccccccccccccccccccccccccccaaaggcucuuuucagagccaccagaauu

SEQ ID NO: 5936 - RNA, 2120 nt, Artificial Sequence
  mRNA product Design f-4 comprising derived and/or modified sequence from HRSV(A2)__F-del_DSCav1_mut5 (opt1)
gggagagucccgcagucggcguccagcggcucugcuuguucgugugugugucguugcaggccuuauucaagcuuaccauggagcugcucauccugaaggccaacgccaucaccaccauccugacggcggugaccuucugcuucgccagcggccagaacaucaccgaggaguucuaccaguccacgugcagcgccgucuccaagggguaccucagcgcccugcggaccggcugguacaccuccgugaucaccaucgagcugagcaacaucaaggagaacaagugcaacgggaccgacgccaaggugaagcucaucaagcaggagcuggacaaguacaagaacgcggucacggagcugcagcuccugaugcaguccaccccggcaaccggcuccggcuccgccaucgcgagcggcgucgccgugugcaaggugcugcaccucgagggggaggucaacaagaucaagagcgcccugcuguccaccaacaaggccguggugagccucuccggcugcggcgucagcgugcugaccuucaaggugcuggaccucaagaacuacaucgacaagcagcugcugcccauccugaacaagcagagcugcuccaucagcaacaucgagacggugaucgaguuccagcagaagaacaaccggcuccuggagaucacccgcgaguucagcgugaacgccggggucaccacccccguguccacguacaugcugaccaacagcgagcuccugucccugaucaacgacaugccgaucaccaacgaccagaagaagcucaugagcaacaacgugcagaucguccggcagcaguccuacagcaucaugugcaucaucaaggaggaggugcuggcguacgugguccagcugccccucuacggcgugaucgacacccccugcuggaagcugcacacgagcccccugugcaccaccaacaccaaggagggguccaacaucugccucacgcgcaccgaccggggcugguacugcgacaacgccggcagcgucuccuucuucccgcaggccgagaccugcaaggugcagagcaaccgcguguucugcgacaccaugaacucccggacgcugcccagcgagguaaaccucugcaacgucgacaucuucaaccccaaguacgacugcaagaucaugaccuccaagaccgacgugagcuccagcgugaucaccucccugggggccaucgucagcugcuacggcaagacgaagugcaccgccagcaacaagugccgggggaucaucaagaccuucuccaacggcugcgacuacgugagcaacaagggcguggacaccguguccgucgggaacacccuguacuacgugaacaagcaggagggcaagagccucuacgugaagggggagcccaucaucaacuucuacgacccgcuggucuuccccuccgacgaguucgacgcgagcaucucccaggugaacgagaagaucaaccagagccuggccuucauccgcaaguccgacgagcugcuccacaacgugaacgccggcaagagcacgaccaacaucaugaucaccaccaucaucaucgucaucaucgugauccugcugucccucaucgccguggggcugcugcucuacugcaaggcccggugaggacuagugaagggaacacccaaauuuaauucagccuuaagcacaauuaauuaagagugaaacguaauuguacaagcaguuggucacccaccauagggcaugaucaacaccgcaaccuuuccuuuuucccccagugauucugaaaaaccccucuucccuucagcuugcuuagauguuccaaauuuaguaagcuuaaggcggccuacagaagaaaaagaaaaaaaaggccacaaaaguucccucucacuuucaguaaauaaaauaaaagcagcaacagaaauaaagaaauaaaugaaauucaaaaugaaauaaauauuguguugugcagcauuaaaaaaucaauaaaaauuaaaaaugagcaagaucuaaaaaaaaaaaaaaaaaaaaaaaaaaaaaaaaaaaaaaaaaaaaaaaaaaaaaaaaaaaaaaaaugcaucccccccccccccccccccccccccccccccaaaggcucuuuucagagccaccagaauu

SEQ ID NO: 5937 - RNA, 2120 nt, Artificial Sequence
  mRNA product Design f-4 comprising derived and/or modified sequence from HRSV(A2)__F-del_DSCav1_mut5 (opt1)
gggagagucccgcagucggcguccagcggcucugcuuguucgugugugugucguugcaggccuuauucaagcuuaccauggagcugcucauccugaaggccaacgccaucaccaccauccugacggcggugaccuucugcuucgccagcggccagaacaucaccgaggaguucuaccaguccacgugcagcgccgucuccaagggguaccucagcgcccugcgcaccggcugguacaccuccgugaucaccaucgagcugagcaacaucaaggagaacaagugcaacgggaccgacgccaaggugaagcucaucaagcaggagcuggacaaguacaagaacgcggucacggagcugcagcuccugaugcaguccacccccgccaccggcagcggguccgccaucgccagcggcguggcggugugcaagguccugcaccucgagggcgaggugaacaagaucaaguccgcccugcugagcaccaacaaggccguggucucccucagcgggugcggcguguccgugcugacguucaagguccuggaccucaagaacuacaucgacaagcagcugcugccgauccucaacaagcagagcugcuccaucagcaacaucgagaccgugaucgaguuccagcagaagaacaaccggcugcuggagaucacccgcgaguucuccgugaacgccggggucaccacgcccgugagcaccuacaugcucaccaacagcgagcugcugucccucaucaacgacaugcccaucaccaacgaccagaagaagcugaugagcaacaacgugcagaucguccggcagcaguccuacagcaucaugugcaucaucaaggaggaggugcuggccuacgugguccagcucccccuguacggcgugaucgacacgccgugcuggaagcugcacaccagcccccucugcaccaccaacacgaaggagggguccaacaucugccugacccgcaccgaccggggcugguacugcgacaacgcgggcuccgugagcuucuucccccaggccgagaccugcaagguccaguccaaccgcguguucugcgacacgaugaacagccggacccuccccuccgaggucaaccugugcaacguggacaucuucaacccgaaguacgacugcaagaucaugaccagcaagaccgacguguccagcuccgucaucacgagccugggggccaucguguccugcuacggcaagaccaagugcaccgccagcaacaagugccgggggaucaucaagaccuucuccaacggcugcgacuacgugagcaacaagggcgucgacacggugagcguggggaacacccucuacuacgucaacaagcaggagggcaagucccuguacgugaagggggagcccaucaucaacuucuacgacccccugguguuccccagcgacgaguucgacgccuccaucagccaggucaacgagaagaucaaccagucccucgcguucauccgcaagagcgacgagcugcugcacaacgugaacgccggcaaguccaccaccaacaucaugaucaccacgaucaucaucgugaucaucgucauccuccugagccugaucgccguggggcuccugcuguacugcaaggcccggugaggacuagugaagggaacacccaaauuuaauucagccuuaagcacaauuaauuaagagugaaacguaauuguacaagcaguuggucacccaccauagggcaugaucaacaccgcaaccuuuccuuuuucccccagugauucugaaaaaccccucuucccuucagcuugcuuagauguuccaaauuuaguaagcuuaaggcggccuacagaagaaaaagaaaaaaaaggccacaaaaguucccucucacuuucaguaaauaaaauaaaagcagcaacagaaauaaagaaauaaaugaaauucaaaaugaaauaaauauuguguugugcagcauuaaaaaaucaauaaaaauuaaaaaugagcaagaucuaaaaaaaaaaaaaaaaaaaaaaaaaaaaaaaaaaaaaaaaaaaaaaaaaaaaaaaaaaaaaaaaugcaucccccccccccccccccccccccccccccccaaaggcucuuuucagagccaccagaauu

SEQ ID NO: 5938 - RNA, 2120 nt, Artificial Sequence
  mRNA product Design f-4 comprising derived and/or modified sequence from HRSV(A2)__F-del_DSCav1_mut5 (opt2)
gggagagucccgcagucggcguccagcggcucugcuuguucgugugugugucguugcaggccuuauucaagcuuaccauggagcuccucauccucaaggccaacgccaucaccaccauccucaccgccgucaccuucugcuucgccuccggccagaacaucaccgaggaguucuaccaguccaccugcuccgccgucuccaagggcuaccucuccgcccuccgcaccggcugguacaccuccgucaucaccaucgagcucuccaacaucaaggagaacaagugcaacggcaccgacgccaaggucaagcucaucaagcaggagcucgacaaguacaagaacgccgucaccgagcuccagcuccucaugcaguccacccccgccaccggcuccggcuccgccaucgccuccggcgucgccgucugcaagguccuccaccucgagggcgaggucaacaagaucaaguccgcccuccucuccaccaacaaggccgucgucucccucuccggcugcggcgucuccguccucaccuucaagguccucgaccucaagaacuacaucgacaagcagcuccuccccauccucaacaagcaguccugcuccaucuccaacaucgagaccgucaucgaguuccagcagaagaacaaccgccuccucgagaucacccgcgaguucuccgucaacgccggcgucaccacccccgucuccaccuacaugcucaccaacuccgagcuccucucccucaucaacgacaugcccaucaccaacgaccagaagaagcucauguccaacaacguccagaucguccgccagcaguccuacuccaucaugugcaucaucaaggaggagguccucgccuacgucguccagcucccccucuacggcgucaucgacacccccugcuggaagcuccacaccuccccccucugcaccaccaacaccaaggagggcuccaacaucugccucacccgcaccgaccgcggcugguacugcgacaacgccggcuccgucuccuucuucccccaggccgagaccugcaagguccaguccaaccgcgucuucugcgacaccaugaacucccgcacccuccccuccgaggucaaccucugcaacgucgacaucuucaaccccaaguacgacugcaagaucaugaccuccaagaccgacgucuccuccuccgucaucaccucccucggcgccaucgucuccugcuacggcaagaccaagugcaccgccuccaacaagugccgcggcaucaucaagaccuucuccaacggcugcgacuacgucuccaacaagggcgucgacaccgucuccgucggcaacacccucuacuacgucaacaagcaggagggcaagucccucuacgucaagggcgagcccaucaucaacuucuacgacccccucgucuuccccuccgacgaguucgacgccuccaucucccaggucaacgagaagaucaaccagucccucgccuucauccgcaaguccgacgagcuccuccacaacgucaacgccggcaaguccaccaccaacaucaugaucaccaccaucaucaucgucaucaucgucauccuccucucccucaucgccgucggccuccuccucuacugcaaggcccgcugaggacuagugaagggaacacccaaauuuaauucagccuuaagcacaauuaauuaagagugaaacguaauuguacaagcaguuggucacccaccauagggcaugaucaacaccgcaaccuuuccuuuuucccccagugauucugaaaaaccccucuucccuucagcuugcuuagauguuccaaauuuaguaagcuuaaggcggccuacagaagaaaaagaaaaaaaaggccacaaaaguucccucucacuuucaguaaauaaaauaaaagcagcaacagaaauaaagaaauaaaugaaauucaaaaugaaauaaauauuguguugugcagcauuaaaaaaucaauaaaaauuaaaaaugagcaagaucuaaaaaaaaaaaaaaaaaaaaaaaaaaaaaaaaaaaaaaaaaaaaaaaaaaaaaaaaaaaaaaaaugcaucccccccccccccccccccccccccccccccaaaggcucuuuucagagccaccagaauu

SEQ ID NO: 5939 - RNA, 2120 nt, Artificial Sequence
  mRNA product Design f-4 comprising derived and/or modified sequence from HRSV(A2)__F-del_DSCav1_mut5 (opt3)
gggagagucccgcagucggcguccagcggcucugcuuguucgugugugugucguugcaggccuuauucaagcuuaccauggagcugcucauccuuaaggccaacgcuauuaccacaauacugacugcagugacguucugcuuugccagcggccagaauaucaccgaagaguucuaccaauccacauguucugcggucucaaaaggguauuugagugcuuuaagaacuggaugguacaccagcguuauuacaaucgaacuguccaacauuaaggagaauaaaugcaacgguaccgacgccaaggugaaacuaaucaagcaggaacucgauaaguauaaaaaugcaguaacugagcugcagcuucugaugcagucuacacccgccaccggcucggggucagcuauagcaagcggaguggccgucuguaagguguugcaccucgagggcgaaguuaacaaaaucaagagugcucugcuguccacgaauaaagccguggucucucucagcgguugcgggguguccguauuaacuuuuaagguucuggaccuuaagaacuacauugauaaacaauugcugccuauccuaaauaagcagucauguaguauuagcaacaucgagaccgugauagaguuccagcagaaaaauaacaggcuccuggaaauuacacgggaguuuucugucaaugcgggagugacuaccccaguguccacauauaugcuuaccaacucagaacuguugagccucaucaaugacaugccgauuacgaacgaucaaaagaaacugaugaguaacaauguccagaucguucgccagcagucuuacuccaucaugugcauuauaaaggaggaaguguuagcauauguagugcaacugccccucuacggcgucaucgacacuccuuguuggaaacuucauacaagcccacugugcaccacuaacacaaaggagggcucgaauauuuguuugacccgaacggaucgugggugguacugcgacaacgccggaucuguguccuucuuuccccaggcugaaaccuguaagguucagucaaauagaguguucugcgauacaaugaacaguagaacucugccuagcgaggucaaucucugcaacguggacaucuuuaauccaaaauaugauuguaagauaaugaccuccaaaacagacguaucuagcucaguuauuaccagucugggugccaucguguccugcuacggcaagacuaaauguacagcaagcaacaagugcagggggaucauuaagaccuucucuaauggaugugauuaugucucaaacaaaggcguggacacugucaguguggguaauacgcuuuacuauguuaacaagcaagaggggaaaagccuguacgugaagggagaacccaucauuaauuuuuaugacccuuugguauucccauccgaugaguuugacgcuucuauaucgcaggucaacgagaaaaucaaccagagccucgccuucauucggaaguccgaugaacuguuacacaaugugaacgcgggcaagucaacaaccaauaucaugaucacuaccauuauaaucguuauuaucgugauucugcuaagucucaucgccgucggccugcuuuuguacugcaaagcacgcugaggacuagugaagggaacacccaaauuuaauucagccuuaagcacaauuaauuaagagugaaacguaauuguacaagcaguuggucacccaccauagggcaugaucaacaccgcaaccuuuccuuuuucccccagugauucugaaaaaccccucuucccuucagcuugcuuagauguuccaaauuuaguaagcuuaaggcggccuacagaagaaaaagaaaaaaaaggccacaaaaguucccucucacuuucaguaaauaaaauaaaagcagcaacagaaauaaagaaauaaaugaaauucaaaaugaaauaaauauuguguugugcagcauuaaaaaaucaauaaaaauuaaaaaugagcaagaucuaaaaaaaaaaaaaaaaaaaaaaaaaaaaaaaaaaaaaaaaaaaaaaaaaaaaaaaaaaaaaaaaugcaucccccccccccccccccccccccccccccccaaaggcucuuuucagagccaccagaauu

SEQ ID NO: 5940 - RNA, 2120 nt, Artificial Sequence
  mRNA product Design f-4 comprising derived and/or modified sequence from HRSV(A2)__F-del_DSCav1_mut5 (opt4)
gggagagucccgcagucggcguccagcggcucugcuuguucgugugugugucguugcaggccuuauucaagcuuaccauggagcugcugauccugaaggccaacgccaucaccaccauccugaccgccgugaccuucugcuucgccagcggccagaacaucaccgaggaguucuaccagagcaccugcagcgccgugagcaagggcuaccugagcgcccugagaaccggcugguacaccagcgugaucaccaucgagcugagcaacaucaaggagaacaagugcaacggcaccgacgccaaggugaagcugaucaagcaggagcuggacaaguacaagaacgccgugaccgagcugcagcugcugaugcagagcacccccgccaccggcagcggcagcgccaucgccagcggcguggccgugugcaaggugcugcaccuggagggcgaggugaacaagaucaagagcgcccugcugagcaccaacaaggccguggugagccugagcggcugcggcgugagcgugcugaccuucaaggugcuggaccugaagaacuacaucgacaagcagcugcugcccauccugaacaagcagagcugcagcaucagcaacaucgagaccgugaucgaguuccagcagaagaacaacagacugcuggagaucaccagagaguucagcgugaacgccggcgugaccacccccgugagcaccuacaugcugaccaacagcgagcugcugagccugaucaacgacaugcccaucaccaacgaccagaagaagcugaugagcaacaacgugcagaucgugagacagcagagcuacagcaucaugugcaucaucaaggaggaggugcuggccuacguggugcagcugccccuguacggcgugaucgacacccccugcuggaagcugcacaccagcccccugugcaccaccaacaccaaggagggcagcaacaucugccugaccagaaccgacagaggcugguacugcgacaacgccggcagcgugagcuucuucccccaggccgagaccugcaaggugcagagcaacagaguguucugcgacaccaugaacagcagaacccugcccagcgaggugaaccugugcaacguggacaucuucaaccccaaguacgacugcaagaucaugaccagcaagaccgacgugagcagcagcgugaucaccagccugggcgccaucgugagcugcuacggcaagaccaagugcaccgccagcaacaagugcagaggcaucaucaagaccuucagcaacggcugcgacuacgugagcaacaagggcguggacaccgugagcgugggcaacacccuguacuacgugaacaagcaggagggcaagagccuguacgugaagggcgagcccaucaucaacuucuacgacccccugguguuccccagcgacgaguucgacgccagcaucagccaggugaacgagaagaucaaccagagccuggccuucaucagaaagagcgacgagcugcugcacaacgugaacgccggcaagagcaccaccaacaucaugaucaccaccaucaucaucgugaucaucgugauccugcugagccugaucgccgugggccugcugcuguacugcaaggccagaugaggacuagugaagggaacacccaaauuuaauucagccuuaagcacaauuaauuaagagugaaacguaauuguacaagcaguuggucacccaccauagggcaugaucaacaccgcaaccuuuccuuuuucccccagugauucugaaaaaccccucuucccuucagcuugcuuagauguuccaaauuuaguaagcuuaaggcggccuacagaagaaaaagaaaaaaaaggccacaaaaguucccucucacuuucaguaaauaaaauaaaagcagcaacagaaauaaagaaauaaaugaaauucaaaaugaaauaaauauuguguugugcagcauuaaaaaaucaauaaaaauuaaaaaugagcaagaucuaaaaaaaaaaaaaaaaaaaaaaaaaaaaaaaaaaaaaaaaaaaaaaaaaaaaaaaaaaaaaaaaugcaucccccccccccccccccccccccccccccccaaaggcucuuuucagagccaccagaauu

SEQ ID NO: 5941 - RNA, 2120 nt, Artificial Sequence
  mRNA product Design f-4 comprising derived and/or modified sequence from HRSV(A2)__F-del_DSCav1_mut5 (opt5)
gggagagucccgcagucggcguccagcggcucugcuuguucgugugugugucguugcaggccuuauucaagcuuaccauggagcugcucauccugaaggccaacgcuauuaccacaauccuuacggccgugaccuucugcuuugcgagcggccagaauauuacagaagaguucuaccaauccaccuguucugcugucagcaaaggguaucuguccgcccucagaacaggaugguacaccucuguuaucacaauugaacugagcaacaucaaggagaauaaaugcaacggcaccgacgccaaggugaaacuuaucaagcaggaacuggauaaguauaaaaaugcugugacggagcuccagcugcugaugcaguccacccccgccacagggucuggaagcgcuauugccuccggcgucgcgguguguaagguucuccaccuggagggggaagugaacaaaaucaagagcgcccuucugucuaccaauaaagcugucgugucccucagcggaugcggcguuucugugcugacauuuaagguccuugaccugaagaacuacauugauaaacaacuccugccuauccugaauaagcaguccuguagcauuucuaacaucgagaccgugauugaguuccagcagaaaaauaaccggcuccuggaaaucacgcgcgaguuuuccgugaaugccggcgucacaaccccgguuagcacauauaugcuuaccaacuccgaacugcucucucugaucaaugacaugcccauuaccaacgaucaaaagaaacuuaugagcaacaaugugcagaucgugagacagcaguccuacagcauuaugugcaucauuaaggaggaaguccuggcuuaugugguucaacucccucuguacggggugaucgacacacccuguuggaaacugcauacgucuccucucugcaccacaaacaccaaggagggauccaauaucugucugacacggaccgaucgcggcugguacugcgacaacgccgggagcgucucuuucuuuccccaggcggaaacguguaaggugcagagcaauagaguuuucugcgauacaaugaacuccagaacccugccuucugaggugaaucucugcaacgucgacauuuuuaauccgaaauaugauuguaagaucaugaccagcaaaacagacguguccagcucugucauuaccucccugggagccaucgugagcugcuacggcaagacaaaauguacggcuucuaacaagugccgggggauuaucaagaccuucuccaauggaugugauuauguuagcaacaaaggcguggacacagucuccgugggcaauacccuuuacuauguuaacaagcaagaggggaaaucucuguacgugaagggagaacccaucauuaauuuuuaugacccucucgucuuccccagcgaugaguuugacgccuccaucucucaggugaacgagaaaauuaaccagagccuggcuuucauccgcaaguccgaugaacugcuccacaaugugaacgccggcaagagcacaaccaauauuaugaucacgaccauuaucaucguuauuaucgucauucugcuuucucugaucgccguggggcuccugcuguacugcaaagcuagaugaggacuagugaagggaacacccaaauuuaauucagccuuaagcacaauuaauuaagagugaaacguaauuguacaagcaguuggucacccaccauagggcaugaucaacaccgcaaccuuuccuuuuucccccagugauucugaaaaaccccucuucccuucagcuugcuuagauguuccaaauuuaguaagcuuaaggcggccuacagaagaaaaagaaaaaaaaggccacaaaaguucccucucacuuucaguaaauaaaauaaaagcagcaacagaaauaaagaaauaaaugaaauucaaaaugaaauaaauauuguguugugcagcauuaaaaaaucaauaaaaauuaaaaaugagcaagaucuaaaaaaaaaaaaaaaaaaaaaaaaaaaaaaaaaaaaaaaaaaaaaaaaaaaaaaaaaaaaaaaaugcaucccccccccccccccccccccccccccccccaaaggcucuuuucagagccaccagaauu

SEQ ID NO: 5942 - RNA, 2120 nt, Artificial Sequence
  mRNA product Design f-4 comprising derived and/or modified sequence from HRSV(A2)__F-del_DSCav1_mut5 (opt6)
gggagagucccgcagucggcguccagcggcucugcuuguucgugugugugucguugcaggccuuauucaagcuuaccauggaacuuuuaauacugaaagcaaaugccaucacaaccauacuaacugccgucacauucugcuuugcaucaggacaaaacauaacagaagaauuuuaccaauccacaugcucagcaguaucaaaaggauaucuaucggcacuuagaacuggaugguacacaaguguuauaacuauagaacucucaaacauaaaagaaaacaaaugcaauggaacagacgcaaaaguaaaacuaauaaaacaagaacucgauaaauauaaaaaugcaguaaccgaacuacaacuauuaaugcaaagcacacccgcaacaggcagcggaucagcaauagcaagcggagucgcaguauguaaaguacuacaucuagaaggagaagucaacaaaaucaaaucugcacuucuauccacaaacaaagcuguaguaucccuauccggaugcggagucucaguauuaacuuuuaaaguacuagaccuuaaaaacuacauagauaaacaacuauuaccaauacuaaauaaacaaucaugcagcauauccaauauagagacaguaauugaauuucaacaaaaaaacaacagauuacuagaaauuacucgugaauuuuccguaaaugccggagucacaacaccaguaucaaccuauaugcuaacaaacagcgaacuacuuagcuuaauaaaugacaugccaauaacaaaugaccaaaaaaaacuuaugucaaauaacguacaaaucgucagacaacaauccuacucuauaauguguauaauuaaagaagaaguccuagcauacguaguucaauuaccacucuauggaguaauagauacaccaugcuggaaacuacacacgucaccacuauguacaacaaacacaaaagaaggauccaauauaugccuaacaagaaccgacagaggcugguauugugacaacgcaggauccguuucauucuucccacaagcagaaaccuguaaaguacaaucuaauagaguauuuugcgacacaaugaacaguagaacacuaccaagcgagguuaaucuauguaacguagacauauucaauccaaaauaugauugcaaaauaaugacaucaaaaacagauguaucgucgaguguaauaacaagucugggagcuauaguaagcugcuacggcaagacgaaauguaccgcuucaaauaaaugcagaggaaucauuaaaacauucucgaacggaugcgacuacguaaguaauaaaggugucgacaccguaucaguagggaauacauuauacuacgucaacaaacaagaaggaaaaucucuauauguaaaaggagaaccaauaauaaauuucuaugacccucuaguauucccaucagaugaauuugacgcuuccauaucacaaguaaacgaaaaaaucaaucaaucuuuagcauucauacgaaaaagugaugaacuccuacacaacgucaacgcaggaaaaagcacaacaaauauaaugaucacaacaaucaucauaguaauaauaguaauacuacuaucauuaauagcaguaggauuauugcuuuacugcaaagcacgauagggacuagugaagggaacacccaaauuuaauucagccuuaagcacaauuaauuaagagugaaacguaauuguacaagcaguuggucacccaccauagggcaugaucaacaccgcaaccuuuccuuuuucccccagugauucugaaaaaccccucuucccuucagcuugcuuagauguuccaaauuuaguaagcuuaaggcggccuacagaagaaaaagaaaaaaaaggccacaaaaguucccucucacuuucaguaaauaaaauaaaagcagcaacagaaauaaagaaauaaaugaaauucaaaaugaaauaaauauuguguugugcagcauuaaaaaaucaauaaaaauuaaaaaugagcaagaucuaaaaaaaaaaaaaaaaaaaaaaaaaaaaaaaaaaaaaaaaaaaaaaaaaaaaaaaaaaaaaaaaugcaucccccccccccccccccccccccccccccccaaaggcucuuuucagagccaccagaauu

SEQ ID NO: 5943 - RNA, 2120 nt, Artificial Sequence
  mRNA product Design f-4 comprising derived and/or modified sequence from HRSV(A2)__F-del_DSCav1_mut5 (opt11)
gggagagucccgcagucggcguccagcggcucugcuuguucgugugugugucguugcaggccuuauucaagcuuaccauggaacuccucauccucaaagccaacgccauaaccacaauacucaccgccguaaccuucugcuuugcgucgggacaaaacaucaccgaagaguucuaccaauccacuugcuccgcaguaagcaaaggauaccucuccgcccugcgaaccgguugguacacaucagucaucacaaucgaacucucaaacauaaaagaaaacaaaugcaacggcaccgacgcaaaggucaaauuaaucaagcaagaacuagacaaauacaaaaacgccgucacagaacuccagcugcuaaugcagagcacacccgcaacuggcagcggauccgccaucgcaucaggagucgccgugugcaaaguccuacaccucgaaggagaagugaacaaaaucaaaucagcccuacucuccaccaacaaggccgucgucucccucuccggcugcggugucuccguccuaaccuucaaagugcuagaccucaagaacuacaucgacaaacaacuccuaccaauacucaacaagcaaucuugcuccaucuccaacaucgaaaccguaaucgaguuccaacagaagaacaaccgccuccucgaaaucacccgcgaguucucugucaacgcaggggucaccacucccgucuccacauacaugcucacaaacuccgaacuccucagccucaucaacgacaugcccauaaccaacgaccagaaaaagcuaaugagcaauaacguccaaaucguuagacaacaaaguuauuccaucaugugcaucaucaaagaagaaguccucgccuacgucguacaacucccccucuauggcgucaucgacacccccugcuggaaacugcacacaucaccccucugcaccacaaacaccaaagaaggcucaaacaucugccuaacucgcaccgaccgcggcugguacugcgacaacgccggcagcguaucauucuuuccccaagccgaaacaugcaaaguucaauccaaccgcgucuucugcgacacaaugaacuccagaacgcuccccagcgaagucaaccucuguaacguagacaucuucaacccuaaguacgacugcaaaaucaugaccuccaaaacugauguauccuccuccgucaucacaucccugggcgccaucgucagcugcuacggcaaaacaaaaugcacugccucaaacaaaugccgagguaucauaaagaccuucucaaacggaugcgauuacgucagcaacaaaggcgucgacaccgucagugucggcaacacccucuacuacgucaacaaacaagaaggaaaaucccucuacgucaaaggcgaacccaucaucaacuucuacgacccccucgucuuccccagcgacgaguucgacgccuccaucucacaagucaacgaaaagauaaaccaaucucuagccuucauccgcaaauccgaugaacuccugcauaacgucaacgccggcaaauccaccacaaacaucaugaucacuaccauaaucaucgucauaaucguaauccuccuaucucuuaucgcagucggccuacuacucuacugcaaagcccgcuaaggacuagugaagggaacacccaaauuuaauucagccuuaagcacaauuaauuaagagugaaacguaauuguacaagcaguuggucacccaccauagggcaugaucaacaccgcaaccuuuccuuuuucccccagugauucugaaaaaccccucuucccuucagcuugcuuagauguuccaaauuuaguaagcuuaaggcggccuacagaagaaaaagaaaaaaaaggccacaaaaguucccucucacuuucaguaaauaaaauaaaagcagcaacagaaauaaagaaauaaaugaaauucaaaaugaaauaaauauuguguugugcagcauuaaaaaaucaauaaaaauuaaaaaugagcaagaucuaaaaaaaaaaaaaaaaaaaaaaaaaaaaaaaaaaaaaaaaaaaaaaaaaaaaaaaaaaaaaaaaugcaucccccccccccccccccccccccccccccccaaaggcucuuuucagagccaccagaauu

SEQ ID NO: 5944 - RNA, 1896 nt, Artificial Sequence
  mRNA product Design f-5 comprising derived and/or modified sequence from HRSV(A2)__F-del_DSCav1_mut5 (opt1)
gggagacuuucccauucuguagcagaauuugguguugccuguggucuuggucccgcggagaagcuuaccauggagcugcucauccugaaggccaacgccaucaccaccauccugacggcggugaccuucugcuucgccagcggccagaacaucaccgaggaguucuaccaguccacgugcagcgccgucuccaagggguaccucagcgcccugcggaccggcugguacaccuccgugaucaccaucgagcugagcaacaucaaggagaacaagugcaacgggaccgacgccaaggugaagcucaucaagcaggagcuggacaaguacaagaacgcggucacggagcugcagcuccugaugcaguccaccccggcaaccggcuccggcuccgccaucgcgagcggcgucgccgugugcaaggugcugcaccucgagggggaggucaacaagaucaagagcgcccugcuguccaccaacaaggccguggugagccucuccggcugcggcgucagcgugcugaccuucaaggugcuggaccucaagaacuacaucgacaagcagcugcugcccauccugaacaagcagagcugcuccaucagcaacaucgagacggugaucgaguuccagcagaagaacaaccggcuccuggagaucacccgcgaguucagcgugaacgccggggucaccacccccguguccacguacaugcugaccaacagcgagcuccugucccugaucaacgacaugccgaucaccaacgaccagaagaagcucaugagcaacaacgugcagaucguccggcagcaguccuacagcaucaugugcaucaucaaggaggaggugcuggcguacgugguccagcugccccucuacggcgugaucgacacccccugcuggaagcugcacacgagcccccugugcaccaccaacaccaaggagggguccaacaucugccucacgcgcaccgaccggggcugguacugcgacaacgccggcagcgucuccuucuucccgcaggccgagaccugcaaggugcagagcaaccgcguguucugcgacaccaugaacucccggacgcugcccagcgagguaaaccucugcaacgucgacaucuucaaccccaaguacgacugcaagaucaugaccuccaagaccgacgugagcuccagcgugaucaccucccugggggccaucgucagcugcuacggcaagacgaagugcaccgccagcaacaagugccgggggaucaucaagaccuucuccaacggcugcgacuacgugagcaacaagggcguggacaccguguccgucgggaacacccuguacuacgugaacaagcaggagggcaagagccucuacgugaagggggagcccaucaucaacuucuacgacccgcuggucuuccccuccgacgaguucgacgcgagcaucucccaggugaacgagaagaucaaccagagccuggccuucauccgcaaguccgacgagcugcuccacaacgugaacgccggcaagagcacgaccaacaucaugaucaccaccaucaucaucgucaucaucgugauccugcugucccucaucgccguggggcugcugcucuacugcaaggcccggugaggacuaguacuggcugcaucucccuuuccucuguccuccauccuucucccaggauggugaagggggaccugguacccagugauccccaccccaggauccuaaaucaugacuuaccugcuaauaaaaacucauuggaaaagugagaagaucuaaaaaaaaaaaaaaaaaaaaaaaaaaaaaaaaaaaaaaaaaaaaaaaaaaaaaaaaaaaaaaaaugcaucccccccccccccccccccccccccccccccaaaggcucuuuucagagccaccagaauu

SEQ ID NO: 5945 - RNA, 1896 nt, Artificial Sequence
  mRNA product Design f-5 comprising derived and/or modified sequence from HRSV(A2)__F-del_DSCav1_mut5 (opt1)
gggagacuuucccauucuguagcagaauuugguguugccuguggucuuggucccgcggagaagcuuaccauggagcugcucauccugaaggccaacgccaucaccaccauccugacggcggugaccuucugcuucgccagcggccagaacaucaccgaggaguucuaccaguccacgugcagcgccgucuccaagggguaccucagcgcccugcgcaccggcugguacaccuccgugaucaccaucgagcugagcaacaucaaggagaacaagugcaacgggaccgacgccaaggugaagcucaucaagcaggagcuggacaaguacaagaacgcggucacggagcugcagcuccugaugcaguccacccccgccaccggcagcggguccgccaucgccagcggcguggcggugugcaagguccugcaccucgagggcgaggugaacaagaucaaguccgcccugcugagcaccaacaaggccguggucucccucagcgggugcggcguguccgugcugacguucaagguccuggaccucaagaacuacaucgacaagcagcugcugccgauccucaacaagcagagcugcuccaucagcaacaucgagaccgugaucgaguuccagcagaagaacaaccggcugcuggagaucacccgcgaguucuccgugaacgccggggucaccacgcccgugagcaccuacaugcucaccaacagcgagcugcugucccucaucaacgacaugcccaucaccaacgaccagaagaagcugaugagcaacaacgugcagaucguccggcagcaguccuacagcaucaugugcaucaucaaggaggaggugcuggccuacgugguccagcucccccuguacggcgugaucgacacgccgugcuggaagcugcacaccagcccccucugcaccaccaacacgaaggagggguccaacaucugccugacccgcaccgaccggggcugguacugcgacaacgcgggcuccgugagcuucuucccccaggccgagaccugcaagguccaguccaaccgcguguucugcgacacgaugaacagccggacccuccccuccgaggucaaccugugcaacguggacaucuucaacccgaaguacgacugcaagaucaugaccagcaagaccgacguguccagcuccgucaucacgagccugggggccaucguguccugcuacggcaagaccaagugcaccgccagcaacaagugccgggggaucaucaagaccuucuccaacggcugcgacuacgugagcaacaagggcgucgacacggugagcguggggaacacccucuacuacgucaacaagcaggagggcaagucccuguacgugaagggggagcccaucaucaacuucuacgacccccugguguuccccagcgacgaguucgacgccuccaucagccaggucaacgagaagaucaaccagucccucgcguucauccgcaagagcgacgagcugcugcacaacgugaacgccggcaaguccaccaccaacaucaugaucaccacgaucaucaucgugaucaucgucauccuccugagccugaucgccguggggcuccugcuguacugcaaggcccggugaggacuaguacuggcugcaucucccuuuccucuguccuccauccuucucccaggauggugaagggggaccugguacccagugauccccaccccaggauccuaaaucaugacuuaccugcuaauaaaaacucauuggaaaagugagaagaucuaaaaaaaaaaaaaaaaaaaaaaaaaaaaaaaaaaaaaaaaaaaaaaaaaaaaaaaaaaaaaaaaugcaucccccccccccccccccccccccccccccccaaaggcucuuuucagagccaccagaauu

SEQ ID NO: 5946 - RNA, 1896 nt, Artificial Sequence
  mRNA product Design f-5 comprising derived and/or modified sequence from HRSV(A2)__F-del_DSCav1_mut5 (opt2)
gggagacuuucccauucuguagcagaauuugguguugccuguggucuuggucccgcggagaagcuuaccauggagcuccucauccucaaggccaacgccaucaccaccauccucaccgccgucaccuucugcuucgccuccggccagaacaucaccgaggaguucuaccaguccaccugcuccgccgucuccaagggcuaccucuccgcccuccgcaccggcugguacaccuccgucaucaccaucgagcucuccaacaucaaggagaacaagugcaacggcaccgacgccaaggucaagcucaucaagcaggagcucgacaaguacaagaacgccgucaccgagcuccagcuccucaugcaguccacccccgccaccggcuccggcuccgccaucgccuccggcgucgccgucugcaagguccuccaccucgagggcgaggucaacaagaucaaguccgcccuccucuccaccaacaaggccgucgucucccucuccggcugcggcgucuccguccucaccuucaagguccucgaccucaagaacuacaucgacaagcagcuccuccccauccucaacaagcaguccugcuccaucuccaacaucgagaccgucaucgaguuccagcagaagaacaaccgccuccucgagaucacccgcgaguucuccgucaacgccggcgucaccacccccgucuccaccuacaugcucaccaacuccgagcuccucucccucaucaacgacaugcccaucaccaacgaccagaagaagcucauguccaacaacguccagaucguccgccagcaguccuacuccaucaugugcaucaucaaggaggagguccucgccuacgucguccagcucccccucuacggcgucaucgacacccccugcuggaagcuccacaccuccccccucugcaccaccaacaccaaggagggcuccaacaucugccucacccgcaccgaccgcggcugguacugcgacaacgccggcuccgucuccuucuucccccaggccgagaccugcaagguccaguccaaccgcgucuucugcgacaccaugaacucccgcacccuccccuccgaggucaaccucugcaacgucgacaucuucaaccccaaguacgacugcaagaucaugaccuccaagaccgacgucuccuccuccgucaucaccucccucggcgccaucgucuccugcuacggcaagaccaagugcaccgccuccaacaagugccgcggcaucaucaagaccuucuccaacggcugcgacuacgucuccaacaagggcgucgacaccgucuccgucggcaacacccucuacuacgucaacaagcaggagggcaagucccucuacgucaagggcgagcccaucaucaacuucuacgacccccucgucuuccccuccgacgaguucgacgccuccaucucccaggucaacgagaagaucaaccagucccucgccuucauccgcaaguccgacgagcuccuccacaacgucaacgccggcaaguccaccaccaacaucaugaucaccaccaucaucaucgucaucaucgucauccuccucucccucaucgccgucggccuccuccucuacugcaaggcccgcugaggacuaguacuggcugcaucucccuuuccucuguccuccauccuucucccaggauggugaagggggaccugguacccagugauccccaccccaggauccuaaaucaugacuuaccugcuaauaaaaacucauuggaaaagugagaagaucuaaaaaaaaaaaaaaaaaaaaaaaaaaaaaaaaaaaaaaaaaaaaaaaaaaaaaaaaaaaaaaaaugcaucccccccccccccccccccccccccccccccaaaggcucuuuucagagccaccagaauu

SEQ ID NO: 5947 - RNA, 1896 nt, Artificial Sequence
  mRNA product Design f-5 comprising derived and/or modified sequence from HRSV(A2)__F-del_DSCav1_mut5 (opt3)
gggagacuuucccauucuguagcagaauuugguguugccuguggucuuggucccgcggagaagcuuaccauggagcugcucauccuuaaggccaacgcuauuaccacaauacugacugcagugacguucugcuuugccagcggccagaauaucaccgaagaguucuaccaauccacauguucugcggucucaaaaggguauuugagugcuuuaagaacuggaugguacaccagcguuauuacaaucgaacuguccaacauuaaggagaauaaaugcaacgguaccgacgccaaggugaaacuaaucaagcaggaacucgauaaguauaaaaaugcaguaacugagcugcagcuucugaugcagucuacacccgccaccggcucggggucagcuauagcaagcggaguggccgucuguaagguguugcaccucgagggcgaaguuaacaaaaucaagagugcucugcuguccacgaauaaagccguggucucucucagcgguugcgggguguccguauuaacuuuuaagguucuggaccuuaagaacuacauugauaaacaauugcugccuauccuaaauaagcagucauguaguauuagcaacaucgagaccgugauagaguuccagcagaaaaauaacaggcuccuggaaauuacacgggaguuuucugucaaugcgggagugacuaccccaguguccacauauaugcuuaccaacucagaacuguugagccucaucaaugacaugccgauuacgaacgaucaaaagaaacugaugaguaacaauguccagaucguucgccagcagucuuacuccaucaugugcauuauaaaggaggaaguguuagcauauguagugcaacugccccucuacggcgucaucgacacuccuuguuggaaacuucauacaagcccacugugcaccacuaacacaaaggagggcucgaauauuuguuugacccgaacggaucgugggugguacugcgacaacgccggaucuguguccuucuuuccccaggcugaaaccuguaagguucagucaaauagaguguucugcgauacaaugaacaguagaacucugccuagcgaggucaaucucugcaacguggacaucuuuaauccaaaauaugauuguaagauaaugaccuccaaaacagacguaucuagcucaguuauuaccagucugggugccaucguguccugcuacggcaagacuaaauguacagcaagcaacaagugcagggggaucauuaagaccuucucuaauggaugugauuaugucucaaacaaaggcguggacacugucaguguggguaauacgcuuuacuauguuaacaagcaagaggggaaaagccuguacgugaagggagaacccaucauuaauuuuuaugacccuuugguauucccauccgaugaguuugacgcuucuauaucgcaggucaacgagaaaaucaaccagagccucgccuucauucggaaguccgaugaacuguuacacaaugugaacgcgggcaagucaacaaccaauaucaugaucacuaccauuauaaucguuauuaucgugauucugcuaagucucaucgccgucggccugcuuuuguacugcaaagcacgcugaggacuaguacuggcugcaucucccuuuccucuguccuccauccuucucccaggauggugaagggggaccugguacccagugauccccaccccaggauccuaaaucaugacuuaccugcuaauaaaaacucauuggaaaagugagaagaucuaaaaaaaaaaaaaaaaaaaaaaaaaaaaaaaaaaaaaaaaaaaaaaaaaaaaaaaaaaaaaaaaugcaucccccccccccccccccccccccccccccccaaaggcucuuuucagagccaccagaauu

SEQ ID NO: 5948 - RNA, 1896 nt, Artificial Sequence
  mRNA product Design f-5 comprising derived and/or modified sequence from HRSV(A2)__F-del_DSCav1_mut5 (opt4)
gggagacuuucccauucuguagcagaauuugguguugccuguggucuuggucccgcggagaagcuuaccauggagcugcugauccugaaggccaacgccaucaccaccauccugaccgccgugaccuucugcuucgccagcggccagaacaucaccgaggaguucuaccagagcaccugcagcgccgugagcaagggcuaccugagcgcccugagaaccggcugguacaccagcgugaucaccaucgagcugagcaacaucaaggagaacaagugcaacggcaccgacgccaaggugaagcugaucaagcaggagcuggacaaguacaagaacgccgugaccgagcugcagcugcugaugcagagcacccccgccaccggcagcggcagcgccaucgccagcggcguggccgugugcaaggugcugcaccuggagggcgaggugaacaagaucaagagcgcccugcugagcaccaacaaggccguggugagccugagcggcugcggcgugagcgugcugaccuucaaggugcuggaccugaagaacuacaucgacaagcagcugcugcccauccugaacaagcagagcugcagcaucagcaacaucgagaccgugaucgaguuccagcagaagaacaacagacugcuggagaucaccagagaguucagcgugaacgccggcgugaccacccccgugagcaccuacaugcugaccaacagcgagcugcugagccugaucaacgacaugcccaucaccaacgaccagaagaagcugaugagcaacaacgugcagaucgugagacagcagagcuacagcaucaugugcaucaucaaggaggaggugcuggccuacguggugcagcugccccuguacggcgugaucgacacccccugcuggaagcugcacaccagcccccugugcaccaccaacaccaaggagggcagcaacaucugccugaccagaaccgacagaggcugguacugcgacaacgccggcagcgugagcuucuucccccaggccgagaccugcaaggugcagagcaacagaguguucugcgacaccaugaacagcagaacccugcccagcgaggugaaccugugcaacguggacaucuucaaccccaaguacgacugcaagaucaugaccagcaagaccgacgugagcagcagcgugaucaccagccugggcgccaucgugagcugcuacggcaagaccaagugcaccgccagcaacaagugcagaggcaucaucaagaccuucagcaacggcugcgacuacgugagcaacaagggcguggacaccgugagcgugggcaacacccuguacuacgugaacaagcaggagggcaagagccuguacgugaagggcgagcccaucaucaacuucuacgacccccugguguuccccagcgacgaguucgacgccagcaucagccaggugaacgagaagaucaaccagagccuggccuucaucagaaagagcgacgagcugcugcacaacgugaacgccggcaagagcaccaccaacaucaugaucaccaccaucaucaucgugaucaucgugauccugcugagccugaucgccgugggccugcugcuguacugcaaggccagaugaggacuaguacuggcugcaucucccuuuccucuguccuccauccuucucccaggauggugaagggggaccugguacccagugauccccaccccaggauccuaaaucaugacuuaccugcuaauaaaaacucauuggaaaagugagaagaucuaaaaaaaaaaaaaaaaaaaaaaaaaaaaaaaaaaaaaaaaaaaaaaaaaaaaaaaaaaaaaaaaugcaucccccccccccccccccccccccccccccccaaaggcucuuuucagagccaccagaauu

SEQ ID NO: 5949 - RNA, 1896 nt, Artificial Sequence
  mRNA product Design f-5 comprising derived and/or modified sequence from HRSV(A2)__F-del_DSCav1_mut5 (opt5)
gggagacuuucccauucuguagcagaauuugguguugccuguggucuuggucccgcggagaagcuuaccauggagcugcucauccugaaggccaacgcuauuaccacaauccuuacggccgugaccuucugcuuugcgagcggccagaauauuacagaagaguucuaccaauccaccuguucugcugucagcaaaggguaucuguccgcccucagaacaggaugguacaccucuguuaucacaauugaacugagcaacaucaaggagaauaaaugcaacggcaccgacgccaaggugaaacuuaucaagcaggaacuggauaaguauaaaaaugcugugacggagcuccagcugcugaugcaguccacccccgccacagggucuggaagcgcuauugccuccggcgucgcgguguguaagguucuccaccuggagggggaagugaacaaaaucaagagcgcccuucugucuaccaauaaagcugucgugucccucagcggaugcggcguuucugugcugacauuuaagguccuugaccugaagaacuacauugauaaacaacuccugccuauccugaauaagcaguccuguagcauuucuaacaucgagaccgugauugaguuccagcagaaaaauaaccggcuccuggaaaucacgcgcgaguuuuccgugaaugccggcgucacaaccccgguuagcacauauaugcuuaccaacuccgaacugcucucucugaucaaugacaugcccauuaccaacgaucaaaagaaacuuaugagcaacaaugugcagaucgugagacagcaguccuacagcauuaugugcaucauuaaggaggaaguccuggcuuaugugguucaacucccucuguacggggugaucgacacacccuguuggaaacugcauacgucuccucucugcaccacaaacaccaaggagggauccaauaucugucugacacggaccgaucgcggcugguacugcgacaacgccgggagcgucucuuucuuuccccaggcggaaacguguaaggugcagagcaauagaguuuucugcgauacaaugaacuccagaacccugccuucugaggugaaucucugcaacgucgacauuuuuaauccgaaauaugauuguaagaucaugaccagcaaaacagacguguccagcucugucauuaccucccugggagccaucgugagcugcuacggcaagacaaaauguacggcuucuaacaagugccgggggauuaucaagaccuucuccaauggaugugauuauguuagcaacaaaggcguggacacagucuccgugggcaauacccuuuacuauguuaacaagcaagaggggaaaucucuguacgugaagggagaacccaucauuaauuuuuaugacccucucgucuuccccagcgaugaguuugacgccuccaucucucaggugaacgagaaaauuaaccagagccuggcuuucauccgcaaguccgaugaacugcuccacaaugugaacgccggcaagagcacaaccaauauuaugaucacgaccauuaucaucguuauuaucgucauucugcuuucucugaucgccguggggcuccugcuguacugcaaagcuagaugaggacuaguacuggcugcaucucccuuuccucuguccuccauccuucucccaggauggugaagggggaccugguacccagugauccccaccccaggauccuaaaucaugacuuaccugcuaauaaaaacucauuggaaaagugagaagaucuaaaaaaaaaaaaaaaaaaaaaaaaaaaaaaaaaaaaaaaaaaaaaaaaaaaaaaaaaaaaaaaaugcaucccccccccccccccccccccccccccccccaaaggcucuuuucagagccaccagaauu

SEQ ID NO: 5950 - RNA, 1896 nt, Artificial Sequence
  mRNA product Design f-5 comprising derived and/or modified sequence from HRSV(A2)__F-del_DSCav1_mut5 (opt6)
gggagacuuucccauucuguagcagaauuugguguugccuguggucuuggucccgcggagaagcuuaccauggaacuuuuaauacugaaagcaaaugccaucacaaccauacuaacugccgucacauucugcuuugcaucaggacaaaacauaacagaagaauuuuaccaauccacaugcucagcaguaucaaaaggauaucuaucggcacuuagaacuggaugguacacaaguguuauaacuauagaacucucaaacauaaaagaaaacaaaugcaauggaacagacgcaaaaguaaaacuaauaaaacaagaacucgauaaauauaaaaaugcaguaaccgaacuacaacuauuaaugcaaagcacacccgcaacaggcagcggaucagcaauagcaagcggagucgcaguauguaaaguacuacaucuagaaggagaagucaacaaaaucaaaucugcacuucuauccacaaacaaagcuguaguaucccuauccggaugcggagucucaguauuaacuuuuaaaguacuagaccuuaaaaacuacauagauaaacaacuauuaccaauacuaaauaaacaaucaugcagcauauccaauauagagacaguaauugaauuucaacaaaaaaacaacagauuacuagaaauuacucgugaauuuuccguaaaugccggagucacaacaccaguaucaaccuauaugcuaacaaacagcgaacuacuuagcuuaauaaaugacaugccaauaacaaaugaccaaaaaaaacuuaugucaaauaacguacaaaucgucagacaacaauccuacucuauaauguguauaauuaaagaagaaguccuagcauacguaguucaauuaccacucuauggaguaauagauacaccaugcuggaaacuacacacgucaccacuauguacaacaaacacaaaagaaggauccaauauaugccuaacaagaaccgacagaggcugguauugugacaacgcaggauccguuucauucuucccacaagcagaaaccuguaaaguacaaucuaauagaguauuuugcgacacaaugaacaguagaacacuaccaagcgagguuaaucuauguaacguagacauauucaauccaaaauaugauugcaaaauaaugacaucaaaaacagauguaucgucgaguguaauaacaagucugggagcuauaguaagcugcuacggcaagacgaaauguaccgcuucaaauaaaugcagaggaaucauuaaaacauucucgaacggaugcgacuacguaaguaauaaaggugucgacaccguaucaguagggaauacauuauacuacgucaacaaacaagaaggaaaaucucuauauguaaaaggagaaccaauaauaaauuucuaugacccucuaguauucccaucagaugaauuugacgcuuccauaucacaaguaaacgaaaaaaucaaucaaucuuuagcauucauacgaaaaagugaugaacuccuacacaacgucaacgcaggaaaaagcacaacaaauauaaugaucacaacaaucaucauaguaauaauaguaauacuacuaucauuaauagcaguaggauuauugcuuuacugcaaagcacgauagggacuaguacuggcugcaucucccuuuccucuguccuccauccuucucccaggauggugaagggggaccugguacccagugauccccaccccaggauccuaaaucaugacuuaccugcuaauaaaaacucauuggaaaagugagaagaucuaaaaaaaaaaaaaaaaaaaaaaaaaaaaaaaaaaaaaaaaaaaaaaaaaaaaaaaaaaaaaaaaugcaucccccccccccccccccccccccccccccccaaaggcucuuuucagagccaccagaauu

SEQ ID NO: 5951 - RNA, 1896 nt, Artificial Sequence
  mRNA product Design f-5 comprising derived and/or modified sequence from HRSV(A2)__F-del_DSCav1_mut5 (opt11)
gggagacuuucccauucuguagcagaauuugguguugccuguggucuuggucccgcggagaagcuuaccauggaacuccucauccucaaagccaacgccauaaccacaauacucaccgccguaaccuucugcuuugcgucgggacaaaacaucaccgaagaguucuaccaauccacuugcuccgcaguaagcaaaggauaccucuccgcccugcgaaccgguugguacacaucagucaucacaaucgaacucucaaacauaaaagaaaacaaaugcaacggcaccgacgcaaaggucaaauuaaucaagcaagaacuagacaaauacaaaaacgccgucacagaacuccagcugcuaaugcagagcacacccgcaacuggcagcggauccgccaucgcaucaggagucgccgugugcaaaguccuacaccucgaaggagaagugaacaaaaucaaaucagcccuacucuccaccaacaaggccgucgucucccucuccggcugcggugucuccguccuaaccuucaaagugcuagaccucaagaacuacaucgacaaacaacuccuaccaauacucaacaagcaaucuugcuccaucuccaacaucgaaaccguaaucgaguuccaacagaagaacaaccgccuccucgaaaucacccgcgaguucucugucaacgcaggggucaccacucccgucuccacauacaugcucacaaacuccgaacuccucagccucaucaacgacaugcccauaaccaacgaccagaaaaagcuaaugagcaauaacguccaaaucguuagacaacaaaguuauuccaucaugugcaucaucaaagaagaaguccucgccuacgucguacaacucccccucuauggcgucaucgacacccccugcuggaaacugcacacaucaccccucugcaccacaaacaccaaagaaggcucaaacaucugccuaacucgcaccgaccgcggcugguacugcgacaacgccggcagcguaucauucuuuccccaagccgaaacaugcaaaguucaauccaaccgcgucuucugcgacacaaugaacuccagaacgcuccccagcgaagucaaccucuguaacguagacaucuucaacccuaaguacgacugcaaaaucaugaccuccaaaacugauguauccuccuccgucaucacaucccugggcgccaucgucagcugcuacggcaaaacaaaaugcacugccucaaacaaaugccgagguaucauaaagaccuucucaaacggaugcgauuacgucagcaacaaaggcgucgacaccgucagugucggcaacacccucuacuacgucaacaaacaagaaggaaaaucccucuacgucaaaggcgaacccaucaucaacuucuacgacccccucgucuuccccagcgacgaguucgacgccuccaucucacaagucaacgaaaagauaaaccaaucucuagccuucauccgcaaauccgaugaacuccugcauaacgucaacgccggcaaauccaccacaaacaucaugaucacuaccauaaucaucgucauaaucguaauccuccuaucucuuaucgcagucggccuacuacucuacugcaaagcccgcuaaggacuaguacuggcugcaucucccuuuccucuguccuccauccuucucccaggauggugaagggggaccugguacccagugauccccaccccaggauccuaaaucaugacuuaccugcuaauaaaaacucauuggaaaagugagaagaucuaaaaaaaaaaaaaaaaaaaaaaaaaaaaaaaaaaaaaaaaaaaaaaaaaaaaaaaaaaaaaaaaugcaucccccccccccccccccccccccccccccccaaaggcucuuuucagagccaccagaauu

SEQ ID NO: 5952 - RNA, 1892 nt, Artificial Sequence
  mRNA product Design g-1 comprising derived and/or modified sequence from HRSV(A2)__F-del_DSCav1_mut5 (opt1)
gggagacuuucccauucuguagcagaauuugguguugccuguggucuuggucccgcggagaagcuuaccauggagcugcucauccugaaggccaacgccaucaccaccauccugacggcggugaccuucugcuucgccagcggccagaacaucaccgaggaguucuaccaguccacgugcagcgccgucuccaagggguaccucagcgcccugcggaccggcugguacaccuccgugaucaccaucgagcugagcaacaucaaggagaacaagugcaacgggaccgacgccaaggugaagcucaucaagcaggagcuggacaaguacaagaacgcggucacggagcugcagcuccugaugcaguccaccccggcaaccggcuccggcuccgccaucgcgagcggcgucgccgugugcaaggugcugcaccucgagggggaggucaacaagaucaagagcgcccugcuguccaccaacaaggccguggugagccucuccggcugcggcgucagcgugcugaccuucaaggugcuggaccucaagaacuacaucgacaagcagcugcugcccauccugaacaagcagagcugcuccaucagcaacaucgagacggugaucgaguuccagcagaagaacaaccggcuccuggagaucacccgcgaguucagcgugaacgccggggucaccacccccguguccacguacaugcugaccaacagcgagcuccugucccugaucaacgacaugccgaucaccaacgaccagaagaagcucaugagcaacaacgugcagaucguccggcagcaguccuacagcaucaugugcaucaucaaggaggaggugcuggcguacgugguccagcugccccucuacggcgugaucgacacccccugcuggaagcugcacacgagcccccugugcaccaccaacaccaaggagggguccaacaucugccucacgcgcaccgaccggggcugguacugcgacaacgccggcagcgucuccuucuucccgcaggccgagaccugcaaggugcagagcaaccgcguguucugcgacaccaugaacucccggacgcugcccagcgagguaaaccucugcaacgucgacaucuucaaccccaaguacgacugcaagaucaugaccuccaagaccgacgugagcuccagcgugaucaccucccugggggccaucgucagcugcuacggcaagacgaagugcaccgccagcaacaagugccgggggaucaucaagaccuucuccaacggcugcgacuacgugagcaacaagggcguggacaccguguccgucgggaacacccuguacuacgugaacaagcaggagggcaagagccucuacgugaagggggagcccaucaucaacuucuacgacccgcuggucuuccccuccgacgaguucgacgcgagcaucucccaggugaacgagaagaucaaccagagccuggccuucauccgcaaguccgacgagcugcuccacaacgugaacgccggcaagagcacgaccaacaucaugaucaccaccaucaucaucgucaucaucgugauccugcugucccucaucgccguggggcugcugcucuacugcaaggcccggugaggacuaguggaagcauuuuccuggcugauuaaaagaaauuacucagcuauggucaucuguuccuguuagaaggcuaugcagcauauuauauacuaugcgcauguuaugaaaugcauaauaaaaaauuuuaaaaaaucuaaaagaucuaaaaaaaaaaaaaaaaaaaaaaaaaaaaaaaaaaaaaaaaaaaaaaaaaaaaaaaaaaaaaaaaugcaucccccccccccccccccccccccccccccccaaaggcucuuuucagagccaccagaauu

SEQ ID NO: 5953 - RNA, 1892 nt, Artificial Sequence
  mRNA product Design g-1 comprising derived and/or modified sequence from HRSV(A2)__F-del_DSCav1_mut5 (opt1)
gggagacuuucccauucuguagcagaauuugguguugccuguggucuuggucccgcggagaagcuuaccauggagcugcucauccugaaggccaacgccaucaccaccauccugacggcggugaccuucugcuucgccagcggccagaacaucaccgaggaguucuaccaguccacgugcagcgccgucuccaagggguaccucagcgcccugcgcaccggcugguacaccuccgugaucaccaucgagcugagcaacaucaaggagaacaagugcaacgggaccgacgccaaggugaagcucaucaagcaggagcuggacaaguacaagaacgcggucacggagcugcagcuccugaugcaguccacccccgccaccggcagcggguccgccaucgccagcggcguggcggugugcaagguccugcaccucgagggcgaggugaacaagaucaaguccgcccugcugagcaccaacaaggccguggucucccucagcgggugcggcguguccgugcugacguucaagguccuggaccucaagaacuacaucgacaagcagcugcugccgauccucaacaagcagagcugcuccaucagcaacaucgagaccgugaucgaguuccagcagaagaacaaccggcugcuggagaucacccgcgaguucuccgugaacgccggggucaccacgcccgugagcaccuacaugcucaccaacagcgagcugcugucccucaucaacgacaugcccaucaccaacgaccagaagaagcugaugagcaacaacgugcagaucguccggcagcaguccuacagcaucaugugcaucaucaaggaggaggugcuggccuacgugguccagcucccccuguacggcgugaucgacacgccgugcuggaagcugcacaccagcccccucugcaccaccaacacgaaggagggguccaacaucugccugacccgcaccgaccggggcugguacugcgacaacgcgggcuccgugagcuucuucccccaggccgagaccugcaagguccaguccaaccgcguguucugcgacacgaugaacagccggacccuccccuccgaggucaaccugugcaacguggacaucuucaacccgaaguacgacugcaagaucaugaccagcaagaccgacguguccagcuccgucaucacgagccugggggccaucguguccugcuacggcaagaccaagugcaccgccagcaacaagugccgggggaucaucaagaccuucuccaacggcugcgacuacgugagcaacaagggcgucgacacggugagcguggggaacacccucuacuacgucaacaagcaggagggcaagucccuguacgugaagggggagcccaucaucaacuucuacgacccccugguguuccccagcgacgaguucgacgccuccaucagccaggucaacgagaagaucaaccagucccucgcguucauccgcaagagcgacgagcugcugcacaacgugaacgccggcaaguccaccaccaacaucaugaucaccacgaucaucaucgugaucaucgucauccuccugagccugaucgccguggggcuccugcuguacugcaaggcccggugaggacuaguggaagcauuuuccuggcugauuaaaagaaauuacucagcuauggucaucuguuccuguuagaaggcuaugcagcauauuauauacuaugcgcauguuaugaaaugcauaauaaaaaauuuuaaaaaaucuaaaagaucuaaaaaaaaaaaaaaaaaaaaaaaaaaaaaaaaaaaaaaaaaaaaaaaaaaaaaaaaaaaaaaaaugcaucccccccccccccccccccccccccccccccaaaggcucuuuucagagccaccagaauu

SEQ ID NO: 5954 - RNA, 1892 nt, Artificial Sequence
  mRNA product Design g-1 comprising derived and/or modified sequence from HRSV(A2)__F-del_DSCav1_mut5 (opt2)
gggagacuuucccauucuguagcagaauuugguguugccuguggucuuggucccgcggagaagcuuaccauggagcuccucauccucaaggccaacgccaucaccaccauccucaccgccgucaccuucugcuucgccuccggccagaacaucaccgaggaguucuaccaguccaccugcuccgccgucuccaagggcuaccucuccgcccuccgcaccggcugguacaccuccgucaucaccaucgagcucuccaacaucaaggagaacaagugcaacggcaccgacgccaaggucaagcucaucaagcaggagcucgacaaguacaagaacgccgucaccgagcuccagcuccucaugcaguccacccccgccaccggcuccggcuccgccaucgccuccggcgucgccgucugcaagguccuccaccucgagggcgaggucaacaagaucaaguccgcccuccucuccaccaacaaggccgucgucucccucuccggcugcggcgucuccguccucaccuucaagguccucgaccucaagaacuacaucgacaagcagcuccuccccauccucaacaagcaguccugcuccaucuccaacaucgagaccgucaucgaguuccagcagaagaacaaccgccuccucgagaucacccgcgaguucuccgucaacgccggcgucaccacccccgucuccaccuacaugcucaccaacuccgagcuccucucccucaucaacgacaugcccaucaccaacgaccagaagaagcucauguccaacaacguccagaucguccgccagcaguccuacuccaucaugugcaucaucaaggaggagguccucgccuacgucguccagcucccccucuacggcgucaucgacacccccugcuggaagcuccacaccuccccccucugcaccaccaacaccaaggagggcuccaacaucugccucacccgcaccgaccgcggcugguacugcgacaacgccggcuccgucuccuucuucccccaggccgagaccugcaagguccaguccaaccgcgucuucugcgacaccaugaacucccgcacccuccccuccgaggucaaccucugcaacgucgacaucuucaaccccaaguacgacugcaagaucaugaccuccaagaccgacgucuccuccuccgucaucaccucccucggcgccaucgucuccugcuacggcaagaccaagugcaccgccuccaacaagugccgcggcaucaucaagaccuucuccaacggcugcgacuacgucuccaacaagggcgucgacaccgucuccgucggcaacacccucuacuacgucaacaagcaggagggcaagucccucuacgucaagggcgagcccaucaucaacuucuacgacccccucgucuuccccuccgacgaguucgacgccuccaucucccaggucaacgagaagaucaaccagucccucgccuucauccgcaaguccgacgagcuccuccacaacgucaacgccggcaaguccaccaccaacaucaugaucaccaccaucaucaucgucaucaucgucauccuccucucccucaucgccgucggccuccuccucuacugcaaggcccgcugaggacuaguggaagcauuuuccuggcugauuaaaagaaauuacucagcuauggucaucuguuccuguuagaaggcuaugcagcauauuauauacuaugcgcauguuaugaaaugcauaauaaaaaauuuuaaaaaaucuaaaagaucuaaaaaaaaaaaaaaaaaaaaaaaaaaaaaaaaaaaaaaaaaaaaaaaaaaaaaaaaaaaaaaaaugcaucccccccccccccccccccccccccccccccaaaggcucuuuucagagccaccagaauu

SEQ ID NO: 5955 - RNA, 1892 nt, Artificial Sequence
  mRNA product Design g-1 comprising derived and/or modified sequence from HRSV(A2)__F-del_DSCav1_mut5 (opt3)
gggagacuuucccauucuguagcagaauuugguguugccuguggucuuggucccgcggagaagcuuaccauggagcugcucauccuuaaggccaacgcuauuaccacaauacugacugcagugacguucugcuuugccagcggccagaauaucaccgaagaguucuaccaauccacauguucugcggucucaaaaggguauuugagugcuuuaagaacuggaugguacaccagcguuauuacaaucgaacuguccaacauuaaggagaauaaaugcaacgguaccgacgccaaggugaaacuaaucaagcaggaacucgauaaguauaaaaaugcaguaacugagcugcagcuucugaugcagucuacacccgccaccggcucggggucagcuauagcaagcggaguggccgucuguaagguguugcaccucgagggcgaaguuaacaaaaucaagagugcucugcuguccacgaauaaagccguggucucucucagcgguugcgggguguccguauuaacuuuuaagguucuggaccuuaagaacuacauugauaaacaauugcugccuauccuaaauaagcagucauguaguauuagcaacaucgagaccgugauagaguuccagcagaaaaauaacaggcuccuggaaauuacacgggaguuuucugucaaugcgggagugacuaccccaguguccacauauaugcuuaccaacucagaacuguugagccucaucaaugacaugccgauuacgaacgaucaaaagaaacugaugaguaacaauguccagaucguucgccagcagucuuacuccaucaugugcauuauaaaggaggaaguguuagcauauguagugcaacugccccucuacggcgucaucgacacuccuuguuggaaacuucauacaagcccacugugcaccacuaacacaaaggagggcucgaauauuuguuugacccgaacggaucgugggugguacugcgacaacgccggaucuguguccuucuuuccccaggcugaaaccuguaagguucagucaaauagaguguucugcgauacaaugaacaguagaacucugccuagcgaggucaaucucugcaacguggacaucuuuaauccaaaauaugauuguaagauaaugaccuccaaaacagacguaucuagcucaguuauuaccagucugggugccaucguguccugcuacggcaagacuaaauguacagcaagcaacaagugcagggggaucauuaagaccuucucuaauggaugugauuaugucucaaacaaaggcguggacacugucaguguggguaauacgcuuuacuauguuaacaagcaagaggggaaaagccuguacgugaagggagaacccaucauuaauuuuuaugacccuuugguauucccauccgaugaguuugacgcuucuauaucgcaggucaacgagaaaaucaaccagagccucgccuucauucggaaguccgaugaacuguuacacaaugugaacgcgggcaagucaacaaccaauaucaugaucacuaccauuauaaucguuauuaucgugauucugcuaagucucaucgccgucggccugcuuuuguacugcaaagcacgcugaggacuaguggaagcauuuuccuggcugauuaaaagaaauuacucagcuauggucaucuguuccuguuagaaggcuaugcagcauauuauauacuaugcgcauguuaugaaaugcauaauaaaaaauuuuaaaaaaucuaaaagaucuaaaaaaaaaaaaaaaaaaaaaaaaaaaaaaaaaaaaaaaaaaaaaaaaaaaaaaaaaaaaaaaaugcaucccccccccccccccccccccccccccccccaaaggcucuuuucagagccaccagaauu

SEQ ID NO: 5956 - RNA, 1892 nt, Artificial Sequence
  mRNA product Design g-1 comprising derived and/or modified sequence from HRSV(A2)__F-del_DSCav1_mut5 (opt4)
gggagacuuucccauucuguagcagaauuugguguugccuguggucuuggucccgcggagaagcuuaccauggagcugcugauccugaaggccaacgccaucaccaccauccugaccgccgugaccuucugcuucgccagcggccagaacaucaccgaggaguucuaccagagcaccugcagcgccgugagcaagggcuaccugagcgcccugagaaccggcugguacaccagcgugaucaccaucgagcugagcaacaucaaggagaacaagugcaacggcaccgacgccaaggugaagcugaucaagcaggagcuggacaaguacaagaacgccgugaccgagcugcagcugcugaugcagagcacccccgccaccggcagcggcagcgccaucgccagcggcguggccgugugcaaggugcugcaccuggagggcgaggugaacaagaucaagagcgcccugcugagcaccaacaaggccguggugagccugagcggcugcggcgugagcgugcugaccuucaaggugcuggaccugaagaacuacaucgacaagcagcugcugcccauccugaacaagcagagcugcagcaucagcaacaucgagaccgugaucgaguuccagcagaagaacaacagacugcuggagaucaccagagaguucagcgugaacgccggcgugaccacccccgugagcaccuacaugcugaccaacagcgagcugcugagccugaucaacgacaugcccaucaccaacgaccagaagaagcugaugagcaacaacgugcagaucgugagacagcagagcuacagcaucaugugcaucaucaaggaggaggugcuggccuacguggugcagcugccccuguacggcgugaucgacacccccugcuggaagcugcacaccagcccccugugcaccaccaacaccaaggagggcagcaacaucugccugaccagaaccgacagaggcugguacugcgacaacgccggcagcgugagcuucuucccccaggccgagaccugcaaggugcagagcaacagaguguucugcgacaccaugaacagcagaacccugcccagcgaggugaaccugugcaacguggacaucuucaaccccaaguacgacugcaagaucaugaccagcaagaccgacgugagcagcagcgugaucaccagccugggcgccaucgugagcugcuacggcaagaccaagugcaccgccagcaacaagugcagaggcaucaucaagaccuucagcaacggcugcgacuacgugagcaacaagggcguggacaccgugagcgugggcaacacccuguacuacgugaacaagcaggagggcaagagccuguacgugaagggcgagcccaucaucaacuucuacgacccccugguguuccccagcgacgaguucgacgccagcaucagccaggugaacgagaagaucaaccagagccuggccuucaucagaaagagcgacgagcugcugcacaacgugaacgccggcaagagcaccaccaacaucaugaucaccaccaucaucaucgugaucaucgugauccugcugagccugaucgccgugggccugcugcuguacugcaaggccagaugaggacuaguggaagcauuuuccuggcugauuaaaagaaauuacucagcuauggucaucuguuccuguuagaaggcuaugcagcauauuauauacuaugcgcauguuaugaaaugcauaauaaaaaauuuuaaaaaaucuaaaagaucuaaaaaaaaaaaaaaaaaaaaaaaaaaaaaaaaaaaaaaaaaaaaaaaaaaaaaaaaaaaaaaaaugcaucccccccccccccccccccccccccccccccaaaggcucuuuucagagccaccagaauu

SEQ ID NO: 5957 - RNA, 1892 nt, Artificial Sequence
  mRNA product Design g-1 comprising derived and/or modified sequence from HRSV(A2)__F-del_DSCav1_mut5 (opt5)
gggagacuuucccauucuguagcagaauuugguguugccuguggucuuggucccgcggagaagcuuaccauggagcugcucauccugaaggccaacgcuauuaccacaauccuuacggccgugaccuucugcuuugcgagcggccagaauauuacagaagaguucuaccaauccaccuguucugcugucagcaaaggguaucuguccgcccucagaacaggaugguacaccucuguuaucacaauugaacugagcaacaucaaggagaauaaaugcaacggcaccgacgccaaggugaaacuuaucaagcaggaacuggauaaguauaaaaaugcugugacggagcuccagcugcugaugcaguccacccccgccacagggucuggaagcgcuauugccuccggcgucgcgguguguaagguucuccaccuggagggggaagugaacaaaaucaagagcgcccuucugucuaccaauaaagcugucgugucccucagcggaugcggcguuucugugcugacauuuaagguccuugaccugaagaacuacauugauaaacaacuccugccuauccugaauaagcaguccuguagcauuucuaacaucgagaccgugauugaguuccagcagaaaaauaaccggcuccuggaaaucacgcgcgaguuuuccgugaaugccggcgucacaaccccgguuagcacauauaugcuuaccaacuccgaacugcucucucugaucaaugacaugcccauuaccaacgaucaaaagaaacuuaugagcaacaaugugcagaucgugagacagcaguccuacagcauuaugugcaucauuaaggaggaaguccuggcuuaugugguucaacucccucuguacggggugaucgacacacccuguuggaaacugcauacgucuccucucugcaccacaaacaccaaggagggauccaauaucugucugacacggaccgaucgcggcugguacugcgacaacgccgggagcgucucuuucuuuccccaggcggaaacguguaaggugcagagcaauagaguuuucugcgauacaaugaacuccagaacccugccuucugaggugaaucucugcaacgucgacauuuuuaauccgaaauaugauuguaagaucaugaccagcaaaacagacguguccagcucugucauuaccucccugggagccaucgugagcugcuacggcaagacaaaauguacggcuucuaacaagugccgggggauuaucaagaccuucuccaauggaugugauuauguuagcaacaaaggcguggacacagucuccgugggcaauacccuuuacuauguuaacaagcaagaggggaaaucucuguacgugaagggagaacccaucauuaauuuuuaugacccucucgucuuccccagcgaugaguuugacgccuccaucucucaggugaacgagaaaauuaaccagagccuggcuuucauccgcaaguccgaugaacugcuccacaaugugaacgccggcaagagcacaaccaauauuaugaucacgaccauuaucaucguuauuaucgucauucugcuuucucugaucgccguggggcuccugcuguacugcaaagcuagaugaggacuaguggaagcauuuuccuggcugauuaaaagaaauuacucagcuauggucaucuguuccuguuagaaggcuaugcagcauauuauauacuaugcgcauguuaugaaaugcauaauaaaaaauuuuaaaaaaucuaaaagaucuaaaaaaaaaaaaaaaaaaaaaaaaaaaaaaaaaaaaaaaaaaaaaaaaaaaaaaaaaaaaaaaaugcaucccccccccccccccccccccccccccccccaaaggcucuuuucagagccaccagaauu

SEQ ID NO: 5958 - RNA, 1892 nt, Artificial Sequence
  mRNA product Design g-1 comprising derived and/or modified sequence from HRSV(A2)__F-del_DSCav1_mut5 (opt6)
gggagacuuucccauucuguagcagaauuugguguugccuguggucuuggucccgcggagaagcuuaccauggaacuuuuaauacugaaagcaaaugccaucacaaccauacuaacugccgucacauucugcuuugcaucaggacaaaacauaacagaagaauuuuaccaauccacaugcucagcaguaucaaaaggauaucuaucggcacuuagaacuggaugguacacaaguguuauaacuauagaacucucaaacauaaaagaaaacaaaugcaauggaacagacgcaaaaguaaaacuaauaaaacaagaacucgauaaauauaaaaaugcaguaaccgaacuacaacuauuaaugcaaagcacacccgcaacaggcagcggaucagcaauagcaagcggagucgcaguauguaaaguacuacaucuagaaggagaagucaacaaaaucaaaucugcacuucuauccacaaacaaagcuguaguaucccuauccggaugcggagucucaguauuaacuuuuaaaguacuagaccuuaaaaacuacauagauaaacaacuauuaccaauacuaaauaaacaaucaugcagcauauccaauauagagacaguaauugaauuucaacaaaaaaacaacagauuacuagaaauuacucgugaauuuuccguaaaugccggagucacaacaccaguaucaaccuauaugcuaacaaacagcgaacuacuuagcuuaauaaaugacaugccaauaacaaaugaccaaaaaaaacuuaugucaaauaacguacaaaucgucagacaacaauccuacucuauaauguguauaauuaaagaagaaguccuagcauacguaguucaauuaccacucuauggaguaauagauacaccaugcuggaaacuacacacgucaccacuauguacaacaaacacaaaagaaggauccaauauaugccuaacaagaaccgacagaggcugguauugugacaacgcaggauccguuucauucuucccacaagcagaaaccuguaaaguacaaucuaauagaguauuuugcgacacaaugaacaguagaacacuaccaagcgagguuaaucuauguaacguagacauauucaauccaaaauaugauugcaaaauaaugacaucaaaaacagauguaucgucgaguguaauaacaagucugggagcuauaguaagcugcuacggcaagacgaaauguaccgcuucaaauaaaugcagaggaaucauuaaaacauucucgaacggaugcgacuacguaaguaauaaaggugucgacaccguaucaguagggaauacauuauacuacgucaacaaacaagaaggaaaaucucuauauguaaaaggagaaccaauaauaaauuucuaugacccucuaguauucccaucagaugaauuugacgcuuccauaucacaaguaaacgaaaaaaucaaucaaucuuuagcauucauacgaaaaagugaugaacuccuacacaacgucaacgcaggaaaaagcacaacaaauauaaugaucacaacaaucaucauaguaauaauaguaauacuacuaucauuaauagcaguaggauuauugcuuuacugcaaagcacgauagggacuaguggaagcauuuuccuggcugauuaaaagaaauuacucagcuauggucaucuguuccuguuagaaggcuaugcagcauauuauauacuaugcgcauguuaugaaaugcauaauaaaaaauuuuaaaaaaucuaaaagaucuaaaaaaaaaaaaaaaaaaaaaaaaaaaaaaaaaaaaaaaaaaaaaaaaaaaaaaaaaaaaaaaaugcaucccccccccccccccccccccccccccccccaaaggcucuuuucagagccaccagaauu

SEQ ID NO: 5959 - RNA, 1892 nt, Artificial Sequence
  mRNA product Design g-1 comprising derived and/or modified sequence from HRSV(A2)__F-del_DSCav1_mut5 (opt11)
gggagacuuucccauucuguagcagaauuugguguugccuguggucuuggucccgcggagaagcuuaccauggaacuccucauccucaaagccaacgccauaaccacaauacucaccgccguaaccuucugcuuugcgucgggacaaaacaucaccgaagaguucuaccaauccacuugcuccgcaguaagcaaaggauaccucuccgcccugcgaaccgguugguacacaucagucaucacaaucgaacucucaaacauaaaagaaaacaaaugcaacggcaccgacgcaaaggucaaauuaaucaagcaagaacuagacaaauacaaaaacgccgucacagaacuccagcugcuaaugcagagcacacccgcaacuggcagcggauccgccaucgcaucaggagucgccgugugcaaaguccuacaccucgaaggagaagugaacaaaaucaaaucagcccuacucuccaccaacaaggccgucgucucccucuccggcugcggugucuccguccuaaccuucaaagugcuagaccucaagaacuacaucgacaaacaacuccuaccaauacucaacaagcaaucuugcuccaucuccaacaucgaaaccguaaucgaguuccaacagaagaacaaccgccuccucgaaaucacccgcgaguucucugucaacgcaggggucaccacucccgucuccacauacaugcucacaaacuccgaacuccucagccucaucaacgacaugcccauaaccaacgaccagaaaaagcuaaugagcaauaacguccaaaucguuagacaacaaaguuauuccaucaugugcaucaucaaagaagaaguccucgccuacgucguacaacucccccucuauggcgucaucgacacccccugcuggaaacugcacacaucaccccucugcaccacaaacaccaaagaaggcucaaacaucugccuaacucgcaccgaccgcggcugguacugcgacaacgccggcagcguaucauucuuuccccaagccgaaacaugcaaaguucaauccaaccgcgucuucugcgacacaaugaacuccagaacgcuccccagcgaagucaaccucuguaacguagacaucuucaacccuaaguacgacugcaaaaucaugaccuccaaaacugauguauccuccuccgucaucacaucccugggcgccaucgucagcugcuacggcaaaacaaaaugcacugccucaaacaaaugccgagguaucauaaagaccuucucaaacggaugcgauuacgucagcaacaaaggcgucgacaccgucagugucggcaacacccucuacuacgucaacaaacaagaaggaaaaucccucuacgucaaaggcgaacccaucaucaacuucuacgacccccucgucuuccccagcgacgaguucgacgccuccaucucacaagucaacgaaaagauaaaccaaucucuagccuucauccgcaaauccgaugaacuccugcauaacgucaacgccggcaaauccaccacaaacaucaugaucacuaccauaaucaucgucauaaucguaauccuccuaucucuuaucgcagucggccuacuacucuacugcaaagcccgcuaaggacuaguggaagcauuuuccuggcugauuaaaagaaauuacucagcuauggucaucuguuccuguuagaaggcuaugcagcauauuauauacuaugcgcauguuaugaaaugcauaauaaaaaauuuuaaaaaaucuaaaagaucuaaaaaaaaaaaaaaaaaaaaaaaaaaaaaaaaaaaaaaaaaaaaaaaaaaaaaaaaaaaaaaaaugcaucccccccccccccccccccccccccccccccaaaggcucuuuucagagccaccagaauu

SEQ ID NO: 5960 - RNA, 1907 nt, Artificial Sequence
  mRNA product Design g-2 comprising derived and/or modified sequence from HRSV(A2)__F-del_DSCav1_mut5 (opt1)
gggagaguccgcucagccagguugcagaagcggcuuagcguguguccuaaucuucucucugcguguagguaggccugugccgcaaacaagcuuaccauggagcugcucauccugaaggccaacgccaucaccaccauccugacggcggugaccuucugcuucgccagcggccagaacaucaccgaggaguucuaccaguccacgugcagcgccgucuccaagggguaccucagcgcccugcggaccggcugguacaccuccgugaucaccaucgagcugagcaacaucaaggagaacaagugcaacgggaccgacgccaaggugaagcucaucaagcaggagcuggacaaguacaagaacgcggucacggagcugcagcuccugaugcaguccaccccggcaaccggcuccggcuccgccaucgcgagcggcgucgccgugugcaaggugcugcaccucgagggggaggucaacaagaucaagagcgcccugcuguccaccaacaaggccguggugagccucuccggcugcggcgucagcgugcugaccuucaaggugcuggaccucaagaacuacaucgacaagcagcugcugcccauccugaacaagcagagcugcuccaucagcaacaucgagacggugaucgaguuccagcagaagaacaaccggcuccuggagaucacccgcgaguucagcgugaacgccggggucaccacccccguguccacguacaugcugaccaacagcgagcuccugucccugaucaacgacaugccgaucaccaacgaccagaagaagcucaugagcaacaacgugcagaucguccggcagcaguccuacagcaucaugugcaucaucaaggaggaggugcuggcguacgugguccagcugccccucuacggcgugaucgacacccccugcuggaagcugcacacgagcccccugugcaccaccaacaccaaggagggguccaacaucugccucacgcgcaccgaccggggcugguacugcgacaacgccggcagcgucuccuucuucccgcaggccgagaccugcaaggugcagagcaaccgcguguucugcgacaccaugaacucccggacgcugcccagcgagguaaaccucugcaacgucgacaucuucaaccccaaguacgacugcaagaucaugaccuccaagaccgacgugagcuccagcgugaucaccucccugggggccaucgucagcugcuacggcaagacgaagugcaccgccagcaacaagugccgggggaucaucaagaccuucuccaacggcugcgacuacgugagcaacaagggcguggacaccguguccgucgggaacacccuguacuacgugaacaagcaggagggcaagagccucuacgugaagggggagcccaucaucaacuucuacgacccgcuggucuuccccuccgacgaguucgacgcgagcaucucccaggugaacgagaagaucaaccagagccuggccuucauccgcaaguccgacgagcugcuccacaacgugaacgccggcaagagcacgaccaacaucaugaucaccaccaucaucaucgucaucaucgugauccugcugucccucaucgccguggggcugcugcucuacugcaaggcccggugaggacuaguaauaaggaaacuguaugaaugucugugggcaggaagugaagagauccuucuguaaagguuuuuggaauuaugucugcugaauaauaaacuuuuuugaaauaauaaaucugguagaaaaaugagaucuaaaaaaaaaaaaaaaaaaaaaaaaaaaaaaaaaaaaaaaaaaaaaaaaaaaaaaaaaaaaaaaaugcaucccccccccccccccccccccccccccccccaaaggcucuuuucagagccaccagaauu

SEQ ID NO: 5961 - RNA, 1907 nt, Artificial Sequence
  mRNA product Design g-2 comprising derived and/or modified sequence from HRSV(A2)__F-del_DSCav1_mut5 (opt1)
gggagaguccgcucagccagguugcagaagcggcuuagcguguguccuaaucuucucucugcguguagguaggccugugccgcaaacaagcuuaccauggagcugcucauccugaaggccaacgccaucaccaccauccugacggcggugaccuucugcuucgccagcggccagaacaucaccgaggaguucuaccaguccacgugcagcgccgucuccaagggguaccucagcgcccugcgcaccggcugguacaccuccgugaucaccaucgagcugagcaacaucaaggagaacaagugcaacgggaccgacgccaaggugaagcucaucaagcaggagcuggacaaguacaagaacgcggucacggagcugcagcuccugaugcaguccacccccgccaccggcagcggguccgccaucgccagcggcguggcggugugcaagguccugcaccucgagggcgaggugaacaagaucaaguccgcccugcugagcaccaacaaggccguggucucccucagcgggugcggcguguccgugcugacguucaagguccuggaccucaagaacuacaucgacaagcagcugcugccgauccucaacaagcagagcugcuccaucagcaacaucgagaccgugaucgaguuccagcagaagaacaaccggcugcuggagaucacccgcgaguucuccgugaacgccggggucaccacgcccgugagcaccuacaugcucaccaacagcgagcugcugucccucaucaacgacaugcccaucaccaacgaccagaagaagcugaugagcaacaacgugcagaucguccggcagcaguccuacagcaucaugugcaucaucaaggaggaggugcuggccuacgugguccagcucccccuguacggcgugaucgacacgccgugcuggaagcugcacaccagcccccucugcaccaccaacacgaaggagggguccaacaucugccugacccgcaccgaccggggcugguacugcgacaacgcgggcuccgugagcuucuucccccaggccgagaccugcaagguccaguccaaccgcguguucugcgacacgaugaacagccggacccuccccuccgaggucaaccugugcaacguggacaucuucaacccgaaguacgacugcaagaucaugaccagcaagaccgacguguccagcuccgucaucacgagccugggggccaucguguccugcuacggcaagaccaagugcaccgccagcaacaagugccgggggaucaucaagaccuucuccaacggcugcgacuacgugagcaacaagggcgucgacacggugagcguggggaacacccucuacuacgucaacaagcaggagggcaagucccuguacgugaagggggagcccaucaucaacuucuacgacccccugguguuccccagcgacgaguucgacgccuccaucagccaggucaacgagaagaucaaccagucccucgcguucauccgcaagagcgacgagcugcugcacaacgugaacgccggcaaguccaccaccaacaucaugaucaccacgaucaucaucgugaucaucgucauccuccugagccugaucgccguggggcuccugcuguacugcaaggcccggugaggacuaguaauaaggaaacuguaugaaugucugugggcaggaagugaagagauccuucuguaaagguuuuuggaauuaugucugcugaauaauaaacuuuuuugaaauaauaaaucugguagaaaaaugagaucuaaaaaaaaaaaaaaaaaaaaaaaaaaaaaaaaaaaaaaaaaaaaaaaaaaaaaaaaaaaaaaaaugcaucccccccccccccccccccccccccccccccaaaggcucuuuucagagccaccagaauu

SEQ ID NO: 5962 - RNA, 1907 nt, Artificial Sequence
  mRNA product Design g-2 comprising derived and/or modified sequence from HRSV(A2)__F-del_DSCav1_mut5 (opt2)
gggagaguccgcucagccagguugcagaagcggcuuagcguguguccuaaucuucucucugcguguagguaggccugugccgcaaacaagcuuaccauggagcuccucauccucaaggccaacgccaucaccaccauccucaccgccgucaccuucugcuucgccuccggccagaacaucaccgaggaguucuaccaguccaccugcuccgccgucuccaagggcuaccucuccgcccuccgcaccggcugguacaccuccgucaucaccaucgagcucuccaacaucaaggagaacaagugcaacggcaccgacgccaaggucaagcucaucaagcaggagcucgacaaguacaagaacgccgucaccgagcuccagcuccucaugcaguccacccccgccaccggcuccggcuccgccaucgccuccggcgucgccgucugcaagguccuccaccucgagggcgaggucaacaagaucaaguccgcccuccucuccaccaacaaggccgucgucucccucuccggcugcggcgucuccguccucaccuucaagguccucgaccucaagaacuacaucgacaagcagcuccuccccauccucaacaagcaguccugcuccaucuccaacaucgagaccgucaucgaguuccagcagaagaacaaccgccuccucgagaucacccgcgaguucuccgucaacgccggcgucaccacccccgucuccaccuacaugcucaccaacuccgagcuccucucccucaucaacgacaugcccaucaccaacgaccagaagaagcucauguccaacaacguccagaucguccgccagcaguccuacuccaucaugugcaucaucaaggaggagguccucgccuacgucguccagcucccccucuacggcgucaucgacacccccugcuggaagcuccacaccuccccccucugcaccaccaacaccaaggagggcuccaacaucugccucacccgcaccgaccgcggcugguacugcgacaacgccggcuccgucuccuucuucccccaggccgagaccugcaagguccaguccaaccgcgucuucugcgacaccaugaacucccgcacccuccccuccgaggucaaccucugcaacgucgacaucuucaaccccaaguacgacugcaagaucaugaccuccaagaccgacgucuccuccuccgucaucaccucccucggcgccaucgucuccugcuacggcaagaccaagugcaccgccuccaacaagugccgcggcaucaucaagaccuucuccaacggcugcgacuacgucuccaacaagggcgucgacaccgucuccgucggcaacacccucuacuacgucaacaagcaggagggcaagucccucuacgucaagggcgagcccaucaucaacuucuacgacccccucgucuuccccuccgacgaguucgacgccuccaucucccaggucaacgagaagaucaaccagucccucgccuucauccgcaaguccgacgagcuccuccacaacgucaacgccggcaaguccaccaccaacaucaugaucaccaccaucaucaucgucaucaucgucauccuccucucccucaucgccgucggccuccuccucuacugcaaggcccgcugaggacuaguaauaaggaaacuguaugaaugucugugggcaggaagugaagagauccuucuguaaagguuuuuggaauuaugucugcugaauaauaaacuuuuuugaaauaauaaaucugguagaaaaaugagaucuaaaaaaaaaaaaaaaaaaaaaaaaaaaaaaaaaaaaaaaaaaaaaaaaaaaaaaaaaaaaaaaaugcaucccccccccccccccccccccccccccccccaaaggcucuuuucagagccaccagaauu

SEQ ID NO: 5963 - RNA, 1907 nt, Artificial Sequence
  mRNA product Design g-2 comprising derived and/or modified sequence from HRSV(A2)__F-del_DSCav1_mut5 (opt3)
gggagaguccgcucagccagguugcagaagcggcuuagcguguguccuaaucuucucucugcguguagguaggccugugccgcaaacaagcuuaccauggagcugcucauccuuaaggccaacgcuauuaccacaauacugacugcagugacguucugcuuugccagcggccagaauaucaccgaagaguucuaccaauccacauguucugcggucucaaaaggguauuugagugcuuuaagaacuggaugguacaccagcguuauuacaaucgaacuguccaacauuaaggagaauaaaugcaacgguaccgacgccaaggugaaacuaaucaagcaggaacucgauaaguauaaaaaugcaguaacugagcugcagcuucugaugcagucuacacccgccaccggcucggggucagcuauagcaagcggaguggccgucuguaagguguugcaccucgagggcgaaguuaacaaaaucaagagugcucugcuguccacgaauaaagccguggucucucucagcgguugcgggguguccguauuaacuuuuaagguucuggaccuuaagaacuacauugauaaacaauugcugccuauccuaaauaagcagucauguaguauuagcaacaucgagaccgugauagaguuccagcagaaaaauaacaggcuccuggaaauuacacgggaguuuucugucaaugcgggagugacuaccccaguguccacauauaugcuuaccaacucagaacuguugagccucaucaaugacaugccgauuacgaacgaucaaaagaaacugaugaguaacaauguccagaucguucgccagcagucuuacuccaucaugugcauuauaaaggaggaaguguuagcauauguagugcaacugccccucuacggcgucaucgacacuccuuguuggaaacuucauacaagcccacugugcaccacuaacacaaaggagggcucgaauauuuguuugacccgaacggaucgugggugguacugcgacaacgccggaucuguguccuucuuuccccaggcugaaaccuguaagguucagucaaauagaguguucugcgauacaaugaacaguagaacucugccuagcgaggucaaucucugcaacguggacaucuuuaauccaaaauaugauuguaagauaaugaccuccaaaacagacguaucuagcucaguuauuaccagucugggugccaucguguccugcuacggcaagacuaaauguacagcaagcaacaagugcagggggaucauuaagaccuucucuaauggaugugauuaugucucaaacaaaggcguggacacugucaguguggguaauacgcuuuacuauguuaacaagcaagaggggaaaagccuguacgugaagggagaacccaucauuaauuuuuaugacccuuugguauucccauccgaugaguuugacgcuucuauaucgcaggucaacgagaaaaucaaccagagccucgccuucauucggaaguccgaugaacuguuacacaaugugaacgcgggcaagucaacaaccaauaucaugaucacuaccauuauaaucguuauuaucgugauucugcuaagucucaucgccgucggccugcuuuuguacugcaaagcacgcugaggacuaguaauaaggaaacuguaugaaugucugugggcaggaagugaagagauccuucuguaaagguuuuuggaauuaugucugcugaauaauaaacuuuuuugaaauaauaaaucugguagaaaaaugagaucuaaaaaaaaaaaaaaaaaaaaaaaaaaaaaaaaaaaaaaaaaaaaaaaaaaaaaaaaaaaaaaaaugcaucccccccccccccccccccccccccccccccaaaggcucuuuucagagccaccagaauu

SEQ ID NO: 5964 - RNA, 1907 nt, Artificial Sequence
  mRNA product Design g-2 comprising derived and/or modified sequence from HRSV(A2)__F-del_DSCav1_mut5 (opt4)
gggagaguccgcucagccagguugcagaagcggcuuagcguguguccuaaucuucucucugcguguagguaggccugugccgcaaacaagcuuaccauggagcugcugauccugaaggccaacgccaucaccaccauccugaccgccgugaccuucugcuucgccagcggccagaacaucaccgaggaguucuaccagagcaccugcagcgccgugagcaagggcuaccugagcgcccugagaaccggcugguacaccagcgugaucaccaucgagcugagcaacaucaaggagaacaagugcaacggcaccgacgccaaggugaagcugaucaagcaggagcuggacaaguacaagaacgccgugaccgagcugcagcugcugaugcagagcacccccgccaccggcagcggcagcgccaucgccagcggcguggccgugugcaaggugcugcaccuggagggcgaggugaacaagaucaagagcgcccugcugagcaccaacaaggccguggugagccugagcggcugcggcgugagcgugcugaccuucaaggugcuggaccugaagaacuacaucgacaagcagcugcugcccauccugaacaagcagagcugcagcaucagcaacaucgagaccgugaucgaguuccagcagaagaacaacagacugcuggagaucaccagagaguucagcgugaacgccggcgugaccacccccgugagcaccuacaugcugaccaacagcgagcugcugagccugaucaacgacaugcccaucaccaacgaccagaagaagcugaugagcaacaacgugcagaucgugagacagcagagcuacagcaucaugugcaucaucaaggaggaggugcuggccuacguggugcagcugccccuguacggcgugaucgacacccccugcuggaagcugcacaccagcccccugugcaccaccaacaccaaggagggcagcaacaucugccugaccagaaccgacagaggcugguacugcgacaacgccggcagcgugagcuucuucccccaggccgagaccugcaaggugcagagcaacagaguguucugcgacaccaugaacagcagaacccugcccagcgaggugaaccugugcaacguggacaucuucaaccccaaguacgacugcaagaucaugaccagcaagaccgacgugagcagcagcgugaucaccagccugggcgccaucgugagcugcuacggcaagaccaagugcaccgccagcaacaagugcagaggcaucaucaagaccuucagcaacggcugcgacuacgugagcaacaagggcguggacaccgugagcgugggcaacacccuguacuacgugaacaagcaggagggcaagagccuguacgugaagggcgagcccaucaucaacuucuacgacccccugguguuccccagcgacgaguucgacgccagcaucagccaggugaacgagaagaucaaccagagccuggccuucaucagaaagagcgacgagcugcugcacaacgugaacgccggcaagagcaccaccaacaucaugaucaccaccaucaucaucgugaucaucgugauccugcugagccugaucgccgugggccugcugcuguacugcaaggccagaugaggacuaguaauaaggaaacuguaugaaugucugugggcaggaagugaagagauccuucuguaaagguuuuuggaauuaugucugcugaauaauaaacuuuuuugaaauaauaaaucugguagaaaaaugagaucuaaaaaaaaaaaaaaaaaaaaaaaaaaaaaaaaaaaaaaaaaaaaaaaaaaaaaaaaaaaaaaaaugcaucccccccccccccccccccccccccccccccaaaggcucuuuucagagccaccagaauu

SEQ ID NO: 5965 - RNA, 1907 nt, Artificial Sequence
  mRNA product Design g-2 comprising derived and/or modified sequence from HRSV(A2)__F-del_DSCav1_mut5 (opt5)
gggagaguccgcucagccagguugcagaagcggcuuagcguguguccuaaucuucucucugcguguagguaggccugugccgcaaacaagcuuaccauggagcugcucauccugaaggccaacgcuauuaccacaauccuuacggccgugaccuucugcuuugcgagcggccagaauauuacagaagaguucuaccaauccaccuguucugcugucagcaaaggguaucuguccgcccucagaacaggaugguacaccucuguuaucacaauugaacugagcaacaucaaggagaauaaaugcaacggcaccgacgccaaggugaaacuuaucaagcaggaacuggauaaguauaaaaaugcugugacggagcuccagcugcugaugcaguccacccccgccacagggucuggaagcgcuauugccuccggcgucgcgguguguaagguucuccaccuggagggggaagugaacaaaaucaagagcgcccuucugucuaccaauaaagcugucgugucccucagcggaugcggcguuucugugcugacauuuaagguccuugaccugaagaacuacauugauaaacaacuccugccuauccugaauaagcaguccuguagcauuucuaacaucgagaccgugauugaguuccagcagaaaaauaaccggcuccuggaaaucacgcgcgaguuuuccgugaaugccggcgucacaaccccgguuagcacauauaugcuuaccaacuccgaacugcucucucugaucaaugacaugcccauuaccaacgaucaaaagaaacuuaugagcaacaaugugcagaucgugagacagcaguccuacagcauuaugugcaucauuaaggaggaaguccuggcuuaugugguucaacucccucuguacggggugaucgacacacccuguuggaaacugcauacgucuccucucugcaccacaaacaccaaggagggauccaauaucugucugacacggaccgaucgcggcugguacugcgacaacgccgggagcgucucuuucuuuccccaggcggaaacguguaaggugcagagcaauagaguuuucugcgauacaaugaacuccagaacccugccuucugaggugaaucucugcaacgucgacauuuuuaauccgaaauaugauuguaagaucaugaccagcaaaacagacguguccagcucugucauuaccucccugggagccaucgugagcugcuacggcaagacaaaauguacggcuucuaacaagugccgggggauuaucaagaccuucuccaauggaugugauuauguuagcaacaaaggcguggacacagucuccgugggcaauacccuuuacuauguuaacaagcaagaggggaaaucucuguacgugaagggagaacccaucauuaauuuuuaugacccucucgucuuccccagcgaugaguuugacgccuccaucucucaggugaacgagaaaauuaaccagagccuggcuuucauccgcaaguccgaugaacugcuccacaaugugaacgccggcaagagcacaaccaauauuaugaucacgaccauuaucaucguuauuaucgucauucugcuuucucugaucgccguggggcuccugcuguacugcaaagcuagaugaggacuaguaauaaggaaacuguaugaaugucugugggcaggaagugaagagauccuucuguaaagguuuuuggaauuaugucugcugaauaauaaacuuuuuugaaauaauaaaucugguagaaaaaugagaucuaaaaaaaaaaaaaaaaaaaaaaaaaaaaaaaaaaaaaaaaaaaaaaaaaaaaaaaaaaaaaaaaugcaucccccccccccccccccccccccccccccccaaaggcucuuuucagagccaccagaauu

SEQ ID NO: 5966 - RNA, 1907 nt, Artificial Sequence
  mRNA product Design g-2 comprising derived and/or modified sequence from HRSV(A2)__F-del_DSCav1_mut5 (opt6)
gggagaguccgcucagccagguugcagaagcggcuuagcguguguccuaaucuucucucugcguguagguaggccugugccgcaaacaagcuuaccauggaacuuuuaauacugaaagcaaaugccaucacaaccauacuaacugccgucacauucugcuuugcaucaggacaaaacauaacagaagaauuuuaccaauccacaugcucagcaguaucaaaaggauaucuaucggcacuuagaacuggaugguacacaaguguuauaacuauagaacucucaaacauaaaagaaaacaaaugcaauggaacagacgcaaaaguaaaacuaauaaaacaagaacucgauaaauauaaaaaugcaguaaccgaacuacaacuauuaaugcaaagcacacccgcaacaggcagcggaucagcaauagcaagcggagucgcaguauguaaaguacuacaucuagaaggagaagucaacaaaaucaaaucugcacuucuauccacaaacaaagcuguaguaucccuauccggaugcggagucucaguauuaacuuuuaaaguacuagaccuuaaaaacuacauagauaaacaacuauuaccaauacuaaauaaacaaucaugcagcauauccaauauagagacaguaauugaauuucaacaaaaaaacaacagauuacuagaaauuacucgugaauuuuccguaaaugccggagucacaacaccaguaucaaccuauaugcuaacaaacagcgaacuacuuagcuuaauaaaugacaugccaauaacaaaugaccaaaaaaaacuuaugucaaauaacguacaaaucgucagacaacaauccuacucuauaauguguauaauuaaagaagaaguccuagcauacguaguucaauuaccacucuauggaguaauagauacaccaugcuggaaacuacacacgucaccacuauguacaacaaacacaaaagaaggauccaauauaugccuaacaagaaccgacagaggcugguauugugacaacgcaggauccguuucauucuucccacaagcagaaaccuguaaaguacaaucuaauagaguauuuugcgacacaaugaacaguagaacacuaccaagcgagguuaaucuauguaacguagacauauucaauccaaaauaugauugcaaaauaaugacaucaaaaacagauguaucgucgaguguaauaacaagucugggagcuauaguaagcugcuacggcaagacgaaauguaccgcuucaaauaaaugcagaggaaucauuaaaacauucucgaacggaugcgacuacguaaguaauaaaggugucgacaccguaucaguagggaauacauuauacuacgucaacaaacaagaaggaaaaucucuauauguaaaaggagaaccaauaauaaauuucuaugacccucuaguauucccaucagaugaauuugacgcuuccauaucacaaguaaacgaaaaaaucaaucaaucuuuagcauucauacgaaaaagugaugaacuccuacacaacgucaacgcaggaaaaagcacaacaaauauaaugaucacaacaaucaucauaguaauaauaguaauacuacuaucauuaauagcaguaggauuauugcuuuacugcaaagcacgauagggacuaguaauaaggaaacuguaugaaugucugugggcaggaagugaagagauccuucuguaaagguuuuuggaauuaugucugcugaauaauaaacuuuuuugaaauaauaaaucugguagaaaaaugagaucuaaaaaaaaaaaaaaaaaaaaaaaaaaaaaaaaaaaaaaaaaaaaaaaaaaaaaaaaaaaaaaaaugcaucccccccccccccccccccccccccccccccaaaggcucuuuucagagccaccagaauu

SEQ ID NO: 5967 - RNA, 1907 nt, Artificial Sequence
  mRNA product Design g-2 comprising derived and/or modified sequence from HRSV(A2)__F-del_DSCav1_mut5 (opt11)
gggagaguccgcucagccagguugcagaagcggcuuagcguguguccuaaucuucucucugcguguagguaggccugugccgcaaacaagcuuaccauggaacuccucauccucaaagccaacgccauaaccacaauacucaccgccguaaccuucugcuuugcgucgggacaaaacaucaccgaagaguucuaccaauccacuugcuccgcaguaagcaaaggauaccucuccgcccugcgaaccgguugguacacaucagucaucacaaucgaacucucaaacauaaaagaaaacaaaugcaacggcaccgacgcaaaggucaaauuaaucaagcaagaacuagacaaauacaaaaacgccgucacagaacuccagcugcuaaugcagagcacacccgcaacuggcagcggauccgccaucgcaucaggagucgccgugugcaaaguccuacaccucgaaggagaagugaacaaaaucaaaucagcccuacucuccaccaacaaggccgucgucucccucuccggcugcggugucuccguccuaaccuucaaagugcuagaccucaagaacuacaucgacaaacaacuccuaccaauacucaacaagcaaucuugcuccaucuccaacaucgaaaccguaaucgaguuccaacagaagaacaaccgccuccucgaaaucacccgcgaguucucugucaacgcaggggucaccacucccgucuccacauacaugcucacaaacuccgaacuccucagccucaucaacgacaugcccauaaccaacgaccagaaaaagcuaaugagcaauaacguccaaaucguuagacaacaaaguuauuccaucaugugcaucaucaaagaagaaguccucgccuacgucguacaacucccccucuauggcgucaucgacacccccugcuggaaacugcacacaucaccccucugcaccacaaacaccaaagaaggcucaaacaucugccuaacucgcaccgaccgcggcugguacugcgacaacgccggcagcguaucauucuuuccccaagccgaaacaugcaaaguucaauccaaccgcgucuucugcgacacaaugaacuccagaacgcuccccagcgaagucaaccucuguaacguagacaucuucaacccuaaguacgacugcaaaaucaugaccuccaaaacugauguauccuccuccgucaucacaucccugggcgccaucgucagcugcuacggcaaaacaaaaugcacugccucaaacaaaugccgagguaucauaaagaccuucucaaacggaugcgauuacgucagcaacaaaggcgucgacaccgucagugucggcaacacccucuacuacgucaacaaacaagaaggaaaaucccucuacgucaaaggcgaacccaucaucaacuucuacgacccccucgucuuccccagcgacgaguucgacgccuccaucucacaagucaacgaaaagauaaaccaaucucuagccuucauccgcaaauccgaugaacuccugcauaacgucaacgccggcaaauccaccacaaacaucaugaucacuaccauaaucaucgucauaaucguaauccuccuaucucuuaucgcagucggccuacuacucuacugcaaagcccgcuaaggacuaguaauaaggaaacuguaugaaugucugugggcaggaagugaagagauccuucuguaaagguuuuuggaauuaugucugcugaauaauaaacuuuuuugaaauaauaaaucugguagaaaaaugagaucuaaaaaaaaaaaaaaaaaaaaaaaaaaaaaaaaaaaaaaaaaaaaaaaaaaaaaaaaaaaaaaaaugcaucccccccccccccccccccccccccccccccaaaggcucuuuucagagccaccagaauu

SEQ ID NO: 5968 - RNA, 2139 nt, Artificial Sequence
  mRNA product Design g-3 comprising derived and/or modified sequence from HRSV(A2)__F-del_DSCav1_mut5 (opt1)
gggagaguccgcucagccagguugcagaagcggcuuagcguguguccuaaucuucucucugcguguagguaggccugugccgcaaacaagcuuaccauggagcugcucauccugaaggccaacgccaucaccaccauccugacggcggugaccuucugcuucgccagcggccagaacaucaccgaggaguucuaccaguccacgugcagcgccgucuccaagggguaccucagcgcccugcggaccggcugguacaccuccgugaucaccaucgagcugagcaacaucaaggagaacaagugcaacgggaccgacgccaaggugaagcucaucaagcaggagcuggacaaguacaagaacgcggucacggagcugcagcuccugaugcaguccaccccggcaaccggcuccggcuccgccaucgcgagcggcgucgccgugugcaaggugcugcaccucgagggggaggucaacaagaucaagagcgcccugcuguccaccaacaaggccguggugagccucuccggcugcggcgucagcgugcugaccuucaaggugcuggaccucaagaacuacaucgacaagcagcugcugcccauccugaacaagcagagcugcuccaucagcaacaucgagacggugaucgaguuccagcagaagaacaaccggcuccuggagaucacccgcgaguucagcgugaacgccggggucaccacccccguguccacguacaugcugaccaacagcgagcuccugucccugaucaacgacaugccgaucaccaacgaccagaagaagcucaugagcaacaacgugcagaucguccggcagcaguccuacagcaucaugugcaucaucaaggaggaggugcuggcguacgugguccagcugccccucuacggcgugaucgacacccccugcuggaagcugcacacgagcccccugugcaccaccaacaccaaggagggguccaacaucugccucacgcgcaccgaccggggcugguacugcgacaacgccggcagcgucuccuucuucccgcaggccgagaccugcaaggugcagagcaaccgcguguucugcgacaccaugaacucccggacgcugcccagcgagguaaaccucugcaacgucgacaucuucaaccccaaguacgacugcaagaucaugaccuccaagaccgacgugagcuccagcgugaucaccucccugggggccaucgucagcugcuacggcaagacgaagugcaccgccagcaacaagugccgggggaucaucaagaccuucuccaacggcugcgacuacgugagcaacaagggcguggacaccguguccgucgggaacacccuguacuacgugaacaagcaggagggcaagagccucuacgugaagggggagcccaucaucaacuucuacgacccgcuggucuuccccuccgacgaguucgacgcgagcaucucccaggugaacgagaagaucaaccagagccuggccuucauccgcaaguccgacgagcugcuccacaacgugaacgccggcaagagcacgaccaacaucaugaucaccaccaucaucaucgucaucaucgugauccugcugucccucaucgccguggggcugcugcucuacugcaaggcccggugaggacuagugaagggaacacccaaauuuaauucagccuuaagcacaauuaauuaagagugaaacguaauuguacaagcaguuggucacccaccauagggcaugaucaacaccgcaaccuuuccuuuuucccccagugauucugaaaaaccccucuucccuucagcuugcuuagauguuccaaauuuaguaagcuuaaggcggccuacagaagaaaaagaaaaaaaaggccacaaaaguucccucucacuuucaguaaauaaaauaaaagcagcaacagaaauaaagaaauaaaugaaauucaaaaugaaauaaauauuguguugugcagcauuaaaaaaucaauaaaaauuaaaaaugagcaagaucuaaaaaaaaaaaaaaaaaaaaaaaaaaaaaaaaaaaaaaaaaaaaaaaaaaaaaaaaaaaaaaaaugcaucccccccccccccccccccccccccccccccaaaggcucuuuucagagccaccagaauu

SEQ ID NO: 5969 - RNA, 2139 nt, Artificial Sequence
  mRNA product Design g-3 comprising derived and/or modified sequence from HRSV(A2)__F-del_DSCav1_mut5 (opt1)
gggagaguccgcucagccagguugcagaagcggcuuagcguguguccuaaucuucucucugcguguagguaggccugugccgcaaacaagcuuaccauggagcugcucauccugaaggccaacgccaucaccaccauccugacggcggugaccuucugcuucgccagcggccagaacaucaccgaggaguucuaccaguccacgugcagcgccgucuccaagggguaccucagcgcccugcgcaccggcugguacaccuccgugaucaccaucgagcugagcaacaucaaggagaacaagugcaacgggaccgacgccaaggugaagcucaucaagcaggagcuggacaaguacaagaacgcggucacggagcugcagcuccugaugcaguccacccccgccaccggcagcggguccgccaucgccagcggcguggcggugugcaagguccugcaccucgagggcgaggugaacaagaucaaguccgcccugcugagcaccaacaaggccguggucucccucagcgggugcggcguguccgugcugacguucaagguccuggaccucaagaacuacaucgacaagcagcugcugccgauccucaacaagcagagcugcuccaucagcaacaucgagaccgugaucgaguuccagcagaagaacaaccggcugcuggagaucacccgcgaguucuccgugaacgccggggucaccacgcccgugagcaccuacaugcucaccaacagcgagcugcugucccucaucaacgacaugcccaucaccaacgaccagaagaagcugaugagcaacaacgugcagaucguccggcagcaguccuacagcaucaugugcaucaucaaggaggaggugcuggccuacgugguccagcucccccuguacggcgugaucgacacgccgugcuggaagcugcacaccagcccccucugcaccaccaacacgaaggagggguccaacaucugccugacccgcaccgaccggggcugguacugcgacaacgcgggcuccgugagcuucuucccccaggccgagaccugcaagguccaguccaaccgcguguucugcgacacgaugaacagccggacccuccccuccgaggucaaccugugcaacguggacaucuucaacccgaaguacgacugcaagaucaugaccagcaagaccgacguguccagcuccgucaucacgagccugggggccaucguguccugcuacggcaagaccaagugcaccgccagcaacaagugccgggggaucaucaagaccuucuccaacggcugcgacuacgugagcaacaagggcgucgacacggugagcguggggaacacccucuacuacgucaacaagcaggagggcaagucccuguacgugaagggggagcccaucaucaacuucuacgacccccugguguuccccagcgacgaguucgacgccuccaucagccaggucaacgagaagaucaaccagucccucgcguucauccgcaagagcgacgagcugcugcacaacgugaacgccggcaaguccaccaccaacaucaugaucaccacgaucaucaucgugaucaucgucauccuccugagccugaucgccguggggcuccugcuguacugcaaggcccggugaggacuagugaagggaacacccaaauuuaauucagccuuaagcacaauuaauuaagagugaaacguaauuguacaagcaguuggucacccaccauagggcaugaucaacaccgcaaccuuuccuuuuucccccagugauucugaaaaaccccucuucccuucagcuugcuuagauguuccaaauuuaguaagcuuaaggcggccuacagaagaaaaagaaaaaaaaggccacaaaaguucccucucacuuucaguaaauaaaauaaaagcagcaacagaaauaaagaaauaaaugaaauucaaaaugaaauaaauauuguguugugcagcauuaaaaaaucaauaaaaauuaaaaaugagcaagaucuaaaaaaaaaaaaaaaaaaaaaaaaaaaaaaaaaaaaaaaaaaaaaaaaaaaaaaaaaaaaaaaaugcaucccccccccccccccccccccccccccccccaaaggcucuuuucagagccaccagaauu

SEQ ID NO: 5970 - RNA, 2139 nt, Artificial Sequence
  mRNA product Design g-3 comprising derived and/or modified sequence from HRSV(A2)__F-del_DSCav1_mut5 (opt2)
gggagaguccgcucagccagguugcagaagcggcuuagcguguguccuaaucuucucucugcguguagguaggccugugccgcaaacaagcuuaccauggagcuccucauccucaaggccaacgccaucaccaccauccucaccgccgucaccuucugcuucgccuccggccagaacaucaccgaggaguucuaccaguccaccugcuccgccgucuccaagggcuaccucuccgcccuccgcaccggcugguacaccuccgucaucaccaucgagcucuccaacaucaaggagaacaagugcaacggcaccgacgccaaggucaagcucaucaagcaggagcucgacaaguacaagaacgccgucaccgagcuccagcuccucaugcaguccacccccgccaccggcuccggcuccgccaucgccuccggcgucgccgucugcaagguccuccaccucgagggcgaggucaacaagaucaaguccgcccuccucuccaccaacaaggccgucgucucccucuccggcugcggcgucuccguccucaccuucaagguccucgaccucaagaacuacaucgacaagcagcuccuccccauccucaacaagcaguccugcuccaucuccaacaucgagaccgucaucgaguuccagcagaagaacaaccgccuccucgagaucacccgcgaguucuccgucaacgccggcgucaccacccccgucuccaccuacaugcucaccaacuccgagcuccucucccucaucaacgacaugcccaucaccaacgaccagaagaagcucauguccaacaacguccagaucguccgccagcaguccuacuccaucaugugcaucaucaaggaggagguccucgccuacgucguccagcucccccucuacggcgucaucgacacccccugcuggaagcuccacaccuccccccucugcaccaccaacaccaaggagggcuccaacaucugccucacccgcaccgaccgcggcugguacugcgacaacgccggcuccgucuccuucuucccccaggccgagaccugcaagguccaguccaaccgcgucuucugcgacaccaugaacucccgcacccuccccuccgaggucaaccucugcaacgucgacaucuucaaccccaaguacgacugcaagaucaugaccuccaagaccgacgucuccuccuccgucaucaccucccucggcgccaucgucuccugcuacggcaagaccaagugcaccgccuccaacaagugccgcggcaucaucaagaccuucuccaacggcugcgacuacgucuccaacaagggcgucgacaccgucuccgucggcaacacccucuacuacgucaacaagcaggagggcaagucccucuacgucaagggcgagcccaucaucaacuucuacgacccccucgucuuccccuccgacgaguucgacgccuccaucucccaggucaacgagaagaucaaccagucccucgccuucauccgcaaguccgacgagcuccuccacaacgucaacgccggcaaguccaccaccaacaucaugaucaccaccaucaucaucgucaucaucgucauccuccucucccucaucgccgucggccuccuccucuacugcaaggcccgcugaggacuagugaagggaacacccaaauuuaauucagccuuaagcacaauuaauuaagagugaaacguaauuguacaagcaguuggucacccaccauagggcaugaucaacaccgcaaccuuuccuuuuucccccagugauucugaaaaaccccucuucccuucagcuugcuuagauguuccaaauuuaguaagcuuaaggcggccuacagaagaaaaagaaaaaaaaggccacaaaaguucccucucacuuucaguaaauaaaauaaaagcagcaacagaaauaaagaaauaaaugaaauucaaaaugaaauaaauauuguguugugcagcauuaaaaaaucaauaaaaauuaaaaaugagcaagaucuaaaaaaaaaaaaaaaaaaaaaaaaaaaaaaaaaaaaaaaaaaaaaaaaaaaaaaaaaaaaaaaaugcaucccccccccccccccccccccccccccccccaaaggcucuuuucagagccaccagaauu

SEQ ID NO: 5971 - RNA, 2139 nt, Artificial Sequence
  mRNA product Design g-3 comprising derived and/or modified sequence from HRSV(A2)__F-del_DSCav1_mut5 (opt3)
gggagaguccgcucagccagguugcagaagcggcuuagcguguguccuaaucuucucucugcguguagguaggccugugccgcaaacaagcuuaccauggagcugcucauccuuaaggccaacgcuauuaccacaauacugacugcagugacguucugcuuugccagcggccagaauaucaccgaagaguucuaccaauccacauguucugcggucucaaaaggguauuugagugcuuuaagaacuggaugguacaccagcguuauuacaaucgaacuguccaacauuaaggagaauaaaugcaacgguaccgacgccaaggugaaacuaaucaagcaggaacucgauaaguauaaaaaugcaguaacugagcugcagcuucugaugcagucuacacccgccaccggcucggggucagcuauagcaagcggaguggccgucuguaagguguugcaccucgagggcgaaguuaacaaaaucaagagugcucugcuguccacgaauaaagccguggucucucucagcgguugcgggguguccguauuaacuuuuaagguucuggaccuuaagaacuacauugauaaacaauugcugccuauccuaaauaagcagucauguaguauuagcaacaucgagaccgugauagaguuccagcagaaaaauaacaggcuccuggaaauuacacgggaguuuucugucaaugcgggagugacuaccccaguguccacauauaugcuuaccaacucagaacuguugagccucaucaaugacaugccgauuacgaacgaucaaaagaaacugaugaguaacaauguccagaucguucgccagcagucuuacuccaucaugugcauuauaaaggaggaaguguuagcauauguagugcaacugccccucuacggcgucaucgacacuccuuguuggaaacuucauacaagcccacugugcaccacuaacacaaaggagggcucgaauauuuguuugacccgaacggaucgugggugguacugcgacaacgccggaucuguguccuucuuuccccaggcugaaaccuguaagguucagucaaauagaguguucugcgauacaaugaacaguagaacucugccuagcgaggucaaucucugcaacguggacaucuuuaauccaaaauaugauuguaagauaaugaccuccaaaacagacguaucuagcucaguuauuaccagucugggugccaucguguccugcuacggcaagacuaaauguacagcaagcaacaagugcagggggaucauuaagaccuucucuaauggaugugauuaugucucaaacaaaggcguggacacugucaguguggguaauacgcuuuacuauguuaacaagcaagaggggaaaagccuguacgugaagggagaacccaucauuaauuuuuaugacccuuugguauucccauccgaugaguuugacgcuucuauaucgcaggucaacgagaaaaucaaccagagccucgccuucauucggaaguccgaugaacuguuacacaaugugaacgcgggcaagucaacaaccaauaucaugaucacuaccauuauaaucguuauuaucgugauucugcuaagucucaucgccgucggccugcuuuuguacugcaaagcacgcugaggacuagugaagggaacacccaaauuuaauucagccuuaagcacaauuaauuaagagugaaacguaauuguacaagcaguuggucacccaccauagggcaugaucaacaccgcaaccuuuccuuuuucccccagugauucugaaaaaccccucuucccuucagcuugcuuagauguuccaaauuuaguaagcuuaaggcggccuacagaagaaaaagaaaaaaaaggccacaaaaguucccucucacuuucaguaaauaaaauaaaagcagcaacagaaauaaagaaauaaaugaaauucaaaaugaaauaaauauuguguugugcagcauuaaaaaaucaauaaaaauuaaaaaugagcaagaucuaaaaaaaaaaaaaaaaaaaaaaaaaaaaaaaaaaaaaaaaaaaaaaaaaaaaaaaaaaaaaaaaugcaucccccccccccccccccccccccccccccccaaaggcucuuuucagagccaccagaauu

SEQ ID NO: 5972 - RNA, 2139 nt, Artificial Sequence
  mRNA product Design g-3 comprising derived and/or modified sequence from HRSV(A2)__F-del_DSCav1_mut5 (opt4)
gggagaguccgcucagccagguugcagaagcggcuuagcguguguccuaaucuucucucugcguguagguaggccugugccgcaaacaagcuuaccauggagcugcugauccugaaggccaacgccaucaccaccauccugaccgccgugaccuucugcuucgccagcggccagaacaucaccgaggaguucuaccagagcaccugcagcgccgugagcaagggcuaccugagcgcccugagaaccggcugguacaccagcgugaucaccaucgagcugagcaacaucaaggagaacaagugcaacggcaccgacgccaaggugaagcugaucaagcaggagcuggacaaguacaagaacgccgugaccgagcugcagcugcugaugcagagcacccccgccaccggcagcggcagcgccaucgccagcggcguggccgugugcaaggugcugcaccuggagggcgaggugaacaagaucaagagcgcccugcugagcaccaacaaggccguggugagccugagcggcugcggcgugagcgugcugaccuucaaggugcuggaccugaagaacuacaucgacaagcagcugcugcccauccugaacaagcagagcugcagcaucagcaacaucgagaccgugaucgaguuccagcagaagaacaacagacugcuggagaucaccagagaguucagcgugaacgccggcgugaccacccccgugagcaccuacaugcugaccaacagcgagcugcugagccugaucaacgacaugcccaucaccaacgaccagaagaagcugaugagcaacaacgugcagaucgugagacagcagagcuacagcaucaugugcaucaucaaggaggaggugcuggccuacguggugcagcugccccuguacggcgugaucgacacccccugcuggaagcugcacaccagcccccugugcaccaccaacaccaaggagggcagcaacaucugccugaccagaaccgacagaggcugguacugcgacaacgccggcagcgugagcuucuucccccaggccgagaccugcaaggugcagagcaacagaguguucugcgacaccaugaacagcagaacccugcccagcgaggugaaccugugcaacguggacaucuucaaccccaaguacgacugcaagaucaugaccagcaagaccgacgugagcagcagcgugaucaccagccugggcgccaucgugagcugcuacggcaagaccaagugcaccgccagcaacaagugcagaggcaucaucaagaccuucagcaacggcugcgacuacgugagcaacaagggcguggacaccgugagcgugggcaacacccuguacuacgugaacaagcaggagggcaagagccuguacgugaagggcgagcccaucaucaacuucuacgacccccugguguuccccagcgacgaguucgacgccagcaucagccaggugaacgagaagaucaaccagagccuggccuucaucagaaagagcgacgagcugcugcacaacgugaacgccggcaagagcaccaccaacaucaugaucaccaccaucaucaucgugaucaucgugauccugcugagccugaucgccgugggccugcugcuguacugcaaggccagaugaggacuagugaagggaacacccaaauuuaauucagccuuaagcacaauuaauuaagagugaaacguaauuguacaagcaguuggucacccaccauagggcaugaucaacaccgcaaccuuuccuuuuucccccagugauucugaaaaaccccucuucccuucagcuugcuuagauguuccaaauuuaguaagcuuaaggcggccuacagaagaaaaagaaaaaaaaggccacaaaaguucccucucacuuucaguaaauaaaauaaaagcagcaacagaaauaaagaaauaaaugaaauucaaaaugaaauaaauauuguguugugcagcauuaaaaaaucaauaaaaauuaaaaaugagcaagaucuaaaaaaaaaaaaaaaaaaaaaaaaaaaaaaaaaaaaaaaaaaaaaaaaaaaaaaaaaaaaaaaaugcaucccccccccccccccccccccccccccccccaaaggcucuuuucagagccaccagaauu

SEQ ID NO: 5973 - RNA, 2139 nt, Artificial Sequence
  mRNA product Design g-3 comprising derived and/or modified sequence from HRSV(A2)__F-del_DSCav1_mut5 (opt5)
gggagaguccgcucagccagguugcagaagcggcuuagcguguguccuaaucuucucucugcguguagguaggccugugccgcaaacaagcuuaccauggagcugcucauccugaaggccaacgcuauuaccacaauccuuacggccgugaccuucugcuuugcgagcggccagaauauuacagaagaguucuaccaauccaccuguucugcugucagcaaaggguaucuguccgcccucagaacaggaugguacaccucuguuaucacaauugaacugagcaacaucaaggagaauaaaugcaacggcaccgacgccaaggugaaacuuaucaagcaggaacuggauaaguauaaaaaugcugugacggagcuccagcugcugaugcaguccacccccgccacagggucuggaagcgcuauugccuccggcgucgcgguguguaagguucuccaccuggagggggaagugaacaaaaucaagagcgcccuucugucuaccaauaaagcugucgugucccucagcggaugcggcguuucugugcugacauuuaagguccuugaccugaagaacuacauugauaaacaacuccugccuauccugaauaagcaguccuguagcauuucuaacaucgagaccgugauugaguuccagcagaaaaauaaccggcuccuggaaaucacgcgcgaguuuuccgugaaugccggcgucacaaccccgguuagcacauauaugcuuaccaacuccgaacugcucucucugaucaaugacaugcccauuaccaacgaucaaaagaaacuuaugagcaacaaugugcagaucgugagacagcaguccuacagcauuaugugcaucauuaaggaggaaguccuggcuuaugugguucaacucccucuguacggggugaucgacacacccuguuggaaacugcauacgucuccucucugcaccacaaacaccaaggagggauccaauaucugucugacacggaccgaucgcggcugguacugcgacaacgccgggagcgucucuuucuuuccccaggcggaaacguguaaggugcagagcaauagaguuuucugcgauacaaugaacuccagaacccugccuucugaggugaaucucugcaacgucgacauuuuuaauccgaaauaugauuguaagaucaugaccagcaaaacagacguguccagcucugucauuaccucccugggagccaucgugagcugcuacggcaagacaaaauguacggcuucuaacaagugccgggggauuaucaagaccuucuccaauggaugugauuauguuagcaacaaaggcguggacacagucuccgugggcaauacccuuuacuauguuaacaagcaagaggggaaaucucuguacgugaagggagaacccaucauuaauuuuuaugacccucucgucuuccccagcgaugaguuugacgccuccaucucucaggugaacgagaaaauuaaccagagccuggcuuucauccgcaaguccgaugaacugcuccacaaugugaacgccggcaagagcacaaccaauauuaugaucacgaccauuaucaucguuauuaucgucauucugcuuucucugaucgccguggggcuccugcuguacugcaaagcuagaugaggacuagugaagggaacacccaaauuuaauucagccuuaagcacaauuaauuaagagugaaacguaauuguacaagcaguuggucacccaccauagggcaugaucaacaccgcaaccuuuccuuuuucccccagugauucugaaaaaccccucuucccuucagcuugcuuagauguuccaaauuuaguaagcuuaaggcggccuacagaagaaaaagaaaaaaaaggccacaaaaguucccucucacuuucaguaaauaaaauaaaagcagcaacagaaauaaagaaauaaaugaaauucaaaaugaaauaaauauuguguugugcagcauuaaaaaaucaauaaaaauuaaaaaugagcaagaucuaaaaaaaaaaaaaaaaaaaaaaaaaaaaaaaaaaaaaaaaaaaaaaaaaaaaaaaaaaaaaaaaugcaucccccccccccccccccccccccccccccccaaaggcucuuuucagagccaccagaauu

SEQ ID NO: 5974 - RNA, 2139 nt, Artificial Sequence
  mRNA product Design g-3 comprising derived and/or modified sequence from HRSV(A2)__F-del_DSCav1_mut5 (opt6)
gggagaguccgcucagccagguugcagaagcggcuuagcguguguccuaaucuucucucugcguguagguaggccugugccgcaaacaagcuuaccauggaacuuuuaauacugaaagcaaaugccaucacaaccauacuaacugccgucacauucugcuuugcaucaggacaaaacauaacagaagaauuuuaccaauccacaugcucagcaguaucaaaaggauaucuaucggcacuuagaacuggaugguacacaaguguuauaacuauagaacucucaaacauaaaagaaaacaaaugcaauggaacagacgcaaaaguaaaacuaauaaaacaagaacucgauaaauauaaaaaugcaguaaccgaacuacaacuauuaaugcaaagcacacccgcaacaggcagcggaucagcaauagcaagcggagucgcaguauguaaaguacuacaucuagaaggagaagucaacaaaaucaaaucugcacuucuauccacaaacaaagcuguaguaucccuauccggaugcggagucucaguauuaacuuuuaaaguacuagaccuuaaaaacuacauagauaaacaacuauuaccaauacuaaauaaacaaucaugcagcauauccaauauagagacaguaauugaauuucaacaaaaaaacaacagauuacuagaaauuacucgugaauuuuccguaaaugccggagucacaacaccaguaucaaccuauaugcuaacaaacagcgaacuacuuagcuuaauaaaugacaugccaauaacaaaugaccaaaaaaaacuuaugucaaauaacguacaaaucgucagacaacaauccuacucuauaauguguauaauuaaagaagaaguccuagcauacguaguucaauuaccacucuauggaguaauagauacaccaugcuggaaacuacacacgucaccacuauguacaacaaacacaaaagaaggauccaauauaugccuaacaagaaccgacagaggcugguauugugacaacgcaggauccguuucauucuucccacaagcagaaaccuguaaaguacaaucuaauagaguauuuugcgacacaaugaacaguagaacacuaccaagcgagguuaaucuauguaacguagacauauucaauccaaaauaugauugcaaaauaaugacaucaaaaacagauguaucgucgaguguaauaacaagucugggagcuauaguaagcugcuacggcaagacgaaauguaccgcuucaaauaaaugcagaggaaucauuaaaacauucucgaacggaugcgacuacguaaguaauaaaggugucgacaccguaucaguagggaauacauuauacuacgucaacaaacaagaaggaaaaucucuauauguaaaaggagaaccaauaauaaauuucuaugacccucuaguauucccaucagaugaauuugacgcuuccauaucacaaguaaacgaaaaaaucaaucaaucuuuagcauucauacgaaaaagugaugaacuccuacacaacgucaacgcaggaaaaagcacaacaaauauaaugaucacaacaaucaucauaguaauaauaguaauacuacuaucauuaauagcaguaggauuauugcuuuacugcaaagcacgauagggacuagugaagggaacacccaaauuuaauucagccuuaagcacaauuaauuaagagugaaacguaauuguacaagcaguuggucacccaccauagggcaugaucaacaccgcaaccuuuccuuuuucccccagugauucugaaaaaccccucuucccuucagcuugcuuagauguuccaaauuuaguaagcuuaaggcggccuacagaagaaaaagaaaaaaaaggccacaaaaguucccucucacuuucaguaaauaaaauaaaagcagcaacagaaauaaagaaauaaaugaaauucaaaaugaaauaaauauuguguugugcagcauuaaaaaaucaauaaaaauuaaaaaugagcaagaucuaaaaaaaaaaaaaaaaaaaaaaaaaaaaaaaaaaaaaaaaaaaaaaaaaaaaaaaaaaaaaaaaugcaucccccccccccccccccccccccccccccccaaaggcucuuuucagagccaccagaauu

SEQ ID NO: 5975 - RNA, 2139 nt, Artificial Sequence
  mRNA product Design g-3 comprising derived and/or modified sequence from HRSV(A2)__F-del_DSCav1_mut5 (opt11)
gggagaguccgcucagccagguugcagaagcggcuuagcguguguccuaaucuucucucugcguguagguaggccugugccgcaaacaagcuuaccauggaacuccucauccucaaagccaacgccauaaccacaauacucaccgccguaaccuucugcuuugcgucgggacaaaacaucaccgaagaguucuaccaauccacuugcuccgcaguaagcaaaggauaccucuccgcccugcgaaccgguugguacacaucagucaucacaaucgaacucucaaacauaaaagaaaacaaaugcaacggcaccgacgcaaaggucaaauuaaucaagcaagaacuagacaaauacaaaaacgccgucacagaacuccagcugcuaaugcagagcacacccgcaacuggcagcggauccgccaucgcaucaggagucgccgugugcaaaguccuacaccucgaaggagaagugaacaaaaucaaaucagcccuacucuccaccaacaaggccgucgucucccucuccggcugcggugucuccguccuaaccuucaaagugcuagaccucaagaacuacaucgacaaacaacuccuaccaauacucaacaagcaaucuugcuccaucuccaacaucgaaaccguaaucgaguuccaacagaagaacaaccgccuccucgaaaucacccgcgaguucucugucaacgcaggggucaccacucccgucuccacauacaugcucacaaacuccgaacuccucagccucaucaacgacaugcccauaaccaacgaccagaaaaagcuaaugagcaauaacguccaaaucguuagacaacaaaguuauuccaucaugugcaucaucaaagaagaaguccucgccuacgucguacaacucccccucuauggcgucaucgacacccccugcuggaaacugcacacaucaccccucugcaccacaaacaccaaagaaggcucaaacaucugccuaacucgcaccgaccgcggcugguacugcgacaacgccggcagcguaucauucuuuccccaagccgaaacaugcaaaguucaauccaaccgcgucuucugcgacacaaugaacuccagaacgcuccccagcgaagucaaccucuguaacguagacaucuucaacccuaaguacgacugcaaaaucaugaccuccaaaacugauguauccuccuccgucaucacaucccugggcgccaucgucagcugcuacggcaaaacaaaaugcacugccucaaacaaaugccgagguaucauaaagaccuucucaaacggaugcgauuacgucagcaacaaaggcgucgacaccgucagugucggcaacacccucuacuacgucaacaaacaagaaggaaaaucccucuacgucaaaggcgaacccaucaucaacuucuacgacccccucgucuuccccagcgacgaguucgacgccuccaucucacaagucaacgaaaagauaaaccaaucucuagccuucauccgcaaauccgaugaacuccugcauaacgucaacgccggcaaauccaccacaaacaucaugaucacuaccauaaucaucgucauaaucguaauccuccuaucucuuaucgcagucggccuacuacucuacugcaaagcccgcuaaggacuagugaagggaacacccaaauuuaauucagccuuaagcacaauuaauuaagagugaaacguaauuguacaagcaguuggucacccaccauagggcaugaucaacaccgcaaccuuuccuuuuucccccagugauucugaaaaaccccucuucccuucagcuugcuuagauguuccaaauuuaguaagcuuaaggcggccuacagaagaaaaagaaaaaaaaggccacaaaaguucccucucacuuucaguaaauaaaauaaaagcagcaacagaaauaaagaaauaaaugaaauucaaaaugaaauaaauauuguguugugcagcauuaaaaaaucaauaaaaauuaaaaaugagcaagaucuaaaaaaaaaaaaaaaaaaaaaaaaaaaaaaaaaaaaaaaaaaaaaaaaaaaaaaaaaaaaaaaaugcaucccccccccccccccccccccccccccccccaaaggcucuuuucagagccaccagaauu

SEQ ID NO: 5976 - RNA, 1934 nt, Artificial Sequence
  mRNA product Design g-4 comprising derived and/or modified sequence from HRSV(A2)__F-del_DSCav1_mut5 (opt1)
gggagacuccugucgggcggaaguaggaggaguagaguuuaaaaacaguacucuuuuuccgguucgggacguaguugaagcaacgacaagccggauaaccgcucuugagacaggaagcuuaccauggagcugcucauccugaaggccaacgccaucaccaccauccugacggcggugaccuucugcuucgccagcggccagaacaucaccgaggaguucuaccaguccacgugcagcgccgucuccaagggguaccucagcgcccugcggaccggcugguacaccuccgugaucaccaucgagcugagcaacaucaaggagaacaagugcaacgggaccgacgccaaggugaagcucaucaagcaggagcuggacaaguacaagaacgcggucacggagcugcagcuccugaugcaguccaccccggcaaccggcuccggcuccgccaucgcgagcggcgucgccgugugcaaggugcugcaccucgagggggaggucaacaagaucaagagcgcccugcuguccaccaacaaggccguggugagccucuccggcugcggcgucagcgugcugaccuucaaggugcuggaccucaagaacuacaucgacaagcagcugcugcccauccugaacaagcagagcugcuccaucagcaacaucgagacggugaucgaguuccagcagaagaacaaccggcuccuggagaucacccgcgaguucagcgugaacgccggggucaccacccccguguccacguacaugcugaccaacagcgagcuccugucccugaucaacgacaugccgaucaccaacgaccagaagaagcucaugagcaacaacgugcagaucguccggcagcaguccuacagcaucaugugcaucaucaaggaggaggugcuggcguacgugguccagcugccccucuacggcgugaucgacacccccugcuggaagcugcacacgagcccccugugcaccaccaacaccaaggagggguccaacaucugccucacgcgcaccgaccggggcugguacugcgacaacgccggcagcgucuccuucuucccgcaggccgagaccugcaaggugcagagcaaccgcguguucugcgacaccaugaacucccggacgcugcccagcgagguaaaccucugcaacgucgacaucuucaaccccaaguacgacugcaagaucaugaccuccaagaccgacgugagcuccagcgugaucaccucccugggggccaucgucagcugcuacggcaagacgaagugcaccgccagcaacaagugccgggggaucaucaagaccuucuccaacggcugcgacuacgugagcaacaagggcguggacaccguguccgucgggaacacccuguacuacgugaacaagcaggagggcaagagccucuacgugaagggggagcccaucaucaacuucuacgacccgcuggucuuccccuccgacgaguucgacgcgagcaucucccaggugaacgagaagaucaaccagagccuggccuucauccgcaaguccgacgagcugcuccacaacgugaacgccggcaagagcacgaccaacaucaugaucaccaccaucaucaucgucaucaucgugauccugcugucccucaucgccguggggcugcugcucuacugcaaggcccggugaggacuaguaauaaggaaacuguaugaaugucugugggcaggaagugaagagauccuucuguaaagguuuuuggaauuaugucugcugaauaauaaacuuuuuugaaauaauaaaucugguagaaaaaugagaucuaaaaaaaaaaaaaaaaaaaaaaaaaaaaaaaaaaaaaaaaaaaaaaaaaaaaaaaaaaaaaaaaugcaucccccccccccccccccccccccccccccccaaaggcucuuuucagagccaccagaauu

SEQ ID NO: 5977 - RNA, 1934 nt, Artificial Sequence
  mRNA product Design g-4 comprising derived and/or modified sequence from HRSV(A2)__F-del_DSCav1_mut5 (opt1)
gggagacuccugucgggcggaaguaggaggaguagaguuuaaaaacaguacucuuuuuccgguucgggacguaguugaagcaacgacaagccggauaaccgcucuugagacaggaagcuuaccauggagcugcucauccugaaggccaacgccaucaccaccauccugacggcggugaccuucugcuucgccagcggccagaacaucaccgaggaguucuaccaguccacgugcagcgccgucuccaagggguaccucagcgcccugcgcaccggcugguacaccuccgugaucaccaucgagcugagcaacaucaaggagaacaagugcaacgggaccgacgccaaggugaagcucaucaagcaggagcuggacaaguacaagaacgcggucacggagcugcagcuccugaugcaguccacccccgccaccggcagcggguccgccaucgccagcggcguggcggugugcaagguccugcaccucgagggcgaggugaacaagaucaaguccgcccugcugagcaccaacaaggccguggucucccucagcgggugcggcguguccgugcugacguucaagguccuggaccucaagaacuacaucgacaagcagcugcugccgauccucaacaagcagagcugcuccaucagcaacaucgagaccgugaucgaguuccagcagaagaacaaccggcugcuggagaucacccgcgaguucuccgugaacgccggggucaccacgcccgugagcaccuacaugcucaccaacagcgagcugcugucccucaucaacgacaugcccaucaccaacgaccagaagaagcugaugagcaacaacgugcagaucguccggcagcaguccuacagcaucaugugcaucaucaaggaggaggugcuggccuacgugguccagcucccccuguacggcgugaucgacacgccgugcuggaagcugcacaccagcccccucugcaccaccaacacgaaggagggguccaacaucugccugacccgcaccgaccggggcugguacugcgacaacgcgggcuccgugagcuucuucccccaggccgagaccugcaagguccaguccaaccgcguguucugcgacacgaugaacagccggacccuccccuccgaggucaaccugugcaacguggacaucuucaacccgaaguacgacugcaagaucaugaccagcaagaccgacguguccagcuccgucaucacgagccugggggccaucguguccugcuacggcaagaccaagugcaccgccagcaacaagugccgggggaucaucaagaccuucuccaacggcugcgacuacgugagcaacaagggcgucgacacggugagcguggggaacacccucuacuacgucaacaagcaggagggcaagucccuguacgugaagggggagcccaucaucaacuucuacgacccccugguguuccccagcgacgaguucgacgccuccaucagccaggucaacgagaagaucaaccagucccucgcguucauccgcaagagcgacgagcugcugcacaacgugaacgccggcaaguccaccaccaacaucaugaucaccacgaucaucaucgugaucaucgucauccuccugagccugaucgccguggggcuccugcuguacugcaaggcccggugaggacuaguaauaaggaaacuguaugaaugucugugggcaggaagugaagagauccuucuguaaagguuuuuggaauuaugucugcugaauaauaaacuuuuuugaaauaauaaaucugguagaaaaaugagaucuaaaaaaaaaaaaaaaaaaaaaaaaaaaaaaaaaaaaaaaaaaaaaaaaaaaaaaaaaaaaaaaaugcaucccccccccccccccccccccccccccccccaaaggcucuuuucagagccaccagaauu

SEQ ID NO: 5978 - RNA, 1934 nt, Artificial Sequence
  mRNA product Design g-4 comprising derived and/or modified sequence from HRSV(A2)__F-del_DSCav1_mut5 (opt2)
gggagacuccugucgggcggaaguaggaggaguagaguuuaaaaacaguacucuuuuuccgguucgggacguaguugaagcaacgacaagccggauaaccgcucuugagacaggaagcuuaccauggagcuccucauccucaaggccaacgccaucaccaccauccucaccgccgucaccuucugcuucgccuccggccagaacaucaccgaggaguucuaccaguccaccugcuccgccgucuccaagggcuaccucuccgcccuccgcaccggcugguacaccuccgucaucaccaucgagcucuccaacaucaaggagaacaagugcaacggcaccgacgccaaggucaagcucaucaagcaggagcucgacaaguacaagaacgccgucaccgagcuccagcuccucaugcaguccacccccgccaccggcuccggcuccgccaucgccuccggcgucgccgucugcaagguccuccaccucgagggcgaggucaacaagaucaaguccgcccuccucuccaccaacaaggccgucgucucccucuccggcugcggcgucuccguccucaccuucaagguccucgaccucaagaacuacaucgacaagcagcuccuccccauccucaacaagcaguccugcuccaucuccaacaucgagaccgucaucgaguuccagcagaagaacaaccgccuccucgagaucacccgcgaguucuccgucaacgccggcgucaccacccccgucuccaccuacaugcucaccaacuccgagcuccucucccucaucaacgacaugcccaucaccaacgaccagaagaagcucauguccaacaacguccagaucguccgccagcaguccuacuccaucaugugcaucaucaaggaggagguccucgccuacgucguccagcucccccucuacggcgucaucgacacccccugcuggaagcuccacaccuccccccucugcaccaccaacaccaaggagggcuccaacaucugccucacccgcaccgaccgcggcugguacugcgacaacgccggcuccgucuccuucuucccccaggccgagaccugcaagguccaguccaaccgcgucuucugcgacaccaugaacucccgcacccuccccuccgaggucaaccucugcaacgucgacaucuucaaccccaaguacgacugcaagaucaugaccuccaagaccgacgucuccuccuccgucaucaccucccucggcgccaucgucuccugcuacggcaagaccaagugcaccgccuccaacaagugccgcggcaucaucaagaccuucuccaacggcugcgacuacgucuccaacaagggcgucgacaccgucuccgucggcaacacccucuacuacgucaacaagcaggagggcaagucccucuacgucaagggcgagcccaucaucaacuucuacgacccccucgucuuccccuccgacgaguucgacgccuccaucucccaggucaacgagaagaucaaccagucccucgccuucauccgcaaguccgacgagcuccuccacaacgucaacgccggcaaguccaccaccaacaucaugaucaccaccaucaucaucgucaucaucgucauccuccucucccucaucgccgucggccuccuccucuacugcaaggcccgcugaggacuaguaauaaggaaacuguaugaaugucugugggcaggaagugaagagauccuucuguaaagguuuuuggaauuaugucugcugaauaauaaacuuuuuugaaauaauaaaucugguagaaaaaugagaucuaaaaaaaaaaaaaaaaaaaaaaaaaaaaaaaaaaaaaaaaaaaaaaaaaaaaaaaaaaaaaaaaugcaucccccccccccccccccccccccccccccccaaaggcucuuuucagagccaccagaauu

SEQ ID NO: 5979 - RNA, 1934 nt, Artificial Sequence
  mRNA product Design g-4 comprising derived and/or modified sequence from HRSV(A2)__F-del_DSCav1_mut5 (opt3)
gggagacuccugucgggcggaaguaggaggaguagaguuuaaaaacaguacucuuuuuccgguucgggacguaguugaagcaacgacaagccggauaaccgcucuugagacaggaagcuuaccauggagcugcucauccuuaaggccaacgcuauuaccacaauacugacugcagugacguucugcuuugccagcggccagaauaucaccgaagaguucuaccaauccacauguucugcggucucaaaaggguauuugagugcuuuaagaacuggaugguacaccagcguuauuacaaucgaacuguccaacauuaaggagaauaaaugcaacgguaccgacgccaaggugaaacuaaucaagcaggaacucgauaaguauaaaaaugcaguaacugagcugcagcuucugaugcagucuacacccgccaccggcucggggucagcuauagcaagcggaguggccgucuguaagguguugcaccucgagggcgaaguuaacaaaaucaagagugcucugcuguccacgaauaaagccguggucucucucagcgguugcgggguguccguauuaacuuuuaagguucuggaccuuaagaacuacauugauaaacaauugcugccuauccuaaauaagcagucauguaguauuagcaacaucgagaccgugauagaguuccagcagaaaaauaacaggcuccuggaaauuacacgggaguuuucugucaaugcgggagugacuaccccaguguccacauauaugcuuaccaacucagaacuguugagccucaucaaugacaugccgauuacgaacgaucaaaagaaacugaugaguaacaauguccagaucguucgccagcagucuuacuccaucaugugcauuauaaaggaggaaguguuagcauauguagugcaacugccccucuacggcgucaucgacacuccuuguuggaaacuucauacaagcccacugugcaccacuaacacaaaggagggcucgaauauuuguuugacccgaacggaucgugggugguacugcgacaacgccggaucuguguccuucuuuccccaggcugaaaccuguaagguucagucaaauagaguguucugcgauacaaugaacaguagaacucugccuagcgaggucaaucucugcaacguggacaucuuuaauccaaaauaugauuguaagauaaugaccuccaaaacagacguaucuagcucaguuauuaccagucugggugccaucguguccugcuacggcaagacuaaauguacagcaagcaacaagugcagggggaucauuaagaccuucucuaauggaugugauuaugucucaaacaaaggcguggacacugucaguguggguaauacgcuuuacuauguuaacaagcaagaggggaaaagccuguacgugaagggagaacccaucauuaauuuuuaugacccuuugguauucccauccgaugaguuugacgcuucuauaucgcaggucaacgagaaaaucaaccagagccucgccuucauucggaaguccgaugaacuguuacacaaugugaacgcgggcaagucaacaaccaauaucaugaucacuaccauuauaaucguuauuaucgugauucugcuaagucucaucgccgucggccugcuuuuguacugcaaagcacgcugaggacuaguaauaaggaaacuguaugaaugucugugggcaggaagugaagagauccuucuguaaagguuuuuggaauuaugucugcugaauaauaaacuuuuuugaaauaauaaaucugguagaaaaaugagaucuaaaaaaaaaaaaaaaaaaaaaaaaaaaaaaaaaaaaaaaaaaaaaaaaaaaaaaaaaaaaaaaaugcaucccccccccccccccccccccccccccccccaaaggcucuuuucagagccaccagaauu

SEQ ID NO: 5980 - RNA, 1934 nt, Artificial Sequence
  mRNA product Design g-4 comprising derived and/or modified sequence from HRSV(A2)__F-del_DSCav1_mut5 (opt4)
gggagacuccugucgggcggaaguaggaggaguagaguuuaaaaacaguacucuuuuuccgguucgggacguaguugaagcaacgacaagccggauaaccgcucuugagacaggaagcuuaccauggagcugcugauccugaaggccaacgccaucaccaccauccugaccgccgugaccuucugcuucgccagcggccagaacaucaccgaggaguucuaccagagcaccugcagcgccgugagcaagggcuaccugagcgcccugagaaccggcugguacaccagcgugaucaccaucgagcugagcaacaucaaggagaacaagugcaacggcaccgacgccaaggugaagcugaucaagcaggagcuggacaaguacaagaacgccgugaccgagcugcagcugcugaugcagagcacccccgccaccggcagcggcagcgccaucgccagcggcguggccgugugcaaggugcugcaccuggagggcgaggugaacaagaucaagagcgcccugcugagcaccaacaaggccguggugagccugagcggcugcggcgugagcgugcugaccuucaaggugcuggaccugaagaacuacaucgacaagcagcugcugcccauccugaacaagcagagcugcagcaucagcaacaucgagaccgugaucgaguuccagcagaagaacaacagacugcuggagaucaccagagaguucagcgugaacgccggcgugaccacccccgugagcaccuacaugcugaccaacagcgagcugcugagccugaucaacgacaugcccaucaccaacgaccagaagaagcugaugagcaacaacgugcagaucgugagacagcagagcuacagcaucaugugcaucaucaaggaggaggugcuggccuacguggugcagcugccccuguacggcgugaucgacacccccugcuggaagcugcacaccagcccccugugcaccaccaacaccaaggagggcagcaacaucugccugaccagaaccgacagaggcugguacugcgacaacgccggcagcgugagcuucuucccccaggccgagaccugcaaggugcagagcaacagaguguucugcgacaccaugaacagcagaacccugcccagcgaggugaaccugugcaacguggacaucuucaaccccaaguacgacugcaagaucaugaccagcaagaccgacgugagcagcagcgugaucaccagccugggcgccaucgugagcugcuacggcaagaccaagugcaccgccagcaacaagugcagaggcaucaucaagaccuucagcaacggcugcgacuacgugagcaacaagggcguggacaccgugagcgugggcaacacccuguacuacgugaacaagcaggagggcaagagccuguacgugaagggcgagcccaucaucaacuucuacgacccccugguguuccccagcgacgaguucgacgccagcaucagccaggugaacgagaagaucaaccagagccuggccuucaucagaaagagcgacgagcugcugcacaacgugaacgccggcaagagcaccaccaacaucaugaucaccaccaucaucaucgugaucaucgugauccugcugagccugaucgccgugggccugcugcuguacugcaaggccagaugaggacuaguaauaaggaaacuguaugaaugucugugggcaggaagugaagagauccuucuguaaagguuuuuggaauuaugucugcugaauaauaaacuuuuuugaaauaauaaaucugguagaaaaaugagaucuaaaaaaaaaaaaaaaaaaaaaaaaaaaaaaaaaaaaaaaaaaaaaaaaaaaaaaaaaaaaaaaaugcaucccccccccccccccccccccccccccccccaaaggcucuuuucagagccaccagaauu

SEQ ID NO: 5981 - RNA, 1934 nt, Artificial Sequence
  mRNA product Design g-4 comprising derived and/or modified sequence from HRSV(A2)__F-del_DSCav1_mut5 (opt5)
gggagacuccugucgggcggaaguaggaggaguagaguuuaaaaacaguacucuuuuuccgguucgggacguaguugaagcaacgacaagccggauaaccgcucuugagacaggaagcuuaccauggagcugcucauccugaaggccaacgcuauuaccacaauccuuacggccgugaccuucugcuuugcgagcggccagaauauuacagaagaguucuaccaauccaccuguucugcugucagcaaaggguaucuguccgcccucagaacaggaugguacaccucuguuaucacaauugaacugagcaacaucaaggagaauaaaugcaacggcaccgacgccaaggugaaacuuaucaagcaggaacuggauaaguauaaaaaugcugugacggagcuccagcugcugaugcaguccacccccgccacagggucuggaagcgcuauugccuccggcgucgcgguguguaagguucuccaccuggagggggaagugaacaaaaucaagagcgcccuucugucuaccaauaaagcugucgugucccucagcggaugcggcguuucugugcugacauuuaagguccuugaccugaagaacuacauugauaaacaacuccugccuauccugaauaagcaguccuguagcauuucuaacaucgagaccgugauugaguuccagcagaaaaauaaccggcuccuggaaaucacgcgcgaguuuuccgugaaugccggcgucacaaccccgguuagcacauauaugcuuaccaacuccgaacugcucucucugaucaaugacaugcccauuaccaacgaucaaaagaaacuuaugagcaacaaugugcagaucgugagacagcaguccuacagcauuaugugcaucauuaaggaggaaguccuggcuuaugugguucaacucccucuguacggggugaucgacacacccuguuggaaacugcauacgucuccucucugcaccacaaacaccaaggagggauccaauaucugucugacacggaccgaucgcggcugguacugcgacaacgccgggagcgucucuuucuuuccccaggcggaaacguguaaggugcagagcaauagaguuuucugcgauacaaugaacuccagaacccugccuucugaggugaaucucugcaacgucgacauuuuuaauccgaaauaugauuguaagaucaugaccagcaaaacagacguguccagcucugucauuaccucccugggagccaucgugagcugcuacggcaagacaaaauguacggcuucuaacaagugccgggggauuaucaagaccuucuccaauggaugugauuauguuagcaacaaaggcguggacacagucuccgugggcaauacccuuuacuauguuaacaagcaagaggggaaaucucuguacgugaagggagaacccaucauuaauuuuuaugacccucucgucuuccccagcgaugaguuugacgccuccaucucucaggugaacgagaaaauuaaccagagccuggcuuucauccgcaaguccgaugaacugcuccacaaugugaacgccggcaagagcacaaccaauauuaugaucacgaccauuaucaucguuauuaucgucauucugcuuucucugaucgccguggggcuccugcuguacugcaaagcuagaugaggacuaguaauaaggaaacuguaugaaugucugugggcaggaagugaagagauccuucuguaaagguuuuuggaauuaugucugcugaauaauaaacuuuuuugaaauaauaaaucugguagaaaaaugagaucuaaaaaaaaaaaaaaaaaaaaaaaaaaaaaaaaaaaaaaaaaaaaaaaaaaaaaaaaaaaaaaaaugcaucccccccccccccccccccccccccccccccaaaggcucuuuucagagccaccagaauu

SEQ ID NO: 5982 - RNA, 1934 nt, Artificial Sequence
  mRNA product Design g-4 comprising derived and/or modified sequence from HRSV(A2)__F-del_DSCav1_mut5 (opt6)
gggagacuccugucgggcggaaguaggaggaguagaguuuaaaaacaguacucuuuuuccgguucgggacguaguugaagcaacgacaagccggauaaccgcucuugagacaggaagcuuaccauggaacuuuuaauacugaaagcaaaugccaucacaaccauacuaacugccgucacauucugcuuugcaucaggacaaaacauaacagaagaauuuuaccaauccacaugcucagcaguaucaaaaggauaucuaucggcacuuagaacuggaugguacacaaguguuauaacuauagaacucucaaacauaaaagaaaacaaaugcaauggaacagacgcaaaaguaaaacuaauaaaacaagaacucgauaaauauaaaaaugcaguaaccgaacuacaacuauuaaugcaaagcacacccgcaacaggcagcggaucagcaauagcaagcggagucgcaguauguaaaguacuacaucuagaaggagaagucaacaaaaucaaaucugcacuucuauccacaaacaaagcuguaguaucccuauccggaugcggagucucaguauuaacuuuuaaaguacuagaccuuaaaaacuacauagauaaacaacuauuaccaauacuaaauaaacaaucaugcagcauauccaauauagagacaguaauugaauuucaacaaaaaaacaacagauuacuagaaauuacucgugaauuuuccguaaaugccggagucacaacaccaguaucaaccuauaugcuaacaaacagcgaacuacuuagcuuaauaaaugacaugccaauaacaaaugaccaaaaaaaacuuaugucaaauaacguacaaaucgucagacaacaauccuacucuauaauguguauaauuaaagaagaaguccuagcauacguaguucaauuaccacucuauggaguaauagauacaccaugcuggaaacuacacacgucaccacuauguacaacaaacacaaaagaaggauccaauauaugccuaacaagaaccgacagaggcugguauugugacaacgcaggauccguuucauucuucccacaagcagaaaccuguaaaguacaaucuaauagaguauuuugcgacacaaugaacaguagaacacuaccaagcgagguuaaucuauguaacguagacauauucaauccaaaauaugauugcaaaauaaugacaucaaaaacagauguaucgucgaguguaauaacaagucugggagcuauaguaagcugcuacggcaagacgaaauguaccgcuucaaauaaaugcagaggaaucauuaaaacauucucgaacggaugcgacuacguaaguaauaaaggugucgacaccguaucaguagggaauacauuauacuacgucaacaaacaagaaggaaaaucucuauauguaaaaggagaaccaauaauaaauuucuaugacccucuaguauucccaucagaugaauuugacgcuuccauaucacaaguaaacgaaaaaaucaaucaaucuuuagcauucauacgaaaaagugaugaacuccuacacaacgucaacgcaggaaaaagcacaacaaauauaaugaucacaacaaucaucauaguaauaauaguaauacuacuaucauuaauagcaguaggauuauugcuuuacugcaaagcacgauagggacuaguaauaaggaaacuguaugaaugucugugggcaggaagugaagagauccuucuguaaagguuuuuggaauuaugucugcugaauaauaaacuuuuuugaaauaauaaaucugguagaaaaaugagaucuaaaaaaaaaaaaaaaaaaaaaaaaaaaaaaaaaaaaaaaaaaaaaaaaaaaaaaaaaaaaaaaaugcaucccccccccccccccccccccccccccccccaaaggcucuuuucagagccaccagaauu

SEQ ID NO: 5983 - RNA, 1934 nt, Artificial Sequence
  mRNA product Design g-4 comprising derived and/or modified sequence from HRSV(A2)__F-del_DSCav1_mut5 (opt11)
gggagacuccugucgggcggaaguaggaggaguagaguuuaaaaacaguacucuuuuuccgguucgggacguaguugaagcaacgacaagccggauaaccgcucuugagacaggaagcuuaccauggaacuccucauccucaaagccaacgccauaaccacaauacucaccgccguaaccuucugcuuugcgucgggacaaaacaucaccgaagaguucuaccaauccacuugcuccgcaguaagcaaaggauaccucuccgcccugcgaaccgguugguacacaucagucaucacaaucgaacucucaaacauaaaagaaaacaaaugcaacggcaccgacgcaaaggucaaauuaaucaagcaagaacuagacaaauacaaaaacgccgucacagaacuccagcugcuaaugcagagcacacccgcaacuggcagcggauccgccaucgcaucaggagucgccgugugcaaaguccuacaccucgaaggagaagugaacaaaaucaaaucagcccuacucuccaccaacaaggccgucgucucccucuccggcugcggugucuccguccuaaccuucaaagugcuagaccucaagaacuacaucgacaaacaacuccuaccaauacucaacaagcaaucuugcuccaucuccaacaucgaaaccguaaucgaguuccaacagaagaacaaccgccuccucgaaaucacccgcgaguucucugucaacgcaggggucaccacucccgucuccacauacaugcucacaaacuccgaacuccucagccucaucaacgacaugcccauaaccaacgaccagaaaaagcuaaugagcaauaacguccaaaucguuagacaacaaaguuauuccaucaugugcaucaucaaagaagaaguccucgccuacgucguacaacucccccucuauggcgucaucgacacccccugcuggaaacugcacacaucaccccucugcaccacaaacaccaaagaaggcucaaacaucugccuaacucgcaccgaccgcggcugguacugcgacaacgccggcagcguaucauucuuuccccaagccgaaacaugcaaaguucaauccaaccgcgucuucugcgacacaaugaacuccagaacgcuccccagcgaagucaaccucuguaacguagacaucuucaacccuaaguacgacugcaaaaucaugaccuccaaaacugauguauccuccuccgucaucacaucccugggcgccaucgucagcugcuacggcaaaacaaaaugcacugccucaaacaaaugccgagguaucauaaagaccuucucaaacggaugcgauuacgucagcaacaaaggcgucgacaccgucagugucggcaacacccucuacuacgucaacaaacaagaaggaaaaucccucuacgucaaaggcgaacccaucaucaacuucuacgacccccucgucuuccccagcgacgaguucgacgccuccaucucacaagucaacgaaaagauaaaccaaucucuagccuucauccgcaaauccgaugaacuccugcauaacgucaacgccggcaaauccaccacaaacaucaugaucacuaccauaaucaucgucauaaucguaauccuccuaucucuuaucgcagucggccuacuacucuacugcaaagcccgcuaaggacuaguaauaaggaaacuguaugaaugucugugggcaggaagugaagagauccuucuguaaagguuuuuggaauuaugucugcugaauaauaaacuuuuuugaaauaauaaaucugguagaaaaaugagaucuaaaaaaaaaaaaaaaaaaaaaaaaaaaaaaaaaaaaaaaaaaaaaaaaaaaaaaaaaaaaaaaaugcaucccccccccccccccccccccccccccccccaaaggcucuuuucagagccaccagaauu

SEQ ID NO: 5984 - RNA, 1910 nt, Artificial Sequence
  mRNA product Design g-5 comprising derived and/or modified sequence from HRSV(A2)__F-del_DSCav1_mut5 (opt1)
gggagacccgugacccggaaguuguacggcuacgcgacuuucccucccacaaacccucgcgcccuuccuuuccuacuugggcccggcagaaagcuuaccauggagcugcucauccugaaggccaacgccaucaccaccauccugacggcggugaccuucugcuucgccagcggccagaacaucaccgaggaguucuaccaguccacgugcagcgccgucuccaagggguaccucagcgcccugcggaccggcugguacaccuccgugaucaccaucgagcugagcaacaucaaggagaacaagugcaacgggaccgacgccaaggugaagcucaucaagcaggagcuggacaaguacaagaacgcggucacggagcugcagcuccugaugcaguccaccccggcaaccggcuccggcuccgccaucgcgagcggcgucgccgugugcaaggugcugcaccucgagggggaggucaacaagaucaagagcgcccugcuguccaccaacaaggccguggugagccucuccggcugcggcgucagcgugcugaccuucaaggugcuggaccucaagaacuacaucgacaagcagcugcugcccauccugaacaagcagagcugcuccaucagcaacaucgagacggugaucgaguuccagcagaagaacaaccggcuccuggagaucacccgcgaguucagcgugaacgccggggucaccacccccguguccacguacaugcugaccaacagcgagcuccugucccugaucaacgacaugccgaucaccaacgaccagaagaagcucaugagcaacaacgugcagaucguccggcagcaguccuacagcaucaugugcaucaucaaggaggaggugcuggcguacgugguccagcugccccucuacggcgugaucgacacccccugcuggaagcugcacacgagcccccugugcaccaccaacaccaaggagggguccaacaucugccucacgcgcaccgaccggggcugguacugcgacaacgccggcagcgucuccuucuucccgcaggccgagaccugcaaggugcagagcaaccgcguguucugcgacaccaugaacucccggacgcugcccagcgagguaaaccucugcaacgucgacaucuucaaccccaaguacgacugcaagaucaugaccuccaagaccgacgugagcuccagcgugaucaccucccugggggccaucgucagcugcuacggcaagacgaagugcaccgccagcaacaagugccgggggaucaucaagaccuucuccaacggcugcgacuacgugagcaacaagggcguggacaccguguccgucgggaacacccuguacuacgugaacaagcaggagggcaagagccucuacgugaagggggagcccaucaucaacuucuacgacccgcuggucuuccccuccgacgaguucgacgcgagcaucucccaggugaacgagaagaucaaccagagccuggccuucauccgcaaguccgacgagcugcuccacaacgugaacgccggcaagagcacgaccaacaucaugaucaccaccaucaucaucgucaucaucgugauccugcugucccucaucgccguggggcugcugcucuacugcaaggcccggugaggacuaguaauaaggaaacuguaugaaugucugugggcaggaagugaagagauccuucuguaaagguuuuuggaauuaugucugcugaauaauaaacuuuuuugaaauaauaaaucugguagaaaaaugagaucuaaaaaaaaaaaaaaaaaaaaaaaaaaaaaaaaaaaaaaaaaaaaaaaaaaaaaaaaaaaaaaaaugcaucccccccccccccccccccccccccccccccaaaggcucuuuucagagccaccagaauu

SEQ ID NO: 5985 - RNA, 1910 nt, Artificial Sequence
  mRNA product Design g-5 comprising derived and/or modified sequence from HRSV(A2)__F-del_DSCav1_mut5 (opt1)
gggagacccgugacccggaaguuguacggcuacgcgacuuucccucccacaaacccucgcgcccuuccuuuccuacuugggcccggcagaaagcuuaccauggagcugcucauccugaaggccaacgccaucaccaccauccugacggcggugaccuucugcuucgccagcggccagaacaucaccgaggaguucuaccaguccacgugcagcgccgucuccaagggguaccucagcgcccugcgcaccggcugguacaccuccgugaucaccaucgagcugagcaacaucaaggagaacaagugcaacgggaccgacgccaaggugaagcucaucaagcaggagcuggacaaguacaagaacgcggucacggagcugcagcuccugaugcaguccacccccgccaccggcagcggguccgccaucgccagcggcguggcggugugcaagguccugcaccucgagggcgaggugaacaagaucaaguccgcccugcugagcaccaacaaggccguggucucccucagcgggugcggcguguccgugcugacguucaagguccuggaccucaagaacuacaucgacaagcagcugcugccgauccucaacaagcagagcugcuccaucagcaacaucgagaccgugaucgaguuccagcagaagaacaaccggcugcuggagaucacccgcgaguucuccgugaacgccggggucaccacgcccgugagcaccuacaugcucaccaacagcgagcugcugucccucaucaacgacaugcccaucaccaacgaccagaagaagcugaugagcaacaacgugcagaucguccggcagcaguccuacagcaucaugugcaucaucaaggaggaggugcuggccuacgugguccagcucccccuguacggcgugaucgacacgccgugcuggaagcugcacaccagcccccucugcaccaccaacacgaaggagggguccaacaucugccugacccgcaccgaccggggcugguacugcgacaacgcgggcuccgugagcuucuucccccaggccgagaccugcaagguccaguccaaccgcguguucugcgacacgaugaacagccggacccuccccuccgaggucaaccugugcaacguggacaucuucaacccgaaguacgacugcaagaucaugaccagcaagaccgacguguccagcuccgucaucacgagccugggggccaucguguccugcuacggcaagaccaagugcaccgccagcaacaagugccgggggaucaucaagaccuucuccaacggcugcgacuacgugagcaacaagggcgucgacacggugagcguggggaacacccucuacuacgucaacaagcaggagggcaagucccuguacgugaagggggagcccaucaucaacuucuacgacccccugguguuccccagcgacgaguucgacgccuccaucagccaggucaacgagaagaucaaccagucccucgcguucauccgcaagagcgacgagcugcugcacaacgugaacgccggcaaguccaccaccaacaucaugaucaccacgaucaucaucgugaucaucgucauccuccugagccugaucgccguggggcuccugcuguacugcaaggcccggugaggacuaguaauaaggaaacuguaugaaugucugugggcaggaagugaagagauccuucuguaaagguuuuuggaauuaugucugcugaauaauaaacuuuuuugaaauaauaaaucugguagaaaaaugagaucuaaaaaaaaaaaaaaaaaaaaaaaaaaaaaaaaaaaaaaaaaaaaaaaaaaaaaaaaaaaaaaaaugcaucccccccccccccccccccccccccccccccaaaggcucuuuucagagccaccagaauu

SEQ ID NO: 5986 - RNA, 1910 nt, Artificial Sequence
  mRNA product Design g-5 comprising derived and/or modified sequence from HRSV(A2)__F-del_DSCav1_mut5 (opt2)
gggagacccgugacccggaaguuguacggcuacgcgacuuucccucccacaaacccucgcgcccuuccuuuccuacuugggcccggcagaaagcuuaccauggagcuccucauccucaaggccaacgccaucaccaccauccucaccgccgucaccuucugcuucgccuccggccagaacaucaccgaggaguucuaccaguccaccugcuccgccgucuccaagggcuaccucuccgcccuccgcaccggcugguacaccuccgucaucaccaucgagcucuccaacaucaaggagaacaagugcaacggcaccgacgccaaggucaagcucaucaagcaggagcucgacaaguacaagaacgccgucaccgagcuccagcuccucaugcaguccacccccgccaccggcuccggcuccgccaucgccuccggcgucgccgucugcaagguccuccaccucgagggcgaggucaacaagaucaaguccgcccuccucuccaccaacaaggccgucgucucccucuccggcugcggcgucuccguccucaccuucaagguccucgaccucaagaacuacaucgacaagcagcuccuccccauccucaacaagcaguccugcuccaucuccaacaucgagaccgucaucgaguuccagcagaagaacaaccgccuccucgagaucacccgcgaguucuccgucaacgccggcgucaccacccccgucuccaccuacaugcucaccaacuccgagcuccucucccucaucaacgacaugcccaucaccaacgaccagaagaagcucauguccaacaacguccagaucguccgccagcaguccuacuccaucaugugcaucaucaaggaggagguccucgccuacgucguccagcucccccucuacggcgucaucgacacccccugcuggaagcuccacaccuccccccucugcaccaccaacaccaaggagggcuccaacaucugccucacccgcaccgaccgcggcugguacugcgacaacgccggcuccgucuccuucuucccccaggccgagaccugcaagguccaguccaaccgcgucuucugcgacaccaugaacucccgcacccuccccuccgaggucaaccucugcaacgucgacaucuucaaccccaaguacgacugcaagaucaugaccuccaagaccgacgucuccuccuccgucaucaccucccucggcgccaucgucuccugcuacggcaagaccaagugcaccgccuccaacaagugccgcggcaucaucaagaccuucuccaacggcugcgacuacgucuccaacaagggcgucgacaccgucuccgucggcaacacccucuacuacgucaacaagcaggagggcaagucccucuacgucaagggcgagcccaucaucaacuucuacgacccccucgucuuccccuccgacgaguucgacgccuccaucucccaggucaacgagaagaucaaccagucccucgccuucauccgcaaguccgacgagcuccuccacaacgucaacgccggcaaguccaccaccaacaucaugaucaccaccaucaucaucgucaucaucgucauccuccucucccucaucgccgucggccuccuccucuacugcaaggcccgcugaggacuaguaauaaggaaacuguaugaaugucugugggcaggaagugaagagauccuucuguaaagguuuuuggaauuaugucugcugaauaauaaacuuuuuugaaauaauaaaucugguagaaaaaugagaucuaaaaaaaaaaaaaaaaaaaaaaaaaaaaaaaaaaaaaaaaaaaaaaaaaaaaaaaaaaaaaaaaugcaucccccccccccccccccccccccccccccccaaaggcucuuuucagagccaccagaauu

SEQ ID NO: 5987 - RNA, 1910 nt, Artificial Sequence
  mRNA product Design g-5 comprising derived and/or modified sequence from HRSV(A2)__F-del_DSCav1_mut5 (opt3)
gggagacccgugacccggaaguuguacggcuacgcgacuuucccucccacaaacccucgcgcccuuccuuuccuacuugggcccggcagaaagcuuaccauggagcugcucauccuuaaggccaacgcuauuaccacaauacugacugcagugacguucugcuuugccagcggccagaauaucaccgaagaguucuaccaauccacauguucugcggucucaaaaggguauuugagugcuuuaagaacuggaugguacaccagcguuauuacaaucgaacuguccaacauuaaggagaauaaaugcaacgguaccgacgccaaggugaaacuaaucaagcaggaacucgauaaguauaaaaaugcaguaacugagcugcagcuucugaugcagucuacacccgccaccggcucggggucagcuauagcaagcggaguggccgucuguaagguguugcaccucgagggcgaaguuaacaaaaucaagagugcucugcuguccacgaauaaagccguggucucucucagcgguugcgggguguccguauuaacuuuuaagguucuggaccuuaagaacuacauugauaaacaauugcugccuauccuaaauaagcagucauguaguauuagcaacaucgagaccgugauagaguuccagcagaaaaauaacaggcuccuggaaauuacacgggaguuuucugucaaugcgggagugacuaccccaguguccacauauaugcuuaccaacucagaacuguugagccucaucaaugacaugccgauuacgaacgaucaaaagaaacugaugaguaacaauguccagaucguucgccagcagucuuacuccaucaugugcauuauaaaggaggaaguguuagcauauguagugcaacugccccucuacggcgucaucgacacuccuuguuggaaacuucauacaagcccacugugcaccacuaacacaaaggagggcucgaauauuuguuugacccgaacggaucgugggugguacugcgacaacgccggaucuguguccuucuuuccccaggcugaaaccuguaagguucagucaaauagaguguucugcgauacaaugaacaguagaacucugccuagcgaggucaaucucugcaacguggacaucuuuaauccaaaauaugauuguaagauaaugaccuccaaaacagacguaucuagcucaguuauuaccagucugggugccaucguguccugcuacggcaagacuaaauguacagcaagcaacaagugcagggggaucauuaagaccuucucuaauggaugugauuaugucucaaacaaaggcguggacacugucaguguggguaauacgcuuuacuauguuaacaagcaagaggggaaaagccuguacgugaagggagaacccaucauuaauuuuuaugacccuuugguauucccauccgaugaguuugacgcuucuauaucgcaggucaacgagaaaaucaaccagagccucgccuucauucggaaguccgaugaacuguuacacaaugugaacgcgggcaagucaacaaccaauaucaugaucacuaccauuauaaucguuauuaucgugauucugcuaagucucaucgccgucggccugcuuuuguacugcaaagcacgcugaggacuaguaauaaggaaacuguaugaaugucugugggcaggaagugaagagauccuucuguaaagguuuuuggaauuaugucugcugaauaauaaacuuuuuugaaauaauaaaucugguagaaaaaugagaucuaaaaaaaaaaaaaaaaaaaaaaaaaaaaaaaaaaaaaaaaaaaaaaaaaaaaaaaaaaaaaaaaugcaucccccccccccccccccccccccccccccccaaaggcucuuuucagagccaccagaauu

SEQ ID NO: 5988 - RNA, 1910 nt, Artificial Sequence
  mRNA product Design g-5 comprising derived and/or modified sequence from HRSV(A2)__F-del_DSCav1_mut5 (opt4)
gggagacccgugacccggaaguuguacggcuacgcgacuuucccucccacaaacccucgcgcccuuccuuuccuacuugggcccggcagaaagcuuaccauggagcugcugauccugaaggccaacgccaucaccaccauccugaccgccgugaccuucugcuucgccagcggccagaacaucaccgaggaguucuaccagagcaccugcagcgccgugagcaagggcuaccugagcgcccugagaaccggcugguacaccagcgugaucaccaucgagcugagcaacaucaaggagaacaagugcaacggcaccgacgccaaggugaagcugaucaagcaggagcuggacaaguacaagaacgccgugaccgagcugcagcugcugaugcagagcacccccgccaccggcagcggcagcgccaucgccagcggcguggccgugugcaaggugcugcaccuggagggcgaggugaacaagaucaagagcgcccugcugagcaccaacaaggccguggugagccugagcggcugcggcgugagcgugcugaccuucaaggugcuggaccugaagaacuacaucgacaagcagcugcugcccauccugaacaagcagagcugcagcaucagcaacaucgagaccgugaucgaguuccagcagaagaacaacagacugcuggagaucaccagagaguucagcgugaacgccggcgugaccacccccgugagcaccuacaugcugaccaacagcgagcugcugagccugaucaacgacaugcccaucaccaacgaccagaagaagcugaugagcaacaacgugcagaucgugagacagcagagcuacagcaucaugugcaucaucaaggaggaggugcuggccuacguggugcagcugccccuguacggcgugaucgacacccccugcuggaagcugcacaccagcccccugugcaccaccaacaccaaggagggcagcaacaucugccugaccagaaccgacagaggcugguacugcgacaacgccggcagcgugagcuucuucccccaggccgagaccugcaaggugcagagcaacagaguguucugcgacaccaugaacagcagaacccugcccagcgaggugaaccugugcaacguggacaucuucaaccccaaguacgacugcaagaucaugaccagcaagaccgacgugagcagcagcgugaucaccagccugggcgccaucgugagcugcuacggcaagaccaagugcaccgccagcaacaagugcagaggcaucaucaagaccuucagcaacggcugcgacuacgugagcaacaagggcguggacaccgugagcgugggcaacacccuguacuacgugaacaagcaggagggcaagagccuguacgugaagggcgagcccaucaucaacuucuacgacccccugguguuccccagcgacgaguucgacgccagcaucagccaggugaacgagaagaucaaccagagccuggccuucaucagaaagagcgacgagcugcugcacaacgugaacgccggcaagagcaccaccaacaucaugaucaccaccaucaucaucgugaucaucgugauccugcugagccugaucgccgugggccugcugcuguacugcaaggccagaugaggacuaguaauaaggaaacuguaugaaugucugugggcaggaagugaagagauccuucuguaaagguuuuuggaauuaugucugcugaauaauaaacuuuuuugaaauaauaaaucugguagaaaaaugagaucuaaaaaaaaaaaaaaaaaaaaaaaaaaaaaaaaaaaaaaaaaaaaaaaaaaaaaaaaaaaaaaaaugcaucccccccccccccccccccccccccccccccaaaggcucuuuucagagccaccagaauu

SEQ ID NO: 5989 - RNA, 1910 nt, Artificial Sequence
  mRNA product Design g-5 comprising derived and/or modified sequence from HRSV(A2)__F-del_DSCav1_mut5 (opt5)
gggagacccgugacccggaaguuguacggcuacgcgacuuucccucccacaaacccucgcgcccuuccuuuccuacuugggcccggcagaaagcuuaccauggagcugcucauccugaaggccaacgcuauuaccacaauccuuacggccgugaccuucugcuuugcgagcggccagaauauuacagaagaguucuaccaauccaccuguucugcugucagcaaaggguaucuguccgcccucagaacaggaugguacaccucuguuaucacaauugaacugagcaacaucaaggagaauaaaugcaacggcaccgacgccaaggugaaacuuaucaagcaggaacuggauaaguauaaaaaugcugugacggagcuccagcugcugaugcaguccacccccgccacagggucuggaagcgcuauugccuccggcgucgcgguguguaagguucuccaccuggagggggaagugaacaaaaucaagagcgcccuucugucuaccaauaaagcugucgugucccucagcggaugcggcguuucugugcugacauuuaagguccuugaccugaagaacuacauugauaaacaacuccugccuauccugaauaagcaguccuguagcauuucuaacaucgagaccgugauugaguuccagcagaaaaauaaccggcuccuggaaaucacgcgcgaguuuuccgugaaugccggcgucacaaccccgguuagcacauauaugcuuaccaacuccgaacugcucucucugaucaaugacaugcccauuaccaacgaucaaaagaaacuuaugagcaacaaugugcagaucgugagacagcaguccuacagcauuaugugcaucauuaaggaggaaguccuggcuuaugugguucaacucccucuguacggggugaucgacacacccuguuggaaacugcauacgucuccucucugcaccacaaacaccaaggagggauccaauaucugucugacacggaccgaucgcggcugguacugcgacaacgccgggagcgucucuuucuuuccccaggcggaaacguguaaggugcagagcaauagaguuuucugcgauacaaugaacuccagaacccugccuucugaggugaaucucugcaacgucgacauuuuuaauccgaaauaugauuguaagaucaugaccagcaaaacagacguguccagcucugucauuaccucccugggagccaucgugagcugcuacggcaagacaaaauguacggcuucuaacaagugccgggggauuaucaagaccuucuccaauggaugugauuauguuagcaacaaaggcguggacacagucuccgugggcaauacccuuuacuauguuaacaagcaagaggggaaaucucuguacgugaagggagaacccaucauuaauuuuuaugacccucucgucuuccccagcgaugaguuugacgccuccaucucucaggugaacgagaaaauuaaccagagccuggcuuucauccgcaaguccgaugaacugcuccacaaugugaacgccggcaagagcacaaccaauauuaugaucacgaccauuaucaucguuauuaucgucauucugcuuucucugaucgccguggggcuccugcuguacugcaaagcuagaugaggacuaguaauaaggaaacuguaugaaugucugugggcaggaagugaagagauccuucuguaaagguuuuuggaauuaugucugcugaauaauaaacuuuuuugaaauaauaaaucugguagaaaaaugagaucuaaaaaaaaaaaaaaaaaaaaaaaaaaaaaaaaaaaaaaaaaaaaaaaaaaaaaaaaaaaaaaaaugcaucccccccccccccccccccccccccccccccaaaggcucuuuucagagccaccagaauu

SEQ ID NO: 5990 - RNA, 1910 nt, Artificial Sequence
  mRNA product Design g-5 comprising derived and/or modified sequence from HRSV(A2)__F-del_DSCav1_mut5 (opt6)
gggagacccgugacccggaaguuguacggcuacgcgacuuucccucccacaaacccucgcgcccuuccuuuccuacuugggcccggcagaaagcuuaccauggaacuuuuaauacugaaagcaaaugccaucacaaccauacuaacugccgucacauucugcuuugcaucaggacaaaacauaacagaagaauuuuaccaauccacaugcucagcaguaucaaaaggauaucuaucggcacuuagaacuggaugguacacaaguguuauaacuauagaacucucaaacauaaaagaaaacaaaugcaauggaacagacgcaaaaguaaaacuaauaaaacaagaacucgauaaauauaaaaaugcaguaaccgaacuacaacuauuaaugcaaagcacacccgcaacaggcagcggaucagcaauagcaagcggagucgcaguauguaaaguacuacaucuagaaggagaagucaacaaaaucaaaucugcacuucuauccacaaacaaagcuguaguaucccuauccggaugcggagucucaguauuaacuuuuaaaguacuagaccuuaaaaacuacauagauaaacaacuauuaccaauacuaaauaaacaaucaugcagcauauccaauauagagacaguaauugaauuucaacaaaaaaacaacagauuacuagaaauuacucgugaauuuuccguaaaugccggagucacaacaccaguaucaaccuauaugcuaacaaacagcgaacuacuuagcuuaauaaaugacaugccaauaacaaaugaccaaaaaaaacuuaugucaaauaacguacaaaucgucagacaacaauccuacucuauaauguguauaauuaaagaagaaguccuagcauacguaguucaauuaccacucuauggaguaauagauacaccaugcuggaaacuacacacgucaccacuauguacaacaaacacaaaagaaggauccaauauaugccuaacaagaaccgacagaggcugguauugugacaacgcaggauccguuucauucuucccacaagcagaaaccuguaaaguacaaucuaauagaguauuuugcgacacaaugaacaguagaacacuaccaagcgagguuaaucuauguaacguagacauauucaauccaaaauaugauugcaaaauaaugacaucaaaaacagauguaucgucgaguguaauaacaagucugggagcuauaguaagcugcuacggcaagacgaaauguaccgcuucaaauaaaugcagaggaaucauuaaaacauucucgaacggaugcgacuacguaaguaauaaaggugucgacaccguaucaguagggaauacauuauacuacgucaacaaacaagaaggaaaaucucuauauguaaaaggagaaccaauaauaaauuucuaugacccucuaguauucccaucagaugaauuugacgcuuccauaucacaaguaaacgaaaaaaucaaucaaucuuuagcauucauacgaaaaagugaugaacuccuacacaacgucaacgcaggaaaaagcacaacaaauauaaugaucacaacaaucaucauaguaauaauaguaauacuacuaucauuaauagcaguaggauuauugcuuuacugcaaagcacgauagggacuaguaauaaggaaacuguaugaaugucugugggcaggaagugaagagauccuucuguaaagguuuuuggaauuaugucugcugaauaauaaacuuuuuugaaauaauaaaucugguagaaaaaugagaucuaaaaaaaaaaaaaaaaaaaaaaaaaaaaaaaaaaaaaaaaaaaaaaaaaaaaaaaaaaaaaaaaugcaucccccccccccccccccccccccccccccccaaaggcucuuuucagagccaccagaauu

SEQ ID NO: 5991 - RNA, 1910 nt, Artificial Sequence
  mRNA product Design g-5 comprising derived and/or modified sequence from HRSV(A2)__F-del_DSCav1_mut5 (opt11)
gggagacccgugacccggaaguuguacggcuacgcgacuuucccucccacaaacccucgcgcccuuccuuuccuacuugggcccggcagaaagcuuaccauggaacuccucauccucaaagccaacgccauaaccacaauacucaccgccguaaccuucugcuuugcgucgggacaaaacaucaccgaagaguucuaccaauccacuugcuccgcaguaagcaaaggauaccucuccgcccugcgaaccgguugguacacaucagucaucacaaucgaacucucaaacauaaaagaaaacaaaugcaacggcaccgacgcaaaggucaaauuaaucaagcaagaacuagacaaauacaaaaacgccgucacagaacuccagcugcuaaugcagagcacacccgcaacuggcagcggauccgccaucgcaucaggagucgccgugugcaaaguccuacaccucgaaggagaagugaacaaaaucaaaucagcccuacucuccaccaacaaggccgucgucucccucuccggcugcggugucuccguccuaaccuucaaagugcuagaccucaagaacuacaucgacaaacaacuccuaccaauacucaacaagcaaucuugcuccaucuccaacaucgaaaccguaaucgaguuccaacagaagaacaaccgccuccucgaaaucacccgcgaguucucugucaacgcaggggucaccacucccgucuccacauacaugcucacaaacuccgaacuccucagccucaucaacgacaugcccauaaccaacgaccagaaaaagcuaaugagcaauaacguccaaaucguuagacaacaaaguuauuccaucaugugcaucaucaaagaagaaguccucgccuacgucguacaacucccccucuauggcgucaucgacacccccugcuggaaacugcacacaucaccccucugcaccacaaacaccaaagaaggcucaaacaucugccuaacucgcaccgaccgcggcugguacugcgacaacgccggcagcguaucauucuuuccccaagccgaaacaugcaaaguucaauccaaccgcgucuucugcgacacaaugaacuccagaacgcuccccagcgaagucaaccucuguaacguagacaucuucaacccuaaguacgacugcaaaaucaugaccuccaaaacugauguauccuccuccgucaucacaucccugggcgccaucgucagcugcuacggcaaaacaaaaugcacugccucaaacaaaugccgagguaucauaaagaccuucucaaacggaugcgauuacgucagcaacaaaggcgucgacaccgucagugucggcaacacccucuacuacgucaacaaacaagaaggaaaaucccucuacgucaaaggcgaacccaucaucaacuucuacgacccccucgucuuccccagcgacgaguucgacgccuccaucucacaagucaacgaaaagauaaaccaaucucuagccuucauccgcaaauccgaugaacuccugcauaacgucaacgccggcaaauccaccacaaacaucaugaucacuaccauaaucaucgucauaaucguaauccuccuaucucuuaucgcagucggccuacuacucuacugcaaagcccgcuaaggacuaguaauaaggaaacuguaugaaugucugugggcaggaagugaagagauccuucuguaaagguuuuuggaauuaugucugcugaauaauaaacuuuuuugaaauaauaaaucugguagaaaaaugagaucuaaaaaaaaaaaaaaaaaaaaaaaaaaaaaaaaaaaaaaaaaaaaaaaaaaaaaaaaaaaaaaaaugcaucccccccccccccccccccccccccccccccaaaggcucuuuucagagccaccagaauu

SEQ ID NO: 5992 - RNA, 1926 nt, Artificial Sequence
  mRNA product Design h-1 comprising derived and/or modified sequence from HRSV(A2)__F-del_DSCav1_mut5 (opt1)
gggagacccgugacccggaaguuguacggcuacgcgacuuucccucccacaaacccucgcgcccuuccuuuccuacuugggcccggcagaaagcuuaccauggagcugcucauccugaaggccaacgccaucaccaccauccugacggcggugaccuucugcuucgccagcggccagaacaucaccgaggaguucuaccaguccacgugcagcgccgucuccaagggguaccucagcgcccugcggaccggcugguacaccuccgugaucaccaucgagcugagcaacaucaaggagaacaagugcaacgggaccgacgccaaggugaagcucaucaagcaggagcuggacaaguacaagaacgcggucacggagcugcagcuccugaugcaguccaccccggcaaccggcuccggcuccgccaucgcgagcggcgucgccgugugcaaggugcugcaccucgagggggaggucaacaagaucaagagcgcccugcuguccaccaacaaggccguggugagccucuccggcugcggcgucagcgugcugaccuucaaggugcuggaccucaagaacuacaucgacaagcagcugcugcccauccugaacaagcagagcugcuccaucagcaacaucgagacggugaucgaguuccagcagaagaacaaccggcuccuggagaucacccgcgaguucagcgugaacgccggggucaccacccccguguccacguacaugcugaccaacagcgagcuccugucccugaucaacgacaugccgaucaccaacgaccagaagaagcucaugagcaacaacgugcagaucguccggcagcaguccuacagcaucaugugcaucaucaaggaggaggugcuggcguacgugguccagcugccccucuacggcgugaucgacacccccugcuggaagcugcacacgagcccccugugcaccaccaacaccaaggagggguccaacaucugccucacgcgcaccgaccggggcugguacugcgacaacgccggcagcgucuccuucuucccgcaggccgagaccugcaaggugcagagcaaccgcguguucugcgacaccaugaacucccggacgcugcccagcgagguaaaccucugcaacgucgacaucuucaaccccaaguacgacugcaagaucaugaccuccaagaccgacgugagcuccagcgugaucaccucccugggggccaucgucagcugcuacggcaagacgaagugcaccgccagcaacaagugccgggggaucaucaagaccuucuccaacggcugcgacuacgugagcaacaagggcguggacaccguguccgucgggaacacccuguacuacgugaacaagcaggagggcaagagccucuacgugaagggggagcccaucaucaacuucuacgacccgcuggucuuccccuccgacgaguucgacgcgagcaucucccaggugaacgagaagaucaaccagagccuggccuucauccgcaaguccgacgagcugcuccacaacgugaacgccggcaagagcacgaccaacaucaugaucaccaccaucaucaucgucaucaucgugauccugcugucccucaucgccguggggcugcugcucuacugcaaggcccggugaggacuaguacuggcugcaucucccuuuccucuguccuccauccuucucccaggauggugaagggggaccugguacccagugauccccaccccaggauccuaaaucaugacuuaccugcuaauaaaaacucauuggaaaagugagaagaucuaaaaaaaaaaaaaaaaaaaaaaaaaaaaaaaaaaaaaaaaaaaaaaaaaaaaaaaaaaaaaaaaugcaucccccccccccccccccccccccccccccccaaaggcucuuuucagagccaccagaauu

SEQ ID NO: 5993 - RNA, 1926 nt, Artificial Sequence
  mRNA product Design h-1 comprising derived and/or modified sequence from HRSV(A2)__F-del_DSCav1_mut5 (opt1)
gggagacccgugacccggaaguuguacggcuacgcgacuuucccucccacaaacccucgcgcccuuccuuuccuacuugggcccggcagaaagcuuaccauggagcugcucauccugaaggccaacgccaucaccaccauccugacggcggugaccuucugcuucgccagcggccagaacaucaccgaggaguucuaccaguccacgugcagcgccgucuccaagggguaccucagcgcccugcgcaccggcugguacaccuccgugaucaccaucgagcugagcaacaucaaggagaacaagugcaacgggaccgacgccaaggugaagcucaucaagcaggagcuggacaaguacaagaacgcggucacggagcugcagcuccugaugcaguccacccccgccaccggcagcggguccgccaucgccagcggcguggcggugugcaagguccugcaccucgagggcgaggugaacaagaucaaguccgcccugcugagcaccaacaaggccguggucucccucagcgggugcggcguguccgugcugacguucaagguccuggaccucaagaacuacaucgacaagcagcugcugccgauccucaacaagcagagcugcuccaucagcaacaucgagaccgugaucgaguuccagcagaagaacaaccggcugcuggagaucacccgcgaguucuccgugaacgccggggucaccacgcccgugagcaccuacaugcucaccaacagcgagcugcugucccucaucaacgacaugcccaucaccaacgaccagaagaagcugaugagcaacaacgugcagaucguccggcagcaguccuacagcaucaugugcaucaucaaggaggaggugcuggccuacgugguccagcucccccuguacggcgugaucgacacgccgugcuggaagcugcacaccagcccccucugcaccaccaacacgaaggagggguccaacaucugccugacccgcaccgaccggggcugguacugcgacaacgcgggcuccgugagcuucuucccccaggccgagaccugcaagguccaguccaaccgcguguucugcgacacgaugaacagccggacccuccccuccgaggucaaccugugcaacguggacaucuucaacccgaaguacgacugcaagaucaugaccagcaagaccgacguguccagcuccgucaucacgagccugggggccaucguguccugcuacggcaagaccaagugcaccgccagcaacaagugccgggggaucaucaagaccuucuccaacggcugcgacuacgugagcaacaagggcgucgacacggugagcguggggaacacccucuacuacgucaacaagcaggagggcaagucccuguacgugaagggggagcccaucaucaacuucuacgacccccugguguuccccagcgacgaguucgacgccuccaucagccaggucaacgagaagaucaaccagucccucgcguucauccgcaagagcgacgagcugcugcacaacgugaacgccggcaaguccaccaccaacaucaugaucaccacgaucaucaucgugaucaucgucauccuccugagccugaucgccguggggcuccugcuguacugcaaggcccggugaggacuaguacuggcugcaucucccuuuccucuguccuccauccuucucccaggauggugaagggggaccugguacccagugauccccaccccaggauccuaaaucaugacuuaccugcuaauaaaaacucauuggaaaagugagaagaucuaaaaaaaaaaaaaaaaaaaaaaaaaaaaaaaaaaaaaaaaaaaaaaaaaaaaaaaaaaaaaaaaugcaucccccccccccccccccccccccccccccccaaaggcucuuuucagagccaccagaauu

SEQ ID NO: 5994 - RNA, 1926 nt, Artificial Sequence
  mRNA product Design h-1 comprising derived and/or modified sequence from HRSV(A2)__F-del_DSCav1_mut5 (opt2)
gggagacccgugacccggaaguuguacggcuacgcgacuuucccucccacaaacccucgcgcccuuccuuuccuacuugggcccggcagaaagcuuaccauggagcuccucauccucaaggccaacgccaucaccaccauccucaccgccgucaccuucugcuucgccuccggccagaacaucaccgaggaguucuaccaguccaccugcuccgccgucuccaagggcuaccucuccgcccuccgcaccggcugguacaccuccgucaucaccaucgagcucuccaacaucaaggagaacaagugcaacggcaccgacgccaaggucaagcucaucaagcaggagcucgacaaguacaagaacgccgucaccgagcuccagcuccucaugcaguccacccccgccaccggcuccggcuccgccaucgccuccggcgucgccgucugcaagguccuccaccucgagggcgaggucaacaagaucaaguccgcccuccucuccaccaacaaggccgucgucucccucuccggcugcggcgucuccguccucaccuucaagguccucgaccucaagaacuacaucgacaagcagcuccuccccauccucaacaagcaguccugcuccaucuccaacaucgagaccgucaucgaguuccagcagaagaacaaccgccuccucgagaucacccgcgaguucuccgucaacgccggcgucaccacccccgucuccaccuacaugcucaccaacuccgagcuccucucccucaucaacgacaugcccaucaccaacgaccagaagaagcucauguccaacaacguccagaucguccgccagcaguccuacuccaucaugugcaucaucaaggaggagguccucgccuacgucguccagcucccccucuacggcgucaucgacacccccugcuggaagcuccacaccuccccccucugcaccaccaacaccaaggagggcuccaacaucugccucacccgcaccgaccgcggcugguacugcgacaacgccggcuccgucuccuucuucccccaggccgagaccugcaagguccaguccaaccgcgucuucugcgacaccaugaacucccgcacccuccccuccgaggucaaccucugcaacgucgacaucuucaaccccaaguacgacugcaagaucaugaccuccaagaccgacgucuccuccuccgucaucaccucccucggcgccaucgucuccugcuacggcaagaccaagugcaccgccuccaacaagugccgcggcaucaucaagaccuucuccaacggcugcgacuacgucuccaacaagggcgucgacaccgucuccgucggcaacacccucuacuacgucaacaagcaggagggcaagucccucuacgucaagggcgagcccaucaucaacuucuacgacccccucgucuuccccuccgacgaguucgacgccuccaucucccaggucaacgagaagaucaaccagucccucgccuucauccgcaaguccgacgagcuccuccacaacgucaacgccggcaaguccaccaccaacaucaugaucaccaccaucaucaucgucaucaucgucauccuccucucccucaucgccgucggccuccuccucuacugcaaggcccgcugaggacuaguacuggcugcaucucccuuuccucuguccuccauccuucucccaggauggugaagggggaccugguacccagugauccccaccccaggauccuaaaucaugacuuaccugcuaauaaaaacucauuggaaaagugagaagaucuaaaaaaaaaaaaaaaaaaaaaaaaaaaaaaaaaaaaaaaaaaaaaaaaaaaaaaaaaaaaaaaaugcaucccccccccccccccccccccccccccccccaaaggcucuuuucagagccaccagaauu

SEQ ID NO: 5995 - RNA, 1926 nt, Artificial Sequence
  mRNA product Design h-1 comprising derived and/or modified sequence from HRSV(A2)__F-del_DSCav1_mut5 (opt3)
gggagacccgugacccggaaguuguacggcuacgcgacuuucccucccacaaacccucgcgcccuuccuuuccuacuugggcccggcagaaagcuuaccauggagcugcucauccuuaaggccaacgcuauuaccacaauacugacugcagugacguucugcuuugccagcggccagaauaucaccgaagaguucuaccaauccacauguucugcggucucaaaaggguauuugagugcuuuaagaacuggaugguacaccagcguuauuacaaucgaacuguccaacauuaaggagaauaaaugcaacgguaccgacgccaaggugaaacuaaucaagcaggaacucgauaaguauaaaaaugcaguaacugagcugcagcuucugaugcagucuacacccgccaccggcucggggucagcuauagcaagcggaguggccgucuguaagguguugcaccucgagggcgaaguuaacaaaaucaagagugcucugcuguccacgaauaaagccguggucucucucagcgguugcgggguguccguauuaacuuuuaagguucuggaccuuaagaacuacauugauaaacaauugcugccuauccuaaauaagcagucauguaguauuagcaacaucgagaccgugauagaguuccagcagaaaaauaacaggcuccuggaaauuacacgggaguuuucugucaaugcgggagugacuaccccaguguccacauauaugcuuaccaacucagaacuguugagccucaucaaugacaugccgauuacgaacgaucaaaagaaacugaugaguaacaauguccagaucguucgccagcagucuuacuccaucaugugcauuauaaaggaggaaguguuagcauauguagugcaacugccccucuacggcgucaucgacacuccuuguuggaaacuucauacaagcccacugugcaccacuaacacaaaggagggcucgaauauuuguuugacccgaacggaucgugggugguacugcgacaacgccggaucuguguccuucuuuccccaggcugaaaccuguaagguucagucaaauagaguguucugcgauacaaugaacaguagaacucugccuagcgaggucaaucucugcaacguggacaucuuuaauccaaaauaugauuguaagauaaugaccuccaaaacagacguaucuagcucaguuauuaccagucugggugccaucguguccugcuacggcaagacuaaauguacagcaagcaacaagugcagggggaucauuaagaccuucucuaauggaugugauuaugucucaaacaaaggcguggacacugucaguguggguaauacgcuuuacuauguuaacaagcaagaggggaaaagccuguacgugaagggagaacccaucauuaauuuuuaugacccuuugguauucccauccgaugaguuugacgcuucuauaucgcaggucaacgagaaaaucaaccagagccucgccuucauucggaaguccgaugaacuguuacacaaugugaacgcgggcaagucaacaaccaauaucaugaucacuaccauuauaaucguuauuaucgugauucugcuaagucucaucgccgucggccugcuuuuguacugcaaagcacgcugaggacuaguacuggcugcaucucccuuuccucuguccuccauccuucucccaggauggugaagggggaccugguacccagugauccccaccccaggauccuaaaucaugacuuaccugcuaauaaaaacucauuggaaaagugagaagaucuaaaaaaaaaaaaaaaaaaaaaaaaaaaaaaaaaaaaaaaaaaaaaaaaaaaaaaaaaaaaaaaaugcaucccccccccccccccccccccccccccccccaaaggcucuuuucagagccaccagaauu

SEQ ID NO: 5996 - RNA, 1926 nt, Artificial Sequence
  mRNA product Design h-1 comprising derived and/or modified sequence from HRSV(A2)__F-del_DSCav1_mut5 (opt4)
gggagacccgugacccggaaguuguacggcuacgcgacuuucccucccacaaacccucgcgcccuuccuuuccuacuugggcccggcagaaagcuuaccauggagcugcugauccugaaggccaacgccaucaccaccauccugaccgccgugaccuucugcuucgccagcggccagaacaucaccgaggaguucuaccagagcaccugcagcgccgugagcaagggcuaccugagcgcccugagaaccggcugguacaccagcgugaucaccaucgagcugagcaacaucaaggagaacaagugcaacggcaccgacgccaaggugaagcugaucaagcaggagcuggacaaguacaagaacgccgugaccgagcugcagcugcugaugcagagcacccccgccaccggcagcggcagcgccaucgccagcggcguggccgugugcaaggugcugcaccuggagggcgaggugaacaagaucaagagcgcccugcugagcaccaacaaggccguggugagccugagcggcugcggcgugagcgugcugaccuucaaggugcuggaccugaagaacuacaucgacaagcagcugcugcccauccugaacaagcagagcugcagcaucagcaacaucgagaccgugaucgaguuccagcagaagaacaacagacugcuggagaucaccagagaguucagcgugaacgccggcgugaccacccccgugagcaccuacaugcugaccaacagcgagcugcugagccugaucaacgacaugcccaucaccaacgaccagaagaagcugaugagcaacaacgugcagaucgugagacagcagagcuacagcaucaugugcaucaucaaggaggaggugcuggccuacguggugcagcugccccuguacggcgugaucgacacccccugcuggaagcugcacaccagcccccugugcaccaccaacaccaaggagggcagcaacaucugccugaccagaaccgacagaggcugguacugcgacaacgccggcagcgugagcuucuucccccaggccgagaccugcaaggugcagagcaacagaguguucugcgacaccaugaacagcagaacccugcccagcgaggugaaccugugcaacguggacaucuucaaccccaaguacgacugcaagaucaugaccagcaagaccgacgugagcagcagcgugaucaccagccugggcgccaucgugagcugcuacggcaagaccaagugcaccgccagcaacaagugcagaggcaucaucaagaccuucagcaacggcugcgacuacgugagcaacaagggcguggacaccgugagcgugggcaacacccuguacuacgugaacaagcaggagggcaagagccuguacgugaagggcgagcccaucaucaacuucuacgacccccugguguuccccagcgacgaguucgacgccagcaucagccaggugaacgagaagaucaaccagagccuggccuucaucagaaagagcgacgagcugcugcacaacgugaacgccggcaagagcaccaccaacaucaugaucaccaccaucaucaucgugaucaucgugauccugcugagccugaucgccgugggccugcugcuguacugcaaggccagaugaggacuaguacuggcugcaucucccuuuccucuguccuccauccuucucccaggauggugaagggggaccugguacccagugauccccaccccaggauccuaaaucaugacuuaccugcuaauaaaaacucauuggaaaagugagaagaucuaaaaaaaaaaaaaaaaaaaaaaaaaaaaaaaaaaaaaaaaaaaaaaaaaaaaaaaaaaaaaaaaugcaucccccccccccccccccccccccccccccccaaaggcucuuuucagagccaccagaauu

SEQ ID NO: 5997 - RNA, 1926 nt, Artificial Sequence
  mRNA product Design h-1 comprising derived and/or modified sequence from HRSV(A2)__F-del_DSCav1_mut5 (opt5)
gggagacccgugacccggaaguuguacggcuacgcgacuuucccucccacaaacccucgcgcccuuccuuuccuacuugggcccggcagaaagcuuaccauggagcugcucauccugaaggccaacgcuauuaccacaauccuuacggccgugaccuucugcuuugcgagcggccagaauauuacagaagaguucuaccaauccaccuguucugcugucagcaaaggguaucuguccgcccucagaacaggaugguacaccucuguuaucacaauugaacugagcaacaucaaggagaauaaaugcaacggcaccgacgccaaggugaaacuuaucaagcaggaacuggauaaguauaaaaaugcugugacggagcuccagcugcugaugcaguccacccccgccacagggucuggaagcgcuauugccuccggcgucgcgguguguaagguucuccaccuggagggggaagugaacaaaaucaagagcgcccuucugucuaccaauaaagcugucgugucccucagcggaugcggcguuucugugcugacauuuaagguccuugaccugaagaacuacauugauaaacaacuccugccuauccugaauaagcaguccuguagcauuucuaacaucgagaccgugauugaguuccagcagaaaaauaaccggcuccuggaaaucacgcgcgaguuuuccgugaaugccggcgucacaaccccgguuagcacauauaugcuuaccaacuccgaacugcucucucugaucaaugacaugcccauuaccaacgaucaaaagaaacuuaugagcaacaaugugcagaucgugagacagcaguccuacagcauuaugugcaucauuaaggaggaaguccuggcuuaugugguucaacucccucuguacggggugaucgacacacccuguuggaaacugcauacgucuccucucugcaccacaaacaccaaggagggauccaauaucugucugacacggaccgaucgcggcugguacugcgacaacgccgggagcgucucuuucuuuccccaggcggaaacguguaaggugcagagcaauagaguuuucugcgauacaaugaacuccagaacccugccuucugaggugaaucucugcaacgucgacauuuuuaauccgaaauaugauuguaagaucaugaccagcaaaacagacguguccagcucugucauuaccucccugggagccaucgugagcugcuacggcaagacaaaauguacggcuucuaacaagugccgggggauuaucaagaccuucuccaauggaugugauuauguuagcaacaaaggcguggacacagucuccgugggcaauacccuuuacuauguuaacaagcaagaggggaaaucucuguacgugaagggagaacccaucauuaauuuuuaugacccucucgucuuccccagcgaugaguuugacgccuccaucucucaggugaacgagaaaauuaaccagagccuggcuuucauccgcaaguccgaugaacugcuccacaaugugaacgccggcaagagcacaaccaauauuaugaucacgaccauuaucaucguuauuaucgucauucugcuuucucugaucgccguggggcuccugcuguacugcaaagcuagaugaggacuaguacuggcugcaucucccuuuccucuguccuccauccuucucccaggauggugaagggggaccugguacccagugauccccaccccaggauccuaaaucaugacuuaccugcuaauaaaaacucauuggaaaagugagaagaucuaaaaaaaaaaaaaaaaaaaaaaaaaaaaaaaaaaaaaaaaaaaaaaaaaaaaaaaaaaaaaaaaugcaucccccccccccccccccccccccccccccccaaaggcucuuuucagagccaccagaauu

SEQ ID NO: 5998 - RNA, 1926 nt, Artificial Sequence
  mRNA product Design h-1 comprising derived and/or modified sequence from HRSV(A2)__F-del_DSCav1_mut5 (opt6)
gggagacccgugacccggaaguuguacggcuacgcgacuuucccucccacaaacccucgcgcccuuccuuuccuacuugggcccggcagaaagcuuaccauggaacuuuuaauacugaaagcaaaugccaucacaaccauacuaacugccgucacauucugcuuugcaucaggacaaaacauaacagaagaauuuuaccaauccacaugcucagcaguaucaaaaggauaucuaucggcacuuagaacuggaugguacacaaguguuauaacuauagaacucucaaacauaaaagaaaacaaaugcaauggaacagacgcaaaaguaaaacuaauaaaacaagaacucgauaaauauaaaaaugcaguaaccgaacuacaacuauuaaugcaaagcacacccgcaacaggcagcggaucagcaauagcaagcggagucgcaguauguaaaguacuacaucuagaaggagaagucaacaaaaucaaaucugcacuucuauccacaaacaaagcuguaguaucccuauccggaugcggagucucaguauuaacuuuuaaaguacuagaccuuaaaaacuacauagauaaacaacuauuaccaauacuaaauaaacaaucaugcagcauauccaauauagagacaguaauugaauuucaacaaaaaaacaacagauuacuagaaauuacucgugaauuuuccguaaaugccggagucacaacaccaguaucaaccuauaugcuaacaaacagcgaacuacuuagcuuaauaaaugacaugccaauaacaaaugaccaaaaaaaacuuaugucaaauaacguacaaaucgucagacaacaauccuacucuauaauguguauaauuaaagaagaaguccuagcauacguaguucaauuaccacucuauggaguaauagauacaccaugcuggaaacuacacacgucaccacuauguacaacaaacacaaaagaaggauccaauauaugccuaacaagaaccgacagaggcugguauugugacaacgcaggauccguuucauucuucccacaagcagaaaccuguaaaguacaaucuaauagaguauuuugcgacacaaugaacaguagaacacuaccaagcgagguuaaucuauguaacguagacauauucaauccaaaauaugauugcaaaauaaugacaucaaaaacagauguaucgucgaguguaauaacaagucugggagcuauaguaagcugcuacggcaagacgaaauguaccgcuucaaauaaaugcagaggaaucauuaaaacauucucgaacggaugcgacuacguaaguaauaaaggugucgacaccguaucaguagggaauacauuauacuacgucaacaaacaagaaggaaaaucucuauauguaaaaggagaaccaauaauaaauuucuaugacccucuaguauucccaucagaugaauuugacgcuuccauaucacaaguaaacgaaaaaaucaaucaaucuuuagcauucauacgaaaaagugaugaacuccuacacaacgucaacgcaggaaaaagcacaacaaauauaaugaucacaacaaucaucauaguaauaauaguaauacuacuaucauuaauagcaguaggauuauugcuuuacugcaaagcacgauagggacuaguacuggcugcaucucccuuuccucuguccuccauccuucucccaggauggugaagggggaccugguacccagugauccccaccccaggauccuaaaucaugacuuaccugcuaauaaaaacucauuggaaaagugagaagaucuaaaaaaaaaaaaaaaaaaaaaaaaaaaaaaaaaaaaaaaaaaaaaaaaaaaaaaaaaaaaaaaaugcaucccccccccccccccccccccccccccccccaaaggcucuuuucagagccaccagaauu

SEQ ID NO: 5999 - RNA, 1926 nt, Artificial Sequence
  mRNA product Design h-1 comprising derived and/or modified sequence from HRSV(A2)__F-del_DSCav1_mut5 (opt11)
gggagacccgugacccggaaguuguacggcuacgcgacuuucccucccacaaacccucgcgcccuuccuuuccuacuugggcccggcagaaagcuuaccauggaacuccucauccucaaagccaacgccauaaccacaauacucaccgccguaaccuucugcuuugcgucgggacaaaacaucaccgaagaguucuaccaauccacuugcuccgcaguaagcaaaggauaccucuccgcccugcgaaccgguugguacacaucagucaucacaaucgaacucucaaacauaaaagaaaacaaaugcaacggcaccgacgcaaaggucaaauuaaucaagcaagaacuagacaaauacaaaaacgccgucacagaacuccagcugcuaaugcagagcacacccgcaacuggcagcggauccgccaucgcaucaggagucgccgugugcaaaguccuacaccucgaaggagaagugaacaaaaucaaaucagcccuacucuccaccaacaaggccgucgucucccucuccggcugcggugucuccguccuaaccuucaaagugcuagaccucaagaacuacaucgacaaacaacuccuaccaauacucaacaagcaaucuugcuccaucuccaacaucgaaaccguaaucgaguuccaacagaagaacaaccgccuccucgaaaucacccgcgaguucucugucaacgcaggggucaccacucccgucuccacauacaugcucacaaacuccgaacuccucagccucaucaacgacaugcccauaaccaacgaccagaaaaagcuaaugagcaauaacguccaaaucguuagacaacaaaguuauuccaucaugugcaucaucaaagaagaaguccucgccuacgucguacaacucccccucuauggcgucaucgacacccccugcuggaaacugcacacaucaccccucugcaccacaaacaccaaagaaggcucaaacaucugccuaacucgcaccgaccgcggcugguacugcgacaacgccggcagcguaucauucuuuccccaagccgaaacaugcaaaguucaauccaaccgcgucuucugcgacacaaugaacuccagaacgcuccccagcgaagucaaccucuguaacguagacaucuucaacccuaaguacgacugcaaaaucaugaccuccaaaacugauguauccuccuccgucaucacaucccugggcgccaucgucagcugcuacggcaaaacaaaaugcacugccucaaacaaaugccgagguaucauaaagaccuucucaaacggaugcgauuacgucagcaacaaaggcgucgacaccgucagugucggcaacacccucuacuacgucaacaaacaagaaggaaaaucccucuacgucaaaggcgaacccaucaucaacuucuacgacccccucgucuuccccagcgacgaguucgacgccuccaucucacaagucaacgaaaagauaaaccaaucucuagccuucauccgcaaauccgaugaacuccugcauaacgucaacgccggcaaauccaccacaaacaucaugaucacuaccauaaucaucgucauaaucguaauccuccuaucucuuaucgcagucggccuacuacucuacugcaaagcccgcuaaggacuaguacuggcugcaucucccuuuccucuguccuccauccuucucccaggauggugaagggggaccugguacccagugauccccaccccaggauccuaaaucaugacuuaccugcuaauaaaaacucauuggaaaagugagaagaucuaaaaaaaaaaaaaaaaaaaaaaaaaaaaaaaaaaaaaaaaaaaaaaaaaaaaaaaaaaaaaaaaugcaucccccccccccccccccccccccccccccccaaaggcucuuuucagagccaccagaauu

SEQ ID NO: 6000 - RNA, 2142 nt, Artificial Sequence
  mRNA product Design h-2 comprising derived and/or modified sequence from HRSV(A2)__F-del_DSCav1_mut5 (opt1)
gggagacccgugacccggaaguuguacggcuacgcgacuuucccucccacaaacccucgcgcccuuccuuuccuacuugggcccggcagaaagcuuaccauggagcugcucauccugaaggccaacgccaucaccaccauccugacggcggugaccuucugcuucgccagcggccagaacaucaccgaggaguucuaccaguccacgugcagcgccgucuccaagggguaccucagcgcccugcggaccggcugguacaccuccgugaucaccaucgagcugagcaacaucaaggagaacaagugcaacgggaccgacgccaaggugaagcucaucaagcaggagcuggacaaguacaagaacgcggucacggagcugcagcuccugaugcaguccaccccggcaaccggcuccggcuccgccaucgcgagcggcgucgccgugugcaaggugcugcaccucgagggggaggucaacaagaucaagagcgcccugcuguccaccaacaaggccguggugagccucuccggcugcggcgucagcgugcugaccuucaaggugcuggaccucaagaacuacaucgacaagcagcugcugcccauccugaacaagcagagcugcuccaucagcaacaucgagacggugaucgaguuccagcagaagaacaaccggcuccuggagaucacccgcgaguucagcgugaacgccggggucaccacccccguguccacguacaugcugaccaacagcgagcuccugucccugaucaacgacaugccgaucaccaacgaccagaagaagcucaugagcaacaacgugcagaucguccggcagcaguccuacagcaucaugugcaucaucaaggaggaggugcuggcguacgugguccagcugccccucuacggcgugaucgacacccccugcuggaagcugcacacgagcccccugugcaccaccaacaccaaggagggguccaacaucugccucacgcgcaccgaccggggcugguacugcgacaacgccggcagcgucuccuucuucccgcaggccgagaccugcaaggugcagagcaaccgcguguucugcgacaccaugaacucccggacgcugcccagcgagguaaaccucugcaacgucgacaucuucaaccccaaguacgacugcaagaucaugaccuccaagaccgacgugagcuccagcgugaucaccucccugggggccaucgucagcugcuacggcaagacgaagugcaccgccagcaacaagugccgggggaucaucaagaccuucuccaacggcugcgacuacgugagcaacaagggcguggacaccguguccgucgggaacacccuguacuacgugaacaagcaggagggcaagagccucuacgugaagggggagcccaucaucaacuucuacgacccgcuggucuuccccuccgacgaguucgacgcgagcaucucccaggugaacgagaagaucaaccagagccuggccuucauccgcaaguccgacgagcugcuccacaacgugaacgccggcaagagcacgaccaacaucaugaucaccaccaucaucaucgucaucaucgugauccugcugucccucaucgccguggggcugcugcucuacugcaaggcccggugaggacuagugaagggaacacccaaauuuaauucagccuuaagcacaauuaauuaagagugaaacguaauuguacaagcaguuggucacccaccauagggcaugaucaacaccgcaaccuuuccuuuuucccccagugauucugaaaaaccccucuucccuucagcuugcuuagauguuccaaauuuaguaagcuuaaggcggccuacagaagaaaaagaaaaaaaaggccacaaaaguucccucucacuuucaguaaauaaaauaaaagcagcaacagaaauaaagaaauaaaugaaauucaaaaugaaauaaauauuguguugugcagcauuaaaaaaucaauaaaaauuaaaaaugagcaagaucuaaaaaaaaaaaaaaaaaaaaaaaaaaaaaaaaaaaaaaaaaaaaaaaaaaaaaaaaaaaaaaaaugcaucccccccccccccccccccccccccccccccaaaggcucuuuucagagccaccagaauu

SEQ ID NO: 6001 - RNA, 2142 nt, Artificial Sequence
  mRNA product Design h-2 comprising derived and/or modified sequence from HRSV(A2)__F-del_DSCav1_mut5 (opt1)
gggagacccgugacccggaaguuguacggcuacgcgacuuucccucccacaaacccucgcgcccuuccuuuccuacuugggcccggcagaaagcuuaccauggagcugcucauccugaaggccaacgccaucaccaccauccugacggcggugaccuucugcuucgccagcggccagaacaucaccgaggaguucuaccaguccacgugcagcgccgucuccaagggguaccucagcgcccugcgcaccggcugguacaccuccgugaucaccaucgagcugagcaacaucaaggagaacaagugcaacgggaccgacgccaaggugaagcucaucaagcaggagcuggacaaguacaagaacgcggucacggagcugcagcuccugaugcaguccacccccgccaccggcagcggguccgccaucgccagcggcguggcggugugcaagguccugcaccucgagggcgaggugaacaagaucaaguccgcccugcugagcaccaacaaggccguggucucccucagcgggugcggcguguccgugcugacguucaagguccuggaccucaagaacuacaucgacaagcagcugcugccgauccucaacaagcagagcugcuccaucagcaacaucgagaccgugaucgaguuccagcagaagaacaaccggcugcuggagaucacccgcgaguucuccgugaacgccggggucaccacgcccgugagcaccuacaugcucaccaacagcgagcugcugucccucaucaacgacaugcccaucaccaacgaccagaagaagcugaugagcaacaacgugcagaucguccggcagcaguccuacagcaucaugugcaucaucaaggaggaggugcuggccuacgugguccagcucccccuguacggcgugaucgacacgccgugcuggaagcugcacaccagcccccucugcaccaccaacacgaaggagggguccaacaucugccugacccgcaccgaccggggcugguacugcgacaacgcgggcuccgugagcuucuucccccaggccgagaccugcaagguccaguccaaccgcguguucugcgacacgaugaacagccggacccuccccuccgaggucaaccugugcaacguggacaucuucaacccgaaguacgacugcaagaucaugaccagcaagaccgacguguccagcuccgucaucacgagccugggggccaucguguccugcuacggcaagaccaagugcaccgccagcaacaagugccgggggaucaucaagaccuucuccaacggcugcgacuacgugagcaacaagggcgucgacacggugagcguggggaacacccucuacuacgucaacaagcaggagggcaagucccuguacgugaagggggagcccaucaucaacuucuacgacccccugguguuccccagcgacgaguucgacgccuccaucagccaggucaacgagaagaucaaccagucccucgcguucauccgcaagagcgacgagcugcugcacaacgugaacgccggcaaguccaccaccaacaucaugaucaccacgaucaucaucgugaucaucgucauccuccugagccugaucgccguggggcuccugcuguacugcaaggcccggugaggacuagugaagggaacacccaaauuuaauucagccuuaagcacaauuaauuaagagugaaacguaauuguacaagcaguuggucacccaccauagggcaugaucaacaccgcaaccuuuccuuuuucccccagugauucugaaaaaccccucuucccuucagcuugcuuagauguuccaaauuuaguaagcuuaaggcggccuacagaagaaaaagaaaaaaaaggccacaaaaguucccucucacuuucaguaaauaaaauaaaagcagcaacagaaauaaagaaauaaaugaaauucaaaaugaaauaaauauuguguugugcagcauuaaaaaaucaauaaaaauuaaaaaugagcaagaucuaaaaaaaaaaaaaaaaaaaaaaaaaaaaaaaaaaaaaaaaaaaaaaaaaaaaaaaaaaaaaaaaugcaucccccccccccccccccccccccccccccccaaaggcucuuuucagagccaccagaauu

SEQ ID NO: 6002 - RNA, 2142 nt, Artificial Sequence
  mRNA product Design h-2 comprising derived and/or modified sequence from HRSV(A2)__F-del_DSCav1_mut5 (opt2)
gggagacccgugacccggaaguuguacggcuacgcgacuuucccucccacaaacccucgcgcccuuccuuuccuacuugggcccggcagaaagcuuaccauggagcuccucauccucaaggccaacgccaucaccaccauccucaccgccgucaccuucugcuucgccuccggccagaacaucaccgaggaguucuaccaguccaccugcuccgccgucuccaagggcuaccucuccgcccuccgcaccggcugguacaccuccgucaucaccaucgagcucuccaacaucaaggagaacaagugcaacggcaccgacgccaaggucaagcucaucaagcaggagcucgacaaguacaagaacgccgucaccgagcuccagcuccucaugcaguccacccccgccaccggcuccggcuccgccaucgccuccggcgucgccgucugcaagguccuccaccucgagggcgaggucaacaagaucaaguccgcccuccucuccaccaacaaggccgucgucucccucuccggcugcggcgucuccguccucaccuucaagguccucgaccucaagaacuacaucgacaagcagcuccuccccauccucaacaagcaguccugcuccaucuccaacaucgagaccgucaucgaguuccagcagaagaacaaccgccuccucgagaucacccgcgaguucuccgucaacgccggcgucaccacccccgucuccaccuacaugcucaccaacuccgagcuccucucccucaucaacgacaugcccaucaccaacgaccagaagaagcucauguccaacaacguccagaucguccgccagcaguccuacuccaucaugugcaucaucaaggaggagguccucgccuacgucguccagcucccccucuacggcgucaucgacacccccugcuggaagcuccacaccuccccccucugcaccaccaacaccaaggagggcuccaacaucugccucacccgcaccgaccgcggcugguacugcgacaacgccggcuccgucuccuucuucccccaggccgagaccugcaagguccaguccaaccgcgucuucugcgacaccaugaacucccgcacccuccccuccgaggucaaccucugcaacgucgacaucuucaaccccaaguacgacugcaagaucaugaccuccaagaccgacgucuccuccuccgucaucaccucccucggcgccaucgucuccugcuacggcaagaccaagugcaccgccuccaacaagugccgcggcaucaucaagaccuucuccaacggcugcgacuacgucuccaacaagggcgucgacaccgucuccgucggcaacacccucuacuacgucaacaagcaggagggcaagucccucuacgucaagggcgagcccaucaucaacuucuacgacccccucgucuuccccuccgacgaguucgacgccuccaucucccaggucaacgagaagaucaaccagucccucgccuucauccgcaaguccgacgagcuccuccacaacgucaacgccggcaaguccaccaccaacaucaugaucaccaccaucaucaucgucaucaucgucauccuccucucccucaucgccgucggccuccuccucuacugcaaggcccgcugaggacuagugaagggaacacccaaauuuaauucagccuuaagcacaauuaauuaagagugaaacguaauuguacaagcaguuggucacccaccauagggcaugaucaacaccgcaaccuuuccuuuuucccccagugauucugaaaaaccccucuucccuucagcuugcuuagauguuccaaauuuaguaagcuuaaggcggccuacagaagaaaaagaaaaaaaaggccacaaaaguucccucucacuuucaguaaauaaaauaaaagcagcaacagaaauaaagaaauaaaugaaauucaaaaugaaauaaauauuguguugugcagcauuaaaaaaucaauaaaaauuaaaaaugagcaagaucuaaaaaaaaaaaaaaaaaaaaaaaaaaaaaaaaaaaaaaaaaaaaaaaaaaaaaaaaaaaaaaaaugcaucccccccccccccccccccccccccccccccaaaggcucuuuucagagccaccagaauu

SEQ ID NO: 6003 - RNA, 2142 nt, Artificial Sequence
  mRNA product Design h-2 comprising derived and/or modified sequence from HRSV(A2)__F-del_DSCav1_mut5 (opt3)
gggagacccgugacccggaaguuguacggcuacgcgacuuucccucccacaaacccucgcgcccuuccuuuccuacuugggcccggcagaaagcuuaccauggagcugcucauccuuaaggccaacgcuauuaccacaauacugacugcagugacguucugcuuugccagcggccagaauaucaccgaagaguucuaccaauccacauguucugcggucucaaaaggguauuugagugcuuuaagaacuggaugguacaccagcguuauuacaaucgaacuguccaacauuaaggagaauaaaugcaacgguaccgacgccaaggugaaacuaaucaagcaggaacucgauaaguauaaaaaugcaguaacugagcugcagcuucugaugcagucuacacccgccaccggcucggggucagcuauagcaagcggaguggccgucuguaagguguugcaccucgagggcgaaguuaacaaaaucaagagugcucugcuguccacgaauaaagccguggucucucucagcgguugcgggguguccguauuaacuuuuaagguucuggaccuuaagaacuacauugauaaacaauugcugccuauccuaaauaagcagucauguaguauuagcaacaucgagaccgugauagaguuccagcagaaaaauaacaggcuccuggaaauuacacgggaguuuucugucaaugcgggagugacuaccccaguguccacauauaugcuuaccaacucagaacuguugagccucaucaaugacaugccgauuacgaacgaucaaaagaaacugaugaguaacaauguccagaucguucgccagcagucuuacuccaucaugugcauuauaaaggaggaaguguuagcauauguagugcaacugccccucuacggcgucaucgacacuccuuguuggaaacuucauacaagcccacugugcaccacuaacacaaaggagggcucgaauauuuguuugacccgaacggaucgugggugguacugcgacaacgccggaucuguguccuucuuuccccaggcugaaaccuguaagguucagucaaauagaguguucugcgauacaaugaacaguagaacucugccuagcgaggucaaucucugcaacguggacaucuuuaauccaaaauaugauuguaagauaaugaccuccaaaacagacguaucuagcucaguuauuaccagucugggugccaucguguccugcuacggcaagacuaaauguacagcaagcaacaagugcagggggaucauuaagaccuucucuaauggaugugauuaugucucaaacaaaggcguggacacugucaguguggguaauacgcuuuacuauguuaacaagcaagaggggaaaagccuguacgugaagggagaacccaucauuaauuuuuaugacccuuugguauucccauccgaugaguuugacgcuucuauaucgcaggucaacgagaaaaucaaccagagccucgccuucauucggaaguccgaugaacuguuacacaaugugaacgcgggcaagucaacaaccaauaucaugaucacuaccauuauaaucguuauuaucgugauucugcuaagucucaucgccgucggccugcuuuuguacugcaaagcacgcugaggacuagugaagggaacacccaaauuuaauucagccuuaagcacaauuaauuaagagugaaacguaauuguacaagcaguuggucacccaccauagggcaugaucaacaccgcaaccuuuccuuuuucccccagugauucugaaaaaccccucuucccuucagcuugcuuagauguuccaaauuuaguaagcuuaaggcggccuacagaagaaaaagaaaaaaaaggccacaaaaguucccucucacuuucaguaaauaaaauaaaagcagcaacagaaauaaagaaauaaaugaaauucaaaaugaaauaaauauuguguugugcagcauuaaaaaaucaauaaaaauuaaaaaugagcaagaucuaaaaaaaaaaaaaaaaaaaaaaaaaaaaaaaaaaaaaaaaaaaaaaaaaaaaaaaaaaaaaaaaugcaucccccccccccccccccccccccccccccccaaaggcucuuuucagagccaccagaauu

SEQ ID NO: 6004 - RNA, 2142 nt, Artificial Sequence
  mRNA product Design h-2 comprising derived and/or modified sequence from HRSV(A2)__F-del_DSCav1_mut5 (opt4)
gggagacccgugacccggaaguuguacggcuacgcgacuuucccucccacaaacccucgcgcccuuccuuuccuacuugggcccggcagaaagcuuaccauggagcugcugauccugaaggccaacgccaucaccaccauccugaccgccgugaccuucugcuucgccagcggccagaacaucaccgaggaguucuaccagagcaccugcagcgccgugagcaagggcuaccugagcgcccugagaaccggcugguacaccagcgugaucaccaucgagcugagcaacaucaaggagaacaagugcaacggcaccgacgccaaggugaagcugaucaagcaggagcuggacaaguacaagaacgccgugaccgagcugcagcugcugaugcagagcacccccgccaccggcagcggcagcgccaucgccagcggcguggccgugugcaaggugcugcaccuggagggcgaggugaacaagaucaagagcgcccugcugagcaccaacaaggccguggugagccugagcggcugcggcgugagcgugcugaccuucaaggugcuggaccugaagaacuacaucgacaagcagcugcugcccauccugaacaagcagagcugcagcaucagcaacaucgagaccgugaucgaguuccagcagaagaacaacagacugcuggagaucaccagagaguucagcgugaacgccggcgugaccacccccgugagcaccuacaugcugaccaacagcgagcugcugagccugaucaacgacaugcccaucaccaacgaccagaagaagcugaugagcaacaacgugcagaucgugagacagcagagcuacagcaucaugugcaucaucaaggaggaggugcuggccuacguggugcagcugccccuguacggcgugaucgacacccccugcuggaagcugcacaccagcccccugugcaccaccaacaccaaggagggcagcaacaucugccugaccagaaccgacagaggcugguacugcgacaacgccggcagcgugagcuucuucccccaggccgagaccugcaaggugcagagcaacagaguguucugcgacaccaugaacagcagaacccugcccagcgaggugaaccugugcaacguggacaucuucaaccccaaguacgacugcaagaucaugaccagcaagaccgacgugagcagcagcgugaucaccagccugggcgccaucgugagcugcuacggcaagaccaagugcaccgccagcaacaagugcagaggcaucaucaagaccuucagcaacggcugcgacuacgugagcaacaagggcguggacaccgugagcgugggcaacacccuguacuacgugaacaagcaggagggcaagagccuguacgugaagggcgagcccaucaucaacuucuacgacccccugguguuccccagcgacgaguucgacgccagcaucagccaggugaacgagaagaucaaccagagccuggccuucaucagaaagagcgacgagcugcugcacaacgugaacgccggcaagagcaccaccaacaucaugaucaccaccaucaucaucgugaucaucgugauccugcugagccugaucgccgugggccugcugcuguacugcaaggccagaugaggacuagugaagggaacacccaaauuuaauucagccuuaagcacaauuaauuaagagugaaacguaauuguacaagcaguuggucacccaccauagggcaugaucaacaccgcaaccuuuccuuuuucccccagugauucugaaaaaccccucuucccuucagcuugcuuagauguuccaaauuuaguaagcuuaaggcggccuacagaagaaaaagaaaaaaaaggccacaaaaguucccucucacuuucaguaaauaaaauaaaagcagcaacagaaauaaagaaauaaaugaaauucaaaaugaaauaaauauuguguugugcagcauuaaaaaaucaauaaaaauuaaaaaugagcaagaucuaaaaaaaaaaaaaaaaaaaaaaaaaaaaaaaaaaaaaaaaaaaaaaaaaaaaaaaaaaaaaaaaugcaucccccccccccccccccccccccccccccccaaaggcucuuuucagagccaccagaauu

SEQ ID NO: 6005 - RNA, 2142 nt, Artificial Sequence
  mRNA product Design h-2 comprising derived and/or modified sequence from HRSV(A2)__F-del_DSCav1_mut5 (opt5)
gggagacccgugacccggaaguuguacggcuacgcgacuuucccucccacaaacccucgcgcccuuccuuuccuacuugggcccggcagaaagcuuaccauggagcugcucauccugaaggccaacgcuauuaccacaauccuuacggccgugaccuucugcuuugcgagcggccagaauauuacagaagaguucuaccaauccaccuguucugcugucagcaaaggguaucuguccgcccucagaacaggaugguacaccucuguuaucacaauugaacugagcaacaucaaggagaauaaaugcaacggcaccgacgccaaggugaaacuuaucaagcaggaacuggauaaguauaaaaaugcugugacggagcuccagcugcugaugcaguccacccccgccacagggucuggaagcgcuauugccuccggcgucgcgguguguaagguucuccaccuggagggggaagugaacaaaaucaagagcgcccuucugucuaccaauaaagcugucgugucccucagcggaugcggcguuucugugcugacauuuaagguccuugaccugaagaacuacauugauaaacaacuccugccuauccugaauaagcaguccuguagcauuucuaacaucgagaccgugauugaguuccagcagaaaaauaaccggcuccuggaaaucacgcgcgaguuuuccgugaaugccggcgucacaaccccgguuagcacauauaugcuuaccaacuccgaacugcucucucugaucaaugacaugcccauuaccaacgaucaaaagaaacuuaugagcaacaaugugcagaucgugagacagcaguccuacagcauuaugugcaucauuaaggaggaaguccuggcuuaugugguucaacucccucuguacggggugaucgacacacccuguuggaaacugcauacgucuccucucugcaccacaaacaccaaggagggauccaauaucugucugacacggaccgaucgcggcugguacugcgacaacgccgggagcgucucuuucuuuccccaggcggaaacguguaaggugcagagcaauagaguuuucugcgauacaaugaacuccagaacccugccuucugaggugaaucucugcaacgucgacauuuuuaauccgaaauaugauuguaagaucaugaccagcaaaacagacguguccagcucugucauuaccucccugggagccaucgugagcugcuacggcaagacaaaauguacggcuucuaacaagugccgggggauuaucaagaccuucuccaauggaugugauuauguuagcaacaaaggcguggacacagucuccgugggcaauacccuuuacuauguuaacaagcaagaggggaaaucucuguacgugaagggagaacccaucauuaauuuuuaugacccucucgucuuccccagcgaugaguuugacgccuccaucucucaggugaacgagaaaauuaaccagagccuggcuuucauccgcaaguccgaugaacugcuccacaaugugaacgccggcaagagcacaaccaauauuaugaucacgaccauuaucaucguuauuaucgucauucugcuuucucugaucgccguggggcuccugcuguacugcaaagcuagaugaggacuagugaagggaacacccaaauuuaauucagccuuaagcacaauuaauuaagagugaaacguaauuguacaagcaguuggucacccaccauagggcaugaucaacaccgcaaccuuuccuuuuucccccagugauucugaaaaaccccucuucccuucagcuugcuuagauguuccaaauuuaguaagcuuaaggcggccuacagaagaaaaagaaaaaaaaggccacaaaaguucccucucacuuucaguaaauaaaauaaaagcagcaacagaaauaaagaaauaaaugaaauucaaaaugaaauaaauauuguguugugcagcauuaaaaaaucaauaaaaauuaaaaaugagcaagaucuaaaaaaaaaaaaaaaaaaaaaaaaaaaaaaaaaaaaaaaaaaaaaaaaaaaaaaaaaaaaaaaaugcaucccccccccccccccccccccccccccccccaaaggcucuuuucagagccaccagaauu

SEQ ID NO: 6006 - RNA, 2142 nt, Artificial Sequence
  mRNA product Design h-2 comprising derived and/or modified sequence from HRSV(A2)__F-del_DSCav1_mut5 (opt6)
gggagacccgugacccggaaguuguacggcuacgcgacuuucccucccacaaacccucgcgcccuuccuuuccuacuugggcccggcagaaagcuuaccauggaacuuuuaauacugaaagcaaaugccaucacaaccauacuaacugccgucacauucugcuuugcaucaggacaaaacauaacagaagaauuuuaccaauccacaugcucagcaguaucaaaaggauaucuaucggcacuuagaacuggaugguacacaaguguuauaacuauagaacucucaaacauaaaagaaaacaaaugcaauggaacagacgcaaaaguaaaacuaauaaaacaagaacucgauaaauauaaaaaugcaguaaccgaacuacaacuauuaaugcaaagcacacccgcaacaggcagcggaucagcaauagcaagcggagucgcaguauguaaaguacuacaucuagaaggagaagucaacaaaaucaaaucugcacuucuauccacaaacaaagcuguaguaucccuauccggaugcggagucucaguauuaacuuuuaaaguacuagaccuuaaaaacuacauagauaaacaacuauuaccaauacuaaauaaacaaucaugcagcauauccaauauagagacaguaauugaauuucaacaaaaaaacaacagauuacuagaaauuacucgugaauuuuccguaaaugccggagucacaacaccaguaucaaccuauaugcuaacaaacagcgaacuacuuagcuuaauaaaugacaugccaauaacaaaugaccaaaaaaaacuuaugucaaauaacguacaaaucgucagacaacaauccuacucuauaauguguauaauuaaagaagaaguccuagcauacguaguucaauuaccacucuauggaguaauagauacaccaugcuggaaacuacacacgucaccacuauguacaacaaacacaaaagaaggauccaauauaugccuaacaagaaccgacagaggcugguauugugacaacgcaggauccguuucauucuucccacaagcagaaaccuguaaaguacaaucuaauagaguauuuugcgacacaaugaacaguagaacacuaccaagcgagguuaaucuauguaacguagacauauucaauccaaaauaugauugcaaaauaaugacaucaaaaacagauguaucgucgaguguaauaacaagucugggagcuauaguaagcugcuacggcaagacgaaauguaccgcuucaaauaaaugcagaggaaucauuaaaacauucucgaacggaugcgacuacguaaguaauaaaggugucgacaccguaucaguagggaauacauuauacuacgucaacaaacaagaaggaaaaucucuauauguaaaaggagaaccaauaauaaauuucuaugacccucuaguauucccaucagaugaauuugacgcuuccauaucacaaguaaacgaaaaaaucaaucaaucuuuagcauucauacgaaaaagugaugaacuccuacacaacgucaacgcaggaaaaagcacaacaaauauaaugaucacaacaaucaucauaguaauaauaguaauacuacuaucauuaauagcaguaggauuauugcuuuacugcaaagcacgauagggacuagugaagggaacacccaaauuuaauucagccuuaagcacaauuaauuaagagugaaacguaauuguacaagcaguuggucacccaccauagggcaugaucaacaccgcaaccuuuccuuuuucccccagugauucugaaaaaccccucuucccuucagcuugcuuagauguuccaaauuuaguaagcuuaaggcggccuacagaagaaaaagaaaaaaaaggccacaaaaguucccucucacuuucaguaaauaaaauaaaagcagcaacagaaauaaagaaauaaaugaaauucaaaaugaaauaaauauuguguugugcagcauuaaaaaaucaauaaaaauuaaaaaugagcaagaucuaaaaaaaaaaaaaaaaaaaaaaaaaaaaaaaaaaaaaaaaaaaaaaaaaaaaaaaaaaaaaaaaugcaucccccccccccccccccccccccccccccccaaaggcucuuuucagagccaccagaauu

SEQ ID NO: 6007 - RNA, 2142 nt, Artificial Sequence
  mRNA product Design h-2 comprising derived and/or modified sequence from HRSV(A2)__F-del_DSCav1_mut5 (opt11)
gggagacccgugacccggaaguuguacggcuacgcgacuuucccucccacaaacccucgcgcccuuccuuuccuacuugggcccggcagaaagcuuaccauggaacuccucauccucaaagccaacgccauaaccacaauacucaccgccguaaccuucugcuuugcgucgggacaaaacaucaccgaagaguucuaccaauccacuugcuccgcaguaagcaaaggauaccucuccgcccugcgaaccgguugguacacaucagucaucacaaucgaacucucaaacauaaaagaaaacaaaugcaacggcaccgacgcaaaggucaaauuaaucaagcaagaacuagacaaauacaaaaacgccgucacagaacuccagcugcuaaugcagagcacacccgcaacuggcagcggauccgccaucgcaucaggagucgccgugugcaaaguccuacaccucgaaggagaagugaacaaaaucaaaucagcccuacucuccaccaacaaggccgucgucucccucuccggcugcggugucuccguccuaaccuucaaagugcuagaccucaagaacuacaucgacaaacaacuccuaccaauacucaacaagcaaucuugcuccaucuccaacaucgaaaccguaaucgaguuccaacagaagaacaaccgccuccucgaaaucacccgcgaguucucugucaacgcaggggucaccacucccgucuccacauacaugcucacaaacuccgaacuccucagccucaucaacgacaugcccauaaccaacgaccagaaaaagcuaaugagcaauaacguccaaaucguuagacaacaaaguuauuccaucaugugcaucaucaaagaagaaguccucgccuacgucguacaacucccccucuauggcgucaucgacacccccugcuggaaacugcacacaucaccccucugcaccacaaacaccaaagaaggcucaaacaucugccuaacucgcaccgaccgcggcugguacugcgacaacgccggcagcguaucauucuuuccccaagccgaaacaugcaaaguucaauccaaccgcgucuucugcgacacaaugaacuccagaacgcuccccagcgaagucaaccucuguaacguagacaucuucaacccuaaguacgacugcaaaaucaugaccuccaaaacugauguauccuccuccgucaucacaucccugggcgccaucgucagcugcuacggcaaaacaaaaugcacugccucaaacaaaugccgagguaucauaaagaccuucucaaacggaugcgauuacgucagcaacaaaggcgucgacaccgucagugucggcaacacccucuacuacgucaacaaacaagaaggaaaaucccucuacgucaaaggcgaacccaucaucaacuucuacgacccccucgucuuccccagcgacgaguucgacgccuccaucucacaagucaacgaaaagauaaaccaaucucuagccuucauccgcaaauccgaugaacuccugcauaacgucaacgccggcaaauccaccacaaacaucaugaucacuaccauaaucaucgucauaaucguaauccuccuaucucuuaucgcagucggccuacuacucuacugcaaagcccgcuaaggacuagugaagggaacacccaaauuuaauucagccuuaagcacaauuaauuaagagugaaacguaauuguacaagcaguuggucacccaccauagggcaugaucaacaccgcaaccuuuccuuuuucccccagugauucugaaaaaccccucuucccuucagcuugcuuagauguuccaaauuuaguaagcuuaaggcggccuacagaagaaaaagaaaaaaaaggccacaaaaguucccucucacuuucaguaaauaaaauaaaagcagcaacagaaauaaagaaauaaaugaaauucaaaaugaaauaaauauuguguugugcagcauuaaaaaaucaauaaaaauuaaaaaugagcaagaucuaaaaaaaaaaaaaaaaaaaaaaaaaaaaaaaaaaaaaaaaaaaaaaaaaaaaaaaaaaaaaaaaugcaucccccccccccccccccccccccccccccccaaaggcucuuuucagagccaccagaauu

SEQ ID NO: 6008 - RNA, 1922 nt, Artificial Sequence
  mRNA product Design h-3 comprising derived and/or modified sequence from HRSV(A2)__F-del_DSCav1_mut5 (opt1)
gggagacccgugacccggaaguuguacggcuacgcgacuuucccucccacaaacccucgcgcccuuccuuuccuacuugggcccggcagaaagcuuaccauggagcugcucauccugaaggccaacgccaucaccaccauccugacggcggugaccuucugcuucgccagcggccagaacaucaccgaggaguucuaccaguccacgugcagcgccgucuccaagggguaccucagcgcccugcggaccggcugguacaccuccgugaucaccaucgagcugagcaacaucaaggagaacaagugcaacgggaccgacgccaaggugaagcucaucaagcaggagcuggacaaguacaagaacgcggucacggagcugcagcuccugaugcaguccaccccggcaaccggcuccggcuccgccaucgcgagcggcgucgccgugugcaaggugcugcaccucgagggggaggucaacaagaucaagagcgcccugcuguccaccaacaaggccguggugagccucuccggcugcggcgucagcgugcugaccuucaaggugcuggaccucaagaacuacaucgacaagcagcugcugcccauccugaacaagcagagcugcuccaucagcaacaucgagacggugaucgaguuccagcagaagaacaaccggcuccuggagaucacccgcgaguucagcgugaacgccggggucaccacccccguguccacguacaugcugaccaacagcgagcuccugucccugaucaacgacaugccgaucaccaacgaccagaagaagcucaugagcaacaacgugcagaucguccggcagcaguccuacagcaucaugugcaucaucaaggaggaggugcuggcguacgugguccagcugccccucuacggcgugaucgacacccccugcuggaagcugcacacgagcccccugugcaccaccaacaccaaggagggguccaacaucugccucacgcgcaccgaccggggcugguacugcgacaacgccggcagcgucuccuucuucccgcaggccgagaccugcaaggugcagagcaaccgcguguucugcgacaccaugaacucccggacgcugcccagcgagguaaaccucugcaacgucgacaucuucaaccccaaguacgacugcaagaucaugaccuccaagaccgacgugagcuccagcgugaucaccucccugggggccaucgucagcugcuacggcaagacgaagugcaccgccagcaacaagugccgggggaucaucaagaccuucuccaacggcugcgacuacgugagcaacaagggcguggacaccguguccgucgggaacacccuguacuacgugaacaagcaggagggcaagagccucuacgugaagggggagcccaucaucaacuucuacgacccgcuggucuuccccuccgacgaguucgacgcgagcaucucccaggugaacgagaagaucaaccagagccuggccuucauccgcaaguccgacgagcugcuccacaacgugaacgccggcaagagcacgaccaacaucaugaucaccaccaucaucaucgucaucaucgugauccugcugucccucaucgccguggggcugcugcucuacugcaaggcccggugaggacuaguggaagcauuuuccuggcugauuaaaagaaauuacucagcuauggucaucuguuccuguuagaaggcuaugcagcauauuauauacuaugcgcauguuaugaaaugcauaauaaaaaauuuuaaaaaaucuaaaagaucuaaaaaaaaaaaaaaaaaaaaaaaaaaaaaaaaaaaaaaaaaaaaaaaaaaaaaaaaaaaaaaaaugcaucccccccccccccccccccccccccccccccaaaggcucuuuucagagccaccagaauu

SEQ ID NO: 6009 - RNA, 1922 nt, Artificial Sequence
  mRNA product Design h-3 comprising derived and/or modified sequence from HRSV(A2)__F-del_DSCav1_mut5 (opt1)
gggagacccgugacccggaaguuguacggcuacgcgacuuucccucccacaaacccucgcgcccuuccuuuccuacuugggcccggcagaaagcuuaccauggagcugcucauccugaaggccaacgccaucaccaccauccugacggcggugaccuucugcuucgccagcggccagaacaucaccgaggaguucuaccaguccacgugcagcgccgucuccaagggguaccucagcgcccugcgcaccggcugguacaccuccgugaucaccaucgagcugagcaacaucaaggagaacaagugcaacgggaccgacgccaaggugaagcucaucaagcaggagcuggacaaguacaagaacgcggucacggagcugcagcuccugaugcaguccacccccgccaccggcagcggguccgccaucgccagcggcguggcggugugcaagguccugcaccucgagggcgaggugaacaagaucaaguccgcccugcugagcaccaacaaggccguggucucccucagcgggugcggcguguccgugcugacguucaagguccuggaccucaagaacuacaucgacaagcagcugcugccgauccucaacaagcagagcugcuccaucagcaacaucgagaccgugaucgaguuccagcagaagaacaaccggcugcuggagaucacccgcgaguucuccgugaacgccggggucaccacgcccgugagcaccuacaugcucaccaacagcgagcugcugucccucaucaacgacaugcccaucaccaacgaccagaagaagcugaugagcaacaacgugcagaucguccggcagcaguccuacagcaucaugugcaucaucaaggaggaggugcuggccuacgugguccagcucccccuguacggcgugaucgacacgccgugcuggaagcugcacaccagcccccucugcaccaccaacacgaaggagggguccaacaucugccugacccgcaccgaccggggcugguacugcgacaacgcgggcuccgugagcuucuucccccaggccgagaccugcaagguccaguccaaccgcguguucugcgacacgaugaacagccggacccuccccuccgaggucaaccugugcaacguggacaucuucaacccgaaguacgacugcaagaucaugaccagcaagaccgacguguccagcuccgucaucacgagccugggggccaucguguccugcuacggcaagaccaagugcaccgccagcaacaagugccgggggaucaucaagaccuucuccaacggcugcgacuacgugagcaacaagggcgucgacacggugagcguggggaacacccucuacuacgucaacaagcaggagggcaagucccuguacgugaagggggagcccaucaucaacuucuacgacccccugguguuccccagcgacgaguucgacgccuccaucagccaggucaacgagaagaucaaccagucccucgcguucauccgcaagagcgacgagcugcugcacaacgugaacgccggcaaguccaccaccaacaucaugaucaccacgaucaucaucgugaucaucgucauccuccugagccugaucgccguggggcuccugcuguacugcaaggcccggugaggacuaguggaagcauuuuccuggcugauuaaaagaaauuacucagcuauggucaucuguuccuguuagaaggcuaugcagcauauuauauacuaugcgcauguuaugaaaugcauaauaaaaaauuuuaaaaaaucuaaaagaucuaaaaaaaaaaaaaaaaaaaaaaaaaaaaaaaaaaaaaaaaaaaaaaaaaaaaaaaaaaaaaaaaugcaucccccccccccccccccccccccccccccccaaaggcucuuuucagagccaccagaauu

SEQ ID NO: 6010 - RNA, 1922 nt, Artificial Sequence
  mRNA product Design h-3 comprising derived and/or modified sequence from HRSV(A2)__F-del_DSCav1_mut5 (opt2)
gggagacccgugacccggaaguuguacggcuacgcgacuuucccucccacaaacccucgcgcccuuccuuuccuacuugggcccggcagaaagcuuaccauggagcuccucauccucaaggccaacgccaucaccaccauccucaccgccgucaccuucugcuucgccuccggccagaacaucaccgaggaguucuaccaguccaccugcuccgccgucuccaagggcuaccucuccgcccuccgcaccggcugguacaccuccgucaucaccaucgagcucuccaacaucaaggagaacaagugcaacggcaccgacgccaaggucaagcucaucaagcaggagcucgacaaguacaagaacgccgucaccgagcuccagcuccucaugcaguccacccccgccaccggcuccggcuccgccaucgccuccggcgucgccgucugcaagguccuccaccucgagggcgaggucaacaagaucaaguccgcccuccucuccaccaacaaggccgucgucucccucuccggcugcggcgucuccguccucaccuucaagguccucgaccucaagaacuacaucgacaagcagcuccuccccauccucaacaagcaguccugcuccaucuccaacaucgagaccgucaucgaguuccagcagaagaacaaccgccuccucgagaucacccgcgaguucuccgucaacgccggcgucaccacccccgucuccaccuacaugcucaccaacuccgagcuccucucccucaucaacgacaugcccaucaccaacgaccagaagaagcucauguccaacaacguccagaucguccgccagcaguccuacuccaucaugugcaucaucaaggaggagguccucgccuacgucguccagcucccccucuacggcgucaucgacacccccugcuggaagcuccacaccuccccccucugcaccaccaacaccaaggagggcuccaacaucugccucacccgcaccgaccgcggcugguacugcgacaacgccggcuccgucuccuucuucccccaggccgagaccugcaagguccaguccaaccgcgucuucugcgacaccaugaacucccgcacccuccccuccgaggucaaccucugcaacgucgacaucuucaaccccaaguacgacugcaagaucaugaccuccaagaccgacgucuccuccuccgucaucaccucccucggcgccaucgucuccugcuacggcaagaccaagugcaccgccuccaacaagugccgcggcaucaucaagaccuucuccaacggcugcgacuacgucuccaacaagggcgucgacaccgucuccgucggcaacacccucuacuacgucaacaagcaggagggcaagucccucuacgucaagggcgagcccaucaucaacuucuacgacccccucgucuuccccuccgacgaguucgacgccuccaucucccaggucaacgagaagaucaaccagucccucgccuucauccgcaaguccgacgagcuccuccacaacgucaacgccggcaaguccaccaccaacaucaugaucaccaccaucaucaucgucaucaucgucauccuccucucccucaucgccgucggccuccuccucuacugcaaggcccgcugaggacuaguggaagcauuuuccuggcugauuaaaagaaauuacucagcuauggucaucuguuccuguuagaaggcuaugcagcauauuauauacuaugcgcauguuaugaaaugcauaauaaaaaauuuuaaaaaaucuaaaagaucuaaaaaaaaaaaaaaaaaaaaaaaaaaaaaaaaaaaaaaaaaaaaaaaaaaaaaaaaaaaaaaaaugcaucccccccccccccccccccccccccccccccaaaggcucuuuucagagccaccagaauu

SEQ ID NO: 6011 - RNA, 1922 nt, Artificial Sequence
  mRNA product Design h-3 comprising derived and/or modified sequence from HRSV(A2)__F-del_DSCav1_mut5 (opt3)
gggagacccgugacccggaaguuguacggcuacgcgacuuucccucccacaaacccucgcgcccuuccuuuccuacuugggcccggcagaaagcuuaccauggagcugcucauccuuaaggccaacgcuauuaccacaauacugacugcagugacguucugcuuugccagcggccagaauaucaccgaagaguucuaccaauccacauguucugcggucucaaaaggguauuugagugcuuuaagaacuggaugguacaccagcguuauuacaaucgaacuguccaacauuaaggagaauaaaugcaacgguaccgacgccaaggugaaacuaaucaagcaggaacucgauaaguauaaaaaugcaguaacugagcugcagcuucugaugcagucuacacccgccaccggcucggggucagcuauagcaagcggaguggccgucuguaagguguugcaccucgagggcgaaguuaacaaaaucaagagugcucugcuguccacgaauaaagccguggucucucucagcgguugcgggguguccguauuaacuuuuaagguucuggaccuuaagaacuacauugauaaacaauugcugccuauccuaaauaagcagucauguaguauuagcaacaucgagaccgugauagaguuccagcagaaaaauaacaggcuccuggaaauuacacgggaguuuucugucaaugcgggagugacuaccccaguguccacauauaugcuuaccaacucagaacuguugagccucaucaaugacaugccgauuacgaacgaucaaaagaaacugaugaguaacaauguccagaucguucgccagcagucuuacuccaucaugugcauuauaaaggaggaaguguuagcauauguagugcaacugccccucuacggcgucaucgacacuccuuguuggaaacuucauacaagcccacugugcaccacuaacacaaaggagggcucgaauauuuguuugacccgaacggaucgugggugguacugcgacaacgccggaucuguguccuucuuuccccaggcugaaaccuguaagguucagucaaauagaguguucugcgauacaaugaacaguagaacucugccuagcgaggucaaucucugcaacguggacaucuuuaauccaaaauaugauuguaagauaaugaccuccaaaacagacguaucuagcucaguuauuaccagucugggugccaucguguccugcuacggcaagacuaaauguacagcaagcaacaagugcagggggaucauuaagaccuucucuaauggaugugauuaugucucaaacaaaggcguggacacugucaguguggguaauacgcuuuacuauguuaacaagcaagaggggaaaagccuguacgugaagggagaacccaucauuaauuuuuaugacccuuugguauucccauccgaugaguuugacgcuucuauaucgcaggucaacgagaaaaucaaccagagccucgccuucauucggaaguccgaugaacuguuacacaaugugaacgcgggcaagucaacaaccaauaucaugaucacuaccauuauaaucguuauuaucgugauucugcuaagucucaucgccgucggccugcuuuuguacugcaaagcacgcugaggacuaguggaagcauuuuccuggcugauuaaaagaaauuacucagcuauggucaucuguuccuguuagaaggcuaugcagcauauuauauacuaugcgcauguuaugaaaugcauaauaaaaaauuuuaaaaaaucuaaaagaucuaaaaaaaaaaaaaaaaaaaaaaaaaaaaaaaaaaaaaaaaaaaaaaaaaaaaaaaaaaaaaaaaugcaucccccccccccccccccccccccccccccccaaaggcucuuuucagagccaccagaauu

SEQ ID NO: 6012 - RNA, 1922 nt, Artificial Sequence
  mRNA product Design h-3 comprising derived and/or modified sequence from HRSV(A2)__F-del_DSCav1_mut5 (opt4)
gggagacccgugacccggaaguuguacggcuacgcgacuuucccucccacaaacccucgcgcccuuccuuuccuacuugggcccggcagaaagcuuaccauggagcugcugauccugaaggccaacgccaucaccaccauccugaccgccgugaccuucugcuucgccagcggccagaacaucaccgaggaguucuaccagagcaccugcagcgccgugagcaagggcuaccugagcgcccugagaaccggcugguacaccagcgugaucaccaucgagcugagcaacaucaaggagaacaagugcaacggcaccgacgccaaggugaagcugaucaagcaggagcuggacaaguacaagaacgccgugaccgagcugcagcugcugaugcagagcacccccgccaccggcagcggcagcgccaucgccagcggcguggccgugugcaaggugcugcaccuggagggcgaggugaacaagaucaagagcgcccugcugagcaccaacaaggccguggugagccugagcggcugcggcgugagcgugcugaccuucaaggugcuggaccugaagaacuacaucgacaagcagcugcugcccauccugaacaagcagagcugcagcaucagcaacaucgagaccgugaucgaguuccagcagaagaacaacagacugcuggagaucaccagagaguucagcgugaacgccggcgugaccacccccgugagcaccuacaugcugaccaacagcgagcugcugagccugaucaacgacaugcccaucaccaacgaccagaagaagcugaugagcaacaacgugcagaucgugagacagcagagcuacagcaucaugugcaucaucaaggaggaggugcuggccuacguggugcagcugccccuguacggcgugaucgacacccccugcuggaagcugcacaccagcccccugugcaccaccaacaccaaggagggcagcaacaucugccugaccagaaccgacagaggcugguacugcgacaacgccggcagcgugagcuucuucccccaggccgagaccugcaaggugcagagcaacagaguguucugcgacaccaugaacagcagaacccugcccagcgaggugaaccugugcaacguggacaucuucaaccccaaguacgacugcaagaucaugaccagcaagaccgacgugagcagcagcgugaucaccagccugggcgccaucgugagcugcuacggcaagaccaagugcaccgccagcaacaagugcagaggcaucaucaagaccuucagcaacggcugcgacuacgugagcaacaagggcguggacaccgugagcgugggcaacacccuguacuacgugaacaagcaggagggcaagagccuguacgugaagggcgagcccaucaucaacuucuacgacccccugguguuccccagcgacgaguucgacgccagcaucagccaggugaacgagaagaucaaccagagccuggccuucaucagaaagagcgacgagcugcugcacaacgugaacgccggcaagagcaccaccaacaucaugaucaccaccaucaucaucgugaucaucgugauccugcugagccugaucgccgugggccugcugcuguacugcaaggccagaugaggacuaguggaagcauuuuccuggcugauuaaaagaaauuacucagcuauggucaucuguuccuguuagaaggcuaugcagcauauuauauacuaugcgcauguuaugaaaugcauaauaaaaaauuuuaaaaaaucuaaaagaucuaaaaaaaaaaaaaaaaaaaaaaaaaaaaaaaaaaaaaaaaaaaaaaaaaaaaaaaaaaaaaaaaugcaucccccccccccccccccccccccccccccccaaaggcucuuuucagagccaccagaauu

SEQ ID NO: 6013 - RNA, 1922 nt, Artificial Sequence
  mRNA product Design h-3 comprising derived and/or modified sequence from HRSV(A2)__F-del_DSCav1_mut5 (opt5)
gggagacccgugacccggaaguuguacggcuacgcgacuuucccucccacaaacccucgcgcccuuccuuuccuacuugggcccggcagaaagcuuaccauggagcugcucauccugaaggccaacgcuauuaccacaauccuuacggccgugaccuucugcuuugcgagcggccagaauauuacagaagaguucuaccaauccaccuguucugcugucagcaaaggguaucuguccgcccucagaacaggaugguacaccucuguuaucacaauugaacugagcaacaucaaggagaauaaaugcaacggcaccgacgccaaggugaaacuuaucaagcaggaacuggauaaguauaaaaaugcugugacggagcuccagcugcugaugcaguccacccccgccacagggucuggaagcgcuauugccuccggcgucgcgguguguaagguucuccaccuggagggggaagugaacaaaaucaagagcgcccuucugucuaccaauaaagcugucgugucccucagcggaugcggcguuucugugcugacauuuaagguccuugaccugaagaacuacauugauaaacaacuccugccuauccugaauaagcaguccuguagcauuucuaacaucgagaccgugauugaguuccagcagaaaaauaaccggcuccuggaaaucacgcgcgaguuuuccgugaaugccggcgucacaaccccgguuagcacauauaugcuuaccaacuccgaacugcucucucugaucaaugacaugcccauuaccaacgaucaaaagaaacuuaugagcaacaaugugcagaucgugagacagcaguccuacagcauuaugugcaucauuaaggaggaaguccuggcuuaugugguucaacucccucuguacggggugaucgacacacccuguuggaaacugcauacgucuccucucugcaccacaaacaccaaggagggauccaauaucugucugacacggaccgaucgcggcugguacugcgacaacgccgggagcgucucuuucuuuccccaggcggaaacguguaaggugcagagcaauagaguuuucugcgauacaaugaacuccagaacccugccuucugaggugaaucucugcaacgucgacauuuuuaauccgaaauaugauuguaagaucaugaccagcaaaacagacguguccagcucugucauuaccucccugggagccaucgugagcugcuacggcaagacaaaauguacggcuucuaacaagugccgggggauuaucaagaccuucuccaauggaugugauuauguuagcaacaaaggcguggacacagucuccgugggcaauacccuuuacuauguuaacaagcaagaggggaaaucucuguacgugaagggagaacccaucauuaauuuuuaugacccucucgucuuccccagcgaugaguuugacgccuccaucucucaggugaacgagaaaauuaaccagagccuggcuuucauccgcaaguccgaugaacugcuccacaaugugaacgccggcaagagcacaaccaauauuaugaucacgaccauuaucaucguuauuaucgucauucugcuuucucugaucgccguggggcuccugcuguacugcaaagcuagaugaggacuaguggaagcauuuuccuggcugauuaaaagaaauuacucagcuauggucaucuguuccuguuagaaggcuaugcagcauauuauauacuaugcgcauguuaugaaaugcauaauaaaaaauuuuaaaaaaucuaaaagaucuaaaaaaaaaaaaaaaaaaaaaaaaaaaaaaaaaaaaaaaaaaaaaaaaaaaaaaaaaaaaaaaaugcaucccccccccccccccccccccccccccccccaaaggcucuuuucagagccaccagaauu

SEQ ID NO: 6014 - RNA, 1922 nt, Artificial Sequence
  mRNA product Design h-3 comprising derived and/or modified sequence from HRSV(A2)__F-del_DSCav1_mut5 (opt6)
gggagacccgugacccggaaguuguacggcuacgcgacuuucccucccacaaacccucgcgcccuuccuuuccuacuugggcccggcagaaagcuuaccauggaacuuuuaauacugaaagcaaaugccaucacaaccauacuaacugccgucacauucugcuuugcaucaggacaaaacauaacagaagaauuuuaccaauccacaugcucagcaguaucaaaaggauaucuaucggcacuuagaacuggaugguacacaaguguuauaacuauagaacucucaaacauaaaagaaaacaaaugcaauggaacagacgcaaaaguaaaacuaauaaaacaagaacucgauaaauauaaaaaugcaguaaccgaacuacaacuauuaaugcaaagcacacccgcaacaggcagcggaucagcaauagcaagcggagucgcaguauguaaaguacuacaucuagaaggagaagucaacaaaaucaaaucugcacuucuauccacaaacaaagcuguaguaucccuauccggaugcggagucucaguauuaacuuuuaaaguacuagaccuuaaaaacuacauagauaaacaacuauuaccaauacuaaauaaacaaucaugcagcauauccaauauagagacaguaauugaauuucaacaaaaaaacaacagauuacuagaaauuacucgugaauuuuccguaaaugccggagucacaacaccaguaucaaccuauaugcuaacaaacagcgaacuacuuagcuuaauaaaugacaugccaauaacaaaugaccaaaaaaaacuuaugucaaauaacguacaaaucgucagacaacaauccuacucuauaauguguauaauuaaagaagaaguccuagcauacguaguucaauuaccacucuauggaguaauagauacaccaugcuggaaacuacacacgucaccacuauguacaacaaacacaaaagaaggauccaauauaugccuaacaagaaccgacagaggcugguauugugacaacgcaggauccguuucauucuucccacaagcagaaaccuguaaaguacaaucuaauagaguauuuugcgacacaaugaacaguagaacacuaccaagcgagguuaaucuauguaacguagacauauucaauccaaaauaugauugcaaaauaaugacaucaaaaacagauguaucgucgaguguaauaacaagucugggagcuauaguaagcugcuacggcaagacgaaauguaccgcuucaaauaaaugcagaggaaucauuaaaacauucucgaacggaugcgacuacguaaguaauaaaggugucgacaccguaucaguagggaauacauuauacuacgucaacaaacaagaaggaaaaucucuauauguaaaaggagaaccaauaauaaauuucuaugacccucuaguauucccaucagaugaauuugacgcuuccauaucacaaguaaacgaaaaaaucaaucaaucuuuagcauucauacgaaaaagugaugaacuccuacacaacgucaacgcaggaaaaagcacaacaaauauaaugaucacaacaaucaucauaguaauaauaguaauacuacuaucauuaauagcaguaggauuauugcuuuacugcaaagcacgauagggacuaguggaagcauuuuccuggcugauuaaaagaaauuacucagcuauggucaucuguuccuguuagaaggcuaugcagcauauuauauacuaugcgcauguuaugaaaugcauaauaaaaaauuuuaaaaaaucuaaaagaucuaaaaaaaaaaaaaaaaaaaaaaaaaaaaaaaaaaaaaaaaaaaaaaaaaaaaaaaaaaaaaaaaugcaucccccccccccccccccccccccccccccccaaaggcucuuuucagagccaccagaauu

SEQ ID NO: 6015 - RNA, 1922 nt, Artificial Sequence
  mRNA product Design h-3 comprising derived and/or modified sequence from HRSV(A2)__F-del_DSCav1_mut5 (opt11)
gggagacccgugacccggaaguuguacggcuacgcgacuuucccucccacaaacccucgcgcccuuccuuuccuacuugggcccggcagaaagcuuaccauggaacuccucauccucaaagccaacgccauaaccacaauacucaccgccguaaccuucugcuuugcgucgggacaaaacaucaccgaagaguucuaccaauccacuugcuccgcaguaagcaaaggauaccucuccgcccugcgaaccgguugguacacaucagucaucacaaucgaacucucaaacauaaaagaaaacaaaugcaacggcaccgacgcaaaggucaaauuaaucaagcaagaacuagacaaauacaaaaacgccgucacagaacuccagcugcuaaugcagagcacacccgcaacuggcagcggauccgccaucgcaucaggagucgccgugugcaaaguccuacaccucgaaggagaagugaacaaaaucaaaucagcccuacucuccaccaacaaggccgucgucucccucuccggcugcggugucuccguccuaaccuucaaagugcuagaccucaagaacuacaucgacaaacaacuccuaccaauacucaacaagcaaucuugcuccaucuccaacaucgaaaccguaaucgaguuccaacagaagaacaaccgccuccucgaaaucacccgcgaguucucugucaacgcaggggucaccacucccgucuccacauacaugcucacaaacuccgaacuccucagccucaucaacgacaugcccauaaccaacgaccagaaaaagcuaaugagcaauaacguccaaaucguuagacaacaaaguuauuccaucaugugcaucaucaaagaagaaguccucgccuacgucguacaacucccccucuauggcgucaucgacacccccugcuggaaacugcacacaucaccccucugcaccacaaacaccaaagaaggcucaaacaucugccuaacucgcaccgaccgcggcugguacugcgacaacgccggcagcguaucauucuuuccccaagccgaaacaugcaaaguucaauccaaccgcgucuucugcgacacaaugaacuccagaacgcuccccagcgaagucaaccucuguaacguagacaucuucaacccuaaguacgacugcaaaaucaugaccuccaaaacugauguauccuccuccgucaucacaucccugggcgccaucgucagcugcuacggcaaaacaaaaugcacugccucaaacaaaugccgagguaucauaaagaccuucucaaacggaugcgauuacgucagcaacaaaggcgucgacaccgucagugucggcaacacccucuacuacgucaacaaacaagaaggaaaaucccucuacgucaaaggcgaacccaucaucaacuucuacgacccccucgucuuccccagcgacgaguucgacgccuccaucucacaagucaacgaaaagauaaaccaaucucuagccuucauccgcaaauccgaugaacuccugcauaacgucaacgccggcaaauccaccacaaacaucaugaucacuaccauaaucaucgucauaaucguaauccuccuaucucuuaucgcagucggccuacuacucuacugcaaagcccgcuaaggacuaguggaagcauuuuccuggcugauuaaaagaaauuacucagcuauggucaucuguuccuguuagaaggcuaugcagcauauuauauacuaugcgcauguuaugaaaugcauaauaaaaaauuuuaaaaaaucuaaaagaucuaaaaaaaaaaaaaaaaaaaaaaaaaaaaaaaaaaaaaaaaaaaaaaaaaaaaaaaaaaaaaaaaugcaucccccccccccccccccccccccccccccccaaaggcucuuuucagagccaccagaauu

SEQ ID NO: 6016 - RNA, 1985 nt, Artificial Sequence
  mRNA product Design h-4 comprising derived and/or modified sequence from HRSV(A2)__F-del_DSCav1_mut5 (opt1)
gggagagggcgcuuggcuugcaaggacccugagcugcggcauugaagcacacccaacccaacucgacugaagucagccucacugaaccggaucugagaaucuucucucucugggcuugccagggcucuccgaaccuagcuagcauccucuucaauuccaacuagaaagcuuaccauggagcugcucauccugaaggccaacgccaucaccaccauccugacggcggugaccuucugcuucgccagcggccagaacaucaccgaggaguucuaccaguccacgugcagcgccgucuccaagggguaccucagcgcccugcggaccggcugguacaccuccgugaucaccaucgagcugagcaacaucaaggagaacaagugcaacgggaccgacgccaaggugaagcucaucaagcaggagcuggacaaguacaagaacgcggucacggagcugcagcuccugaugcaguccaccccggcaaccggcuccggcuccgccaucgcgagcggcgucgccgugugcaaggugcugcaccucgagggggaggucaacaagaucaagagcgcccugcuguccaccaacaaggccguggugagccucuccggcugcggcgucagcgugcugaccuucaaggugcuggaccucaagaacuacaucgacaagcagcugcugcccauccugaacaagcagagcugcuccaucagcaacaucgagacggugaucgaguuccagcagaagaacaaccggcuccuggagaucacccgcgaguucagcgugaacgccggggucaccacccccguguccacguacaugcugaccaacagcgagcuccugucccugaucaacgacaugccgaucaccaacgaccagaagaagcucaugagcaacaacgugcagaucguccggcagcaguccuacagcaucaugugcaucaucaaggaggaggugcuggcguacgugguccagcugccccucuacggcgugaucgacacccccugcuggaagcugcacacgagcccccugugcaccaccaacaccaaggagggguccaacaucugccucacgcgcaccgaccggggcugguacugcgacaacgccggcagcgucuccuucuucccgcaggccgagaccugcaaggugcagagcaaccgcguguucugcgacaccaugaacucccggacgcugcccagcgagguaaaccucugcaacgucgacaucuucaaccccaaguacgacugcaagaucaugaccuccaagaccgacgugagcuccagcgugaucaccucccugggggccaucgucagcugcuacggcaagacgaagugcaccgccagcaacaagugccgggggaucaucaagaccuucuccaacggcugcgacuacgugagcaacaagggcguggacaccguguccgucgggaacacccuguacuacgugaacaagcaggagggcaagagccucuacgugaagggggagcccaucaucaacuucuacgacccgcuggucuuccccuccgacgaguucgacgcgagcaucucccaggugaacgagaagaucaaccagagccuggccuucauccgcaaguccgacgagcugcuccacaacgugaacgccggcaagagcacgaccaacaucaugaucaccaccaucaucaucgucaucaucgugauccugcugucccucaucgccguggggcugcugcucuacugcaaggcccggugaggacuaguaauaaggaaacuguaugaaugucugugggcaggaagugaagagauccuucuguaaagguuuuuggaauuaugucugcugaauaauaaacuuuuuugaaauaauaaaucugguagaaaaaugagaucuaaaaaaaaaaaaaaaaaaaaaaaaaaaaaaaaaaaaaaaaaaaaaaaaaaaaaaaaaaaaaaaaugcaucccccccccccccccccccccccccccccccaaaggcucuuuucagagccaccagaauu

SEQ ID NO: 6017 - RNA, 1985 nt, Artificial Sequence
  mRNA product Design h-4 comprising derived and/or modified sequence from HRSV(A2)__F-del_DSCav1_mut5 (opt1)
gggagagggcgcuuggcuugcaaggacccugagcugcggcauugaagcacacccaacccaacucgacugaagucagccucacugaaccggaucugagaaucuucucucucugggcuugccagggcucuccgaaccuagcuagcauccucuucaauuccaacuagaaagcuuaccauggagcugcucauccugaaggccaacgccaucaccaccauccugacggcggugaccuucugcuucgccagcggccagaacaucaccgaggaguucuaccaguccacgugcagcgccgucuccaagggguaccucagcgcccugcgcaccggcugguacaccuccgugaucaccaucgagcugagcaacaucaaggagaacaagugcaacgggaccgacgccaaggugaagcucaucaagcaggagcuggacaaguacaagaacgcggucacggagcugcagcuccugaugcaguccacccccgccaccggcagcggguccgccaucgccagcggcguggcggugugcaagguccugcaccucgagggcgaggugaacaagaucaaguccgcccugcugagcaccaacaaggccguggucucccucagcgggugcggcguguccgugcugacguucaagguccuggaccucaagaacuacaucgacaagcagcugcugccgauccucaacaagcagagcugcuccaucagcaacaucgagaccgugaucgaguuccagcagaagaacaaccggcugcuggagaucacccgcgaguucuccgugaacgccggggucaccacgcccgugagcaccuacaugcucaccaacagcgagcugcugucccucaucaacgacaugcccaucaccaacgaccagaagaagcugaugagcaacaacgugcagaucguccggcagcaguccuacagcaucaugugcaucaucaaggaggaggugcuggccuacgugguccagcucccccuguacggcgugaucgacacgccgugcuggaagcugcacaccagcccccucugcaccaccaacacgaaggagggguccaacaucugccugacccgcaccgaccggggcugguacugcgacaacgcgggcuccgugagcuucuucccccaggccgagaccugcaagguccaguccaaccgcguguucugcgacacgaugaacagccggacccuccccuccgaggucaaccugugcaacguggacaucuucaacccgaaguacgacugcaagaucaugaccagcaagaccgacguguccagcuccgucaucacgagccugggggccaucguguccugcuacggcaagaccaagugcaccgccagcaacaagugccgggggaucaucaagaccuucuccaacggcugcgacuacgugagcaacaagggcgucgacacggugagcguggggaacacccucuacuacgucaacaagcaggagggcaagucccuguacgugaagggggagcccaucaucaacuucuacgacccccugguguuccccagcgacgaguucgacgccuccaucagccaggucaacgagaagaucaaccagucccucgcguucauccgcaagagcgacgagcugcugcacaacgugaacgccggcaaguccaccaccaacaucaugaucaccacgaucaucaucgugaucaucgucauccuccugagccugaucgccguggggcuccugcuguacugcaaggcccggugaggacuaguaauaaggaaacuguaugaaugucugugggcaggaagugaagagauccuucuguaaagguuuuuggaauuaugucugcugaauaauaaacuuuuuugaaauaauaaaucugguagaaaaaugagaucuaaaaaaaaaaaaaaaaaaaaaaaaaaaaaaaaaaaaaaaaaaaaaaaaaaaaaaaaaaaaaaaaugcaucccccccccccccccccccccccccccccccaaaggcucuuuucagagccaccagaauu

SEQ ID NO: 6018 - RNA, 1985 nt, Artificial Sequence
  mRNA product Design h-4 comprising derived and/or modified sequence from HRSV(A2)__F-del_DSCav1_mut5 (opt2)
gggagagggcgcuuggcuugcaaggacccugagcugcggcauugaagcacacccaacccaacucgacugaagucagccucacugaaccggaucugagaaucuucucucucugggcuugccagggcucuccgaaccuagcuagcauccucuucaauuccaacuagaaagcuuaccauggagcuccucauccucaaggccaacgccaucaccaccauccucaccgccgucaccuucugcuucgccuccggccagaacaucaccgaggaguucuaccaguccaccugcuccgccgucuccaagggcuaccucuccgcccuccgcaccggcugguacaccuccgucaucaccaucgagcucuccaacaucaaggagaacaagugcaacggcaccgacgccaaggucaagcucaucaagcaggagcucgacaaguacaagaacgccgucaccgagcuccagcuccucaugcaguccacccccgccaccggcuccggcuccgccaucgccuccggcgucgccgucugcaagguccuccaccucgagggcgaggucaacaagaucaaguccgcccuccucuccaccaacaaggccgucgucucccucuccggcugcggcgucuccguccucaccuucaagguccucgaccucaagaacuacaucgacaagcagcuccuccccauccucaacaagcaguccugcuccaucuccaacaucgagaccgucaucgaguuccagcagaagaacaaccgccuccucgagaucacccgcgaguucuccgucaacgccggcgucaccacccccgucuccaccuacaugcucaccaacuccgagcuccucucccucaucaacgacaugcccaucaccaacgaccagaagaagcucauguccaacaacguccagaucguccgccagcaguccuacuccaucaugugcaucaucaaggaggagguccucgccuacgucguccagcucccccucuacggcgucaucgacacccccugcuggaagcuccacaccuccccccucugcaccaccaacaccaaggagggcuccaacaucugccucacccgcaccgaccgcggcugguacugcgacaacgccggcuccgucuccuucuucccccaggccgagaccugcaagguccaguccaaccgcgucuucugcgacaccaugaacucccgcacccuccccuccgaggucaaccucugcaacgucgacaucuucaaccccaaguacgacugcaagaucaugaccuccaagaccgacgucuccuccuccgucaucaccucccucggcgccaucgucuccugcuacggcaagaccaagugcaccgccuccaacaagugccgcggcaucaucaagaccuucuccaacggcugcgacuacgucuccaacaagggcgucgacaccgucuccgucggcaacacccucuacuacgucaacaagcaggagggcaagucccucuacgucaagggcgagcccaucaucaacuucuacgacccccucgucuuccccuccgacgaguucgacgccuccaucucccaggucaacgagaagaucaaccagucccucgccuucauccgcaaguccgacgagcuccuccacaacgucaacgccggcaaguccaccaccaacaucaugaucaccaccaucaucaucgucaucaucgucauccuccucucccucaucgccgucggccuccuccucuacugcaaggcccgcugaggacuaguaauaaggaaacuguaugaaugucugugggcaggaagugaagagauccuucuguaaagguuuuuggaauuaugucugcugaauaauaaacuuuuuugaaauaauaaaucugguagaaaaaugagaucuaaaaaaaaaaaaaaaaaaaaaaaaaaaaaaaaaaaaaaaaaaaaaaaaaaaaaaaaaaaaaaaaugcaucccccccccccccccccccccccccccccccaaaggcucuuuucagagccaccagaauu

SEQ ID NO: 6019 - RNA, 1985 nt, Artificial Sequence
  mRNA product Design h-4 comprising derived and/or modified sequence from HRSV(A2)__F-del_DSCav1_mut5 (opt3)
gggagagggcgcuuggcuugcaaggacccugagcugcggcauugaagcacacccaacccaacucgacugaagucagccucacugaaccggaucugagaaucuucucucucugggcuugccagggcucuccgaaccuagcuagcauccucuucaauuccaacuagaaagcuuaccauggagcugcucauccuuaaggccaacgcuauuaccacaauacugacugcagugacguucugcuuugccagcggccagaauaucaccgaagaguucuaccaauccacauguucugcggucucaaaaggguauuugagugcuuuaagaacuggaugguacaccagcguuauuacaaucgaacuguccaacauuaaggagaauaaaugcaacgguaccgacgccaaggugaaacuaaucaagcaggaacucgauaaguauaaaaaugcaguaacugagcugcagcuucugaugcagucuacacccgccaccggcucggggucagcuauagcaagcggaguggccgucuguaagguguugcaccucgagggcgaaguuaacaaaaucaagagugcucugcuguccacgaauaaagccguggucucucucagcgguugcgggguguccguauuaacuuuuaagguucuggaccuuaagaacuacauugauaaacaauugcugccuauccuaaauaagcagucauguaguauuagcaacaucgagaccgugauagaguuccagcagaaaaauaacaggcuccuggaaauuacacgggaguuuucugucaaugcgggagugacuaccccaguguccacauauaugcuuaccaacucagaacuguugagccucaucaaugacaugccgauuacgaacgaucaaaagaaacugaugaguaacaauguccagaucguucgccagcagucuuacuccaucaugugcauuauaaaggaggaaguguuagcauauguagugcaacugccccucuacggcgucaucgacacuccuuguuggaaacuucauacaagcccacugugcaccacuaacacaaaggagggcucgaauauuuguuugacccgaacggaucgugggugguacugcgacaacgccggaucuguguccuucuuuccccaggcugaaaccuguaagguucagucaaauagaguguucugcgauacaaugaacaguagaacucugccuagcgaggucaaucucugcaacguggacaucuuuaauccaaaauaugauuguaagauaaugaccuccaaaacagacguaucuagcucaguuauuaccagucugggugccaucguguccugcuacggcaagacuaaauguacagcaagcaacaagugcagggggaucauuaagaccuucucuaauggaugugauuaugucucaaacaaaggcguggacacugucaguguggguaauacgcuuuacuauguuaacaagcaagaggggaaaagccuguacgugaagggagaacccaucauuaauuuuuaugacccuuugguauucccauccgaugaguuugacgcuucuauaucgcaggucaacgagaaaaucaaccagagccucgccuucauucggaaguccgaugaacuguuacacaaugugaacgcgggcaagucaacaaccaauaucaugaucacuaccauuauaaucguuauuaucgugauucugcuaagucucaucgccgucggccugcuuuuguacugcaaagcacgcugaggacuaguaauaaggaaacuguaugaaugucugugggcaggaagugaagagauccuucuguaaagguuuuuggaauuaugucugcugaauaauaaacuuuuuugaaauaauaaaucugguagaaaaaugagaucuaaaaaaaaaaaaaaaaaaaaaaaaaaaaaaaaaaaaaaaaaaaaaaaaaaaaaaaaaaaaaaaaugcaucccccccccccccccccccccccccccccccaaaggcucuuuucagagccaccagaauu

SEQ ID NO: 6020 - RNA, 1985 nt, Artificial Sequence
  mRNA product Design h-4 comprising derived and/or modified sequence from HRSV(A2)__F-del_DSCav1_mut5 (opt4)
gggagagggcgcuuggcuugcaaggacccugagcugcggcauugaagcacacccaacccaacucgacugaagucagccucacugaaccggaucugagaaucuucucucucugggcuugccagggcucuccgaaccuagcuagcauccucuucaauuccaacuagaaagcuuaccauggagcugcugauccugaaggccaacgccaucaccaccauccugaccgccgugaccuucugcuucgccagcggccagaacaucaccgaggaguucuaccagagcaccugcagcgccgugagcaagggcuaccugagcgcccugagaaccggcugguacaccagcgugaucaccaucgagcugagcaacaucaaggagaacaagugcaacggcaccgacgccaaggugaagcugaucaagcaggagcuggacaaguacaagaacgccgugaccgagcugcagcugcugaugcagagcacccccgccaccggcagcggcagcgccaucgccagcggcguggccgugugcaaggugcugcaccuggagggcgaggugaacaagaucaagagcgcccugcugagcaccaacaaggccguggugagccugagcggcugcggcgugagcgugcugaccuucaaggugcuggaccugaagaacuacaucgacaagcagcugcugcccauccugaacaagcagagcugcagcaucagcaacaucgagaccgugaucgaguuccagcagaagaacaacagacugcuggagaucaccagagaguucagcgugaacgccggcgugaccacccccgugagcaccuacaugcugaccaacagcgagcugcugagccugaucaacgacaugcccaucaccaacgaccagaagaagcugaugagcaacaacgugcagaucgugagacagcagagcuacagcaucaugugcaucaucaaggaggaggugcuggccuacguggugcagcugccccuguacggcgugaucgacacccccugcuggaagcugcacaccagcccccugugcaccaccaacaccaaggagggcagcaacaucugccugaccagaaccgacagaggcugguacugcgacaacgccggcagcgugagcuucuucccccaggccgagaccugcaaggugcagagcaacagaguguucugcgacaccaugaacagcagaacccugcccagcgaggugaaccugugcaacguggacaucuucaaccccaaguacgacugcaagaucaugaccagcaagaccgacgugagcagcagcgugaucaccagccugggcgccaucgugagcugcuacggcaagaccaagugcaccgccagcaacaagugcagaggcaucaucaagaccuucagcaacggcugcgacuacgugagcaacaagggcguggacaccgugagcgugggcaacacccuguacuacgugaacaagcaggagggcaagagccuguacgugaagggcgagcccaucaucaacuucuacgacccccugguguuccccagcgacgaguucgacgccagcaucagccaggugaacgagaagaucaaccagagccuggccuucaucagaaagagcgacgagcugcugcacaacgugaacgccggcaagagcaccaccaacaucaugaucaccaccaucaucaucgugaucaucgugauccugcugagccugaucgccgugggccugcugcuguacugcaaggccagaugaggacuaguaauaaggaaacuguaugaaugucugugggcaggaagugaagagauccuucuguaaagguuuuuggaauuaugucugcugaauaauaaacuuuuuugaaauaauaaaucugguagaaaaaugagaucuaaaaaaaaaaaaaaaaaaaaaaaaaaaaaaaaaaaaaaaaaaaaaaaaaaaaaaaaaaaaaaaaugcaucccccccccccccccccccccccccccccccaaaggcucuuuucagagccaccagaauu

SEQ ID NO: 6021 - RNA, 1985 nt, Artificial Sequence
  mRNA product Design h-4 comprising derived and/or modified sequence from HRSV(A2)__F-del_DSCav1_mut5 (opt5)
gggagagggcgcuuggcuugcaaggacccugagcugcggcauugaagcacacccaacccaacucgacugaagucagccucacugaaccggaucugagaaucuucucucucugggcuugccagggcucuccgaaccuagcuagcauccucuucaauuccaacuagaaagcuuaccauggagcugcucauccugaaggccaacgcuauuaccacaauccuuacggccgugaccuucugcuuugcgagcggccagaauauuacagaagaguucuaccaauccaccuguucugcugucagcaaaggguaucuguccgcccucagaacaggaugguacaccucuguuaucacaauugaacugagcaacaucaaggagaauaaaugcaacggcaccgacgccaaggugaaacuuaucaagcaggaacuggauaaguauaaaaaugcugugacggagcuccagcugcugaugcaguccacccccgccacagggucuggaagcgcuauugccuccggcgucgcgguguguaagguucuccaccuggagggggaagugaacaaaaucaagagcgcccuucugucuaccaauaaagcugucgugucccucagcggaugcggcguuucugugcugacauuuaagguccuugaccugaagaacuacauugauaaacaacuccugccuauccugaauaagcaguccuguagcauuucuaacaucgagaccgugauugaguuccagcagaaaaauaaccggcuccuggaaaucacgcgcgaguuuuccgugaaugccggcgucacaaccccgguuagcacauauaugcuuaccaacuccgaacugcucucucugaucaaugacaugcccauuaccaacgaucaaaagaaacuuaugagcaacaaugugcagaucgugagacagcaguccuacagcauuaugugcaucauuaaggaggaaguccuggcuuaugugguucaacucccucuguacggggugaucgacacacccuguuggaaacugcauacgucuccucucugcaccacaaacaccaaggagggauccaauaucugucugacacggaccgaucgcggcugguacugcgacaacgccgggagcgucucuuucuuuccccaggcggaaacguguaaggugcagagcaauagaguuuucugcgauacaaugaacuccagaacccugccuucugaggugaaucucugcaacgucgacauuuuuaauccgaaauaugauuguaagaucaugaccagcaaaacagacguguccagcucugucauuaccucccugggagccaucgugagcugcuacggcaagacaaaauguacggcuucuaacaagugccgggggauuaucaagaccuucuccaauggaugugauuauguuagcaacaaaggcguggacacagucuccgugggcaauacccuuuacuauguuaacaagcaagaggggaaaucucuguacgugaagggagaacccaucauuaauuuuuaugacccucucgucuuccccagcgaugaguuugacgccuccaucucucaggugaacgagaaaauuaaccagagccuggcuuucauccgcaaguccgaugaacugcuccacaaugugaacgccggcaagagcacaaccaauauuaugaucacgaccauuaucaucguuauuaucgucauucugcuuucucugaucgccguggggcuccugcuguacugcaaagcuagaugaggacuaguaauaaggaaacuguaugaaugucugugggcaggaagugaagagauccuucuguaaagguuuuuggaauuaugucugcugaauaauaaacuuuuuugaaauaauaaaucugguagaaaaaugagaucuaaaaaaaaaaaaaaaaaaaaaaaaaaaaaaaaaaaaaaaaaaaaaaaaaaaaaaaaaaaaaaaaugcaucccccccccccccccccccccccccccccccaaaggcucuuuucagagccaccagaauu

SEQ ID NO: 6022 - RNA, 1985 nt, Artificial Sequence
  mRNA product Design h-4 comprising derived and/or modified sequence from HRSV(A2)__F-del_DSCav1_mut5 (opt6)
gggagagggcgcuuggcuugcaaggacccugagcugcggcauugaagcacacccaacccaacucgacugaagucagccucacugaaccggaucugagaaucuucucucucugggcuugccagggcucuccgaaccuagcuagcauccucuucaauuccaacuagaaagcuuaccauggaacuuuuaauacugaaagcaaaugccaucacaaccauacuaacugccgucacauucugcuuugcaucaggacaaaacauaacagaagaauuuuaccaauccacaugcucagcaguaucaaaaggauaucuaucggcacuuagaacuggaugguacacaaguguuauaacuauagaacucucaaacauaaaagaaaacaaaugcaauggaacagacgcaaaaguaaaacuaauaaaacaagaacucgauaaauauaaaaaugcaguaaccgaacuacaacuauuaaugcaaagcacacccgcaacaggcagcggaucagcaauagcaagcggagucgcaguauguaaaguacuacaucuagaaggagaagucaacaaaaucaaaucugcacuucuauccacaaacaaagcuguaguaucccuauccggaugcggagucucaguauuaacuuuuaaaguacuagaccuuaaaaacuacauagauaaacaacuauuaccaauacuaaauaaacaaucaugcagcauauccaauauagagacaguaauugaauuucaacaaaaaaacaacagauuacuagaaauuacucgugaauuuuccguaaaugccggagucacaacaccaguaucaaccuauaugcuaacaaacagcgaacuacuuagcuuaauaaaugacaugccaauaacaaaugaccaaaaaaaacuuaugucaaauaacguacaaaucgucagacaacaauccuacucuauaauguguauaauuaaagaagaaguccuagcauacguaguucaauuaccacucuauggaguaauagauacaccaugcuggaaacuacacacgucaccacuauguacaacaaacacaaaagaaggauccaauauaugccuaacaagaaccgacagaggcugguauugugacaacgcaggauccguuucauucuucccacaagcagaaaccuguaaaguacaaucuaauagaguauuuugcgacacaaugaacaguagaacacuaccaagcgagguuaaucuauguaacguagacauauucaauccaaaauaugauugcaaaauaaugacaucaaaaacagauguaucgucgaguguaauaacaagucugggagcuauaguaagcugcuacggcaagacgaaauguaccgcuucaaauaaaugcagaggaaucauuaaaacauucucgaacggaugcgacuacguaaguaauaaaggugucgacaccguaucaguagggaauacauuauacuacgucaacaaacaagaaggaaaaucucuauauguaaaaggagaaccaauaauaaauuucuaugacccucuaguauucccaucagaugaauuugacgcuuccauaucacaaguaaacgaaaaaaucaaucaaucuuuagcauucauacgaaaaagugaugaacuccuacacaacgucaacgcaggaaaaagcacaacaaauauaaugaucacaacaaucaucauaguaauaauaguaauacuacuaucauuaauagcaguaggauuauugcuuuacugcaaagcacgauagggacuaguaauaaggaaacuguaugaaugucugugggcaggaagugaagagauccuucuguaaagguuuuuggaauuaugucugcugaauaauaaacuuuuuugaaauaauaaaucugguagaaaaaugagaucuaaaaaaaaaaaaaaaaaaaaaaaaaaaaaaaaaaaaaaaaaaaaaaaaaaaaaaaaaaaaaaaaugcaucccccccccccccccccccccccccccccccaaaggcucuuuucagagccaccagaauu

SEQ ID NO: 6023 - RNA, 1985 nt, Artificial Sequence
  mRNA product Design h-4 comprising derived and/or modified sequence from HRSV(A2)__F-del_DSCav1_mut5 (opt11)
gggagagggcgcuuggcuugcaaggacccugagcugcggcauugaagcacacccaacccaacucgacugaagucagccucacugaaccggaucugagaaucuucucucucugggcuugccagggcucuccgaaccuagcuagcauccucuucaauuccaacuagaaagcuuaccauggaacuccucauccucaaagccaacgccauaaccacaauacucaccgccguaaccuucugcuuugcgucgggacaaaacaucaccgaagaguucuaccaauccacuugcuccgcaguaagcaaaggauaccucuccgcccugcgaaccgguugguacacaucagucaucacaaucgaacucucaaacauaaaagaaaacaaaugcaacggcaccgacgcaaaggucaaauuaaucaagcaagaacuagacaaauacaaaaacgccgucacagaacuccagcugcuaaugcagagcacacccgcaacuggcagcggauccgccaucgcaucaggagucgccgugugcaaaguccuacaccucgaaggagaagugaacaaaaucaaaucagcccuacucuccaccaacaaggccgucgucucccucuccggcugcggugucuccguccuaaccuucaaagugcuagaccucaagaacuacaucgacaaacaacuccuaccaauacucaacaagcaaucuugcuccaucuccaacaucgaaaccguaaucgaguuccaacagaagaacaaccgccuccucgaaaucacccgcgaguucucugucaacgcaggggucaccacucccgucuccacauacaugcucacaaacuccgaacuccucagccucaucaacgacaugcccauaaccaacgaccagaaaaagcuaaugagcaauaacguccaaaucguuagacaacaaaguuauuccaucaugugcaucaucaaagaagaaguccucgccuacgucguacaacucccccucuauggcgucaucgacacccccugcuggaaacugcacacaucaccccucugcaccacaaacaccaaagaaggcucaaacaucugccuaacucgcaccgaccgcggcugguacugcgacaacgccggcagcguaucauucuuuccccaagccgaaacaugcaaaguucaauccaaccgcgucuucugcgacacaaugaacuccagaacgcuccccagcgaagucaaccucuguaacguagacaucuucaacccuaaguacgacugcaaaaucaugaccuccaaaacugauguauccuccuccgucaucacaucccugggcgccaucgucagcugcuacggcaaaacaaaaugcacugccucaaacaaaugccgagguaucauaaagaccuucucaaacggaugcgauuacgucagcaacaaaggcgucgacaccgucagugucggcaacacccucuacuacgucaacaaacaagaaggaaaaucccucuacgucaaaggcgaacccaucaucaacuucuacgacccccucgucuuccccagcgacgaguucgacgccuccaucucacaagucaacgaaaagauaaaccaaucucuagccuucauccgcaaauccgaugaacuccugcauaacgucaacgccggcaaauccaccacaaacaucaugaucacuaccauaaucaucgucauaaucguaauccuccuaucucuuaucgcagucggccuacuacucuacugcaaagcccgcuaaggacuaguaauaaggaaacuguaugaaugucugugggcaggaagugaagagauccuucuguaaagguuuuuggaauuaugucugcugaauaauaaacuuuuuugaaauaauaaaucugguagaaaaaugagaucuaaaaaaaaaaaaaaaaaaaaaaaaaaaaaaaaaaaaaaaaaaaaaaaaaaaaaaaaaaaaaaaaugcaucccccccccccccccccccccccccccccccaaaggcucuuuucagagccaccagaauu

SEQ ID NO: 6024 - RNA, 2001 nt, Artificial Sequence
  mRNA product Design h-5 comprising derived and/or modified sequence from HRSV(A2)__F-del_DSCav1_mut5 (opt1)
gggagagggcgcuuggcuugcaaggacccugagcugcggcauugaagcacacccaacccaacucgacugaagucagccucacugaaccggaucugagaaucuucucucucugggcuugccagggcucuccgaaccuagcuagcauccucuucaauuccaacuagaaagcuuaccauggagcugcucauccugaaggccaacgccaucaccaccauccugacggcggugaccuucugcuucgccagcggccagaacaucaccgaggaguucuaccaguccacgugcagcgccgucuccaagggguaccucagcgcccugcggaccggcugguacaccuccgugaucaccaucgagcugagcaacaucaaggagaacaagugcaacgggaccgacgccaaggugaagcucaucaagcaggagcuggacaaguacaagaacgcggucacggagcugcagcuccugaugcaguccaccccggcaaccggcuccggcuccgccaucgcgagcggcgucgccgugugcaaggugcugcaccucgagggggaggucaacaagaucaagagcgcccugcuguccaccaacaaggccguggugagccucuccggcugcggcgucagcgugcugaccuucaaggugcuggaccucaagaacuacaucgacaagcagcugcugcccauccugaacaagcagagcugcuccaucagcaacaucgagacggugaucgaguuccagcagaagaacaaccggcuccuggagaucacccgcgaguucagcgugaacgccggggucaccacccccguguccacguacaugcugaccaacagcgagcuccugucccugaucaacgacaugccgaucaccaacgaccagaagaagcucaugagcaacaacgugcagaucguccggcagcaguccuacagcaucaugugcaucaucaaggaggaggugcuggcguacgugguccagcugccccucuacggcgugaucgacacccccugcuggaagcugcacacgagcccccugugcaccaccaacaccaaggagggguccaacaucugccucacgcgcaccgaccggggcugguacugcgacaacgccggcagcgucuccuucuucccgcaggccgagaccugcaaggugcagagcaaccgcguguucugcgacaccaugaacucccggacgcugcccagcgagguaaaccucugcaacgucgacaucuucaaccccaaguacgacugcaagaucaugaccuccaagaccgacgugagcuccagcgugaucaccucccugggggccaucgucagcugcuacggcaagacgaagugcaccgccagcaacaagugccgggggaucaucaagaccuucuccaacggcugcgacuacgugagcaacaagggcguggacaccguguccgucgggaacacccuguacuacgugaacaagcaggagggcaagagccucuacgugaagggggagcccaucaucaacuucuacgacccgcuggucuuccccuccgacgaguucgacgcgagcaucucccaggugaacgagaagaucaaccagagccuggccuucauccgcaaguccgacgagcugcuccacaacgugaacgccggcaagagcacgaccaacaucaugaucaccaccaucaucaucgucaucaucgugauccugcugucccucaucgccguggggcugcugcucuacugcaaggcccggugaggacuaguacuggcugcaucucccuuuccucuguccuccauccuucucccaggauggugaagggggaccugguacccagugauccccaccccaggauccuaaaucaugacuuaccugcuaauaaaaacucauuggaaaagugagaagaucuaaaaaaaaaaaaaaaaaaaaaaaaaaaaaaaaaaaaaaaaaaaaaaaaaaaaaaaaaaaaaaaaugcaucccccccccccccccccccccccccccccccaaaggcucuuuucagagccaccagaauu

SEQ ID NO: 6025 - RNA, 2001 nt, Artificial Sequence
  mRNA product Design h-5 comprising derived and/or modified sequence from HRSV(A2)__F-del_DSCav1_mut5 (opt1)
gggagagggcgcuuggcuugcaaggacccugagcugcggcauugaagcacacccaacccaacucgacugaagucagccucacugaaccggaucugagaaucuucucucucugggcuugccagggcucuccgaaccuagcuagcauccucuucaauuccaacuagaaagcuuaccauggagcugcucauccugaaggccaacgccaucaccaccauccugacggcggugaccuucugcuucgccagcggccagaacaucaccgaggaguucuaccaguccacgugcagcgccgucuccaagggguaccucagcgcccugcgcaccggcugguacaccuccgugaucaccaucgagcugagcaacaucaaggagaacaagugcaacgggaccgacgccaaggugaagcucaucaagcaggagcuggacaaguacaagaacgcggucacggagcugcagcuccugaugcaguccacccccgccaccggcagcggguccgccaucgccagcggcguggcggugugcaagguccugcaccucgagggcgaggugaacaagaucaaguccgcccugcugagcaccaacaaggccguggucucccucagcgggugcggcguguccgugcugacguucaagguccuggaccucaagaacuacaucgacaagcagcugcugccgauccucaacaagcagagcugcuccaucagcaacaucgagaccgugaucgaguuccagcagaagaacaaccggcugcuggagaucacccgcgaguucuccgugaacgccggggucaccacgcccgugagcaccuacaugcucaccaacagcgagcugcugucccucaucaacgacaugcccaucaccaacgaccagaagaagcugaugagcaacaacgugcagaucguccggcagcaguccuacagcaucaugugcaucaucaaggaggaggugcuggccuacgugguccagcucccccuguacggcgugaucgacacgccgugcuggaagcugcacaccagcccccucugcaccaccaacacgaaggagggguccaacaucugccugacccgcaccgaccggggcugguacugcgacaacgcgggcuccgugagcuucuucccccaggccgagaccugcaagguccaguccaaccgcguguucugcgacacgaugaacagccggacccuccccuccgaggucaaccugugcaacguggacaucuucaacccgaaguacgacugcaagaucaugaccagcaagaccgacguguccagcuccgucaucacgagccugggggccaucguguccugcuacggcaagaccaagugcaccgccagcaacaagugccgggggaucaucaagaccuucuccaacggcugcgacuacgugagcaacaagggcgucgacacggugagcguggggaacacccucuacuacgucaacaagcaggagggcaagucccuguacgugaagggggagcccaucaucaacuucuacgacccccugguguuccccagcgacgaguucgacgccuccaucagccaggucaacgagaagaucaaccagucccucgcguucauccgcaagagcgacgagcugcugcacaacgugaacgccggcaaguccaccaccaacaucaugaucaccacgaucaucaucgugaucaucgucauccuccugagccugaucgccguggggcuccugcuguacugcaaggcccggugaggacuaguacuggcugcaucucccuuuccucuguccuccauccuucucccaggauggugaagggggaccugguacccagugauccccaccccaggauccuaaaucaugacuuaccugcuaauaaaaacucauuggaaaagugagaagaucuaaaaaaaaaaaaaaaaaaaaaaaaaaaaaaaaaaaaaaaaaaaaaaaaaaaaaaaaaaaaaaaaugcaucccccccccccccccccccccccccccccccaaaggcucuuuucagagccaccagaauu

SEQ ID NO: 6026 - RNA, 2001 nt, Artificial Sequence
  mRNA product Design h-5 comprising derived and/or modified sequence from HRSV(A2)__F-del_DSCav1_mut5 (opt2)
gggagagggcgcuuggcuugcaaggacccugagcugcggcauugaagcacacccaacccaacucgacugaagucagccucacugaaccggaucugagaaucuucucucucugggcuugccagggcucuccgaaccuagcuagcauccucuucaauuccaacuagaaagcuuaccauggagcuccucauccucaaggccaacgccaucaccaccauccucaccgccgucaccuucugcuucgccuccggccagaacaucaccgaggaguucuaccaguccaccugcuccgccgucuccaagggcuaccucuccgcccuccgcaccggcugguacaccuccgucaucaccaucgagcucuccaacaucaaggagaacaagugcaacggcaccgacgccaaggucaagcucaucaagcaggagcucgacaaguacaagaacgccgucaccgagcuccagcuccucaugcaguccacccccgccaccggcuccggcuccgccaucgccuccggcgucgccgucugcaagguccuccaccucgagggcgaggucaacaagaucaaguccgcccuccucuccaccaacaaggccgucgucucccucuccggcugcggcgucuccguccucaccuucaagguccucgaccucaagaacuacaucgacaagcagcuccuccccauccucaacaagcaguccugcuccaucuccaacaucgagaccgucaucgaguuccagcagaagaacaaccgccuccucgagaucacccgcgaguucuccgucaacgccggcgucaccacccccgucuccaccuacaugcucaccaacuccgagcuccucucccucaucaacgacaugcccaucaccaacgaccagaagaagcucauguccaacaacguccagaucguccgccagcaguccuacuccaucaugugcaucaucaaggaggagguccucgccuacgucguccagcucccccucuacggcgucaucgacacccccugcuggaagcuccacaccuccccccucugcaccaccaacaccaaggagggcuccaacaucugccucacccgcaccgaccgcggcugguacugcgacaacgccggcuccgucuccuucuucccccaggccgagaccugcaagguccaguccaaccgcgucuucugcgacaccaugaacucccgcacccuccccuccgaggucaaccucugcaacgucgacaucuucaaccccaaguacgacugcaagaucaugaccuccaagaccgacgucuccuccuccgucaucaccucccucggcgccaucgucuccugcuacggcaagaccaagugcaccgccuccaacaagugccgcggcaucaucaagaccuucuccaacggcugcgacuacgucuccaacaagggcgucgacaccgucuccgucggcaacacccucuacuacgucaacaagcaggagggcaagucccucuacgucaagggcgagcccaucaucaacuucuacgacccccucgucuuccccuccgacgaguucgacgccuccaucucccaggucaacgagaagaucaaccagucccucgccuucauccgcaaguccgacgagcuccuccacaacgucaacgccggcaaguccaccaccaacaucaugaucaccaccaucaucaucgucaucaucgucauccuccucucccucaucgccgucggccuccuccucuacugcaaggcccgcugaggacuaguacuggcugcaucucccuuuccucuguccuccauccuucucccaggauggugaagggggaccugguacccagugauccccaccccaggauccuaaaucaugacuuaccugcuaauaaaaacucauuggaaaagugagaagaucuaaaaaaaaaaaaaaaaaaaaaaaaaaaaaaaaaaaaaaaaaaaaaaaaaaaaaaaaaaaaaaaaugcaucccccccccccccccccccccccccccccccaaaggcucuuuucagagccaccagaauu

SEQ ID NO: 6027 - RNA, 2001 nt, Artificial Sequence
  mRNA product Design h-5 comprising derived and/or modified sequence from HRSV(A2)__F-del_DSCav1_mut5 (opt3)
gggagagggcgcuuggcuugcaaggacccugagcugcggcauugaagcacacccaacccaacucgacugaagucagccucacugaaccggaucugagaaucuucucucucugggcuugccagggcucuccgaaccuagcuagcauccucuucaauuccaacuagaaagcuuaccauggagcugcucauccuuaaggccaacgcuauuaccacaauacugacugcagugacguucugcuuugccagcggccagaauaucaccgaagaguucuaccaauccacauguucugcggucucaaaaggguauuugagugcuuuaagaacuggaugguacaccagcguuauuacaaucgaacuguccaacauuaaggagaauaaaugcaacgguaccgacgccaaggugaaacuaaucaagcaggaacucgauaaguauaaaaaugcaguaacugagcugcagcuucugaugcagucuacacccgccaccggcucggggucagcuauagcaagcggaguggccgucuguaagguguugcaccucgagggcgaaguuaacaaaaucaagagugcucugcuguccacgaauaaagccguggucucucucagcgguugcgggguguccguauuaacuuuuaagguucuggaccuuaagaacuacauugauaaacaauugcugccuauccuaaauaagcagucauguaguauuagcaacaucgagaccgugauagaguuccagcagaaaaauaacaggcuccuggaaauuacacgggaguuuucugucaaugcgggagugacuaccccaguguccacauauaugcuuaccaacucagaacuguugagccucaucaaugacaugccgauuacgaacgaucaaaagaaacugaugaguaacaauguccagaucguucgccagcagucuuacuccaucaugugcauuauaaaggaggaaguguuagcauauguagugcaacugccccucuacggcgucaucgacacuccuuguuggaaacuucauacaagcccacugugcaccacuaacacaaaggagggcucgaauauuuguuugacccgaacggaucgugggugguacugcgacaacgccggaucuguguccuucuuuccccaggcugaaaccuguaagguucagucaaauagaguguucugcgauacaaugaacaguagaacucugccuagcgaggucaaucucugcaacguggacaucuuuaauccaaaauaugauuguaagauaaugaccuccaaaacagacguaucuagcucaguuauuaccagucugggugccaucguguccugcuacggcaagacuaaauguacagcaagcaacaagugcagggggaucauuaagaccuucucuaauggaugugauuaugucucaaacaaaggcguggacacugucaguguggguaauacgcuuuacuauguuaacaagcaagaggggaaaagccuguacgugaagggagaacccaucauuaauuuuuaugacccuuugguauucccauccgaugaguuugacgcuucuauaucgcaggucaacgagaaaaucaaccagagccucgccuucauucggaaguccgaugaacuguuacacaaugugaacgcgggcaagucaacaaccaauaucaugaucacuaccauuauaaucguuauuaucgugauucugcuaagucucaucgccgucggccugcuuuuguacugcaaagcacgcugaggacuaguacuggcugcaucucccuuuccucuguccuccauccuucucccaggauggugaagggggaccugguacccagugauccccaccccaggauccuaaaucaugacuuaccugcuaauaaaaacucauuggaaaagugagaagaucuaaaaaaaaaaaaaaaaaaaaaaaaaaaaaaaaaaaaaaaaaaaaaaaaaaaaaaaaaaaaaaaaugcaucccccccccccccccccccccccccccccccaaaggcucuuuucagagccaccagaauu

SEQ ID NO: 6028 - RNA, 2001 nt, Artificial Sequence
  mRNA product Design h-5 comprising derived and/or modified sequence from HRSV(A2)__F-del_DSCav1_mut5 (opt4)
gggagagggcgcuuggcuugcaaggacccugagcugcggcauugaagcacacccaacccaacucgacugaagucagccucacugaaccggaucugagaaucuucucucucugggcuugccagggcucuccgaaccuagcuagcauccucuucaauuccaacuagaaagcuuaccauggagcugcugauccugaaggccaacgccaucaccaccauccugaccgccgugaccuucugcuucgccagcggccagaacaucaccgaggaguucuaccagagcaccugcagcgccgugagcaagggcuaccugagcgcccugagaaccggcugguacaccagcgugaucaccaucgagcugagcaacaucaaggagaacaagugcaacggcaccgacgccaaggugaagcugaucaagcaggagcuggacaaguacaagaacgccgugaccgagcugcagcugcugaugcagagcacccccgccaccggcagcggcagcgccaucgccagcggcguggccgugugcaaggugcugcaccuggagggcgaggugaacaagaucaagagcgcccugcugagcaccaacaaggccguggugagccugagcggcugcggcgugagcgugcugaccuucaaggugcuggaccugaagaacuacaucgacaagcagcugcugcccauccugaacaagcagagcugcagcaucagcaacaucgagaccgugaucgaguuccagcagaagaacaacagacugcuggagaucaccagagaguucagcgugaacgccggcgugaccacccccgugagcaccuacaugcugaccaacagcgagcugcugagccugaucaacgacaugcccaucaccaacgaccagaagaagcugaugagcaacaacgugcagaucgugagacagcagagcuacagcaucaugugcaucaucaaggaggaggugcuggccuacguggugcagcugccccuguacggcgugaucgacacccccugcuggaagcugcacaccagcccccugugcaccaccaacaccaaggagggcagcaacaucugccugaccagaaccgacagaggcugguacugcgacaacgccggcagcgugagcuucuucccccaggccgagaccugcaaggugcagagcaacagaguguucugcgacaccaugaacagcagaacccugcccagcgaggugaaccugugcaacguggacaucuucaaccccaaguacgacugcaagaucaugaccagcaagaccgacgugagcagcagcgugaucaccagccugggcgccaucgugagcugcuacggcaagaccaagugcaccgccagcaacaagugcagaggcaucaucaagaccuucagcaacggcugcgacuacgugagcaacaagggcguggacaccgugagcgugggcaacacccuguacuacgugaacaagcaggagggcaagagccuguacgugaagggcgagcccaucaucaacuucuacgacccccugguguuccccagcgacgaguucgacgccagcaucagccaggugaacgagaagaucaaccagagccuggccuucaucagaaagagcgacgagcugcugcacaacgugaacgccggcaagagcaccaccaacaucaugaucaccaccaucaucaucgugaucaucgugauccugcugagccugaucgccgugggccugcugcuguacugcaaggccagaugaggacuaguacuggcugcaucucccuuuccucuguccuccauccuucucccaggauggugaagggggaccugguacccagugauccccaccccaggauccuaaaucaugacuuaccugcuaauaaaaacucauuggaaaagugagaagaucuaaaaaaaaaaaaaaaaaaaaaaaaaaaaaaaaaaaaaaaaaaaaaaaaaaaaaaaaaaaaaaaaugcaucccccccccccccccccccccccccccccccaaaggcucuuuucagagccaccagaauu

SEQ ID NO: 6029 - RNA, 2001 nt, Artificial Sequence
  mRNA product Design h-5 comprising derived and/or modified sequence from HRSV(A2)__F-del_DSCav1_mut5 (opt5)
gggagagggcgcuuggcuugcaaggacccugagcugcggcauugaagcacacccaacccaacucgacugaagucagccucacugaaccggaucugagaaucuucucucucugggcuugccagggcucuccgaaccuagcuagcauccucuucaauuccaacuagaaagcuuaccauggagcugcucauccugaaggccaacgcuauuaccacaauccuuacggccgugaccuucugcuuugcgagcggccagaauauuacagaagaguucuaccaauccaccuguucugcugucagcaaaggguaucuguccgcccucagaacaggaugguacaccucuguuaucacaauugaacugagcaacaucaaggagaauaaaugcaacggcaccgacgccaaggugaaacuuaucaagcaggaacuggauaaguauaaaaaugcugugacggagcuccagcugcugaugcaguccacccccgccacagggucuggaagcgcuauugccuccggcgucgcgguguguaagguucuccaccuggagggggaagugaacaaaaucaagagcgcccuucugucuaccaauaaagcugucgugucccucagcggaugcggcguuucugugcugacauuuaagguccuugaccugaagaacuacauugauaaacaacuccugccuauccugaauaagcaguccuguagcauuucuaacaucgagaccgugauugaguuccagcagaaaaauaaccggcuccuggaaaucacgcgcgaguuuuccgugaaugccggcgucacaaccccgguuagcacauauaugcuuaccaacuccgaacugcucucucugaucaaugacaugcccauuaccaacgaucaaaagaaacuuaugagcaacaaugugcagaucgugagacagcaguccuacagcauuaugugcaucauuaaggaggaaguccuggcuuaugugguucaacucccucuguacggggugaucgacacacccuguuggaaacugcauacgucuccucucugcaccacaaacaccaaggagggauccaauaucugucugacacggaccgaucgcggcugguacugcgacaacgccgggagcgucucuuucuuuccccaggcggaaacguguaaggugcagagcaauagaguuuucugcgauacaaugaacuccagaacccugccuucugaggugaaucucugcaacgucgacauuuuuaauccgaaauaugauuguaagaucaugaccagcaaaacagacguguccagcucugucauuaccucccugggagccaucgugagcugcuacggcaagacaaaauguacggcuucuaacaagugccgggggauuaucaagaccuucuccaauggaugugauuauguuagcaacaaaggcguggacacagucuccgugggcaauacccuuuacuauguuaacaagcaagaggggaaaucucuguacgugaagggagaacccaucauuaauuuuuaugacccucucgucuuccccagcgaugaguuugacgccuccaucucucaggugaacgagaaaauuaaccagagccuggcuuucauccgcaaguccgaugaacugcuccacaaugugaacgccggcaagagcacaaccaauauuaugaucacgaccauuaucaucguuauuaucgucauucugcuuucucugaucgccguggggcuccugcuguacugcaaagcuagaugaggacuaguacuggcugcaucucccuuuccucuguccuccauccuucucccaggauggugaagggggaccugguacccagugauccccaccccaggauccuaaaucaugacuuaccugcuaauaaaaacucauuggaaaagugagaagaucuaaaaaaaaaaaaaaaaaaaaaaaaaaaaaaaaaaaaaaaaaaaaaaaaaaaaaaaaaaaaaaaaugcaucccccccccccccccccccccccccccccccaaaggcucuuuucagagccaccagaauu

SEQ ID NO: 6030 - RNA, 2001 nt, Artificial Sequence
  mRNA product Design h-5 comprising derived and/or modified sequence from HRSV(A2)__F-del_DSCav1_mut5 (opt6)
gggagagggcgcuuggcuugcaaggacccugagcugcggcauugaagcacacccaacccaacucgacugaagucagccucacugaaccggaucugagaaucuucucucucugggcuugccagggcucuccgaaccuagcuagcauccucuucaauuccaacuagaaagcuuaccauggaacuuuuaauacugaaagcaaaugccaucacaaccauacuaacugccgucacauucugcuuugcaucaggacaaaacauaacagaagaauuuuaccaauccacaugcucagcaguaucaaaaggauaucuaucggcacuuagaacuggaugguacacaaguguuauaacuauagaacucucaaacauaaaagaaaacaaaugcaauggaacagacgcaaaaguaaaacuaauaaaacaagaacucgauaaauauaaaaaugcaguaaccgaacuacaacuauuaaugcaaagcacacccgcaacaggcagcggaucagcaauagcaagcggagucgcaguauguaaaguacuacaucuagaaggagaagucaacaaaaucaaaucugcacuucuauccacaaacaaagcuguaguaucccuauccggaugcggagucucaguauuaacuuuuaaaguacuagaccuuaaaaacuacauagauaaacaacuauuaccaauacuaaauaaacaaucaugcagcauauccaauauagagacaguaauugaauuucaacaaaaaaacaacagauuacuagaaauuacucgugaauuuuccguaaaugccggagucacaacaccaguaucaaccuauaugcuaacaaacagcgaacuacuuagcuuaauaaaugacaugccaauaacaaaugaccaaaaaaaacuuaugucaaauaacguacaaaucgucagacaacaauccuacucuauaauguguauaauuaaagaagaaguccuagcauacguaguucaauuaccacucuauggaguaauagauacaccaugcuggaaacuacacacgucaccacuauguacaacaaacacaaaagaaggauccaauauaugccuaacaagaaccgacagaggcugguauugugacaacgcaggauccguuucauucuucccacaagcagaaaccuguaaaguacaaucuaauagaguauuuugcgacacaaugaacaguagaacacuaccaagcgagguuaaucuauguaacguagacauauucaauccaaaauaugauugcaaaauaaugacaucaaaaacagauguaucgucgaguguaauaacaagucugggagcuauaguaagcugcuacggcaagacgaaauguaccgcuucaaauaaaugcagaggaaucauuaaaacauucucgaacggaugcgacuacguaaguaauaaaggugucgacaccguaucaguagggaauacauuauacuacgucaacaaacaagaaggaaaaucucuauauguaaaaggagaaccaauaauaaauuucuaugacccucuaguauucccaucagaugaauuugacgcuuccauaucacaaguaaacgaaaaaaucaaucaaucuuuagcauucauacgaaaaagugaugaacuccuacacaacgucaacgcaggaaaaagcacaacaaauauaaugaucacaacaaucaucauaguaauaauaguaauacuacuaucauuaauagcaguaggauuauugcuuuacugcaaagcacgauagggacuaguacuggcugcaucucccuuuccucuguccuccauccuucucccaggauggugaagggggaccugguacccagugauccccaccccaggauccuaaaucaugacuuaccugcuaauaaaaacucauuggaaaagugagaagaucuaaaaaaaaaaaaaaaaaaaaaaaaaaaaaaaaaaaaaaaaaaaaaaaaaaaaaaaaaaaaaaaaugcaucccccccccccccccccccccccccccccccaaaggcucuuuucagagccaccagaauu

SEQ ID NO: 6031 - RNA, 2001 nt, Artificial Sequence
  mRNA product Design h-5 comprising derived and/or modified sequence from HRSV(A2)__F-del_DSCav1_mut5 (opt11)
gggagagggcgcuuggcuugcaaggacccugagcugcggcauugaagcacacccaacccaacucgacugaagucagccucacugaaccggaucugagaaucuucucucucugggcuugccagggcucuccgaaccuagcuagcauccucuucaauuccaacuagaaagcuuaccauggaacuccucauccucaaagccaacgccauaaccacaauacucaccgccguaaccuucugcuuugcgucgggacaaaacaucaccgaagaguucuaccaauccacuugcuccgcaguaagcaaaggauaccucuccgcccugcgaaccgguugguacacaucagucaucacaaucgaacucucaaacauaaaagaaaacaaaugcaacggcaccgacgcaaaggucaaauuaaucaagcaagaacuagacaaauacaaaaacgccgucacagaacuccagcugcuaaugcagagcacacccgcaacuggcagcggauccgccaucgcaucaggagucgccgugugcaaaguccuacaccucgaaggagaagugaacaaaaucaaaucagcccuacucuccaccaacaaggccgucgucucccucuccggcugcggugucuccguccuaaccuucaaagugcuagaccucaagaacuacaucgacaaacaacuccuaccaauacucaacaagcaaucuugcuccaucuccaacaucgaaaccguaaucgaguuccaacagaagaacaaccgccuccucgaaaucacccgcgaguucucugucaacgcaggggucaccacucccgucuccacauacaugcucacaaacuccgaacuccucagccucaucaacgacaugcccauaaccaacgaccagaaaaagcuaaugagcaauaacguccaaaucguuagacaacaaaguuauuccaucaugugcaucaucaaagaagaaguccucgccuacgucguacaacucccccucuauggcgucaucgacacccccugcuggaaacugcacacaucaccccucugcaccacaaacaccaaagaaggcucaaacaucugccuaacucgcaccgaccgcggcugguacugcgacaacgccggcagcguaucauucuuuccccaagccgaaacaugcaaaguucaauccaaccgcgucuucugcgacacaaugaacuccagaacgcuccccagcgaagucaaccucuguaacguagacaucuucaacccuaaguacgacugcaaaaucaugaccuccaaaacugauguauccuccuccgucaucacaucccugggcgccaucgucagcugcuacggcaaaacaaaaugcacugccucaaacaaaugccgagguaucauaaagaccuucucaaacggaugcgauuacgucagcaacaaaggcgucgacaccgucagugucggcaacacccucuacuacgucaacaaacaagaaggaaaaucccucuacgucaaaggcgaacccaucaucaacuucuacgacccccucgucuuccccagcgacgaguucgacgccuccaucucacaagucaacgaaaagauaaaccaaucucuagccuucauccgcaaauccgaugaacuccugcauaacgucaacgccggcaaauccaccacaaacaucaugaucacuaccauaaucaucgucauaaucguaauccuccuaucucuuaucgcagucggccuacuacucuacugcaaagcccgcuaaggacuaguacuggcugcaucucccuuuccucuguccuccauccuucucccaggauggugaagggggaccugguacccagugauccccaccccaggauccuaaaucaugacuuaccugcuaauaaaaacucauuggaaaagugagaagaucuaaaaaaaaaaaaaaaaaaaaaaaaaaaaaaaaaaaaaaaaaaaaaaaaaaaaaaaaaaaaaaaaugcaucccccccccccccccccccccccccccccccaaaggcucuuuucagagccaccagaauu

SEQ ID NO: 6032 - RNA, 1934 nt, Artificial Sequence
  mRNA product Design i-1 comprising derived and/or modified sequence from HRSV(A2)__F-del_DSCav1_mut5 (opt1)
gggagagggcgcuuggcuugcaaggacccugagcugcggcauugaagcacacccaacccaacucgacugaagucagccucacugaaccggaucugagaaucuucucucucugggcuugccagggcucuccgaaccuagcuagcauccucuucaauuccaacuagaaagcuuaccauggagcugcucauccugaaggccaacgccaucaccaccauccugacggcggugaccuucugcuucgccagcggccagaacaucaccgaggaguucuaccaguccacgugcagcgccgucuccaagggguaccucagcgcccugcggaccggcugguacaccuccgugaucaccaucgagcugagcaacaucaaggagaacaagugcaacgggaccgacgccaaggugaagcucaucaagcaggagcuggacaaguacaagaacgcggucacggagcugcagcuccugaugcaguccaccccggcaaccggcuccggcuccgccaucgcgagcggcgucgccgugugcaaggugcugcaccucgagggggaggucaacaagaucaagagcgcccugcuguccaccaacaaggccguggugagccucuccggcugcggcgucagcgugcugaccuucaaggugcuggaccucaagaacuacaucgacaagcagcugcugcccauccugaacaagcagagcugcuccaucagcaacaucgagacggugaucgaguuccagcagaagaacaaccggcuccuggagaucacccgcgaguucagcgugaacgccggggucaccacccccguguccacguacaugcugaccaacagcgagcuccugucccugaucaacgacaugccgaucaccaacgaccagaagaagcucaugagcaacaacgugcagaucguccggcagcaguccuacagcaucaugugcaucaucaaggaggaggugcuggcguacgugguccagcugccccucuacggcgugaucgacacccccugcuggaagcugcacacgagcccccugugcaccaccaacaccaaggagggguccaacaucugccucacgcgcaccgaccggggcugguacugcgacaacgccggcagcgucuccuucuucccgcaggccgagaccugcaaggugcagagcaaccgcguguucugcgacaccaugaacucccggacgcugcccagcgagguaaaccucugcaacgucgacaucuucaaccccaaguacgacugcaagaucaugaccuccaagaccgacgugagcuccagcgugaucaccucccugggggccaucgucagcugcuacggcaagacgaagugcaccgccagcaacaagugccgggggaucaucaagaccuucuccaacggcugcgacuacgugagcaacaagggcguggacaccguguccgucgggaacacccuguacuacgugaacaagcaggagggcaagagccucuacgugaagggggagcccaucaucaacuucuacgacccgcuggucuuccccuccgacgaguucgacgcgagcaucucccaggugaacgagaagaucaaccagagccuggccuucauccgcaaguccgacgagcugcuccacaacgugaacgccggcaagagcacgaccaacaucaugaucaccaccaucaucaucgucaucaucgugauccugcugucccucaucgccguggggcugcugcucuacugcaaggcccggugaggacuaguguccaccugucccuccugggcugcuggauugucucguuuuccugccaaauaaacaggaucagcgcuuuacagaucuaaaaaaaaaaaaaaaaaaaaaaaaaaaaaaaaaaaaaaaaaaaaaaaaaaaaaaaaaaaaaaaaugcaucccccccccccccccccccccccccccccccaaaggcucuuuucagagccaccagaauu

SEQ ID NO: 6033 - RNA, 1934 nt, Artificial Sequence
  mRNA product Design i-1 comprising derived and/or modified sequence from HRSV(A2)__F-del_DSCav1_mut5 (opt1)
gggagagggcgcuuggcuugcaaggacccugagcugcggcauugaagcacacccaacccaacucgacugaagucagccucacugaaccggaucugagaaucuucucucucugggcuugccagggcucuccgaaccuagcuagcauccucuucaauuccaacuagaaagcuuaccauggagcugcucauccugaaggccaacgccaucaccaccauccugacggcggugaccuucugcuucgccagcggccagaacaucaccgaggaguucuaccaguccacgugcagcgccgucuccaagggguaccucagcgcccugcgcaccggcugguacaccuccgugaucaccaucgagcugagcaacaucaaggagaacaagugcaacgggaccgacgccaaggugaagcucaucaagcaggagcuggacaaguacaagaacgcggucacggagcugcagcuccugaugcaguccacccccgccaccggcagcggguccgccaucgccagcggcguggcggugugcaagguccugcaccucgagggcgaggugaacaagaucaaguccgcccugcugagcaccaacaaggccguggucucccucagcgggugcggcguguccgugcugacguucaagguccuggaccucaagaacuacaucgacaagcagcugcugccgauccucaacaagcagagcugcuccaucagcaacaucgagaccgugaucgaguuccagcagaagaacaaccggcugcuggagaucacccgcgaguucuccgugaacgccggggucaccacgcccgugagcaccuacaugcucaccaacagcgagcugcugucccucaucaacgacaugcccaucaccaacgaccagaagaagcugaugagcaacaacgugcagaucguccggcagcaguccuacagcaucaugugcaucaucaaggaggaggugcuggccuacgugguccagcucccccuguacggcgugaucgacacgccgugcuggaagcugcacaccagcccccucugcaccaccaacacgaaggagggguccaacaucugccugacccgcaccgaccggggcugguacugcgacaacgcgggcuccgugagcuucuucccccaggccgagaccugcaagguccaguccaaccgcguguucugcgacacgaugaacagccggacccuccccuccgaggucaaccugugcaacguggacaucuucaacccgaaguacgacugcaagaucaugaccagcaagaccgacguguccagcuccgucaucacgagccugggggccaucguguccugcuacggcaagaccaagugcaccgccagcaacaagugccgggggaucaucaagaccuucuccaacggcugcgacuacgugagcaacaagggcgucgacacggugagcguggggaacacccucuacuacgucaacaagcaggagggcaagucccuguacgugaagggggagcccaucaucaacuucuacgacccccugguguuccccagcgacgaguucgacgccuccaucagccaggucaacgagaagaucaaccagucccucgcguucauccgcaagagcgacgagcugcugcacaacgugaacgccggcaaguccaccaccaacaucaugaucaccacgaucaucaucgugaucaucgucauccuccugagccugaucgccguggggcuccugcuguacugcaaggcccggugaggacuaguguccaccugucccuccugggcugcuggauugucucguuuuccugccaaauaaacaggaucagcgcuuuacagaucuaaaaaaaaaaaaaaaaaaaaaaaaaaaaaaaaaaaaaaaaaaaaaaaaaaaaaaaaaaaaaaaaugcaucccccccccccccccccccccccccccccccaaaggcucuuuucagagccaccagaauu

SEQ ID NO: 6034 - RNA, 1934 nt, Artificial Sequence
  mRNA product Design i-1 comprising derived and/or modified sequence from HRSV(A2)__F-del_DSCav1_mut5 (opt2)
gggagagggcgcuuggcuugcaaggacccugagcugcggcauugaagcacacccaacccaacucgacugaagucagccucacugaaccggaucugagaaucuucucucucugggcuugccagggcucuccgaaccuagcuagcauccucuucaauuccaacuagaaagcuuaccauggagcuccucauccucaaggccaacgccaucaccaccauccucaccgccgucaccuucugcuucgccuccggccagaacaucaccgaggaguucuaccaguccaccugcuccgccgucuccaagggcuaccucuccgcccuccgcaccggcugguacaccuccgucaucaccaucgagcucuccaacaucaaggagaacaagugcaacggcaccgacgccaaggucaagcucaucaagcaggagcucgacaaguacaagaacgccgucaccgagcuccagcuccucaugcaguccacccccgccaccggcuccggcuccgccaucgccuccggcgucgccgucugcaagguccuccaccucgagggcgaggucaacaagaucaaguccgcccuccucuccaccaacaaggccgucgucucccucuccggcugcggcgucuccguccucaccuucaagguccucgaccucaagaacuacaucgacaagcagcuccuccccauccucaacaagcaguccugcuccaucuccaacaucgagaccgucaucgaguuccagcagaagaacaaccgccuccucgagaucacccgcgaguucuccgucaacgccggcgucaccacccccgucuccaccuacaugcucaccaacuccgagcuccucucccucaucaacgacaugcccaucaccaacgaccagaagaagcucauguccaacaacguccagaucguccgccagcaguccuacuccaucaugugcaucaucaaggaggagguccucgccuacgucguccagcucccccucuacggcgucaucgacacccccugcuggaagcuccacaccuccccccucugcaccaccaacaccaaggagggcuccaacaucugccucacccgcaccgaccgcggcugguacugcgacaacgccggcuccgucuccuucuucccccaggccgagaccugcaagguccaguccaaccgcgucuucugcgacaccaugaacucccgcacccuccccuccgaggucaaccucugcaacgucgacaucuucaaccccaaguacgacugcaagaucaugaccuccaagaccgacgucuccuccuccgucaucaccucccucggcgccaucgucuccugcuacggcaagaccaagugcaccgccuccaacaagugccgcggcaucaucaagaccuucuccaacggcugcgacuacgucuccaacaagggcgucgacaccgucuccgucggcaacacccucuacuacgucaacaagcaggagggcaagucccucuacgucaagggcgagcccaucaucaacuucuacgacccccucgucuuccccuccgacgaguucgacgccuccaucucccaggucaacgagaagaucaaccagucccucgccuucauccgcaaguccgacgagcuccuccacaacgucaacgccggcaaguccaccaccaacaucaugaucaccaccaucaucaucgucaucaucgucauccuccucucccucaucgccgucggccuccuccucuacugcaaggcccgcugaggacuaguguccaccugucccuccugggcugcuggauugucucguuuuccugccaaauaaacaggaucagcgcuuuacagaucuaaaaaaaaaaaaaaaaaaaaaaaaaaaaaaaaaaaaaaaaaaaaaaaaaaaaaaaaaaaaaaaaugcaucccccccccccccccccccccccccccccccaaaggcucuuuucagagccaccagaauu

SEQ ID NO: 6035 - RNA, 1934 nt, Artificial Sequence
  mRNA product Design i-1 comprising derived and/or modified sequence from HRSV(A2)__F-del_DSCav1_mut5 (opt3)
gggagagggcgcuuggcuugcaaggacccugagcugcggcauugaagcacacccaacccaacucgacugaagucagccucacugaaccggaucugagaaucuucucucucugggcuugccagggcucuccgaaccuagcuagcauccucuucaauuccaacuagaaagcuuaccauggagcugcucauccuuaaggccaacgcuauuaccacaauacugacugcagugacguucugcuuugccagcggccagaauaucaccgaagaguucuaccaauccacauguucugcggucucaaaaggguauuugagugcuuuaagaacuggaugguacaccagcguuauuacaaucgaacuguccaacauuaaggagaauaaaugcaacgguaccgacgccaaggugaaacuaaucaagcaggaacucgauaaguauaaaaaugcaguaacugagcugcagcuucugaugcagucuacacccgccaccggcucggggucagcuauagcaagcggaguggccgucuguaagguguugcaccucgagggcgaaguuaacaaaaucaagagugcucugcuguccacgaauaaagccguggucucucucagcgguugcgggguguccguauuaacuuuuaagguucuggaccuuaagaacuacauugauaaacaauugcugccuauccuaaauaagcagucauguaguauuagcaacaucgagaccgugauagaguuccagcagaaaaauaacaggcuccuggaaauuacacgggaguuuucugucaaugcgggagugacuaccccaguguccacauauaugcuuaccaacucagaacuguugagccucaucaaugacaugccgauuacgaacgaucaaaagaaacugaugaguaacaauguccagaucguucgccagcagucuuacuccaucaugugcauuauaaaggaggaaguguuagcauauguagugcaacugccccucuacggcgucaucgacacuccuuguuggaaacuucauacaagcccacugugcaccacuaacacaaaggagggcucgaauauuuguuugacccgaacggaucgugggugguacugcgacaacgccggaucuguguccuucuuuccccaggcugaaaccuguaagguucagucaaauagaguguucugcgauacaaugaacaguagaacucugccuagcgaggucaaucucugcaacguggacaucuuuaauccaaaauaugauuguaagauaaugaccuccaaaacagacguaucuagcucaguuauuaccagucugggugccaucguguccugcuacggcaagacuaaauguacagcaagcaacaagugcagggggaucauuaagaccuucucuaauggaugugauuaugucucaaacaaaggcguggacacugucaguguggguaauacgcuuuacuauguuaacaagcaagaggggaaaagccuguacgugaagggagaacccaucauuaauuuuuaugacccuuugguauucccauccgaugaguuugacgcuucuauaucgcaggucaacgagaaaaucaaccagagccucgccuucauucggaaguccgaugaacuguuacacaaugugaacgcgggcaagucaacaaccaauaucaugaucacuaccauuauaaucguuauuaucgugauucugcuaagucucaucgccgucggccugcuuuuguacugcaaagcacgcugaggacuaguguccaccugucccuccugggcugcuggauugucucguuuuccugccaaauaaacaggaucagcgcuuuacagaucuaaaaaaaaaaaaaaaaaaaaaaaaaaaaaaaaaaaaaaaaaaaaaaaaaaaaaaaaaaaaaaaaugcaucccccccccccccccccccccccccccccccaaaggcucuuuucagagccaccagaauu

SEQ ID NO: 6036 - RNA, 1934 nt, Artificial Sequence
  mRNA product Design i-1 comprising derived and/or modified sequence from HRSV(A2)__F-del_DSCav1_mut5 (opt4)
gggagagggcgcuuggcuugcaaggacccugagcugcggcauugaagcacacccaacccaacucgacugaagucagccucacugaaccggaucugagaaucuucucucucugggcuugccagggcucuccgaaccuagcuagcauccucuucaauuccaacuagaaagcuuaccauggagcugcugauccugaaggccaacgccaucaccaccauccugaccgccgugaccuucugcuucgccagcggccagaacaucaccgaggaguucuaccagagcaccugcagcgccgugagcaagggcuaccugagcgcccugagaaccggcugguacaccagcgugaucaccaucgagcugagcaacaucaaggagaacaagugcaacggcaccgacgccaaggugaagcugaucaagcaggagcuggacaaguacaagaacgccgugaccgagcugcagcugcugaugcagagcacccccgccaccggcagcggcagcgccaucgccagcggcguggccgugugcaaggugcugcaccuggagggcgaggugaacaagaucaagagcgcccugcugagcaccaacaaggccguggugagccugagcggcugcggcgugagcgugcugaccuucaaggugcuggaccugaagaacuacaucgacaagcagcugcugcccauccugaacaagcagagcugcagcaucagcaacaucgagaccgugaucgaguuccagcagaagaacaacagacugcuggagaucaccagagaguucagcgugaacgccggcgugaccacccccgugagcaccuacaugcugaccaacagcgagcugcugagccugaucaacgacaugcccaucaccaacgaccagaagaagcugaugagcaacaacgugcagaucgugagacagcagagcuacagcaucaugugcaucaucaaggaggaggugcuggccuacguggugcagcugccccuguacggcgugaucgacacccccugcuggaagcugcacaccagcccccugugcaccaccaacaccaaggagggcagcaacaucugccugaccagaaccgacagaggcugguacugcgacaacgccggcagcgugagcuucuucccccaggccgagaccugcaaggugcagagcaacagaguguucugcgacaccaugaacagcagaacccugcccagcgaggugaaccugugcaacguggacaucuucaaccccaaguacgacugcaagaucaugaccagcaagaccgacgugagcagcagcgugaucaccagccugggcgccaucgugagcugcuacggcaagaccaagugcaccgccagcaacaagugcagaggcaucaucaagaccuucagcaacggcugcgacuacgugagcaacaagggcguggacaccgugagcgugggcaacacccuguacuacgugaacaagcaggagggcaagagccuguacgugaagggcgagcccaucaucaacuucuacgacccccugguguuccccagcgacgaguucgacgccagcaucagccaggugaacgagaagaucaaccagagccuggccuucaucagaaagagcgacgagcugcugcacaacgugaacgccggcaagagcaccaccaacaucaugaucaccaccaucaucaucgugaucaucgugauccugcugagccugaucgccgugggccugcugcuguacugcaaggccagaugaggacuaguguccaccugucccuccugggcugcuggauugucucguuuuccugccaaauaaacaggaucagcgcuuuacagaucuaaaaaaaaaaaaaaaaaaaaaaaaaaaaaaaaaaaaaaaaaaaaaaaaaaaaaaaaaaaaaaaaugcaucccccccccccccccccccccccccccccccaaaggcucuuuucagagccaccagaauu

SEQ ID NO: 6037 - RNA, 1934 nt, Artificial Sequence
  mRNA product Design i-1 comprising derived and/or modified sequence from HRSV(A2)__F-del_DSCav1_mut5 (opt5)
gggagagggcgcuuggcuugcaaggacccugagcugcggcauugaagcacacccaacccaacucgacugaagucagccucacugaaccggaucugagaaucuucucucucugggcuugccagggcucuccgaaccuagcuagcauccucuucaauuccaacuagaaagcuuaccauggagcugcucauccugaaggccaacgcuauuaccacaauccuuacggccgugaccuucugcuuugcgagcggccagaauauuacagaagaguucuaccaauccaccuguucugcugucagcaaaggguaucuguccgcccucagaacaggaugguacaccucuguuaucacaauugaacugagcaacaucaaggagaauaaaugcaacggcaccgacgccaaggugaaacuuaucaagcaggaacuggauaaguauaaaaaugcugugacggagcuccagcugcugaugcaguccacccccgccacagggucuggaagcgcuauugccuccggcgucgcgguguguaagguucuccaccuggagggggaagugaacaaaaucaagagcgcccuucugucuaccaauaaagcugucgugucccucagcggaugcggcguuucugugcugacauuuaagguccuugaccugaagaacuacauugauaaacaacuccugccuauccugaauaagcaguccuguagcauuucuaacaucgagaccgugauugaguuccagcagaaaaauaaccggcuccuggaaaucacgcgcgaguuuuccgugaaugccggcgucacaaccccgguuagcacauauaugcuuaccaacuccgaacugcucucucugaucaaugacaugcccauuaccaacgaucaaaagaaacuuaugagcaacaaugugcagaucgugagacagcaguccuacagcauuaugugcaucauuaaggaggaaguccuggcuuaugugguucaacucccucuguacggggugaucgacacacccuguuggaaacugcauacgucuccucucugcaccacaaacaccaaggagggauccaauaucugucugacacggaccgaucgcggcugguacugcgacaacgccgggagcgucucuuucuuuccccaggcggaaacguguaaggugcagagcaauagaguuuucugcgauacaaugaacuccagaacccugccuucugaggugaaucucugcaacgucgacauuuuuaauccgaaauaugauuguaagaucaugaccagcaaaacagacguguccagcucugucauuaccucccugggagccaucgugagcugcuacggcaagacaaaauguacggcuucuaacaagugccgggggauuaucaagaccuucuccaauggaugugauuauguuagcaacaaaggcguggacacagucuccgugggcaauacccuuuacuauguuaacaagcaagaggggaaaucucuguacgugaagggagaacccaucauuaauuuuuaugacccucucgucuuccccagcgaugaguuugacgccuccaucucucaggugaacgagaaaauuaaccagagccuggcuuucauccgcaaguccgaugaacugcuccacaaugugaacgccggcaagagcacaaccaauauuaugaucacgaccauuaucaucguuauuaucgucauucugcuuucucugaucgccguggggcuccugcuguacugcaaagcuagaugaggacuaguguccaccugucccuccugggcugcuggauugucucguuuuccugccaaauaaacaggaucagcgcuuuacagaucuaaaaaaaaaaaaaaaaaaaaaaaaaaaaaaaaaaaaaaaaaaaaaaaaaaaaaaaaaaaaaaaaugcaucccccccccccccccccccccccccccccccaaaggcucuuuucagagccaccagaauu

SEQ ID NO: 6038 - RNA, 1934 nt, Artificial Sequence
  mRNA product Design i-1 comprising derived and/or modified sequence from HRSV(A2)__F-del_DSCav1_mut5 (opt6)
gggagagggcgcuuggcuugcaaggacccugagcugcggcauugaagcacacccaacccaacucgacugaagucagccucacugaaccggaucugagaaucuucucucucugggcuugccagggcucuccgaaccuagcuagcauccucuucaauuccaacuagaaagcuuaccauggaacuuuuaauacugaaagcaaaugccaucacaaccauacuaacugccgucacauucugcuuugcaucaggacaaaacauaacagaagaauuuuaccaauccacaugcucagcaguaucaaaaggauaucuaucggcacuuagaacuggaugguacacaaguguuauaacuauagaacucucaaacauaaaagaaaacaaaugcaauggaacagacgcaaaaguaaaacuaauaaaacaagaacucgauaaauauaaaaaugcaguaaccgaacuacaacuauuaaugcaaagcacacccgcaacaggcagcggaucagcaauagcaagcggagucgcaguauguaaaguacuacaucuagaaggagaagucaacaaaaucaaaucugcacuucuauccacaaacaaagcuguaguaucccuauccggaugcggagucucaguauuaacuuuuaaaguacuagaccuuaaaaacuacauagauaaacaacuauuaccaauacuaaauaaacaaucaugcagcauauccaauauagagacaguaauugaauuucaacaaaaaaacaacagauuacuagaaauuacucgugaauuuuccguaaaugccggagucacaacaccaguaucaaccuauaugcuaacaaacagcgaacuacuuagcuuaauaaaugacaugccaauaacaaaugaccaaaaaaaacuuaugucaaauaacguacaaaucgucagacaacaauccuacucuauaauguguauaauuaaagaagaaguccuagcauacguaguucaauuaccacucuauggaguaauagauacaccaugcuggaaacuacacacgucaccacuauguacaacaaacacaaaagaaggauccaauauaugccuaacaagaaccgacagaggcugguauugugacaacgcaggauccguuucauucuucccacaagcagaaaccuguaaaguacaaucuaauagaguauuuugcgacacaaugaacaguagaacacuaccaagcgagguuaaucuauguaacguagacauauucaauccaaaauaugauugcaaaauaaugacaucaaaaacagauguaucgucgaguguaauaacaagucugggagcuauaguaagcugcuacggcaagacgaaauguaccgcuucaaauaaaugcagaggaaucauuaaaacauucucgaacggaugcgacuacguaaguaauaaaggugucgacaccguaucaguagggaauacauuauacuacgucaacaaacaagaaggaaaaucucuauauguaaaaggagaaccaauaauaaauuucuaugacccucuaguauucccaucagaugaauuugacgcuuccauaucacaaguaaacgaaaaaaucaaucaaucuuuagcauucauacgaaaaagugaugaacuccuacacaacgucaacgcaggaaaaagcacaacaaauauaaugaucacaacaaucaucauaguaauaauaguaauacuacuaucauuaauagcaguaggauuauugcuuuacugcaaagcacgauagggacuaguguccaccugucccuccugggcugcuggauugucucguuuuccugccaaauaaacaggaucagcgcuuuacagaucuaaaaaaaaaaaaaaaaaaaaaaaaaaaaaaaaaaaaaaaaaaaaaaaaaaaaaaaaaaaaaaaaugcaucccccccccccccccccccccccccccccccaaaggcucuuuucagagccaccagaauu

SEQ ID NO: 6039 - RNA, 1934 nt, Artificial Sequence
  mRNA product Design i-1 comprising derived and/or modified sequence from HRSV(A2)__F-del_DSCav1_mut5 (opt11)
gggagagggcgcuuggcuugcaaggacccugagcugcggcauugaagcacacccaacccaacucgacugaagucagccucacugaaccggaucugagaaucuucucucucugggcuugccagggcucuccgaaccuagcuagcauccucuucaauuccaacuagaaagcuuaccauggaacuccucauccucaaagccaacgccauaaccacaauacucaccgccguaaccuucugcuuugcgucgggacaaaacaucaccgaagaguucuaccaauccacuugcuccgcaguaagcaaaggauaccucuccgcccugcgaaccgguugguacacaucagucaucacaaucgaacucucaaacauaaaagaaaacaaaugcaacggcaccgacgcaaaggucaaauuaaucaagcaagaacuagacaaauacaaaaacgccgucacagaacuccagcugcuaaugcagagcacacccgcaacuggcagcggauccgccaucgcaucaggagucgccgugugcaaaguccuacaccucgaaggagaagugaacaaaaucaaaucagcccuacucuccaccaacaaggccgucgucucccucuccggcugcggugucuccguccuaaccuucaaagugcuagaccucaagaacuacaucgacaaacaacuccuaccaauacucaacaagcaaucuugcuccaucuccaacaucgaaaccguaaucgaguuccaacagaagaacaaccgccuccucgaaaucacccgcgaguucucugucaacgcaggggucaccacucccgucuccacauacaugcucacaaacuccgaacuccucagccucaucaacgacaugcccauaaccaacgaccagaaaaagcuaaugagcaauaacguccaaaucguuagacaacaaaguuauuccaucaugugcaucaucaaagaagaaguccucgccuacgucguacaacucccccucuauggcgucaucgacacccccugcuggaaacugcacacaucaccccucugcaccacaaacaccaaagaaggcucaaacaucugccuaacucgcaccgaccgcggcugguacugcgacaacgccggcagcguaucauucuuuccccaagccgaaacaugcaaaguucaauccaaccgcgucuucugcgacacaaugaacuccagaacgcuccccagcgaagucaaccucuguaacguagacaucuucaacccuaaguacgacugcaaaaucaugaccuccaaaacugauguauccuccuccgucaucacaucccugggcgccaucgucagcugcuacggcaaaacaaaaugcacugccucaaacaaaugccgagguaucauaaagaccuucucaaacggaugcgauuacgucagcaacaaaggcgucgacaccgucagugucggcaacacccucuacuacgucaacaaacaagaaggaaaaucccucuacgucaaaggcgaacccaucaucaacuucuacgacccccucgucuuccccagcgacgaguucgacgccuccaucucacaagucaacgaaaagauaaaccaaucucuagccuucauccgcaaauccgaugaacuccugcauaacgucaacgccggcaaauccaccacaaacaucaugaucacuaccauaaucaucgucauaaucguaauccuccuaucucuuaucgcagucggccuacuacucuacugcaaagcccgcuaaggacuaguguccaccugucccuccugggcugcuggauugucucguuuuccugccaaauaaacaggaucagcgcuuuacagaucuaaaaaaaaaaaaaaaaaaaaaaaaaaaaaaaaaaaaaaaaaaaaaaaaaaaaaaaaaaaaaaaaugcaucccccccccccccccccccccccccccccccaaaggcucuuuucagagccaccagaauu

SEQ ID NO: 6040 - RNA, 1934 nt, Artificial Sequence
  mRNA product Design i-2 comprising derived and/or modified sequence from HRSV(A2)__F-del_DSCav1_mut5 (opt1)
gggagaggcgcugccuacggagguggcagccaucuccuucucggcaucaagcuuaccauggagcugcucauccugaaggccaacgccaucaccaccauccugacggcggugaccuucugcuucgccagcggccagaacaucaccgaggaguucuaccaguccacgugcagcgccgucuccaagggguaccucagcgcccugcggaccggcugguacaccuccgugaucaccaucgagcugagcaacaucaaggagaacaagugcaacgggaccgacgccaaggugaagcucaucaagcaggagcuggacaaguacaagaacgcggucacggagcugcagcuccugaugcaguccaccccggcaaccggcuccggcuccgccaucgcgagcggcgucgccgugugcaaggugcugcaccucgagggggaggucaacaagaucaagagcgcccugcuguccaccaacaaggccguggugagccucuccggcugcggcgucagcgugcugaccuucaaggugcuggaccucaagaacuacaucgacaagcagcugcugcccauccugaacaagcagagcugcuccaucagcaacaucgagacggugaucgaguuccagcagaagaacaaccggcuccuggagaucacccgcgaguucagcgugaacgccggggucaccacccccguguccacguacaugcugaccaacagcgagcuccugucccugaucaacgacaugccgaucaccaacgaccagaagaagcucaugagcaacaacgugcagaucguccggcagcaguccuacagcaucaugugcaucaucaaggaggaggugcuggcguacgugguccagcugccccucuacggcgugaucgacacccccugcuggaagcugcacacgagcccccugugcaccaccaacaccaaggagggguccaacaucugccucacgcgcaccgaccggggcugguacugcgacaacgccggcagcgucuccuucuucccgcaggccgagaccugcaaggugcagagcaaccgcguguucugcgacaccaugaacucccggacgcugcccagcgagguaaaccucugcaacgucgacaucuucaaccccaaguacgacugcaagaucaugaccuccaagaccgacgugagcuccagcgugaucaccucccugggggccaucgucagcugcuacggcaagacgaagugcaccgccagcaacaagugccgggggaucaucaagaccuucuccaacggcugcgacuacgugagcaacaagggcguggacaccguguccgucgggaacacccuguacuacgugaacaagcaggagggcaagagccucuacgugaagggggagcccaucaucaacuucuacgacccgcuggucuuccccuccgacgaguucgacgcgagcaucucccaggugaacgagaagaucaaccagagccuggccuucauccgcaaguccgacgagcugcuccacaacgugaacgccggcaagagcacgaccaacaucaugaucaccaccaucaucaucgucaucaucgugauccugcugucccucaucgccguggggcugcugcucuacugcaaggcccggugaggacuagugcaucacauuuaaaagcaucucagccuaccaugagaauaagagaaagaaaaugaagaucaauagcuuauucaucucuuuuucuuuuucguugguguaaagccaacacccugucuaaaaaacauaaauuucuuuaaucauuuugccucuuuucucugugcuucaauuaauaaaaaauggaaagaaccuagaucuaaaaaaaaaaaaaaaaaaaaaaaaaaaaaaaaaaaaaaaaaaaaaaaaaaaaaaaaaaaaaaaaugcaucccccccccccccccccccccccccccccccaaaggcucuuuucagagccaccagaauu

SEQ ID NO: 6041 - RNA, 1934 nt, Artificial Sequence
  mRNA product Design i-2 comprising derived and/or modified sequence from HRSV(A2)__F-del_DSCav1_mut5 (opt1)
gggagaggcgcugccuacggagguggcagccaucuccuucucggcaucaagcuuaccauggagcugcucauccugaaggccaacgccaucaccaccauccugacggcggugaccuucugcuucgccagcggccagaacaucaccgaggaguucuaccaguccacgugcagcgccgucuccaagggguaccucagcgcccugcgcaccggcugguacaccuccgugaucaccaucgagcugagcaacaucaaggagaacaagugcaacgggaccgacgccaaggugaagcucaucaagcaggagcuggacaaguacaagaacgcggucacggagcugcagcuccugaugcaguccacccccgccaccggcagcggguccgccaucgccagcggcguggcggugugcaagguccugcaccucgagggcgaggugaacaagaucaaguccgcccugcugagcaccaacaaggccguggucucccucagcgggugcggcguguccgugcugacguucaagguccuggaccucaagaacuacaucgacaagcagcugcugccgauccucaacaagcagagcugcuccaucagcaacaucgagaccgugaucgaguuccagcagaagaacaaccggcugcuggagaucacccgcgaguucuccgugaacgccggggucaccacgcccgugagcaccuacaugcucaccaacagcgagcugcugucccucaucaacgacaugcccaucaccaacgaccagaagaagcugaugagcaacaacgugcagaucguccggcagcaguccuacagcaucaugugcaucaucaaggaggaggugcuggccuacgugguccagcucccccuguacggcgugaucgacacgccgugcuggaagcugcacaccagcccccucugcaccaccaacacgaaggagggguccaacaucugccugacccgcaccgaccggggcugguacugcgacaacgcgggcuccgugagcuucuucccccaggccgagaccugcaagguccaguccaaccgcguguucugcgacacgaugaacagccggacccuccccuccgaggucaaccugugcaacguggacaucuucaacccgaaguacgacugcaagaucaugaccagcaagaccgacguguccagcuccgucaucacgagccugggggccaucguguccugcuacggcaagaccaagugcaccgccagcaacaagugccgggggaucaucaagaccuucuccaacggcugcgacuacgugagcaacaagggcgucgacacggugagcguggggaacacccucuacuacgucaacaagcaggagggcaagucccuguacgugaagggggagcccaucaucaacuucuacgacccccugguguuccccagcgacgaguucgacgccuccaucagccaggucaacgagaagaucaaccagucccucgcguucauccgcaagagcgacgagcugcugcacaacgugaacgccggcaaguccaccaccaacaucaugaucaccacgaucaucaucgugaucaucgucauccuccugagccugaucgccguggggcuccugcuguacugcaaggcccggugaggacuagugcaucacauuuaaaagcaucucagccuaccaugagaauaagagaaagaaaaugaagaucaauagcuuauucaucucuuuuucuuuuucguugguguaaagccaacacccugucuaaaaaacauaaauuucuuuaaucauuuugccucuuuucucugugcuucaauuaauaaaaaauggaaagaaccuagaucuaaaaaaaaaaaaaaaaaaaaaaaaaaaaaaaaaaaaaaaaaaaaaaaaaaaaaaaaaaaaaaaaugcaucccccccccccccccccccccccccccccccaaaggcucuuuucagagccaccagaauu

SEQ ID NO: 6042 - RNA, 1934 nt, Artificial Sequence
  mRNA product Design i-2 comprising derived and/or modified sequence from HRSV(A2)__F-del_DSCav1_mut5 (opt2)
gggagaggcgcugccuacggagguggcagccaucuccuucucggcaucaagcuuaccauggagcuccucauccucaaggccaacgccaucaccaccauccucaccgccgucaccuucugcuucgccuccggccagaacaucaccgaggaguucuaccaguccaccugcuccgccgucuccaagggcuaccucuccgcccuccgcaccggcugguacaccuccgucaucaccaucgagcucuccaacaucaaggagaacaagugcaacggcaccgacgccaaggucaagcucaucaagcaggagcucgacaaguacaagaacgccgucaccgagcuccagcuccucaugcaguccacccccgccaccggcuccggcuccgccaucgccuccggcgucgccgucugcaagguccuccaccucgagggcgaggucaacaagaucaaguccgcccuccucuccaccaacaaggccgucgucucccucuccggcugcggcgucuccguccucaccuucaagguccucgaccucaagaacuacaucgacaagcagcuccuccccauccucaacaagcaguccugcuccaucuccaacaucgagaccgucaucgaguuccagcagaagaacaaccgccuccucgagaucacccgcgaguucuccgucaacgccggcgucaccacccccgucuccaccuacaugcucaccaacuccgagcuccucucccucaucaacgacaugcccaucaccaacgaccagaagaagcucauguccaacaacguccagaucguccgccagcaguccuacuccaucaugugcaucaucaaggaggagguccucgccuacgucguccagcucccccucuacggcgucaucgacacccccugcuggaagcuccacaccuccccccucugcaccaccaacaccaaggagggcuccaacaucugccucacccgcaccgaccgcggcugguacugcgacaacgccggcuccgucuccuucuucccccaggccgagaccugcaagguccaguccaaccgcgucuucugcgacaccaugaacucccgcacccuccccuccgaggucaaccucugcaacgucgacaucuucaaccccaaguacgacugcaagaucaugaccuccaagaccgacgucuccuccuccgucaucaccucccucggcgccaucgucuccugcuacggcaagaccaagugcaccgccuccaacaagugccgcggcaucaucaagaccuucuccaacggcugcgacuacgucuccaacaagggcgucgacaccgucuccgucggcaacacccucuacuacgucaacaagcaggagggcaagucccucuacgucaagggcgagcccaucaucaacuucuacgacccccucgucuuccccuccgacgaguucgacgccuccaucucccaggucaacgagaagaucaaccagucccucgccuucauccgcaaguccgacgagcuccuccacaacgucaacgccggcaaguccaccaccaacaucaugaucaccaccaucaucaucgucaucaucgucauccuccucucccucaucgccgucggccuccuccucuacugcaaggcccgcugaggacuagugcaucacauuuaaaagcaucucagccuaccaugagaauaagagaaagaaaaugaagaucaauagcuuauucaucucuuuuucuuuuucguugguguaaagccaacacccugucuaaaaaacauaaauuucuuuaaucauuuugccucuuuucucugugcuucaauuaauaaaaaauggaaagaaccuagaucuaaaaaaaaaaaaaaaaaaaaaaaaaaaaaaaaaaaaaaaaaaaaaaaaaaaaaaaaaaaaaaaaugcaucccccccccccccccccccccccccccccccaaaggcucuuuucagagccaccagaauu

SEQ ID NO: 6043 - RNA, 1934 nt, Artificial Sequence
  mRNA product Design i-2 comprising derived and/or modified sequence from HRSV(A2)__F-del_DSCav1_mut5 (opt3)
gggagaggcgcugccuacggagguggcagccaucuccuucucggcaucaagcuuaccauggagcugcucauccuuaaggccaacgcuauuaccacaauacugacugcagugacguucugcuuugccagcggccagaauaucaccgaagaguucuaccaauccacauguucugcggucucaaaaggguauuugagugcuuuaagaacuggaugguacaccagcguuauuacaaucgaacuguccaacauuaaggagaauaaaugcaacgguaccgacgccaaggugaaacuaaucaagcaggaacucgauaaguauaaaaaugcaguaacugagcugcagcuucugaugcagucuacacccgccaccggcucggggucagcuauagcaagcggaguggccgucuguaagguguugcaccucgagggcgaaguuaacaaaaucaagagugcucugcuguccacgaauaaagccguggucucucucagcgguugcgggguguccguauuaacuuuuaagguucuggaccuuaagaacuacauugauaaacaauugcugccuauccuaaauaagcagucauguaguauuagcaacaucgagaccgugauagaguuccagcagaaaaauaacaggcuccuggaaauuacacgggaguuuucugucaaugcgggagugacuaccccaguguccacauauaugcuuaccaacucagaacuguugagccucaucaaugacaugccgauuacgaacgaucaaaagaaacugaugaguaacaauguccagaucguucgccagcagucuuacuccaucaugugcauuauaaaggaggaaguguuagcauauguagugcaacugccccucuacggcgucaucgacacuccuuguuggaaacuucauacaagcccacugugcaccacuaacacaaaggagggcucgaauauuuguuugacccgaacggaucgugggugguacugcgacaacgccggaucuguguccuucuuuccccaggcugaaaccuguaagguucagucaaauagaguguucugcgauacaaugaacaguagaacucugccuagcgaggucaaucucugcaacguggacaucuuuaauccaaaauaugauuguaagauaaugaccuccaaaacagacguaucuagcucaguuauuaccagucugggugccaucguguccugcuacggcaagacuaaauguacagcaagcaacaagugcagggggaucauuaagaccuucucuaauggaugugauuaugucucaaacaaaggcguggacacugucaguguggguaauacgcuuuacuauguuaacaagcaagaggggaaaagccuguacgugaagggagaacccaucauuaauuuuuaugacccuuugguauucccauccgaugaguuugacgcuucuauaucgcaggucaacgagaaaaucaaccagagccucgccuucauucggaaguccgaugaacuguuacacaaugugaacgcgggcaagucaacaaccaauaucaugaucacuaccauuauaaucguuauuaucgugauucugcuaagucucaucgccgucggccugcuuuuguacugcaaagcacgcugaggacuagugcaucacauuuaaaagcaucucagccuaccaugagaauaagagaaagaaaaugaagaucaauagcuuauucaucucuuuuucuuuuucguugguguaaagccaacacccugucuaaaaaacauaaauuucuuuaaucauuuugccucuuuucucugugcuucaauuaauaaaaaauggaaagaaccuagaucuaaaaaaaaaaaaaaaaaaaaaaaaaaaaaaaaaaaaaaaaaaaaaaaaaaaaaaaaaaaaaaaaugcaucccccccccccccccccccccccccccccccaaaggcucuuuucagagccaccagaauu

SEQ ID NO: 6044 - RNA, 1934 nt, Artificial Sequence
  mRNA product Design i-2 comprising derived and/or modified sequence from HRSV(A2)__F-del_DSCav1_mut5 (opt4)
gggagaggcgcugccuacggagguggcagccaucuccuucucggcaucaagcuuaccauggagcugcugauccugaaggccaacgccaucaccaccauccugaccgccgugaccuucugcuucgccagcggccagaacaucaccgaggaguucuaccagagcaccugcagcgccgugagcaagggcuaccugagcgcccugagaaccggcugguacaccagcgugaucaccaucgagcugagcaacaucaaggagaacaagugcaacggcaccgacgccaaggugaagcugaucaagcaggagcuggacaaguacaagaacgccgugaccgagcugcagcugcugaugcagagcacccccgccaccggcagcggcagcgccaucgccagcggcguggccgugugcaaggugcugcaccuggagggcgaggugaacaagaucaagagcgcccugcugagcaccaacaaggccguggugagccugagcggcugcggcgugagcgugcugaccuucaaggugcuggaccugaagaacuacaucgacaagcagcugcugcccauccugaacaagcagagcugcagcaucagcaacaucgagaccgugaucgaguuccagcagaagaacaacagacugcuggagaucaccagagaguucagcgugaacgccggcgugaccacccccgugagcaccuacaugcugaccaacagcgagcugcugagccugaucaacgacaugcccaucaccaacgaccagaagaagcugaugagcaacaacgugcagaucgugagacagcagagcuacagcaucaugugcaucaucaaggaggaggugcuggccuacguggugcagcugccccuguacggcgugaucgacacccccugcuggaagcugcacaccagcccccugugcaccaccaacaccaaggagggcagcaacaucugccugaccagaaccgacagaggcugguacugcgacaacgccggcagcgugagcuucuucccccaggccgagaccugcaaggugcagagcaacagaguguucugcgacaccaugaacagcagaacccugcccagcgaggugaaccugugcaacguggacaucuucaaccccaaguacgacugcaagaucaugaccagcaagaccgacgugagcagcagcgugaucaccagccugggcgccaucgugagcugcuacggcaagaccaagugcaccgccagcaacaagugcagaggcaucaucaagaccuucagcaacggcugcgacuacgugagcaacaagggcguggacaccgugagcgugggcaacacccuguacuacgugaacaagcaggagggcaagagccuguacgugaagggcgagcccaucaucaacuucuacgacccccugguguuccccagcgacgaguucgacgccagcaucagccaggugaacgagaagaucaaccagagccuggccuucaucagaaagagcgacgagcugcugcacaacgugaacgccggcaagagcaccaccaacaucaugaucaccaccaucaucaucgugaucaucgugauccugcugagccugaucgccgugggccugcugcuguacugcaaggccagaugaggacuagugcaucacauuuaaaagcaucucagccuaccaugagaauaagagaaagaaaaugaagaucaauagcuuauucaucucuuuuucuuuuucguugguguaaagccaacacccugucuaaaaaacauaaauuucuuuaaucauuuugccucuuuucucugugcuucaauuaauaaaaaauggaaagaaccuagaucuaaaaaaaaaaaaaaaaaaaaaaaaaaaaaaaaaaaaaaaaaaaaaaaaaaaaaaaaaaaaaaaaugcaucccccccccccccccccccccccccccccccaaaggcucuuuucagagccaccagaauu

SEQ ID NO: 6045 - RNA, 1934 nt, Artificial Sequence
  mRNA product Design i-2 comprising derived and/or modified sequence from HRSV(A2)__F-del_DSCav1_mut5 (opt5)
gggagaggcgcugccuacggagguggcagccaucuccuucucggcaucaagcuuaccauggagcugcucauccugaaggccaacgcuauuaccacaauccuuacggccgugaccuucugcuuugcgagcggccagaauauuacagaagaguucuaccaauccaccuguucugcugucagcaaaggguaucuguccgcccucagaacaggaugguacaccucuguuaucacaauugaacugagcaacaucaaggagaauaaaugcaacggcaccgacgccaaggugaaacuuaucaagcaggaacuggauaaguauaaaaaugcugugacggagcuccagcugcugaugcaguccacccccgccacagggucuggaagcgcuauugccuccggcgucgcgguguguaagguucuccaccuggagggggaagugaacaaaaucaagagcgcccuucugucuaccaauaaagcugucgugucccucagcggaugcggcguuucugugcugacauuuaagguccuugaccugaagaacuacauugauaaacaacuccugccuauccugaauaagcaguccuguagcauuucuaacaucgagaccgugauugaguuccagcagaaaaauaaccggcuccuggaaaucacgcgcgaguuuuccgugaaugccggcgucacaaccccgguuagcacauauaugcuuaccaacuccgaacugcucucucugaucaaugacaugcccauuaccaacgaucaaaagaaacuuaugagcaacaaugugcagaucgugagacagcaguccuacagcauuaugugcaucauuaaggaggaaguccuggcuuaugugguucaacucccucuguacggggugaucgacacacccuguuggaaacugcauacgucuccucucugcaccacaaacaccaaggagggauccaauaucugucugacacggaccgaucgcggcugguacugcgacaacgccgggagcgucucuuucuuuccccaggcggaaacguguaaggugcagagcaauagaguuuucugcgauacaaugaacuccagaacccugccuucugaggugaaucucugcaacgucgacauuuuuaauccgaaauaugauuguaagaucaugaccagcaaaacagacguguccagcucugucauuaccucccugggagccaucgugagcugcuacggcaagacaaaauguacggcuucuaacaagugccgggggauuaucaagaccuucuccaauggaugugauuauguuagcaacaaaggcguggacacagucuccgugggcaauacccuuuacuauguuaacaagcaagaggggaaaucucuguacgugaagggagaacccaucauuaauuuuuaugacccucucgucuuccccagcgaugaguuugacgccuccaucucucaggugaacgagaaaauuaaccagagccuggcuuucauccgcaaguccgaugaacugcuccacaaugugaacgccggcaagagcacaaccaauauuaugaucacgaccauuaucaucguuauuaucgucauucugcuuucucugaucgccguggggcuccugcuguacugcaaagcuagaugaggacuagugcaucacauuuaaaagcaucucagccuaccaugagaauaagagaaagaaaaugaagaucaauagcuuauucaucucuuuuucuuuuucguugguguaaagccaacacccugucuaaaaaacauaaauuucuuuaaucauuuugccucuuuucucugugcuucaauuaauaaaaaauggaaagaaccuagaucuaaaaaaaaaaaaaaaaaaaaaaaaaaaaaaaaaaaaaaaaaaaaaaaaaaaaaaaaaaaaaaaaugcaucccccccccccccccccccccccccccccccaaaggcucuuuucagagccaccagaauu

SEQ ID NO: 6046 - RNA, 1934 nt, Artificial Sequence
  mRNA product Design i-2 comprising derived and/or modified sequence from HRSV(A2)__F-del_DSCav1_mut5 (opt6)
gggagaggcgcugccuacggagguggcagccaucuccuucucggcaucaagcuuaccauggaacuuuuaauacugaaagcaaaugccaucacaaccauacuaacugccgucacauucugcuuugcaucaggacaaaacauaacagaagaauuuuaccaauccacaugcucagcaguaucaaaaggauaucuaucggcacuuagaacuggaugguacacaaguguuauaacuauagaacucucaaacauaaaagaaaacaaaugcaauggaacagacgcaaaaguaaaacuaauaaaacaagaacucgauaaauauaaaaaugcaguaaccgaacuacaacuauuaaugcaaagcacacccgcaacaggcagcggaucagcaauagcaagcggagucgcaguauguaaaguacuacaucuagaaggagaagucaacaaaaucaaaucugcacuucuauccacaaacaaagcuguaguaucccuauccggaugcggagucucaguauuaacuuuuaaaguacuagaccuuaaaaacuacauagauaaacaacuauuaccaauacuaaauaaacaaucaugcagcauauccaauauagagacaguaauugaauuucaacaaaaaaacaacagauuacuagaaauuacucgugaauuuuccguaaaugccggagucacaacaccaguaucaaccuauaugcuaacaaacagcgaacuacuuagcuuaauaaaugacaugccaauaacaaaugaccaaaaaaaacuuaugucaaauaacguacaaaucgucagacaacaauccuacucuauaauguguauaauuaaagaagaaguccuagcauacguaguucaauuaccacucuauggaguaauagauacaccaugcuggaaacuacacacgucaccacuauguacaacaaacacaaaagaaggauccaauauaugccuaacaagaaccgacagaggcugguauugugacaacgcaggauccguuucauucuucccacaagcagaaaccuguaaaguacaaucuaauagaguauuuugcgacacaaugaacaguagaacacuaccaagcgagguuaaucuauguaacguagacauauucaauccaaaauaugauugcaaaauaaugacaucaaaaacagauguaucgucgaguguaauaacaagucugggagcuauaguaagcugcuacggcaagacgaaauguaccgcuucaaauaaaugcagaggaaucauuaaaacauucucgaacggaugcgacuacguaaguaauaaaggugucgacaccguaucaguagggaauacauuauacuacgucaacaaacaagaaggaaaaucucuauauguaaaaggagaaccaauaauaaauuucuaugacccucuaguauucccaucagaugaauuugacgcuuccauaucacaaguaaacgaaaaaaucaaucaaucuuuagcauucauacgaaaaagugaugaacuccuacacaacgucaacgcaggaaaaagcacaacaaauauaaugaucacaacaaucaucauaguaauaauaguaauacuacuaucauuaauagcaguaggauuauugcuuuacugcaaagcacgauagggacuagugcaucacauuuaaaagcaucucagccuaccaugagaauaagagaaagaaaaugaagaucaauagcuuauucaucucuuuuucuuuuucguugguguaaagccaacacccugucuaaaaaacauaaauuucuuuaaucauuuugccucuuuucucugugcuucaauuaauaaaaaauggaaagaaccuagaucuaaaaaaaaaaaaaaaaaaaaaaaaaaaaaaaaaaaaaaaaaaaaaaaaaaaaaaaaaaaaaaaaugcaucccccccccccccccccccccccccccccccaaaggcucuuuucagagccaccagaauu

SEQ ID NO: 6047 - RNA, 1934 nt, Artificial Sequence
  mRNA product Design i-2 comprising derived and/or modified sequence from HRSV(A2)__F-del_DSCav1_mut5 (opt11)
gggagaggcgcugccuacggagguggcagccaucuccuucucggcaucaagcuuaccauggaacuccucauccucaaagccaacgccauaaccacaauacucaccgccguaaccuucugcuuugcgucgggacaaaacaucaccgaagaguucuaccaauccacuugcuccgcaguaagcaaaggauaccucuccgcccugcgaaccgguugguacacaucagucaucacaaucgaacucucaaacauaaaagaaaacaaaugcaacggcaccgacgcaaaggucaaauuaaucaagcaagaacuagacaaauacaaaaacgccgucacagaacuccagcugcuaaugcagagcacacccgcaacuggcagcggauccgccaucgcaucaggagucgccgugugcaaaguccuacaccucgaaggagaagugaacaaaaucaaaucagcccuacucuccaccaacaaggccgucgucucccucuccggcugcggugucuccguccuaaccuucaaagugcuagaccucaagaacuacaucgacaaacaacuccuaccaauacucaacaagcaaucuugcuccaucuccaacaucgaaaccguaaucgaguuccaacagaagaacaaccgccuccucgaaaucacccgcgaguucucugucaacgcaggggucaccacucccgucuccacauacaugcucacaaacuccgaacuccucagccucaucaacgacaugcccauaaccaacgaccagaaaaagcuaaugagcaauaacguccaaaucguuagacaacaaaguuauuccaucaugugcaucaucaaagaagaaguccucgccuacgucguacaacucccccucuauggcgucaucgacacccccugcuggaaacugcacacaucaccccucugcaccacaaacaccaaagaaggcucaaacaucugccuaacucgcaccgaccgcggcugguacugcgacaacgccggcagcguaucauucuuuccccaagccgaaacaugcaaaguucaauccaaccgcgucuucugcgacacaaugaacuccagaacgcuccccagcgaagucaaccucuguaacguagacaucuucaacccuaaguacgacugcaaaaucaugaccuccaaaacugauguauccuccuccgucaucacaucccugggcgccaucgucagcugcuacggcaaaacaaaaugcacugccucaaacaaaugccgagguaucauaaagaccuucucaaacggaugcgauuacgucagcaacaaaggcgucgacaccgucagugucggcaacacccucuacuacgucaacaaacaagaaggaaaaucccucuacgucaaaggcgaacccaucaucaacuucuacgacccccucgucuuccccagcgacgaguucgacgccuccaucucacaagucaacgaaaagauaaaccaaucucuagccuucauccgcaaauccgaugaacuccugcauaacgucaacgccggcaaauccaccacaaacaucaugaucacuaccauaaucaucgucauaaucguaauccuccuaucucuuaucgcagucggccuacuacucuacugcaaagcccgcuaaggacuagugcaucacauuuaaaagcaucucagccuaccaugagaauaagagaaagaaaaugaagaucaauagcuuauucaucucuuuuucuuuuucguugguguaaagccaacacccugucuaaaaaacauaaauuucuuuaaucauuuugccucuuuucucugugcuucaauuaauaaaaaauggaaagaaccuagaucuaaaaaaaaaaaaaaaaaaaaaaaaaaaaaaaaaaaaaaaaaaaaaaaaaaaaaaaaaaaaaaaaugcaucccccccccccccccccccccccccccccccaaaggcucuuuucagagccaccagaauu

SEQ ID NO: 6048 - RNA, 1930 nt, Artificial Sequence
  mRNA product Design i-2 comprising derived and/or modified sequence from HRSV(A2)__F-del_DSCav1_mut5 (opt1)
ggggcgcugccuacggagguggcagccaucuccuucucggcaucaagcuuaccauggagcugcucauccugaaggccaacgccaucaccaccauccugacggcggugaccuucugcuucgccagcggccagaacaucaccgaggaguucuaccaguccacgugcagcgccgucuccaagggguaccucagcgcccugcggaccggcugguacaccuccgugaucaccaucgagcugagcaacaucaaggagaacaagugcaacgggaccgacgccaaggugaagcucaucaagcaggagcuggacaaguacaagaacgcggucacggagcugcagcuccugaugcaguccaccccggcaaccggcuccggcuccgccaucgcgagcggcgucgccgugugcaaggugcugcaccucgagggggaggucaacaagaucaagagcgcccugcuguccaccaacaaggccguggugagccucuccggcugcggcgucagcgugcugaccuucaaggugcuggaccucaagaacuacaucgacaagcagcugcugcccauccugaacaagcagagcugcuccaucagcaacaucgagacggugaucgaguuccagcagaagaacaaccggcuccuggagaucacccgcgaguucagcgugaacgccggggucaccacccccguguccacguacaugcugaccaacagcgagcuccugucccugaucaacgacaugccgaucaccaacgaccagaagaagcucaugagcaacaacgugcagaucguccggcagcaguccuacagcaucaugugcaucaucaaggaggaggugcuggcguacgugguccagcugccccucuacggcgugaucgacacccccugcuggaagcugcacacgagcccccugugcaccaccaacaccaaggagggguccaacaucugccucacgcgcaccgaccggggcugguacugcgacaacgccggcagcgucuccuucuucccgcaggccgagaccugcaaggugcagagcaaccgcguguucugcgacaccaugaacucccggacgcugcccagcgagguaaaccucugcaacgucgacaucuucaaccccaaguacgacugcaagaucaugaccuccaagaccgacgugagcuccagcgugaucaccucccugggggccaucgucagcugcuacggcaagacgaagugcaccgccagcaacaagugccgggggaucaucaagaccuucuccaacggcugcgacuacgugagcaacaagggcguggacaccguguccgucgggaacacccuguacuacgugaacaagcaggagggcaagagccucuacgugaagggggagcccaucaucaacuucuacgacccgcuggucuuccccuccgacgaguucgacgcgagcaucucccaggugaacgagaagaucaaccagagccuggccuucauccgcaaguccgacgagcugcuccacaacgugaacgccggcaagagcacgaccaacaucaugaucaccaccaucaucaucgucaucaucgugauccugcugucccucaucgccguggggcugcugcucuacugcaaggcccggugaggacuagugcaucacauuuaaaagcaucucagccuaccaugagaauaagagaaagaaaaugaagaucaauagcuuauucaucucuuuuucuuuuucguugguguaaagccaacacccugucuaaaaaacauaaauuucuuuaaucauuuugccucuuuucucugugcuucaauuaauaaaaaauggaaagaaccuagaucuaaaaaaaaaaaaaaaaaaaaaaaaaaaaaaaaaaaaaaaaaaaaaaaaaaaaaaaaaaaaaaaaugcaucccccccccccccccccccccccccccccccaaaggcucuuuucagagccaccagaauu

SEQ ID NO: 6049 - RNA, 1930 nt, Artificial Sequence
  mRNA product Design i-2 comprising derived and/or modified sequence from HRSV(A2)__F-del_DSCav1_mut5 (opt1)
ggggcgcugccuacggagguggcagccaucuccuucucggcaucaagcuuaccauggagcugcucauccugaaggccaacgccaucaccaccauccugacggcggugaccuucugcuucgccagcggccagaacaucaccgaggaguucuaccaguccacgugcagcgccgucuccaagggguaccucagcgcccugcgcaccggcugguacaccuccgugaucaccaucgagcugagcaacaucaaggagaacaagugcaacgggaccgacgccaaggugaagcucaucaagcaggagcuggacaaguacaagaacgcggucacggagcugcagcuccugaugcaguccacccccgccaccggcagcggguccgccaucgccagcggcguggcggugugcaagguccugcaccucgagggcgaggugaacaagaucaaguccgcccugcugagcaccaacaaggccguggucucccucagcgggugcggcguguccgugcugacguucaagguccuggaccucaagaacuacaucgacaagcagcugcugccgauccucaacaagcagagcugcuccaucagcaacaucgagaccgugaucgaguuccagcagaagaacaaccggcugcuggagaucacccgcgaguucuccgugaacgccggggucaccacgcccgugagcaccuacaugcucaccaacagcgagcugcugucccucaucaacgacaugcccaucaccaacgaccagaagaagcugaugagcaacaacgugcagaucguccggcagcaguccuacagcaucaugugcaucaucaaggaggaggugcuggccuacgugguccagcucccccuguacggcgugaucgacacgccgugcuggaagcugcacaccagcccccucugcaccaccaacacgaaggagggguccaacaucugccugacccgcaccgaccggggcugguacugcgacaacgcgggcuccgugagcuucuucccccaggccgagaccugcaagguccaguccaaccgcguguucugcgacacgaugaacagccggacccuccccuccgaggucaaccugugcaacguggacaucuucaacccgaaguacgacugcaagaucaugaccagcaagaccgacguguccagcuccgucaucacgagccugggggccaucguguccugcuacggcaagaccaagugcaccgccagcaacaagugccgggggaucaucaagaccuucuccaacggcugcgacuacgugagcaacaagggcgucgacacggugagcguggggaacacccucuacuacgucaacaagcaggagggcaagucccuguacgugaagggggagcccaucaucaacuucuacgacccccugguguuccccagcgacgaguucgacgccuccaucagccaggucaacgagaagaucaaccagucccucgcguucauccgcaagagcgacgagcugcugcacaacgugaacgccggcaaguccaccaccaacaucaugaucaccacgaucaucaucgugaucaucgucauccuccugagccugaucgccguggggcuccugcuguacugcaaggcccggugaggacuagugcaucacauuuaaaagcaucucagccuaccaugagaauaagagaaagaaaaugaagaucaauagcuuauucaucucuuuuucuuuuucguugguguaaagccaacacccugucuaaaaaacauaaauuucuuuaaucauuuugccucuuuucucugugcuucaauuaauaaaaaauggaaagaaccuagaucuaaaaaaaaaaaaaaaaaaaaaaaaaaaaaaaaaaaaaaaaaaaaaaaaaaaaaaaaaaaaaaaaugcaucccccccccccccccccccccccccccccccaaaggcucuuuucagagccaccagaauu

SEQ ID NO: 6050 - RNA, 1930 nt, Artificial Sequence
  mRNA product Design i-2 comprising derived and/or modified sequence from HRSV(A2)__F-del_DSCav1_mut5 (opt2)
ggggcgcugccuacggagguggcagccaucuccuucucggcaucaagcuuaccauggagcuccucauccucaaggccaacgccaucaccaccauccucaccgccgucaccuucugcuucgccuccggccagaacaucaccgaggaguucuaccaguccaccugcuccgccgucuccaagggcuaccucuccgcccuccgcaccggcugguacaccuccgucaucaccaucgagcucuccaacaucaaggagaacaagugcaacggcaccgacgccaaggucaagcucaucaagcaggagcucgacaaguacaagaacgccgucaccgagcuccagcuccucaugcaguccacccccgccaccggcuccggcuccgccaucgccuccggcgucgccgucugcaagguccuccaccucgagggcgaggucaacaagaucaaguccgcccuccucuccaccaacaaggccgucgucucccucuccggcugcggcgucuccguccucaccuucaagguccucgaccucaagaacuacaucgacaagcagcuccuccccauccucaacaagcaguccugcuccaucuccaacaucgagaccgucaucgaguuccagcagaagaacaaccgccuccucgagaucacccgcgaguucuccgucaacgccggcgucaccacccccgucuccaccuacaugcucaccaacuccgagcuccucucccucaucaacgacaugcccaucaccaacgaccagaagaagcucauguccaacaacguccagaucguccgccagcaguccuacuccaucaugugcaucaucaaggaggagguccucgccuacgucguccagcucccccucuacggcgucaucgacacccccugcuggaagcuccacaccuccccccucugcaccaccaacaccaaggagggcuccaacaucugccucacccgcaccgaccgcggcugguacugcgacaacgccggcuccgucuccuucuucccccaggccgagaccugcaagguccaguccaaccgcgucuucugcgacaccaugaacucccgcacccuccccuccgaggucaaccucugcaacgucgacaucuucaaccccaaguacgacugcaagaucaugaccuccaagaccgacgucuccuccuccgucaucaccucccucggcgccaucgucuccugcuacggcaagaccaagugcaccgccuccaacaagugccgcggcaucaucaagaccuucuccaacggcugcgacuacgucuccaacaagggcgucgacaccgucuccgucggcaacacccucuacuacgucaacaagcaggagggcaagucccucuacgucaagggcgagcccaucaucaacuucuacgacccccucgucuuccccuccgacgaguucgacgccuccaucucccaggucaacgagaagaucaaccagucccucgccuucauccgcaaguccgacgagcuccuccacaacgucaacgccggcaaguccaccaccaacaucaugaucaccaccaucaucaucgucaucaucgucauccuccucucccucaucgccgucggccuccuccucuacugcaaggcccgcugaggacuagugcaucacauuuaaaagcaucucagccuaccaugagaauaagagaaagaaaaugaagaucaauagcuuauucaucucuuuuucuuuuucguugguguaaagccaacacccugucuaaaaaacauaaauuucuuuaaucauuuugccucuuuucucugugcuucaauuaauaaaaaauggaaagaaccuagaucuaaaaaaaaaaaaaaaaaaaaaaaaaaaaaaaaaaaaaaaaaaaaaaaaaaaaaaaaaaaaaaaaugcaucccccccccccccccccccccccccccccccaaaggcucuuuucagagccaccagaauu

SEQ ID NO: 6051 - RNA, 1930 nt, Artificial Sequence
  mRNA product Design i-2 comprising derived and/or modified sequence from HRSV(A2)__F-del_DSCav1_mut5 (opt3)
ggggcgcugccuacggagguggcagccaucuccuucucggcaucaagcuuaccauggagcugcucauccuuaaggccaacgcuauuaccacaauacugacugcagugacguucugcuuugccagcggccagaauaucaccgaagaguucuaccaauccacauguucugcggucucaaaaggguauuugagugcuuuaagaacuggaugguacaccagcguuauuacaaucgaacuguccaacauuaaggagaauaaaugcaacgguaccgacgccaaggugaaacuaaucaagcaggaacucgauaaguauaaaaaugcaguaacugagcugcagcuucugaugcagucuacacccgccaccggcucggggucagcuauagcaagcggaguggccgucuguaagguguugcaccucgagggcgaaguuaacaaaaucaagagugcucugcuguccacgaauaaagccguggucucucucagcgguugcgggguguccguauuaacuuuuaagguucuggaccuuaagaacuacauugauaaacaauugcugccuauccuaaauaagcagucauguaguauuagcaacaucgagaccgugauagaguuccagcagaaaaauaacaggcuccuggaaauuacacgggaguuuucugucaaugcgggagugacuaccccaguguccacauauaugcuuaccaacucagaacuguugagccucaucaaugacaugccgauuacgaacgaucaaaagaaacugaugaguaacaauguccagaucguucgccagcagucuuacuccaucaugugcauuauaaaggaggaaguguuagcauauguagugcaacugccccucuacggcgucaucgacacuccuuguuggaaacuucauacaagcccacugugcaccacuaacacaaaggagggcucgaauauuuguuugacccgaacggaucgugggugguacugcgacaacgccggaucuguguccuucuuuccccaggcugaaaccuguaagguucagucaaauagaguguucugcgauacaaugaacaguagaacucugccuagcgaggucaaucucugcaacguggacaucuuuaauccaaaauaugauuguaagauaaugaccuccaaaacagacguaucuagcucaguuauuaccagucugggugccaucguguccugcuacggcaagacuaaauguacagcaagcaacaagugcagggggaucauuaagaccuucucuaauggaugugauuaugucucaaacaaaggcguggacacugucaguguggguaauacgcuuuacuauguuaacaagcaagaggggaaaagccuguacgugaagggagaacccaucauuaauuuuuaugacccuuugguauucccauccgaugaguuugacgcuucuauaucgcaggucaacgagaaaaucaaccagagccucgccuucauucggaaguccgaugaacuguuacacaaugugaacgcgggcaagucaacaaccaauaucaugaucacuaccauuauaaucguuauuaucgugauucugcuaagucucaucgccgucggccugcuuuuguacugcaaagcacgcugaggacuagugcaucacauuuaaaagcaucucagccuaccaugagaauaagagaaagaaaaugaagaucaauagcuuauucaucucuuuuucuuuuucguugguguaaagccaacacccugucuaaaaaacauaaauuucuuuaaucauuuugccucuuuucucugugcuucaauuaauaaaaaauggaaagaaccuagaucuaaaaaaaaaaaaaaaaaaaaaaaaaaaaaaaaaaaaaaaaaaaaaaaaaaaaaaaaaaaaaaaaugcaucccccccccccccccccccccccccccccccaaaggcucuuuucagagccaccagaauu

SEQ ID NO: 6052 - RNA, 1930 nt, Artificial Sequence
  mRNA product Design i-2 comprising derived and/or modified sequence from HRSV(A2)__F-del_DSCav1_mut5 (opt4)
ggggcgcugccuacggagguggcagccaucuccuucucggcaucaagcuuaccauggagcugcugauccugaaggccaacgccaucaccaccauccugaccgccgugaccuucugcuucgccagcggccagaacaucaccgaggaguucuaccagagcaccugcagcgccgugagcaagggcuaccugagcgcccugagaaccggcugguacaccagcgugaucaccaucgagcugagcaacaucaaggagaacaagugcaacggcaccgacgccaaggugaagcugaucaagcaggagcuggacaaguacaagaacgccgugaccgagcugcagcugcugaugcagagcacccccgccaccggcagcggcagcgccaucgccagcggcguggccgugugcaaggugcugcaccuggagggcgaggugaacaagaucaagagcgcccugcugagcaccaacaaggccguggugagccugagcggcugcggcgugagcgugcugaccuucaaggugcuggaccugaagaacuacaucgacaagcagcugcugcccauccugaacaagcagagcugcagcaucagcaacaucgagaccgugaucgaguuccagcagaagaacaacagacugcuggagaucaccagagaguucagcgugaacgccggcgugaccacccccgugagcaccuacaugcugaccaacagcgagcugcugagccugaucaacgacaugcccaucaccaacgaccagaagaagcugaugagcaacaacgugcagaucgugagacagcagagcuacagcaucaugugcaucaucaaggaggaggugcuggccuacguggugcagcugccccuguacggcgugaucgacacccccugcuggaagcugcacaccagcccccugugcaccaccaacaccaaggagggcagcaacaucugccugaccagaaccgacagaggcugguacugcgacaacgccggcagcgugagcuucuucccccaggccgagaccugcaaggugcagagcaacagaguguucugcgacaccaugaacagcagaacccugcccagcgaggugaaccugugcaacguggacaucuucaaccccaaguacgacugcaagaucaugaccagcaagaccgacgugagcagcagcgugaucaccagccugggcgccaucgugagcugcuacggcaagaccaagugcaccgccagcaacaagugcagaggcaucaucaagaccuucagcaacggcugcgacuacgugagcaacaagggcguggacaccgugagcgugggcaacacccuguacuacgugaacaagcaggagggcaagagccuguacgugaagggcgagcccaucaucaacuucuacgacccccugguguuccccagcgacgaguucgacgccagcaucagccaggugaacgagaagaucaaccagagccuggccuucaucagaaagagcgacgagcugcugcacaacgugaacgccggcaagagcaccaccaacaucaugaucaccaccaucaucaucgugaucaucgugauccugcugagccugaucgccgugggccugcugcuguacugcaaggccagaugaggacuagugcaucacauuuaaaagcaucucagccuaccaugagaauaagagaaagaaaaugaagaucaauagcuuauucaucucuuuuucuuuuucguugguguaaagccaacacccugucuaaaaaacauaaauuucuuuaaucauuuugccucuuuucucugugcuucaauuaauaaaaaauggaaagaaccuagaucuaaaaaaaaaaaaaaaaaaaaaaaaaaaaaaaaaaaaaaaaaaaaaaaaaaaaaaaaaaaaaaaaugcaucccccccccccccccccccccccccccccccaaaggcucuuuucagagccaccagaauu

SEQ ID NO: 6053 - RNA, 1930 nt, Artificial Sequence
  mRNA product Design i-2 comprising derived and/or modified sequence from HRSV(A2)__F-del_DSCav1_mut5 (opt5)
ggggcgcugccuacggagguggcagccaucuccuucucggcaucaagcuuaccauggagcugcucauccugaaggccaacgcuauuaccacaauccuuacggccgugaccuucugcuuugcgagcggccagaauauuacagaagaguucuaccaauccaccuguucugcugucagcaaaggguaucuguccgcccucagaacaggaugguacaccucuguuaucacaauugaacugagcaacaucaaggagaauaaaugcaacggcaccgacgccaaggugaaacuuaucaagcaggaacuggauaaguauaaaaaugcugugacggagcuccagcugcugaugcaguccacccccgccacagggucuggaagcgcuauugccuccggcgucgcgguguguaagguucuccaccuggagggggaagugaacaaaaucaagagcgcccuucugucuaccaauaaagcugucgugucccucagcggaugcggcguuucugugcugacauuuaagguccuugaccugaagaacuacauugauaaacaacuccugccuauccugaauaagcaguccuguagcauuucuaacaucgagaccgugauugaguuccagcagaaaaauaaccggcuccuggaaaucacgcgcgaguuuuccgugaaugccggcgucacaaccccgguuagcacauauaugcuuaccaacuccgaacugcucucucugaucaaugacaugcccauuaccaacgaucaaaagaaacuuaugagcaacaaugugcagaucgugagacagcaguccuacagcauuaugugcaucauuaaggaggaaguccuggcuuaugugguucaacucccucuguacggggugaucgacacacccuguuggaaacugcauacgucuccucucugcaccacaaacaccaaggagggauccaauaucugucugacacggaccgaucgcggcugguacugcgacaacgccgggagcgucucuuucuuuccccaggcggaaacguguaaggugcagagcaauagaguuuucugcgauacaaugaacuccagaacccugccuucugaggugaaucucugcaacgucgacauuuuuaauccgaaauaugauuguaagaucaugaccagcaaaacagacguguccagcucugucauuaccucccugggagccaucgugagcugcuacggcaagacaaaauguacggcuucuaacaagugccgggggauuaucaagaccuucuccaauggaugugauuauguuagcaacaaaggcguggacacagucuccgugggcaauacccuuuacuauguuaacaagcaagaggggaaaucucuguacgugaagggagaacccaucauuaauuuuuaugacccucucgucuuccccagcgaugaguuugacgccuccaucucucaggugaacgagaaaauuaaccagagccuggcuuucauccgcaaguccgaugaacugcuccacaaugugaacgccggcaagagcacaaccaauauuaugaucacgaccauuaucaucguuauuaucgucauucugcuuucucugaucgccguggggcuccugcuguacugcaaagcuagaugaggacuagugcaucacauuuaaaagcaucucagccuaccaugagaauaagagaaagaaaaugaagaucaauagcuuauucaucucuuuuucuuuuucguugguguaaagccaacacccugucuaaaaaacauaaauuucuuuaaucauuuugccucuuuucucugugcuucaauuaauaaaaaauggaaagaaccuagaucuaaaaaaaaaaaaaaaaaaaaaaaaaaaaaaaaaaaaaaaaaaaaaaaaaaaaaaaaaaaaaaaaugcaucccccccccccccccccccccccccccccccaaaggcucuuuucagagccaccagaauu

SEQ ID NO: 6054 - RNA, 1930 nt, Artificial Sequence
  mRNA product Design i-2 comprising derived and/or modified sequence from HRSV(A2)__F-del_DSCav1_mut5 (opt6)
ggggcgcugccuacggagguggcagccaucuccuucucggcaucaagcuuaccauggaacuuuuaauacugaaagcaaaugccaucacaaccauacuaacugccgucacauucugcuuugcaucaggacaaaacauaacagaagaauuuuaccaauccacaugcucagcaguaucaaaaggauaucuaucggcacuuagaacuggaugguacacaaguguuauaacuauagaacucucaaacauaaaagaaaacaaaugcaauggaacagacgcaaaaguaaaacuaauaaaacaagaacucgauaaauauaaaaaugcaguaaccgaacuacaacuauuaaugcaaagcacacccgcaacaggcagcggaucagcaauagcaagcggagucgcaguauguaaaguacuacaucuagaaggagaagucaacaaaaucaaaucugcacuucuauccacaaacaaagcuguaguaucccuauccggaugcggagucucaguauuaacuuuuaaaguacuagaccuuaaaaacuacauagauaaacaacuauuaccaauacuaaauaaacaaucaugcagcauauccaauauagagacaguaauugaauuucaacaaaaaaacaacagauuacuagaaauuacucgugaauuuuccguaaaugccggagucacaacaccaguaucaaccuauaugcuaacaaacagcgaacuacuuagcuuaauaaaugacaugccaauaacaaaugaccaaaaaaaacuuaugucaaauaacguacaaaucgucagacaacaauccuacucuauaauguguauaauuaaagaagaaguccuagcauacguaguucaauuaccacucuauggaguaauagauacaccaugcuggaaacuacacacgucaccacuauguacaacaaacacaaaagaaggauccaauauaugccuaacaagaaccgacagaggcugguauugugacaacgcaggauccguuucauucuucccacaagcagaaaccuguaaaguacaaucuaauagaguauuuugcgacacaaugaacaguagaacacuaccaagcgagguuaaucuauguaacguagacauauucaauccaaaauaugauugcaaaauaaugacaucaaaaacagauguaucgucgaguguaauaacaagucugggagcuauaguaagcugcuacggcaagacgaaauguaccgcuucaaauaaaugcagaggaaucauuaaaacauucucgaacggaugcgacuacguaaguaauaaaggugucgacaccguaucaguagggaauacauuauacuacgucaacaaacaagaaggaaaaucucuauauguaaaaggagaaccaauaauaaauuucuaugacccucuaguauucccaucagaugaauuugacgcuuccauaucacaaguaaacgaaaaaaucaaucaaucuuuagcauucauacgaaaaagugaugaacuccuacacaacgucaacgcaggaaaaagcacaacaaauauaaugaucacaacaaucaucauaguaauaauaguaauacuacuaucauuaauagcaguaggauuauugcuuuacugcaaagcacgauagggacuagugcaucacauuuaaaagcaucucagccuaccaugagaauaagagaaagaaaaugaagaucaauagcuuauucaucucuuuuucuuuuucguugguguaaagccaacacccugucuaaaaaacauaaauuucuuuaaucauuuugccucuuuucucugugcuucaauuaauaaaaaauggaaagaaccuagaucuaaaaaaaaaaaaaaaaaaaaaaaaaaaaaaaaaaaaaaaaaaaaaaaaaaaaaaaaaaaaaaaaugcaucccccccccccccccccccccccccccccccaaaggcucuuuucagagccaccagaauu

SEQ ID NO: 6055 - RNA, 1930 nt, Artificial Sequence
  mRNA product Design i-2 comprising derived and/or modified sequence from HRSV(A2)__F-del_DSCav1_mut5 (opt11)
ggggcgcugccuacggagguggcagccaucuccuucucggcaucaagcuuaccauggaacuccucauccucaaagccaacgccauaaccacaauacucaccgccguaaccuucugcuuugcgucgggacaaaacaucaccgaagaguucuaccaauccacuugcuccgcaguaagcaaaggauaccucuccgcccugcgaaccgguugguacacaucagucaucacaaucgaacucucaaacauaaaagaaaacaaaugcaacggcaccgacgcaaaggucaaauuaaucaagcaagaacuagacaaauacaaaaacgccgucacagaacuccagcugcuaaugcagagcacacccgcaacuggcagcggauccgccaucgcaucaggagucgccgugugcaaaguccuacaccucgaaggagaagugaacaaaaucaaaucagcccuacucuccaccaacaaggccgucgucucccucuccggcugcggugucuccguccuaaccuucaaagugcuagaccucaagaacuacaucgacaaacaacuccuaccaauacucaacaagcaaucuugcuccaucuccaacaucgaaaccguaaucgaguuccaacagaagaacaaccgccuccucgaaaucacccgcgaguucucugucaacgcaggggucaccacucccgucuccacauacaugcucacaaacuccgaacuccucagccucaucaacgacaugcccauaaccaacgaccagaaaaagcuaaugagcaauaacguccaaaucguuagacaacaaaguuauuccaucaugugcaucaucaaagaagaaguccucgccuacgucguacaacucccccucuauggcgucaucgacacccccugcuggaaacugcacacaucaccccucugcaccacaaacaccaaagaaggcucaaacaucugccuaacucgcaccgaccgcggcugguacugcgacaacgccggcagcguaucauucuuuccccaagccgaaacaugcaaaguucaauccaaccgcgucuucugcgacacaaugaacuccagaacgcuccccagcgaagucaaccucuguaacguagacaucuucaacccuaaguacgacugcaaaaucaugaccuccaaaacugauguauccuccuccgucaucacaucccugggcgccaucgucagcugcuacggcaaaacaaaaugcacugccucaaacaaaugccgagguaucauaaagaccuucucaaacggaugcgauuacgucagcaacaaaggcgucgacaccgucagugucggcaacacccucuacuacgucaacaaacaagaaggaaaaucccucuacgucaaaggcgaacccaucaucaacuucuacgacccccucgucuuccccagcgacgaguucgacgccuccaucucacaagucaacgaaaagauaaaccaaucucuagccuucauccgcaaauccgaugaacuccugcauaacgucaacgccggcaaauccaccacaaacaucaugaucacuaccauaaucaucgucauaaucguaauccuccuaucucuuaucgcagucggccuacuacucuacugcaaagcccgcuaaggacuagugcaucacauuuaaaagcaucucagccuaccaugagaauaagagaaagaaaaugaagaucaauagcuuauucaucucuuuuucuuuuucguugguguaaagccaacacccugucuaaaaaacauaaauuucuuuaaucauuuugccucuuuucucugugcuucaauuaauaaaaaauggaaagaaccuagaucuaaaaaaaaaaaaaaaaaaaaaaaaaaaaaaaaaaaaaaaaaaaaaaaaaaaaaaaaaaaaaaaaugcaucccccccccccccccccccccccccccccccaaaggcucuuuucagagccaccagaauu

SEQ ID NO: 6056 - RNA, 1765 nt, Artificial Sequence
  mRNA product Design i-3 comprising derived and/or modified sequence from HRSV(A2)__F-del_DSCav1_mut5 (opt1) R7457
gggagaaagcuuaccauggagcugcucauccugaaggccaacgccaucaccaccauccugacggcggugaccuucugcuucgccagcggccagaacaucaccgaggaguucuaccaguccacgugcagcgccgucuccaagggguaccucagcgcccugcggaccggcugguacaccuccgugaucaccaucgagcugagcaacaucaaggagaacaagugcaacgggaccgacgccaaggugaagcucaucaagcaggagcuggacaaguacaagaacgcggucacggagcugcagcuccugaugcaguccaccccggcaaccggcuccggcuccgccaucgcgagcggcgucgccgugugcaaggugcugcaccucgagggggaggucaacaagaucaagagcgcccugcuguccaccaacaaggccguggugagccucuccggcugcggcgucagcgugcugaccuucaaggugcuggaccucaagaacuacaucgacaagcagcugcugcccauccugaacaagcagagcugcuccaucagcaacaucgagacggugaucgaguuccagcagaagaacaaccggcuccuggagaucacccgcgaguucagcgugaacgccggggucaccacccccguguccacguacaugcugaccaacagcgagcuccugucccugaucaacgacaugccgaucaccaacgaccagaagaagcucaugagcaacaacgugcagaucguccggcagcaguccuacagcaucaugugcaucaucaaggaggaggugcuggcguacgugguccagcugccccucuacggcgugaucgacacccccugcuggaagcugcacacgagcccccugugcaccaccaacaccaaggagggguccaacaucugccucacgcgcaccgaccggggcugguacugcgacaacgccggcagcgucuccuucuucccgcaggccgagaccugcaaggugcagagcaaccgcguguucugcgacaccaugaacucccggacgcugcccagcgagguaaaccucugcaacgucgacaucuucaaccccaaguacgacugcaagaucaugaccuccaagaccgacgugagcuccagcgugaucaccucccugggggccaucgucagcugcuacggcaagacgaagugcaccgccagcaacaagugccgggggaucaucaagaccuucuccaacggcugcgacuacgugagcaacaagggcguggacaccguguccgucgggaacacccuguacuacgugaacaagcaggagggcaagagccucuacgugaagggggagcccaucaucaacuucuacgacccgcuggucuuccccuccgacgaguucgacgcgagcaucucccaggugaacgagaagaucaaccagagccuggccuucauccgcaaguccgacgagcugcuccacaacgugaacgccggcaagagcacgaccaacaucaugaucaccaccaucaucaucgucaucaucgugauccugcugucccucaucgccguggggcugcugcucuacugcaaggcccggugaggacuaguuauaagacugacuagcccgaugggccucccaacgggcccuccuccccuccuugcaccgagauuaauaaaaaaaaaaaaaaaaaaaaaaaaaaaaaaaaaaaaaaaaaaaaaaaaaaaaaaaaaaaaaaaaugcaucccccccccccccccccccccccccccccccaaaggcucuuuucagagccaccagaauu

SEQ ID NO: 6057 - RNA, 1765 nt, Artificial Sequence
  mRNA product Design i-3 comprising derived and/or modified sequence from HRSV(A2)__F-del_DSCav1_mut5 (opt1)
gggagaaagcuuaccauggagcugcucauccugaaggccaacgccaucaccaccauccugacggcggugaccuucugcuucgccagcggccagaacaucaccgaggaguucuaccaguccacgugcagcgccgucuccaagggguaccucagcgcccugcgcaccggcugguacaccuccgugaucaccaucgagcugagcaacaucaaggagaacaagugcaacgggaccgacgccaaggugaagcucaucaagcaggagcuggacaaguacaagaacgcggucacggagcugcagcuccugaugcaguccacccccgccaccggcagcggguccgccaucgccagcggcguggcggugugcaagguccugcaccucgagggcgaggugaacaagaucaaguccgcccugcugagcaccaacaaggccguggucucccucagcgggugcggcguguccgugcugacguucaagguccuggaccucaagaacuacaucgacaagcagcugcugccgauccucaacaagcagagcugcuccaucagcaacaucgagaccgugaucgaguuccagcagaagaacaaccggcugcuggagaucacccgcgaguucuccgugaacgccggggucaccacgcccgugagcaccuacaugcucaccaacagcgagcugcugucccucaucaacgacaugcccaucaccaacgaccagaagaagcugaugagcaacaacgugcagaucguccggcagcaguccuacagcaucaugugcaucaucaaggaggaggugcuggccuacgugguccagcucccccuguacggcgugaucgacacgccgugcuggaagcugcacaccagcccccucugcaccaccaacacgaaggagggguccaacaucugccugacccgcaccgaccggggcugguacugcgacaacgcgggcuccgugagcuucuucccccaggccgagaccugcaagguccaguccaaccgcguguucugcgacacgaugaacagccggacccuccccuccgaggucaaccugugcaacguggacaucuucaacccgaaguacgacugcaagaucaugaccagcaagaccgacguguccagcuccgucaucacgagccugggggccaucguguccugcuacggcaagaccaagugcaccgccagcaacaagugccgggggaucaucaagaccuucuccaacggcugcgacuacgugagcaacaagggcgucgacacggugagcguggggaacacccucuacuacgucaacaagcaggagggcaagucccuguacgugaagggggagcccaucaucaacuucuacgacccccugguguuccccagcgacgaguucgacgccuccaucagccaggucaacgagaagaucaaccagucccucgcguucauccgcaagagcgacgagcugcugcacaacgugaacgccggcaaguccaccaccaacaucaugaucaccacgaucaucaucgugaucaucgucauccuccugagccugaucgccguggggcuccugcuguacugcaaggcccggugaggacuaguuauaagacugacuagcccgaugggccucccaacgggcccuccuccccuccuugcaccgagauuaauaaaaaaaaaaaaaaaaaaaaaaaaaaaaaaaaaaaaaaaaaaaaaaaaaaaaaaaaaaaaaaaaugcaucccccccccccccccccccccccccccccccaaaggcucuuuucagagccaccagaauu

SEQ ID NO: 6058 - RNA, 1765 nt, Artificial Sequence
  mRNA product Design i-3 comprising derived and/or modified sequence from HRSV(A2)__F-del_DSCav1_mut5 (opt2)
gggagaaagcuuaccauggagcuccucauccucaaggccaacgccaucaccaccauccucaccgccgucaccuucugcuucgccuccggccagaacaucaccgaggaguucuaccaguccaccugcuccgccgucuccaagggcuaccucuccgcccuccgcaccggcugguacaccuccgucaucaccaucgagcucuccaacaucaaggagaacaagugcaacggcaccgacgccaaggucaagcucaucaagcaggagcucgacaaguacaagaacgccgucaccgagcuccagcuccucaugcaguccacccccgccaccggcuccggcuccgccaucgccuccggcgucgccgucugcaagguccuccaccucgagggcgaggucaacaagaucaaguccgcccuccucuccaccaacaaggccgucgucucccucuccggcugcggcgucuccguccucaccuucaagguccucgaccucaagaacuacaucgacaagcagcuccuccccauccucaacaagcaguccugcuccaucuccaacaucgagaccgucaucgaguuccagcagaagaacaaccgccuccucgagaucacccgcgaguucuccgucaacgccggcgucaccacccccgucuccaccuacaugcucaccaacuccgagcuccucucccucaucaacgacaugcccaucaccaacgaccagaagaagcucauguccaacaacguccagaucguccgccagcaguccuacuccaucaugugcaucaucaaggaggagguccucgccuacgucguccagcucccccucuacggcgucaucgacacccccugcuggaagcuccacaccuccccccucugcaccaccaacaccaaggagggcuccaacaucugccucacccgcaccgaccgcggcugguacugcgacaacgccggcuccgucuccuucuucccccaggccgagaccugcaagguccaguccaaccgcgucuucugcgacaccaugaacucccgcacccuccccuccgaggucaaccucugcaacgucgacaucuucaaccccaaguacgacugcaagaucaugaccuccaagaccgacgucuccuccuccgucaucaccucccucggcgccaucgucuccugcuacggcaagaccaagugcaccgccuccaacaagugccgcggcaucaucaagaccuucuccaacggcugcgacuacgucuccaacaagggcgucgacaccgucuccgucggcaacacccucuacuacgucaacaagcaggagggcaagucccucuacgucaagggcgagcccaucaucaacuucuacgacccccucgucuuccccuccgacgaguucgacgccuccaucucccaggucaacgagaagaucaaccagucccucgccuucauccgcaaguccgacgagcuccuccacaacgucaacgccggcaaguccaccaccaacaucaugaucaccaccaucaucaucgucaucaucgucauccuccucucccucaucgccgucggccuccuccucuacugcaaggcccgcugaggacuaguuauaagacugacuagcccgaugggccucccaacgggcccuccuccccuccuugcaccgagauuaauaaaaaaaaaaaaaaaaaaaaaaaaaaaaaaaaaaaaaaaaaaaaaaaaaaaaaaaaaaaaaaaaugcaucccccccccccccccccccccccccccccccaaaggcucuuuucagagccaccagaauu

SEQ ID NO: 6059 - RNA, 1765 nt, Artificial Sequence
  mRNA product Design i-3 comprising derived and/or modified sequence from HRSV(A2)__F-del_DSCav1_mut5 (opt3)
gggagaaagcuuaccauggagcugcucauccuuaaggccaacgcuauuaccacaauacugacugcagugacguucugcuuugccagcggccagaauaucaccgaagaguucuaccaauccacauguucugcggucucaaaaggguauuugagugcuuuaagaacuggaugguacaccagcguuauuacaaucgaacuguccaacauuaaggagaauaaaugcaacgguaccgacgccaaggugaaacuaaucaagcaggaacucgauaaguauaaaaaugcaguaacugagcugcagcuucugaugcagucuacacccgccaccggcucggggucagcuauagcaagcggaguggccgucuguaagguguugcaccucgagggcgaaguuaacaaaaucaagagugcucugcuguccacgaauaaagccguggucucucucagcgguugcgggguguccguauuaacuuuuaagguucuggaccuuaagaacuacauugauaaacaauugcugccuauccuaaauaagcagucauguaguauuagcaacaucgagaccgugauagaguuccagcagaaaaauaacaggcuccuggaaauuacacgggaguuuucugucaaugcgggagugacuaccccaguguccacauauaugcuuaccaacucagaacuguugagccucaucaaugacaugccgauuacgaacgaucaaaagaaacugaugaguaacaauguccagaucguucgccagcagucuuacuccaucaugugcauuauaaaggaggaaguguuagcauauguagugcaacugccccucuacggcgucaucgacacuccuuguuggaaacuucauacaagcccacugugcaccacuaacacaaaggagggcucgaauauuuguuugacccgaacggaucgugggugguacugcgacaacgccggaucuguguccuucuuuccccaggcugaaaccuguaagguucagucaaauagaguguucugcgauacaaugaacaguagaacucugccuagcgaggucaaucucugcaacguggacaucuuuaauccaaaauaugauuguaagauaaugaccuccaaaacagacguaucuagcucaguuauuaccagucugggugccaucguguccugcuacggcaagacuaaauguacagcaagcaacaagugcagggggaucauuaagaccuucucuaauggaugugauuaugucucaaacaaaggcguggacacugucaguguggguaauacgcuuuacuauguuaacaagcaagaggggaaaagccuguacgugaagggagaacccaucauuaauuuuuaugacccuuugguauucccauccgaugaguuugacgcuucuauaucgcaggucaacgagaaaaucaaccagagccucgccuucauucggaaguccgaugaacuguuacacaaugugaacgcgggcaagucaacaaccaauaucaugaucacuaccauuauaaucguuauuaucgugauucugcuaagucucaucgccgucggccugcuuuuguacugcaaagcacgcugaggacuaguuauaagacugacuagcccgaugggccucccaacgggcccuccuccccuccuugcaccgagauuaauaaaaaaaaaaaaaaaaaaaaaaaaaaaaaaaaaaaaaaaaaaaaaaaaaaaaaaaaaaaaaaaaugcaucccccccccccccccccccccccccccccccaaaggcucuuuucagagccaccagaauu

SEQ ID NO: 6060 - RNA, 1765 nt, Artificial Sequence
  mRNA product Design i-3 comprising derived and/or modified sequence from HRSV(A2)__F-del_DSCav1_mut5 (opt4)
gggagaaagcuuaccauggagcugcugauccugaaggccaacgccaucaccaccauccugaccgccgugaccuucugcuucgccagcggccagaacaucaccgaggaguucuaccagagcaccugcagcgccgugagcaagggcuaccugagcgcccugagaaccggcugguacaccagcgugaucaccaucgagcugagcaacaucaaggagaacaagugcaacggcaccgacgccaaggugaagcugaucaagcaggagcuggacaaguacaagaacgccgugaccgagcugcagcugcugaugcagagcacccccgccaccggcagcggcagcgccaucgccagcggcguggccgugugcaaggugcugcaccuggagggcgaggugaacaagaucaagagcgcccugcugagcaccaacaaggccguggugagccugagcggcugcggcgugagcgugcugaccuucaaggugcuggaccugaagaacuacaucgacaagcagcugcugcccauccugaacaagcagagcugcagcaucagcaacaucgagaccgugaucgaguuccagcagaagaacaacagacugcuggagaucaccagagaguucagcgugaacgccggcgugaccacccccgugagcaccuacaugcugaccaacagcgagcugcugagccugaucaacgacaugcccaucaccaacgaccagaagaagcugaugagcaacaacgugcagaucgugagacagcagagcuacagcaucaugugcaucaucaaggaggaggugcuggccuacguggugcagcugccccuguacggcgugaucgacacccccugcuggaagcugcacaccagcccccugugcaccaccaacaccaaggagggcagcaacaucugccugaccagaaccgacagaggcugguacugcgacaacgccggcagcgugagcuucuucccccaggccgagaccugcaaggugcagagcaacagaguguucugcgacaccaugaacagcagaacccugcccagcgaggugaaccugugcaacguggacaucuucaaccccaaguacgacugcaagaucaugaccagcaagaccgacgugagcagcagcgugaucaccagccugggcgccaucgugagcugcuacggcaagaccaagugcaccgccagcaacaagugcagaggcaucaucaagaccuucagcaacggcugcgacuacgugagcaacaagggcguggacaccgugagcgugggcaacacccuguacuacgugaacaagcaggagggcaagagccuguacgugaagggcgagcccaucaucaacuucuacgacccccugguguuccccagcgacgaguucgacgccagcaucagccaggugaacgagaagaucaaccagagccuggccuucaucagaaagagcgacgagcugcugcacaacgugaacgccggcaagagcaccaccaacaucaugaucaccaccaucaucaucgugaucaucgugauccugcugagccugaucgccgugggccugcugcuguacugcaaggccagaugaggacuaguuauaagacugacuagcccgaugggccucccaacgggcccuccuccccuccuugcaccgagauuaauaaaaaaaaaaaaaaaaaaaaaaaaaaaaaaaaaaaaaaaaaaaaaaaaaaaaaaaaaaaaaaaaugcaucccccccccccccccccccccccccccccccaaaggcucuuuucagagccaccagaauu

SEQ ID NO: 6061 - RNA, 1765 nt, Artificial Sequence
  mRNA product Design i-3 comprising derived and/or modified sequence from HRSV(A2)__F-del_DSCav1_mut5 (opt5)
gggagaaagcuuaccauggagcugcucauccugaaggccaacgcuauuaccacaauccuuacggccgugaccuucugcuuugcgagcggccagaauauuacagaagaguucuaccaauccaccuguucugcugucagcaaaggguaucuguccgcccucagaacaggaugguacaccucuguuaucacaauugaacugagcaacaucaaggagaauaaaugcaacggcaccgacgccaaggugaaacuuaucaagcaggaacuggauaaguauaaaaaugcugugacggagcuccagcugcugaugcaguccacccccgccacagggucuggaagcgcuauugccuccggcgucgcgguguguaagguucuccaccuggagggggaagugaacaaaaucaagagcgcccuucugucuaccaauaaagcugucgugucccucagcggaugcggcguuucugugcugacauuuaagguccuugaccugaagaacuacauugauaaacaacuccugccuauccugaauaagcaguccuguagcauuucuaacaucgagaccgugauugaguuccagcagaaaaauaaccggcuccuggaaaucacgcgcgaguuuuccgugaaugccggcgucacaaccccgguuagcacauauaugcuuaccaacuccgaacugcucucucugaucaaugacaugcccauuaccaacgaucaaaagaaacuuaugagcaacaaugugcagaucgugagacagcaguccuacagcauuaugugcaucauuaaggaggaaguccuggcuuaugugguucaacucccucuguacggggugaucgacacacccuguuggaaacugcauacgucuccucucugcaccacaaacaccaaggagggauccaauaucugucugacacggaccgaucgcggcugguacugcgacaacgccgggagcgucucuuucuuuccccaggcggaaacguguaaggugcagagcaauagaguuuucugcgauacaaugaacuccagaacccugccuucugaggugaaucucugcaacgucgacauuuuuaauccgaaauaugauuguaagaucaugaccagcaaaacagacguguccagcucugucauuaccucccugggagccaucgugagcugcuacggcaagacaaaauguacggcuucuaacaagugccgggggauuaucaagaccuucuccaauggaugugauuauguuagcaacaaaggcguggacacagucuccgugggcaauacccuuuacuauguuaacaagcaagaggggaaaucucuguacgugaagggagaacccaucauuaauuuuuaugacccucucgucuuccccagcgaugaguuugacgccuccaucucucaggugaacgagaaaauuaaccagagccuggcuuucauccgcaaguccgaugaacugcuccacaaugugaacgccggcaagagcacaaccaauauuaugaucacgaccauuaucaucguuauuaucgucauucugcuuucucugaucgccguggggcuccugcuguacugcaaagcuagaugaggacuaguuauaagacugacuagcccgaugggccucccaacgggcccuccuccccuccuugcaccgagauuaauaaaaaaaaaaaaaaaaaaaaaaaaaaaaaaaaaaaaaaaaaaaaaaaaaaaaaaaaaaaaaaaaugcaucccccccccccccccccccccccccccccccaaaggcucuuuucagagccaccagaauu

SEQ ID NO: 6062 - RNA, 1765 nt, Artificial Sequence
  mRNA product Design i-3 comprising derived and/or modified sequence from HRSV(A2)__F-del_DSCav1_mut5 (opt6)
gggagaaagcuuaccauggaacuuuuaauacugaaagcaaaugccaucacaaccauacuaacugccgucacauucugcuuugcaucaggacaaaacauaacagaagaauuuuaccaauccacaugcucagcaguaucaaaaggauaucuaucggcacuuagaacuggaugguacacaaguguuauaacuauagaacucucaaacauaaaagaaaacaaaugcaauggaacagacgcaaaaguaaaacuaauaaaacaagaacucgauaaauauaaaaaugcaguaaccgaacuacaacuauuaaugcaaagcacacccgcaacaggcagcggaucagcaauagcaagcggagucgcaguauguaaaguacuacaucuagaaggagaagucaacaaaaucaaaucugcacuucuauccacaaacaaagcuguaguaucccuauccggaugcggagucucaguauuaacuuuuaaaguacuagaccuuaaaaacuacauagauaaacaacuauuaccaauacuaaauaaacaaucaugcagcauauccaauauagagacaguaauugaauuucaacaaaaaaacaacagauuacuagaaauuacucgugaauuuuccguaaaugccggagucacaacaccaguaucaaccuauaugcuaacaaacagcgaacuacuuagcuuaauaaaugacaugccaauaacaaaugaccaaaaaaaacuuaugucaaauaacguacaaaucgucagacaacaauccuacucuauaauguguauaauuaaagaagaaguccuagcauacguaguucaauuaccacucuauggaguaauagauacaccaugcuggaaacuacacacgucaccacuauguacaacaaacacaaaagaaggauccaauauaugccuaacaagaaccgacagaggcugguauugugacaacgcaggauccguuucauucuucccacaagcagaaaccuguaaaguacaaucuaauagaguauuuugcgacacaaugaacaguagaacacuaccaagcgagguuaaucuauguaacguagacauauucaauccaaaauaugauugcaaaauaaugacaucaaaaacagauguaucgucgaguguaauaacaagucugggagcuauaguaagcugcuacggcaagacgaaauguaccgcuucaaauaaaugcagaggaaucauuaaaacauucucgaacggaugcgacuacguaaguaauaaaggugucgacaccguaucaguagggaauacauuauacuacgucaacaaacaagaaggaaaaucucuauauguaaaaggagaaccaauaauaaauuucuaugacccucuaguauucccaucagaugaauuugacgcuuccauaucacaaguaaacgaaaaaaucaaucaaucuuuagcauucauacgaaaaagugaugaacuccuacacaacgucaacgcaggaaaaagcacaacaaauauaaugaucacaacaaucaucauaguaauaauaguaauacuacuaucauuaauagcaguaggauuauugcuuuacugcaaagcacgauagggacuaguuauaagacugacuagcccgaugggccucccaacgggcccuccuccccuccuugcaccgagauuaauaaaaaaaaaaaaaaaaaaaaaaaaaaaaaaaaaaaaaaaaaaaaaaaaaaaaaaaaaaaaaaaaugcaucccccccccccccccccccccccccccccccaaaggcucuuuucagagccaccagaauu

SEQ ID NO: 6063 - RNA, 1765 nt, Artificial Sequence
  mRNA product Design i-3 comprising derived and/or modified sequence from HRSV(A2)__F-del_DSCav1_mut5 (opt11)
gggagaaagcuuaccauggaacuccucauccucaaagccaacgccauaaccacaauacucaccgccguaaccuucugcuuugcgucgggacaaaacaucaccgaagaguucuaccaauccacuugcuccgcaguaagcaaaggauaccucuccgcccugcgaaccgguugguacacaucagucaucacaaucgaacucucaaacauaaaagaaaacaaaugcaacggcaccgacgcaaaggucaaauuaaucaagcaagaacuagacaaauacaaaaacgccgucacagaacuccagcugcuaaugcagagcacacccgcaacuggcagcggauccgccaucgcaucaggagucgccgugugcaaaguccuacaccucgaaggagaagugaacaaaaucaaaucagcccuacucuccaccaacaaggccgucgucucccucuccggcugcggugucuccguccuaaccuucaaagugcuagaccucaagaacuacaucgacaaacaacuccuaccaauacucaacaagcaaucuugcuccaucuccaacaucgaaaccguaaucgaguuccaacagaagaacaaccgccuccucgaaaucacccgcgaguucucugucaacgcaggggucaccacucccgucuccacauacaugcucacaaacuccgaacuccucagccucaucaacgacaugcccauaaccaacgaccagaaaaagcuaaugagcaauaacguccaaaucguuagacaacaaaguuauuccaucaugugcaucaucaaagaagaaguccucgccuacgucguacaacucccccucuauggcgucaucgacacccccugcuggaaacugcacacaucaccccucugcaccacaaacaccaaagaaggcucaaacaucugccuaacucgcaccgaccgcggcugguacugcgacaacgccggcagcguaucauucuuuccccaagccgaaacaugcaaaguucaauccaaccgcgucuucugcgacacaaugaacuccagaacgcuccccagcgaagucaaccucuguaacguagacaucuucaacccuaaguacgacugcaaaaucaugaccuccaaaacugauguauccuccuccgucaucacaucccugggcgccaucgucagcugcuacggcaaaacaaaaugcacugccucaaacaaaugccgagguaucauaaagaccuucucaaacggaugcgauuacgucagcaacaaaggcgucgacaccgucagugucggcaacacccucuacuacgucaacaaacaagaaggaaaaucccucuacgucaaaggcgaacccaucaucaacuucuacgacccccucgucuuccccagcgacgaguucgacgccuccaucucacaagucaacgaaaagauaaaccaaucucuagccuucauccgcaaauccgaugaacuccugcauaacgucaacgccggcaaauccaccacaaacaucaugaucacuaccauaaucaucgucauaaucguaauccuccuaucucuuaucgcagucggccuacuacucuacugcaaagcccgcuaaggacuaguuauaagacugacuagcccgaugggccucccaacgggcccuccuccccuccuugcaccgagauuaauaaaaaaaaaaaaaaaaaaaaaaaaaaaaaaaaaaaaaaaaaaaaaaaaaaaaaaaaaaaaaaaaugcaucccccccccccccccccccccccccccccccaaaggcucuuuucagagccaccagaauu

SEQ ID NO: 6064 - protein, 535 aa, Artificial Sequence
  derived and/or modified protein sequence (artificial) from HRSV(A2)__F_DSCav1_mut6
MELLILKANAITTILTAVTFCFASGQNITEEFYQSTCSAVSKGYLGALRTGWYTSVITIELSNIKENKCNGTDAKVKLIKQELDKYKNAVTDLQMLMCSTPATGSGSAIASGVAVCKVLHLEGEVNKIKSALLSTNKAVVSLSNGVSVLTFKVLDLKNYIDKQLLPILNKQSCSIPNPETVMEFQQKNNRLLEITREFSVNAGVTTPVSTYMLTNSELLSLINDMPITNDQKKLMSNNVQIVRQQSYSIMCIIKEEVLAYVVQLPLYGVIDTPCWKLHTSPLCTTNTKEGSNICLTRTDRGWYCDNAGSVSFFPQAETCKVCSNRVFCDTMNSLTLPSEVNLCNVDIFNPKYDCKIMTSKTDVSSSVITSLGAIVSCYGKTKCTASNKNKGIIKTFSNGCDYVSNKGVDTVSVGNTLYYVNKQEGQSLYVKGEPIINFYDPLVFPSDEFDASISQVNEKINQSLAFIRKSDELLHNVNAGKSTTNIMITTIIIVIIVILLSLIAVGLLLYCKARSTPVTLSKDQLSGINNIAFSN

SEQ ID NO: 6065 - RNA, 1608 nt, Artificial Sequence
  derived and/or modified CDS sequence (opt1) from HRSV(A2)__F_DSCav1_mut6
auggagcugcucauccugaaggccaacgccaucaccaccauccugacggcggugaccuucugcuucgccagcggccagaacaucaccgaggaguucuaccaguccacgugcagcgccgucuccaagggguaccucggcgcccugcggaccggcugguacaccuccgugaucaccaucgagcugagcaacaucaaggagaacaagugcaacgggaccgacgccaaggugaagcucaucaagcaggagcuggacaaguacaagaacgcggucacggaccugcagaugcugaugugcuccaccccggcaaccggcuccggcuccgccaucgcgagcggcgucgccgugugcaaggugcugcaccucgagggggaggucaacaagaucaagagcgcccugcuguccaccaacaaggccguggugagccucuccaacggcgucagcgugcugaccuucaaggugcuggaccucaagaacuacaucgacaagcagcugcugcccauccugaacaagcagagcugcuccauccccaaccccgagacggugauggaguuccagcagaagaacaaccggcuccuggagaucacccgcgaguucagcgugaacgccggggucaccacccccguguccacguacaugcugaccaacagcgagcuccugucccugaucaacgacaugccgaucaccaacgaccagaagaagcucaugagcaacaacgugcagaucguccggcagcaguccuacagcaucaugugcaucaucaaggaggaggugcuggcguacgugguccagcugccccucuacggcgugaucgacacccccugcuggaagcugcacacgagcccccugugcaccaccaacaccaaggagggguccaacaucugccucacgcgcaccgaccggggcugguacugcgacaacgccggcagcgucuccuucuucccgcaggccgagaccugcaaggugugcagcaaccgcguguucugcgacaccaugaacucccugacgcugcccagcgagguaaaccucugcaacgucgacaucuucaaccccaaguacgacugcaagaucaugaccuccaagaccgacgugagcuccagcgugaucaccucccugggggccaucgucagcugcuacggcaagacgaagugcaccgccagcaacaagaacaaggggaucaucaagaccuucuccaacggcugcgacuacgugagcaacaagggcguggacaccguguccgucgggaacacccuguacuacgugaacaagcaggagggccagagccucuacgugaagggggagcccaucaucaacuucuacgacccgcuggucuuccccuccgacgaguucgacgcgagcaucucccaggugaacgagaagaucaaccagagccuggccuucauccgcaaguccgacgagcugcuccacaacgugaacgccggcaagagcacgaccaacaucaugaucaccaccaucaucaucgucaucaucgugauccugcugucccucaucgccguggggcugcugcucuacugcaaggcccggagcacgcccgucacccuguccaaggaccagcugagcggcaucaacaacaucgcguucuccaacuga

SEQ ID NO: 6066 - RNA, 1608 nt, Artificial Sequence
  derived and/or modified CDS sequence (opt1) from HRSV(A2)__F_DSCav1_mut6
auggagcugcucauccugaaggccaacgccaucaccaccauccugacggcggugaccuucugcuucgccagcggccagaacaucaccgaggaguucuaccaguccacgugcagcgccgucuccaagggguaccucggcgcccugcgcaccgggugguacaccagcgugaucaccaucgagcuguccaacaucaaggagaacaagugcaacggcaccgacgccaaggugaagcucaucaagcaggagcuggacaaguacaagaacgcggucacggaccugcagaugcucaugugcagcacccccgccaccggguccggcagcgccaucgccuccggcguggcggugugcaagguccugcaccuggagggggaggugaacaagaucaagagcgcccuccuguccaccaacaaggccguggucagccuguccaacggcgugagcgugcucacguucaagguccuggaccugaagaacuacaucgacaagcagcuccugccgauccugaacaagcaguccugcagcauccccaaccccgagaccgugauggaguuccagcagaagaacaaccggcuccuggagaucacccgcgaguucuccgugaacgccggggucaccacgcccgugagcaccuacaugcugaccaacuccgagcuccugagccugaucaacgacaugccgaucaccaacgaccagaagaagcucaugagcaacaacgugcagaucguccggcagcaguccuacagcaucaugugcaucaucaaggaggaggugcuggccuacgugguccagcugccccucuacggcgugaucgacacgcccugcuggaagcugcacaccagcccccugugcaccaccaacacgaaggaggggagcaacaucugccucacccgcaccgaccggggcugguacugcgacaacgcgggcuccgugagcuucuucccgcaggccgagaccugcaaggucugcuccaaccgcguguucugcgacacgaugaacagccugacccugcccuccgaggucaaccucugcaacguggacaucuucaaccccaaguacgacugcaagaucaugaccagcaagaccgacguguccagcuccgucaucacgagccugggggccaucguguccugcuacggcaagaccaagugcaccgccagcaacaagaacaaggggaucaucaagaccuucuccaacggcugcgacuacgugagcaacaagggcgucgacacgguguccguggggaacacccuguacuacgucaacaagcaggagggccagagccucuacgugaagggggagcccaucaucaacuucuacgacccgcugguguuccccagcgacgaguucgacgccuccaucagccaggucaacgagaagaucaaccagucccuggcguucauccggaaguccgacgagcuccugcacaacgugaacgccggcaaguccaccaccaacaucaugaucaccacgaucaucaucgugaucaucgucauccugcucagccugaucgccguggggcugcuccuguacugcaaggcccgcuccacccccgugacccugagcaaggaccagcuguccggcaucaacaacaucgccuucagcaacuga

SEQ ID NO: 6067 - RNA, 1608 nt, Artificial Sequence
  derived and/or modified CDS sequence (opt2) from HRSV(A2)__F_DSCav1_mut6
auggagcuccucauccucaaggccaacgccaucaccaccauccucaccgccgucaccuucugcuucgccuccggccagaacaucaccgaggaguucuaccaguccaccugcuccgccgucuccaagggcuaccucggcgcccuccgcaccggcugguacaccuccgucaucaccaucgagcucuccaacaucaaggagaacaagugcaacggcaccgacgccaaggucaagcucaucaagcaggagcucgacaaguacaagaacgccgucaccgaccuccagaugcucaugugcuccacccccgccaccggcuccggcuccgccaucgccuccggcgucgccgucugcaagguccuccaccucgagggcgaggucaacaagaucaaguccgcccuccucuccaccaacaaggccgucgucucccucuccaacggcgucuccguccucaccuucaagguccucgaccucaagaacuacaucgacaagcagcuccuccccauccucaacaagcaguccugcuccauccccaaccccgagaccgucauggaguuccagcagaagaacaaccgccuccucgagaucacccgcgaguucuccgucaacgccggcgucaccacccccgucuccaccuacaugcucaccaacuccgagcuccucucccucaucaacgacaugcccaucaccaacgaccagaagaagcucauguccaacaacguccagaucguccgccagcaguccuacuccaucaugugcaucaucaaggaggagguccucgccuacgucguccagcucccccucuacggcgucaucgacacccccugcuggaagcuccacaccuccccccucugcaccaccaacaccaaggagggcuccaacaucugccucacccgcaccgaccgcggcugguacugcgacaacgccggcuccgucuccuucuucccccaggccgagaccugcaaggucugcuccaaccgcgucuucugcgacaccaugaacucccucacccuccccuccgaggucaaccucugcaacgucgacaucuucaaccccaaguacgacugcaagaucaugaccuccaagaccgacgucuccuccuccgucaucaccucccucggcgccaucgucuccugcuacggcaagaccaagugcaccgccuccaacaagaacaagggcaucaucaagaccuucuccaacggcugcgacuacgucuccaacaagggcgucgacaccgucuccgucggcaacacccucuacuacgucaacaagcaggagggccagucccucuacgucaagggcgagcccaucaucaacuucuacgacccccucgucuuccccuccgacgaguucgacgccuccaucucccaggucaacgagaagaucaaccagucccucgccuucauccgcaaguccgacgagcuccuccacaacgucaacgccggcaaguccaccaccaacaucaugaucaccaccaucaucaucgucaucaucgucauccuccucucccucaucgccgucggccuccuccucuacugcaaggcccgcuccacccccgucacccucuccaaggaccagcucuccggcaucaacaacaucgccuucuccaacuga

SEQ ID NO: 6068 - RNA, 1608 nt, Artificial Sequence
  derived and/or modified CDS sequence (opt3) from HRSV(A2)__F_DSCav1_mut6
auggagcugcucauccuuaaggccaacgcuauuaccacaauacugacugcagugacguucugcuuugccagcggccagaauaucaccgaagaguucuaccaauccacauguucugcggucucaaaaggguauuugggagcuuuaagaacugguugguacaccaguguuauuacaaucgaacugagcaacauuaaggagaauaaaugcaacggcaccgacgccaaggugaaacuaaucaagcaggaacucgauaaguauaaaaaugcaguaacugaccugcagaugcuuauguguuccacacccgccaccgggucuggaucggcuauagcaucaggcguggccgucugcaaggugcugcacuuggagggugagguuaacaaaaucaagagcgcucuccugaguacgaauaaagccguggucucccugucuaacggggugagcguacucacuuuuaagguuuuagaucugaagaauuacauugacaaacagcuuuugccuauccugaacaagcaauccuguucaauuccaaauccggaaaccgugauggaguuccagcagaaaaacaauaggcuacucgaaaucacacgggaguuuagugucaacgcgggagugacuacccccgugagcacauauaugcugaccaauucugagcuucuguccuugauaaacgauaugccuauuacgaacgaccagaagaaacucaugucaaauaacguccaaaucguucgccagcagagcuacaguauuaugugcaucaucaaggaagaggugcuggcauauguagugcaguuaccacuguacggcgucauugauacucccuguuggaaacuccauacaucuccucuuugcaccacuaauacaaaggaaggcuccaacauaugucugacccgaacggaccgugggugguacugcgauaaugccggaagcgugucguucuuuccacaagcugagaccuguaagguuugcucuaacagaguguucugcgacacaaugaacuccuugacucuacccucagaagucaaucuguguaauguggauaucuuuaacccuaaauaugacugcaagauuaugaccaguaaaacagauguaagcuccucuguuaucacuagccucggugccauagugucauguuacggcaagaccaaaugcacagcaaguaauaagaacaaggggauuaucaaaaccuucuccaauggaugugacuaugucagcaacaagggcguggacacugucucuguggguaauacgcuguacuauguuaacaaacaggaggggcagucacuuuacgugaagggagagccaaucauuaacuuuuaugauccgcugguauuccccagugacgaauuugaugcuagcaucucccaagucaaugagaaaauuaaccagucuuuggccuucauaaggaagucggacgaacuccugcacaaugugaacgcgggcaagagcacaaccaauaucaugauuacuaccaucaucauuguuauaaucgugauuuuacugucccuaaucgccgucggccuccugcuuuacugcaaagcacggucaacaccugugaccuugaguaaggaucagcugucugggauuaacaauaucgcuuucagcaacuga

SEQ ID NO: 6069 - RNA, 1608 nt, Artificial Sequence
  derived and/or modified CDS sequence (opt4) from HRSV(A2)__F_DSCav1_mut6
auggagcugcugauccugaaggccaacgccaucaccaccauccugaccgccgugaccuucugcuucgccagcggccagaacaucaccgaggaguucuaccagagcaccugcagcgccgugagcaagggcuaccugggcgcccugagaaccggcugguacaccagcgugaucaccaucgagcugagcaacaucaaggagaacaagugcaacggcaccgacgccaaggugaagcugaucaagcaggagcuggacaaguacaagaacgccgugaccgaccugcagaugcugaugugcagcacccccgccaccggcagcggcagcgccaucgccagcggcguggccgugugcaaggugcugcaccuggagggcgaggugaacaagaucaagagcgcccugcugagcaccaacaaggccguggugagccugagcaacggcgugagcgugcugaccuucaaggugcuggaccugaagaacuacaucgacaagcagcugcugcccauccugaacaagcagagcugcagcauccccaaccccgagaccgugauggaguuccagcagaagaacaacagacugcuggagaucaccagagaguucagcgugaacgccggcgugaccacccccgugagcaccuacaugcugaccaacagcgagcugcugagccugaucaacgacaugcccaucaccaacgaccagaagaagcugaugagcaacaacgugcagaucgugagacagcagagcuacagcaucaugugcaucaucaaggaggaggugcuggccuacguggugcagcugccccuguacggcgugaucgacacccccugcuggaagcugcacaccagcccccugugcaccaccaacaccaaggagggcagcaacaucugccugaccagaaccgacagaggcugguacugcgacaacgccggcagcgugagcuucuucccccaggccgagaccugcaaggugugcagcaacagaguguucugcgacaccaugaacagccugacccugcccagcgaggugaaccugugcaacguggacaucuucaaccccaaguacgacugcaagaucaugaccagcaagaccgacgugagcagcagcgugaucaccagccugggcgccaucgugagcugcuacggcaagaccaagugcaccgccagcaacaagaacaagggcaucaucaagaccuucagcaacggcugcgacuacgugagcaacaagggcguggacaccgugagcgugggcaacacccuguacuacgugaacaagcaggagggccagagccuguacgugaagggcgagcccaucaucaacuucuacgacccccugguguuccccagcgacgaguucgacgccagcaucagccaggugaacgagaagaucaaccagagccuggccuucaucagaaagagcgacgagcugcugcacaacgugaacgccggcaagagcaccaccaacaucaugaucaccaccaucaucaucgugaucaucgugauccugcugagccugaucgccgugggccugcugcuguacugcaaggccagaagcacccccgugacccugagcaaggaccagcugagcggcaucaacaacaucgccuucagcaacuga

SEQ ID NO: 6070 - RNA, 1608 nt, Artificial Sequence
  derived and/or modified CDS sequence (opt5) from HRSV(A2)__F_DSCav1_mut6
auggagcugcucauccugaaggccaacgcuauuaccacaauccuuacggccgugaccuucugcuuugcgagcggccagaauauuacagaagaguucuaccaauccaccuguucugcugucagcaaaggguaucugggagcccucagaacaggcugguacaccuccguuaucacaauugaacugucuaacaucaaggagaauaaaugcaacgggaccgacgccaaggugaaacuuaucaagcaggaacuggauaaguauaaaaaugcugugacggaccuccagaugcugauguguagcacccccgccacaggauccggcucugcuauugccagcggggucgcggugugcaagguucugcaccucgagggagaggugaacaaaaucaaguccgcccugcuuagcaccaauaaagcugucgugucucuguccaacggcguuagcgugcucacauuuaagguccuggaucuuaagaauuacauugacaaacagcugcucccuauccugaacaagcaaucuuguuccauuccgaaucccgaaaccgugauggaguuccagcagaaaaacaaucggcugcucgaaaucacgcgcgaguuuagcgugaacgccggcgucacaaccccuguuucuacauauaugcugaccaauuccgagcuucugagccucauuaacgauaugcccaucaccaacgaccagaagaaacugauguccaauaacgugcaaaucgugagacagcagucuuacagcauuaugugcaucauuaaggaagagguccuugcuuaugugguucagcugccucucuacggggugaucgauacacccuguuggaaacugcauacguccccucugugcaccacaaauaccaaggaaggaagcaacauuugucucacacggaccgaccgcggcugguacugcgauaaugccgggucugucuccuucuuuccgcaagcggagacguguaaggugugcagcaacagaguuuucugcgacacaaugaacucucugacccuucccagcgaagugaaucuguguaaugucgauaucuuuaacccuaaauaugacugcaagaucaugaccuccaaaacagaugugucuagcuccgucauuaccagccucggagccaucgugucuuguuacggcaagacaaaaugcacggcuuccaauaagaacaaggggauuaucaaaaccuucagcaauggaugugacuauguuucuaacaagggcguggacacagucuccgugggcaauacccuguacuauguuaacaaacaggaggggcagagccuuuacgugaagggagagcccauuaucaacuuuuaugauccucuggucuuccccuccgacgaauuugaugccucuaucagccaagugaaugagaaaauuaaccagucccucgcuuucauccggaagucugacgaacugcugcacaaugugaacgccggcaagagcacaaccaauauuaugaucacgaccauuaucauuguuaucaucgucauucuccugucccuuaucgccguggggcugcuccuguacugcaaagcucgcagcacaccggugacccugucuaaggaucagcuuuccggaauuaacaauaucgcguucagcaacuga

SEQ ID NO: 6071 - RNA, 1608 nt, Artificial Sequence
  derived and/or modified CDS sequence (opt6) from HRSV(A2)__F_DSCav1_mut6
auggaacuauuaaucuuaaaagcaaaugcuauaaccacaauauuaacagcaguaacauucuguuuugccuccggacaaaacauaacagaagaauuuuaucaaucaacaugcucugcaguauccaaagguuacuuaggcgcacuacgcacuggaugguauacaucaguaauaacaauagaacuaucaaacauaaaagaaaauaaauguaacgguacugacgcaaaagugaaacuaauuaaacaagaacucgacaaauacaaaaaugcuguaacagaccuacaaaugcuaaugugcucaacacccgcaaccggaucaggaucagccauagccuccggagucgcaguaugcaaaguauuacaucuugaaggagaaguaaauaaaauaaaaucagcauuacuauccacaaauaaagccguaguaucacuaucaaacgguguauccguccuuacauucaaaguauuagaucuaaaaaacuacauagauaaacaacuacuacccaucuuaaacaaacaaucaugcucaauucccaacccagaaacagucauggaauuucaacaaaaaaacaacagacucuuagaaauaacacgagaauuuucaguaaacgcaggaguaaccacaccaguaaguacauacaugcucaccaacucagaauuauuaucacuuauuaacgacaugccaauuacaaacgaccaaaaaaaauuaaugucaaacaauguccaaauuguuagacaacaaucauacucuauaauguguauaauaaaagaagaaguacuagcuuacguaguucaauuaccacuauauggcguaauagauacaccuugcuggaaacuacauacaucuccauuauguacaacuaacacaaaagaaggaucuaacauaugccuaacacgcacagaucgaggaugguacugcgauaaugcagguuccguaucauucuuuccacaagcagaaacauguaaaguaugcucaaacagaguauucugugacacuaugaacuccuuaacccuacccucagaagucaaucuaugcaacguugacauauuuaacccaaaauacgacuguaaaaucaugacaucuaaaacagacguaucaucaucaguuauuacaucccuaggagcaauaguaucuugcuacggaaaaacaaaauguacagcauccaacaaaaacaaaggaauaaucaaaacauucucaaacggcugcgacuacguaucaaacaaagguguagacacaguaucaguaggaaauacuuuauauuacguaaauaaacaagaaggacaaucucuauacguuaaaggcgaaccuauuauaaacuucuacgacccacucguauucccuucagacgaauuugacgcaucuauaucccaaguuaacgaaaaaaucaaccaaucauuagccuuuauaagaaaauccgacgaauuauuacauaacgucaacgcuggaaaaucaacaacuaacauaaugauaaccacaauaauaauagucaucauaguuauauuacuaagucuaauagccguaggccuccuacuuuauugcaaagcaagaucaacaccaguaacauuauccaaagaccaacucagcggcauaaacaauauagcuuuuucaaacuag

SEQ ID NO: 6072 - RNA, 1608 nt, Artificial Sequence
  derived and/or modified CDS sequence (opt11) from HRSV(A2)__F_DSCav1_mut6
auggaacuccucauccucaaagccaacgcaaucacaaccauacuaacugcaguuacuuucugcuucgcauccggccaaaacaucaccgaagaguucuaccaaucaaccugcuccgcagucuccaaaggauaccucggagcccuucgcaccggcugguacaccuccgucauaaccaucgaacucucaaacauaaaagaaaacaaaugcaacggcacagacgcgaaagucaaacuuaucaaacaagaacucgacaaauacaaaaacgccgucaccgaccugcagaugcucaugugcucaacccccgccacaggaagcggcucugcuaucgcuuccggcgucgccgucugcaaaguccuccaccucgaaggcgaaguaaacaaaaucaagucagcccuccucuccaccaacaaagccgucgucucucucucaaacggcguauccguccucacauucaaaguccucgaccucaaaaacuacaucgacaaacaacuucuccccauccuaaacaaacaaucaugcuccauccccaaccccgaaacagucauggaauuucaacaaaagaacaaccgccucuuagaaaucacccgagaauuuuccgucaacgcgggagucacaacccccguuucuacguauaugcucaccaacuccgaacuccuuucccucauaaacgacaugccaaucaccaacgaccaaaagaaacucaugucaaacaacguccaaaucguccgacaacaauccuacucuauuaugugcaucaucaaagaagaaguucucgccuacgucguccaacuaccccucuacggcgugaucgacacccccugcuggaaacuacacaccucaccccucugcaccaccaacaccaaggaaggcuccaacaucugccucacccgcaccgaccgcggcugguacugcgacaacgcuggcuccgucucauucuucccgcaagccgaaacuugcaaaguaugcuccaacagaguauucugcgacaccaugaacucacuaacccucccuuccgaagucaaccuuugcaacguugacauauucaacccaaaguacgauugcaaaauuaugacauccaaaacagaugucuccuccuccgucaucacaucccucggugccauuguaucaugcuacggaaaaaccaaaugcaccgcauccaacaaaaacaaaggaaucaucaaaaccuucucaaacggcugcgauuacgucucaaacaaaggagucgacacagucuccgucggaaacacccuauacuacgucaacaaacaagaaggccaaucccuguacgucaaaggagaacccaucaucaacuucuacgacccccucgucuucccgagcgacgaguucgacgccuccaucucacaagucaaugaaaagaucaaccaaucccuugccuucauccggaaaucggacgaacuccuacacaacgugaacgcuggaaaaucaaccaccaacaucaugaucacaaccaucauuaucgucaucaucgucauacuccucucccuaaucgccgucggccuccuccuguauugcaaagcucgcuccacccccgucacccuguccaaagaccaacucuccggaaucaacaacaucgccuucucaaacuaa

SEQ ID NO: 6073 - RNA, 1884 nt, Artificial Sequence
  mRNA product Design a-1 comprising derived and/or modified sequence from HRSV(A2)__F_DSCav1_mut6 (opt1)
gggagagucccgcagucggcguccagcggcucugcuuguucgugugugugucguugcaggccuuauucaagcuuaccauggagcugcucauccugaaggccaacgccaucaccaccauccugacggcggugaccuucugcuucgccagcggccagaacaucaccgaggaguucuaccaguccacgugcagcgccgucuccaagggguaccucggcgcccugcggaccggcugguacaccuccgugaucaccaucgagcugagcaacaucaaggagaacaagugcaacgggaccgacgccaaggugaagcucaucaagcaggagcuggacaaguacaagaacgcggucacggaccugcagaugcugaugugcuccaccccggcaaccggcuccggcuccgccaucgcgagcggcgucgccgugugcaaggugcugcaccucgagggggaggucaacaagaucaagagcgcccugcuguccaccaacaaggccguggugagccucuccaacggcgucagcgugcugaccuucaaggugcuggaccucaagaacuacaucgacaagcagcugcugcccauccugaacaagcagagcugcuccauccccaaccccgagacggugauggaguuccagcagaagaacaaccggcuccuggagaucacccgcgaguucagcgugaacgccggggucaccacccccguguccacguacaugcugaccaacagcgagcuccugucccugaucaacgacaugccgaucaccaacgaccagaagaagcucaugagcaacaacgugcagaucguccggcagcaguccuacagcaucaugugcaucaucaaggaggaggugcuggcguacgugguccagcugccccucuacggcgugaucgacacccccugcuggaagcugcacacgagcccccugugcaccaccaacaccaaggagggguccaacaucugccucacgcgcaccgaccggggcugguacugcgacaacgccggcagcgucuccuucuucccgcaggccgagaccugcaaggugugcagcaaccgcguguucugcgacaccaugaacucccugacgcugcccagcgagguaaaccucugcaacgucgacaucuucaaccccaaguacgacugcaagaucaugaccuccaagaccgacgugagcuccagcgugaucaccucccugggggccaucgucagcugcuacggcaagacgaagugcaccgccagcaacaagaacaaggggaucaucaagaccuucuccaacggcugcgacuacgugagcaacaagggcguggacaccguguccgucgggaacacccuguacuacgugaacaagcaggagggccagagccucuacgugaagggggagcccaucaucaacuucuacgacccgcuggucuuccccuccgacgaguucgacgcgagcaucucccaggugaacgagaagaucaaccagagccuggccuucauccgcaaguccgacgagcugcuccacaacgugaacgccggcaagagcacgaccaacaucaugaucaccaccaucaucaucgucaucaucgugauccugcugucccucaucgccguggggcugcugcucuacugcaaggcccggagcacgcccgucacccuguccaaggaccagcugagcggcaucaacaacaucgcguucuccaacugaggacuagucccuguucccagagcccacuuuuuuuucuuuuuuugaaauaaaauagccugucuuucagaucuaaaaaaaaaaaaaaaaaaaaaaaaaaaaaaaaaaaaaaaaaaaaaaaaaaaaaaaaaaaaaaaaugcaucccccccccccccccccccccccccccccccaaaggcucuuuucagagccaccagaauu

SEQ ID NO: 6074 - RNA, 1884 nt, Artificial Sequence
  mRNA product Design a-1 comprising derived and/or modified sequence from HRSV(A2)__F_DSCav1_mut6 (opt1)
gggagagucccgcagucggcguccagcggcucugcuuguucgugugugugucguugcaggccuuauucaagcuuaccauggagcugcucauccugaaggccaacgccaucaccaccauccugacggcggugaccuucugcuucgccagcggccagaacaucaccgaggaguucuaccaguccacgugcagcgccgucuccaagggguaccucggcgcccugcgcaccgggugguacaccagcgugaucaccaucgagcuguccaacaucaaggagaacaagugcaacggcaccgacgccaaggugaagcucaucaagcaggagcuggacaaguacaagaacgcggucacggaccugcagaugcucaugugcagcacccccgccaccggguccggcagcgccaucgccuccggcguggcggugugcaagguccugcaccuggagggggaggugaacaagaucaagagcgcccuccuguccaccaacaaggccguggucagccuguccaacggcgugagcgugcucacguucaagguccuggaccugaagaacuacaucgacaagcagcuccugccgauccugaacaagcaguccugcagcauccccaaccccgagaccgugauggaguuccagcagaagaacaaccggcuccuggagaucacccgcgaguucuccgugaacgccggggucaccacgcccgugagcaccuacaugcugaccaacuccgagcuccugagccugaucaacgacaugccgaucaccaacgaccagaagaagcucaugagcaacaacgugcagaucguccggcagcaguccuacagcaucaugugcaucaucaaggaggaggugcuggccuacgugguccagcugccccucuacggcgugaucgacacgcccugcuggaagcugcacaccagcccccugugcaccaccaacacgaaggaggggagcaacaucugccucacccgcaccgaccggggcugguacugcgacaacgcgggcuccgugagcuucuucccgcaggccgagaccugcaaggucugcuccaaccgcguguucugcgacacgaugaacagccugacccugcccuccgaggucaaccucugcaacguggacaucuucaaccccaaguacgacugcaagaucaugaccagcaagaccgacguguccagcuccgucaucacgagccugggggccaucguguccugcuacggcaagaccaagugcaccgccagcaacaagaacaaggggaucaucaagaccuucuccaacggcugcgacuacgugagcaacaagggcgucgacacgguguccguggggaacacccuguacuacgucaacaagcaggagggccagagccucuacgugaagggggagcccaucaucaacuucuacgacccgcugguguuccccagcgacgaguucgacgccuccaucagccaggucaacgagaagaucaaccagucccuggcguucauccggaaguccgacgagcuccugcacaacgugaacgccggcaaguccaccaccaacaucaugaucaccacgaucaucaucgugaucaucgucauccugcucagccugaucgccguggggcugcuccuguacugcaaggcccgcuccacccccgugacccugagcaaggaccagcuguccggcaucaacaacaucgccuucagcaacugaggacuagucccuguucccagagcccacuuuuuuuucuuuuuuugaaauaaaauagccugucuuucagaucuaaaaaaaaaaaaaaaaaaaaaaaaaaaaaaaaaaaaaaaaaaaaaaaaaaaaaaaaaaaaaaaaugcaucccccccccccccccccccccccccccccccaaaggcucuuuucagagccaccagaauu

SEQ ID NO: 6075 - RNA, 1884 nt, Artificial Sequence
  mRNA product Design a-1 comprising derived and/or modified sequence from HRSV(A2)__F_DSCav1_mut6 (opt2)
gggagagucccgcagucggcguccagcggcucugcuuguucgugugugugucguugcaggccuuauucaagcuuaccauggagcuccucauccucaaggccaacgccaucaccaccauccucaccgccgucaccuucugcuucgccuccggccagaacaucaccgaggaguucuaccaguccaccugcuccgccgucuccaagggcuaccucggcgcccuccgcaccggcugguacaccuccgucaucaccaucgagcucuccaacaucaaggagaacaagugcaacggcaccgacgccaaggucaagcucaucaagcaggagcucgacaaguacaagaacgccgucaccgaccuccagaugcucaugugcuccacccccgccaccggcuccggcuccgccaucgccuccggcgucgccgucugcaagguccuccaccucgagggcgaggucaacaagaucaaguccgcccuccucuccaccaacaaggccgucgucucccucuccaacggcgucuccguccucaccuucaagguccucgaccucaagaacuacaucgacaagcagcuccuccccauccucaacaagcaguccugcuccauccccaaccccgagaccgucauggaguuccagcagaagaacaaccgccuccucgagaucacccgcgaguucuccgucaacgccggcgucaccacccccgucuccaccuacaugcucaccaacuccgagcuccucucccucaucaacgacaugcccaucaccaacgaccagaagaagcucauguccaacaacguccagaucguccgccagcaguccuacuccaucaugugcaucaucaaggaggagguccucgccuacgucguccagcucccccucuacggcgucaucgacacccccugcuggaagcuccacaccuccccccucugcaccaccaacaccaaggagggcuccaacaucugccucacccgcaccgaccgcggcugguacugcgacaacgccggcuccgucuccuucuucccccaggccgagaccugcaaggucugcuccaaccgcgucuucugcgacaccaugaacucccucacccuccccuccgaggucaaccucugcaacgucgacaucuucaaccccaaguacgacugcaagaucaugaccuccaagaccgacgucuccuccuccgucaucaccucccucggcgccaucgucuccugcuacggcaagaccaagugcaccgccuccaacaagaacaagggcaucaucaagaccuucuccaacggcugcgacuacgucuccaacaagggcgucgacaccgucuccgucggcaacacccucuacuacgucaacaagcaggagggccagucccucuacgucaagggcgagcccaucaucaacuucuacgacccccucgucuuccccuccgacgaguucgacgccuccaucucccaggucaacgagaagaucaaccagucccucgccuucauccgcaaguccgacgagcuccuccacaacgucaacgccggcaaguccaccaccaacaucaugaucaccaccaucaucaucgucaucaucgucauccuccucucccucaucgccgucggccuccuccucuacugcaaggcccgcuccacccccgucacccucuccaaggaccagcucuccggcaucaacaacaucgccuucuccaacugaggacuagucccuguucccagagcccacuuuuuuuucuuuuuuugaaauaaaauagccugucuuucagaucuaaaaaaaaaaaaaaaaaaaaaaaaaaaaaaaaaaaaaaaaaaaaaaaaaaaaaaaaaaaaaaaaugcaucccccccccccccccccccccccccccccccaaaggcucuuuucagagccaccagaauu

SEQ ID NO: 6076 - RNA, 1884 nt, Artificial Sequence
  mRNA product Design a-1 comprising derived and/or modified sequence from HRSV(A2)__F_DSCav1_mut6 (opt3)
gggagagucccgcagucggcguccagcggcucugcuuguucgugugugugucguugcaggccuuauucaagcuuaccauggagcugcucauccuuaaggccaacgcuauuaccacaauacugacugcagugacguucugcuuugccagcggccagaauaucaccgaagaguucuaccaauccacauguucugcggucucaaaaggguauuugggagcuuuaagaacugguugguacaccaguguuauuacaaucgaacugagcaacauuaaggagaauaaaugcaacggcaccgacgccaaggugaaacuaaucaagcaggaacucgauaaguauaaaaaugcaguaacugaccugcagaugcuuauguguuccacacccgccaccgggucuggaucggcuauagcaucaggcguggccgucugcaaggugcugcacuuggagggugagguuaacaaaaucaagagcgcucuccugaguacgaauaaagccguggucucccugucuaacggggugagcguacucacuuuuaagguuuuagaucugaagaauuacauugacaaacagcuuuugccuauccugaacaagcaauccuguucaauuccaaauccggaaaccgugauggaguuccagcagaaaaacaauaggcuacucgaaaucacacgggaguuuagugucaacgcgggagugacuacccccgugagcacauauaugcugaccaauucugagcuucuguccuugauaaacgauaugccuauuacgaacgaccagaagaaacucaugucaaauaacguccaaaucguucgccagcagagcuacaguauuaugugcaucaucaaggaagaggugcuggcauauguagugcaguuaccacuguacggcgucauugauacucccuguuggaaacuccauacaucuccucuuugcaccacuaauacaaaggaaggcuccaacauaugucugacccgaacggaccgugggugguacugcgauaaugccggaagcgugucguucuuuccacaagcugagaccuguaagguuugcucuaacagaguguucugcgacacaaugaacuccuugacucuacccucagaagucaaucuguguaauguggauaucuuuaacccuaaauaugacugcaagauuaugaccaguaaaacagauguaagcuccucuguuaucacuagccucggugccauagugucauguuacggcaagaccaaaugcacagcaaguaauaagaacaaggggauuaucaaaaccuucuccaauggaugugacuaugucagcaacaagggcguggacacugucucuguggguaauacgcuguacuauguuaacaaacaggaggggcagucacuuuacgugaagggagagccaaucauuaacuuuuaugauccgcugguauuccccagugacgaauuugaugcuagcaucucccaagucaaugagaaaauuaaccagucuuuggccuucauaaggaagucggacgaacuccugcacaaugugaacgcgggcaagagcacaaccaauaucaugauuacuaccaucaucauuguuauaaucgugauuuuacugucccuaaucgccgucggccuccugcuuuacugcaaagcacggucaacaccugugaccuugaguaaggaucagcugucugggauuaacaauaucgcuuucagcaacugaggacuagucccuguucccagagcccacuuuuuuuucuuuuuuugaaauaaaauagccugucuuucagaucuaaaaaaaaaaaaaaaaaaaaaaaaaaaaaaaaaaaaaaaaaaaaaaaaaaaaaaaaaaaaaaaaugcaucccccccccccccccccccccccccccccccaaaggcucuuuucagagccaccagaauu

SEQ ID NO: 6077 - RNA, 1884 nt, Artificial Sequence
  mRNA product Design a-1 comprising derived and/or modified sequence from HRSV(A2)__F_DSCav1_mut6 (opt4)
gggagagucccgcagucggcguccagcggcucugcuuguucgugugugugucguugcaggccuuauucaagcuuaccauggagcugcugauccugaaggccaacgccaucaccaccauccugaccgccgugaccuucugcuucgccagcggccagaacaucaccgaggaguucuaccagagcaccugcagcgccgugagcaagggcuaccugggcgcccugagaaccggcugguacaccagcgugaucaccaucgagcugagcaacaucaaggagaacaagugcaacggcaccgacgccaaggugaagcugaucaagcaggagcuggacaaguacaagaacgccgugaccgaccugcagaugcugaugugcagcacccccgccaccggcagcggcagcgccaucgccagcggcguggccgugugcaaggugcugcaccuggagggcgaggugaacaagaucaagagcgcccugcugagcaccaacaaggccguggugagccugagcaacggcgugagcgugcugaccuucaaggugcuggaccugaagaacuacaucgacaagcagcugcugcccauccugaacaagcagagcugcagcauccccaaccccgagaccgugauggaguuccagcagaagaacaacagacugcuggagaucaccagagaguucagcgugaacgccggcgugaccacccccgugagcaccuacaugcugaccaacagcgagcugcugagccugaucaacgacaugcccaucaccaacgaccagaagaagcugaugagcaacaacgugcagaucgugagacagcagagcuacagcaucaugugcaucaucaaggaggaggugcuggccuacguggugcagcugccccuguacggcgugaucgacacccccugcuggaagcugcacaccagcccccugugcaccaccaacaccaaggagggcagcaacaucugccugaccagaaccgacagaggcugguacugcgacaacgccggcagcgugagcuucuucccccaggccgagaccugcaaggugugcagcaacagaguguucugcgacaccaugaacagccugacccugcccagcgaggugaaccugugcaacguggacaucuucaaccccaaguacgacugcaagaucaugaccagcaagaccgacgugagcagcagcgugaucaccagccugggcgccaucgugagcugcuacggcaagaccaagugcaccgccagcaacaagaacaagggcaucaucaagaccuucagcaacggcugcgacuacgugagcaacaagggcguggacaccgugagcgugggcaacacccuguacuacgugaacaagcaggagggccagagccuguacgugaagggcgagcccaucaucaacuucuacgacccccugguguuccccagcgacgaguucgacgccagcaucagccaggugaacgagaagaucaaccagagccuggccuucaucagaaagagcgacgagcugcugcacaacgugaacgccggcaagagcaccaccaacaucaugaucaccaccaucaucaucgugaucaucgugauccugcugagccugaucgccgugggccugcugcuguacugcaaggccagaagcacccccgugacccugagcaaggaccagcugagcggcaucaacaacaucgccuucagcaacugaggacuagucccuguucccagagcccacuuuuuuuucuuuuuuugaaauaaaauagccugucuuucagaucuaaaaaaaaaaaaaaaaaaaaaaaaaaaaaaaaaaaaaaaaaaaaaaaaaaaaaaaaaaaaaaaaugcaucccccccccccccccccccccccccccccccaaaggcucuuuucagagccaccagaauu

SEQ ID NO: 6078 - RNA, 1884 nt, Artificial Sequence
  mRNA product Design a-1 comprising derived and/or modified sequence from HRSV(A2)__F_DSCav1_mut6 (opt5)
gggagagucccgcagucggcguccagcggcucugcuuguucgugugugugucguugcaggccuuauucaagcuuaccauggagcugcucauccugaaggccaacgcuauuaccacaauccuuacggccgugaccuucugcuuugcgagcggccagaauauuacagaagaguucuaccaauccaccuguucugcugucagcaaaggguaucugggagcccucagaacaggcugguacaccuccguuaucacaauugaacugucuaacaucaaggagaauaaaugcaacgggaccgacgccaaggugaaacuuaucaagcaggaacuggauaaguauaaaaaugcugugacggaccuccagaugcugauguguagcacccccgccacaggauccggcucugcuauugccagcggggucgcggugugcaagguucugcaccucgagggagaggugaacaaaaucaaguccgcccugcuuagcaccaauaaagcugucgugucucuguccaacggcguuagcgugcucacauuuaagguccuggaucuuaagaauuacauugacaaacagcugcucccuauccugaacaagcaaucuuguuccauuccgaaucccgaaaccgugauggaguuccagcagaaaaacaaucggcugcucgaaaucacgcgcgaguuuagcgugaacgccggcgucacaaccccuguuucuacauauaugcugaccaauuccgagcuucugagccucauuaacgauaugcccaucaccaacgaccagaagaaacugauguccaauaacgugcaaaucgugagacagcagucuuacagcauuaugugcaucauuaaggaagagguccuugcuuaugugguucagcugccucucuacggggugaucgauacacccuguuggaaacugcauacguccccucugugcaccacaaauaccaaggaaggaagcaacauuugucucacacggaccgaccgcggcugguacugcgauaaugccgggucugucuccuucuuuccgcaagcggagacguguaaggugugcagcaacagaguuuucugcgacacaaugaacucucugacccuucccagcgaagugaaucuguguaaugucgauaucuuuaacccuaaauaugacugcaagaucaugaccuccaaaacagaugugucuagcuccgucauuaccagccucggagccaucgugucuuguuacggcaagacaaaaugcacggcuuccaauaagaacaaggggauuaucaaaaccuucagcaauggaugugacuauguuucuaacaagggcguggacacagucuccgugggcaauacccuguacuauguuaacaaacaggaggggcagagccuuuacgugaagggagagcccauuaucaacuuuuaugauccucuggucuuccccuccgacgaauuugaugccucuaucagccaagugaaugagaaaauuaaccagucccucgcuuucauccggaagucugacgaacugcugcacaaugugaacgccggcaagagcacaaccaauauuaugaucacgaccauuaucauuguuaucaucgucauucuccugucccuuaucgccguggggcugcuccuguacugcaaagcucgcagcacaccggugacccugucuaaggaucagcuuuccggaauuaacaauaucgcguucagcaacugaggacuagucccuguucccagagcccacuuuuuuuucuuuuuuugaaauaaaauagccugucuuucagaucuaaaaaaaaaaaaaaaaaaaaaaaaaaaaaaaaaaaaaaaaaaaaaaaaaaaaaaaaaaaaaaaaugcaucccccccccccccccccccccccccccccccaaaggcucuuuucagagccaccagaauu

SEQ ID NO: 6079 - RNA, 1884 nt, Artificial Sequence
  mRNA product Design a-1 comprising derived and/or modified sequence from HRSV(A2)__F_DSCav1_mut6 (opt6)
gggagagucccgcagucggcguccagcggcucugcuuguucgugugugugucguugcaggccuuauucaagcuuaccauggaacuauuaaucuuaaaagcaaaugcuauaaccacaauauuaacagcaguaacauucuguuuugccuccggacaaaacauaacagaagaauuuuaucaaucaacaugcucugcaguauccaaagguuacuuaggcgcacuacgcacuggaugguauacaucaguaauaacaauagaacuaucaaacauaaaagaaaauaaauguaacgguacugacgcaaaagugaaacuaauuaaacaagaacucgacaaauacaaaaaugcuguaacagaccuacaaaugcuaaugugcucaacacccgcaaccggaucaggaucagccauagccuccggagucgcaguaugcaaaguauuacaucuugaaggagaaguaaauaaaauaaaaucagcauuacuauccacaaauaaagccguaguaucacuaucaaacgguguauccguccuuacauucaaaguauuagaucuaaaaaacuacauagauaaacaacuacuacccaucuuaaacaaacaaucaugcucaauucccaacccagaaacagucauggaauuucaacaaaaaaacaacagacucuuagaaauaacacgagaauuuucaguaaacgcaggaguaaccacaccaguaaguacauacaugcucaccaacucagaauuauuaucacuuauuaacgacaugccaauuacaaacgaccaaaaaaaauuaaugucaaacaauguccaaauuguuagacaacaaucauacucuauaauguguauaauaaaagaagaaguacuagcuuacguaguucaauuaccacuauauggcguaauagauacaccuugcuggaaacuacauacaucuccauuauguacaacuaacacaaaagaaggaucuaacauaugccuaacacgcacagaucgaggaugguacugcgauaaugcagguuccguaucauucuuuccacaagcagaaacauguaaaguaugcucaaacagaguauucugugacacuaugaacuccuuaacccuacccucagaagucaaucuaugcaacguugacauauuuaacccaaaauacgacuguaaaaucaugacaucuaaaacagacguaucaucaucaguuauuacaucccuaggagcaauaguaucuugcuacggaaaaacaaaauguacagcauccaacaaaaacaaaggaauaaucaaaacauucucaaacggcugcgacuacguaucaaacaaagguguagacacaguaucaguaggaaauacuuuauauuacguaaauaaacaagaaggacaaucucuauacguuaaaggcgaaccuauuauaaacuucuacgacccacucguauucccuucagacgaauuugacgcaucuauaucccaaguuaacgaaaaaaucaaccaaucauuagccuuuauaagaaaauccgacgaauuauuacauaacgucaacgcuggaaaaucaacaacuaacauaaugauaaccacaauaauaauagucaucauaguuauauuacuaagucuaauagccguaggccuccuacuuuauugcaaagcaagaucaacaccaguaacauuauccaaagaccaacucagcggcauaaacaauauagcuuuuucaaacuagggacuagucccuguucccagagcccacuuuuuuuucuuuuuuugaaauaaaauagccugucuuucagaucuaaaaaaaaaaaaaaaaaaaaaaaaaaaaaaaaaaaaaaaaaaaaaaaaaaaaaaaaaaaaaaaaugcaucccccccccccccccccccccccccccccccaaaggcucuuuucagagccaccagaauu

SEQ ID NO: 6080 - RNA, 1884 nt, Artificial Sequence
  mRNA product Design a-1 comprising derived and/or modified sequence from HRSV(A2)__F_DSCav1_mut6 (opt11)
gggagagucccgcagucggcguccagcggcucugcuuguucgugugugugucguugcaggccuuauucaagcuuaccauggaacuccucauccucaaagccaacgcaaucacaaccauacuaacugcaguuacuuucugcuucgcauccggccaaaacaucaccgaagaguucuaccaaucaaccugcuccgcagucuccaaaggauaccucggagcccuucgcaccggcugguacaccuccgucauaaccaucgaacucucaaacauaaaagaaaacaaaugcaacggcacagacgcgaaagucaaacuuaucaaacaagaacucgacaaauacaaaaacgccgucaccgaccugcagaugcucaugugcucaacccccgccacaggaagcggcucugcuaucgcuuccggcgucgccgucugcaaaguccuccaccucgaaggcgaaguaaacaaaaucaagucagcccuccucuccaccaacaaagccgucgucucucucucaaacggcguauccguccucacauucaaaguccucgaccucaaaaacuacaucgacaaacaacuucuccccauccuaaacaaacaaucaugcuccauccccaaccccgaaacagucauggaauuucaacaaaagaacaaccgccucuuagaaaucacccgagaauuuuccgucaacgcgggagucacaacccccguuucuacguauaugcucaccaacuccgaacuccuuucccucauaaacgacaugccaaucaccaacgaccaaaagaaacucaugucaaacaacguccaaaucguccgacaacaauccuacucuauuaugugcaucaucaaagaagaaguucucgccuacgucguccaacuaccccucuacggcgugaucgacacccccugcuggaaacuacacaccucaccccucugcaccaccaacaccaaggaaggcuccaacaucugccucacccgcaccgaccgcggcugguacugcgacaacgcuggcuccgucucauucuucccgcaagccgaaacuugcaaaguaugcuccaacagaguauucugcgacaccaugaacucacuaacccucccuuccgaagucaaccuuugcaacguugacauauucaacccaaaguacgauugcaaaauuaugacauccaaaacagaugucuccuccuccgucaucacaucccucggugccauuguaucaugcuacggaaaaaccaaaugcaccgcauccaacaaaaacaaaggaaucaucaaaaccuucucaaacggcugcgauuacgucucaaacaaaggagucgacacagucuccgucggaaacacccuauacuacgucaacaaacaagaaggccaaucccuguacgucaaaggagaacccaucaucaacuucuacgacccccucgucuucccgagcgacgaguucgacgccuccaucucacaagucaaugaaaagaucaaccaaucccuugccuucauccggaaaucggacgaacuccuacacaacgugaacgcuggaaaaucaaccaccaacaucaugaucacaaccaucauuaucgucaucaucgucauacuccucucccuaaucgccgucggccuccuccuguauugcaaagcucgcuccacccccgucacccuguccaaagaccaacucuccggaaucaacaacaucgccuucucaaacuaaggacuagucccuguucccagagcccacuuuuuuuucuuuuuuugaaauaaaauagccugucuuucagaucuaaaaaaaaaaaaaaaaaaaaaaaaaaaaaaaaaaaaaaaaaaaaaaaaaaaaaaaaaaaaaaaaugcaucccccccccccccccccccccccccccccccaaaggcucuuuucagagccaccagaauu

SEQ ID NO: 6081 - RNA, 1903 nt, Artificial Sequence
  mRNA product Design a-2 comprising derived and/or modified sequence from HRSV(A2)__F_DSCav1_mut6 (opt1)
gggagaguccgcucagccagguugcagaagcggcuuagcguguguccuaaucuucucucugcguguagguaggccugugccgcaaacaagcuuaccauggagcugcucauccugaaggccaacgccaucaccaccauccugacggcggugaccuucugcuucgccagcggccagaacaucaccgaggaguucuaccaguccacgugcagcgccgucuccaagggguaccucggcgcccugcggaccggcugguacaccuccgugaucaccaucgagcugagcaacaucaaggagaacaagugcaacgggaccgacgccaaggugaagcucaucaagcaggagcuggacaaguacaagaacgcggucacggaccugcagaugcugaugugcuccaccccggcaaccggcuccggcuccgccaucgcgagcggcgucgccgugugcaaggugcugcaccucgagggggaggucaacaagaucaagagcgcccugcuguccaccaacaaggccguggugagccucuccaacggcgucagcgugcugaccuucaaggugcuggaccucaagaacuacaucgacaagcagcugcugcccauccugaacaagcagagcugcuccauccccaaccccgagacggugauggaguuccagcagaagaacaaccggcuccuggagaucacccgcgaguucagcgugaacgccggggucaccacccccguguccacguacaugcugaccaacagcgagcuccugucccugaucaacgacaugccgaucaccaacgaccagaagaagcucaugagcaacaacgugcagaucguccggcagcaguccuacagcaucaugugcaucaucaaggaggaggugcuggcguacgugguccagcugccccucuacggcgugaucgacacccccugcuggaagcugcacacgagcccccugugcaccaccaacaccaaggagggguccaacaucugccucacgcgcaccgaccggggcugguacugcgacaacgccggcagcgucuccuucuucccgcaggccgagaccugcaaggugugcagcaaccgcguguucugcgacaccaugaacucccugacgcugcccagcgagguaaaccucugcaacgucgacaucuucaaccccaaguacgacugcaagaucaugaccuccaagaccgacgugagcuccagcgugaucaccucccugggggccaucgucagcugcuacggcaagacgaagugcaccgccagcaacaagaacaaggggaucaucaagaccuucuccaacggcugcgacuacgugagcaacaagggcguggacaccguguccgucgggaacacccuguacuacgugaacaagcaggagggccagagccucuacgugaagggggagcccaucaucaacuucuacgacccgcuggucuuccccuccgacgaguucgacgcgagcaucucccaggugaacgagaagaucaaccagagccuggccuucauccgcaaguccgacgagcugcuccacaacgugaacgccggcaagagcacgaccaacaucaugaucaccaccaucaucaucgucaucaucgugauccugcugucccucaucgccguggggcugcugcucuacugcaaggcccggagcacgcccgucacccuguccaaggaccagcugagcggcaucaacaacaucgcguucuccaacugaggacuagucccuguucccagagcccacuuuuuuuucuuuuuuugaaauaaaauagccugucuuucagaucuaaaaaaaaaaaaaaaaaaaaaaaaaaaaaaaaaaaaaaaaaaaaaaaaaaaaaaaaaaaaaaaaugcaucccccccccccccccccccccccccccccccaaaggcucuuuucagagccaccagaauu

SEQ ID NO: 6082 - RNA, 1903 nt, Artificial Sequence
  mRNA product Design a-2 comprising derived and/or modified sequence from HRSV(A2)__F_DSCav1_mut6 (opt1)
gggagaguccgcucagccagguugcagaagcggcuuagcguguguccuaaucuucucucugcguguagguaggccugugccgcaaacaagcuuaccauggagcugcucauccugaaggccaacgccaucaccaccauccugacggcggugaccuucugcuucgccagcggccagaacaucaccgaggaguucuaccaguccacgugcagcgccgucuccaagggguaccucggcgcccugcgcaccgggugguacaccagcgugaucaccaucgagcuguccaacaucaaggagaacaagugcaacggcaccgacgccaaggugaagcucaucaagcaggagcuggacaaguacaagaacgcggucacggaccugcagaugcucaugugcagcacccccgccaccggguccggcagcgccaucgccuccggcguggcggugugcaagguccugcaccuggagggggaggugaacaagaucaagagcgcccuccuguccaccaacaaggccguggucagccuguccaacggcgugagcgugcucacguucaagguccuggaccugaagaacuacaucgacaagcagcuccugccgauccugaacaagcaguccugcagcauccccaaccccgagaccgugauggaguuccagcagaagaacaaccggcuccuggagaucacccgcgaguucuccgugaacgccggggucaccacgcccgugagcaccuacaugcugaccaacuccgagcuccugagccugaucaacgacaugccgaucaccaacgaccagaagaagcucaugagcaacaacgugcagaucguccggcagcaguccuacagcaucaugugcaucaucaaggaggaggugcuggccuacgugguccagcugccccucuacggcgugaucgacacgcccugcuggaagcugcacaccagcccccugugcaccaccaacacgaaggaggggagcaacaucugccucacccgcaccgaccggggcugguacugcgacaacgcgggcuccgugagcuucuucccgcaggccgagaccugcaaggucugcuccaaccgcguguucugcgacacgaugaacagccugacccugcccuccgaggucaaccucugcaacguggacaucuucaaccccaaguacgacugcaagaucaugaccagcaagaccgacguguccagcuccgucaucacgagccugggggccaucguguccugcuacggcaagaccaagugcaccgccagcaacaagaacaaggggaucaucaagaccuucuccaacggcugcgacuacgugagcaacaagggcgucgacacgguguccguggggaacacccuguacuacgucaacaagcaggagggccagagccucuacgugaagggggagcccaucaucaacuucuacgacccgcugguguuccccagcgacgaguucgacgccuccaucagccaggucaacgagaagaucaaccagucccuggcguucauccggaaguccgacgagcuccugcacaacgugaacgccggcaaguccaccaccaacaucaugaucaccacgaucaucaucgugaucaucgucauccugcucagccugaucgccguggggcugcuccuguacugcaaggcccgcuccacccccgugacccugagcaaggaccagcuguccggcaucaacaacaucgccuucagcaacugaggacuagucccuguucccagagcccacuuuuuuuucuuuuuuugaaauaaaauagccugucuuucagaucuaaaaaaaaaaaaaaaaaaaaaaaaaaaaaaaaaaaaaaaaaaaaaaaaaaaaaaaaaaaaaaaaugcaucccccccccccccccccccccccccccccccaaaggcucuuuucagagccaccagaauu

SEQ ID NO: 6083 - RNA, 1903 nt, Artificial Sequence
  mRNA product Design a-2 comprising derived and/or modified sequence from HRSV(A2)__F_DSCav1_mut6 (opt2)
gggagaguccgcucagccagguugcagaagcggcuuagcguguguccuaaucuucucucugcguguagguaggccugugccgcaaacaagcuuaccauggagcuccucauccucaaggccaacgccaucaccaccauccucaccgccgucaccuucugcuucgccuccggccagaacaucaccgaggaguucuaccaguccaccugcuccgccgucuccaagggcuaccucggcgcccuccgcaccggcugguacaccuccgucaucaccaucgagcucuccaacaucaaggagaacaagugcaacggcaccgacgccaaggucaagcucaucaagcaggagcucgacaaguacaagaacgccgucaccgaccuccagaugcucaugugcuccacccccgccaccggcuccggcuccgccaucgccuccggcgucgccgucugcaagguccuccaccucgagggcgaggucaacaagaucaaguccgcccuccucuccaccaacaaggccgucgucucccucuccaacggcgucuccguccucaccuucaagguccucgaccucaagaacuacaucgacaagcagcuccuccccauccucaacaagcaguccugcuccauccccaaccccgagaccgucauggaguuccagcagaagaacaaccgccuccucgagaucacccgcgaguucuccgucaacgccggcgucaccacccccgucuccaccuacaugcucaccaacuccgagcuccucucccucaucaacgacaugcccaucaccaacgaccagaagaagcucauguccaacaacguccagaucguccgccagcaguccuacuccaucaugugcaucaucaaggaggagguccucgccuacgucguccagcucccccucuacggcgucaucgacacccccugcuggaagcuccacaccuccccccucugcaccaccaacaccaaggagggcuccaacaucugccucacccgcaccgaccgcggcugguacugcgacaacgccggcuccgucuccuucuucccccaggccgagaccugcaaggucugcuccaaccgcgucuucugcgacaccaugaacucccucacccuccccuccgaggucaaccucugcaacgucgacaucuucaaccccaaguacgacugcaagaucaugaccuccaagaccgacgucuccuccuccgucaucaccucccucggcgccaucgucuccugcuacggcaagaccaagugcaccgccuccaacaagaacaagggcaucaucaagaccuucuccaacggcugcgacuacgucuccaacaagggcgucgacaccgucuccgucggcaacacccucuacuacgucaacaagcaggagggccagucccucuacgucaagggcgagcccaucaucaacuucuacgacccccucgucuuccccuccgacgaguucgacgccuccaucucccaggucaacgagaagaucaaccagucccucgccuucauccgcaaguccgacgagcuccuccacaacgucaacgccggcaaguccaccaccaacaucaugaucaccaccaucaucaucgucaucaucgucauccuccucucccucaucgccgucggccuccuccucuacugcaaggcccgcuccacccccgucacccucuccaaggaccagcucuccggcaucaacaacaucgccuucuccaacugaggacuagucccuguucccagagcccacuuuuuuuucuuuuuuugaaauaaaauagccugucuuucagaucuaaaaaaaaaaaaaaaaaaaaaaaaaaaaaaaaaaaaaaaaaaaaaaaaaaaaaaaaaaaaaaaaugcaucccccccccccccccccccccccccccccccaaaggcucuuuucagagccaccagaauu

SEQ ID NO: 6084 - RNA, 1903 nt, Artificial Sequence
  mRNA product Design a-2 comprising derived and/or modified sequence from HRSV(A2)__F_DSCav1_mut6 (opt3)
gggagaguccgcucagccagguugcagaagcggcuuagcguguguccuaaucuucucucugcguguagguaggccugugccgcaaacaagcuuaccauggagcugcucauccuuaaggccaacgcuauuaccacaauacugacugcagugacguucugcuuugccagcggccagaauaucaccgaagaguucuaccaauccacauguucugcggucucaaaaggguauuugggagcuuuaagaacugguugguacaccaguguuauuacaaucgaacugagcaacauuaaggagaauaaaugcaacggcaccgacgccaaggugaaacuaaucaagcaggaacucgauaaguauaaaaaugcaguaacugaccugcagaugcuuauguguuccacacccgccaccgggucuggaucggcuauagcaucaggcguggccgucugcaaggugcugcacuuggagggugagguuaacaaaaucaagagcgcucuccugaguacgaauaaagccguggucucccugucuaacggggugagcguacucacuuuuaagguuuuagaucugaagaauuacauugacaaacagcuuuugccuauccugaacaagcaauccuguucaauuccaaauccggaaaccgugauggaguuccagcagaaaaacaauaggcuacucgaaaucacacgggaguuuagugucaacgcgggagugacuacccccgugagcacauauaugcugaccaauucugagcuucuguccuugauaaacgauaugccuauuacgaacgaccagaagaaacucaugucaaauaacguccaaaucguucgccagcagagcuacaguauuaugugcaucaucaaggaagaggugcuggcauauguagugcaguuaccacuguacggcgucauugauacucccuguuggaaacuccauacaucuccucuuugcaccacuaauacaaaggaaggcuccaacauaugucugacccgaacggaccgugggugguacugcgauaaugccggaagcgugucguucuuuccacaagcugagaccuguaagguuugcucuaacagaguguucugcgacacaaugaacuccuugacucuacccucagaagucaaucuguguaauguggauaucuuuaacccuaaauaugacugcaagauuaugaccaguaaaacagauguaagcuccucuguuaucacuagccucggugccauagugucauguuacggcaagaccaaaugcacagcaaguaauaagaacaaggggauuaucaaaaccuucuccaauggaugugacuaugucagcaacaagggcguggacacugucucuguggguaauacgcuguacuauguuaacaaacaggaggggcagucacuuuacgugaagggagagccaaucauuaacuuuuaugauccgcugguauuccccagugacgaauuugaugcuagcaucucccaagucaaugagaaaauuaaccagucuuuggccuucauaaggaagucggacgaacuccugcacaaugugaacgcgggcaagagcacaaccaauaucaugauuacuaccaucaucauuguuauaaucgugauuuuacugucccuaaucgccgucggccuccugcuuuacugcaaagcacggucaacaccugugaccuugaguaaggaucagcugucugggauuaacaauaucgcuuucagcaacugaggacuagucccuguucccagagcccacuuuuuuuucuuuuuuugaaauaaaauagccugucuuucagaucuaaaaaaaaaaaaaaaaaaaaaaaaaaaaaaaaaaaaaaaaaaaaaaaaaaaaaaaaaaaaaaaaugcaucccccccccccccccccccccccccccccccaaaggcucuuuucagagccaccagaauu

SEQ ID NO: 6085 - RNA, 1903 nt, Artificial Sequence
  mRNA product Design a-2 comprising derived and/or modified sequence from HRSV(A2)__F_DSCav1_mut6 (opt4)
gggagaguccgcucagccagguugcagaagcggcuuagcguguguccuaaucuucucucugcguguagguaggccugugccgcaaacaagcuuaccauggagcugcugauccugaaggccaacgccaucaccaccauccugaccgccgugaccuucugcuucgccagcggccagaacaucaccgaggaguucuaccagagcaccugcagcgccgugagcaagggcuaccugggcgcccugagaaccggcugguacaccagcgugaucaccaucgagcugagcaacaucaaggagaacaagugcaacggcaccgacgccaaggugaagcugaucaagcaggagcuggacaaguacaagaacgccgugaccgaccugcagaugcugaugugcagcacccccgccaccggcagcggcagcgccaucgccagcggcguggccgugugcaaggugcugcaccuggagggcgaggugaacaagaucaagagcgcccugcugagcaccaacaaggccguggugagccugagcaacggcgugagcgugcugaccuucaaggugcuggaccugaagaacuacaucgacaagcagcugcugcccauccugaacaagcagagcugcagcauccccaaccccgagaccgugauggaguuccagcagaagaacaacagacugcuggagaucaccagagaguucagcgugaacgccggcgugaccacccccgugagcaccuacaugcugaccaacagcgagcugcugagccugaucaacgacaugcccaucaccaacgaccagaagaagcugaugagcaacaacgugcagaucgugagacagcagagcuacagcaucaugugcaucaucaaggaggaggugcuggccuacguggugcagcugccccuguacggcgugaucgacacccccugcuggaagcugcacaccagcccccugugcaccaccaacaccaaggagggcagcaacaucugccugaccagaaccgacagaggcugguacugcgacaacgccggcagcgugagcuucuucccccaggccgagaccugcaaggugugcagcaacagaguguucugcgacaccaugaacagccugacccugcccagcgaggugaaccugugcaacguggacaucuucaaccccaaguacgacugcaagaucaugaccagcaagaccgacgugagcagcagcgugaucaccagccugggcgccaucgugagcugcuacggcaagaccaagugcaccgccagcaacaagaacaagggcaucaucaagaccuucagcaacggcugcgacuacgugagcaacaagggcguggacaccgugagcgugggcaacacccuguacuacgugaacaagcaggagggccagagccuguacgugaagggcgagcccaucaucaacuucuacgacccccugguguuccccagcgacgaguucgacgccagcaucagccaggugaacgagaagaucaaccagagccuggccuucaucagaaagagcgacgagcugcugcacaacgugaacgccggcaagagcaccaccaacaucaugaucaccaccaucaucaucgugaucaucgugauccugcugagccugaucgccgugggccugcugcuguacugcaaggccagaagcacccccgugacccugagcaaggaccagcugagcggcaucaacaacaucgccuucagcaacugaggacuagucccuguucccagagcccacuuuuuuuucuuuuuuugaaauaaaauagccugucuuucagaucuaaaaaaaaaaaaaaaaaaaaaaaaaaaaaaaaaaaaaaaaaaaaaaaaaaaaaaaaaaaaaaaaugcaucccccccccccccccccccccccccccccccaaaggcucuuuucagagccaccagaauu

SEQ ID NO: 6086 - RNA, 1903 nt, Artificial Sequence
  mRNA product Design a-2 comprising derived and/or modified sequence from HRSV(A2)__F_DSCav1_mut6 (opt5)
gggagaguccgcucagccagguugcagaagcggcuuagcguguguccuaaucuucucucugcguguagguaggccugugccgcaaacaagcuuaccauggagcugcucauccugaaggccaacgcuauuaccacaauccuuacggccgugaccuucugcuuugcgagcggccagaauauuacagaagaguucuaccaauccaccuguucugcugucagcaaaggguaucugggagcccucagaacaggcugguacaccuccguuaucacaauugaacugucuaacaucaaggagaauaaaugcaacgggaccgacgccaaggugaaacuuaucaagcaggaacuggauaaguauaaaaaugcugugacggaccuccagaugcugauguguagcacccccgccacaggauccggcucugcuauugccagcggggucgcggugugcaagguucugcaccucgagggagaggugaacaaaaucaaguccgcccugcuuagcaccaauaaagcugucgugucucuguccaacggcguuagcgugcucacauuuaagguccuggaucuuaagaauuacauugacaaacagcugcucccuauccugaacaagcaaucuuguuccauuccgaaucccgaaaccgugauggaguuccagcagaaaaacaaucggcugcucgaaaucacgcgcgaguuuagcgugaacgccggcgucacaaccccuguuucuacauauaugcugaccaauuccgagcuucugagccucauuaacgauaugcccaucaccaacgaccagaagaaacugauguccaauaacgugcaaaucgugagacagcagucuuacagcauuaugugcaucauuaaggaagagguccuugcuuaugugguucagcugccucucuacggggugaucgauacacccuguuggaaacugcauacguccccucugugcaccacaaauaccaaggaaggaagcaacauuugucucacacggaccgaccgcggcugguacugcgauaaugccgggucugucuccuucuuuccgcaagcggagacguguaaggugugcagcaacagaguuuucugcgacacaaugaacucucugacccuucccagcgaagugaaucuguguaaugucgauaucuuuaacccuaaauaugacugcaagaucaugaccuccaaaacagaugugucuagcuccgucauuaccagccucggagccaucgugucuuguuacggcaagacaaaaugcacggcuuccaauaagaacaaggggauuaucaaaaccuucagcaauggaugugacuauguuucuaacaagggcguggacacagucuccgugggcaauacccuguacuauguuaacaaacaggaggggcagagccuuuacgugaagggagagcccauuaucaacuuuuaugauccucuggucuuccccuccgacgaauuugaugccucuaucagccaagugaaugagaaaauuaaccagucccucgcuuucauccggaagucugacgaacugcugcacaaugugaacgccggcaagagcacaaccaauauuaugaucacgaccauuaucauuguuaucaucgucauucuccugucccuuaucgccguggggcugcuccuguacugcaaagcucgcagcacaccggugacccugucuaaggaucagcuuuccggaauuaacaauaucgcguucagcaacugaggacuagucccuguucccagagcccacuuuuuuuucuuuuuuugaaauaaaauagccugucuuucagaucuaaaaaaaaaaaaaaaaaaaaaaaaaaaaaaaaaaaaaaaaaaaaaaaaaaaaaaaaaaaaaaaaugcaucccccccccccccccccccccccccccccccaaaggcucuuuucagagccaccagaauu

SEQ ID NO: 6087 - RNA, 1903 nt, Artificial Sequence
  mRNA product Design a-2 comprising derived and/or modified sequence from HRSV(A2)__F_DSCav1_mut6 (opt6)
gggagaguccgcucagccagguugcagaagcggcuuagcguguguccuaaucuucucucugcguguagguaggccugugccgcaaacaagcuuaccauggaacuauuaaucuuaaaagcaaaugcuauaaccacaauauuaacagcaguaacauucuguuuugccuccggacaaaacauaacagaagaauuuuaucaaucaacaugcucugcaguauccaaagguuacuuaggcgcacuacgcacuggaugguauacaucaguaauaacaauagaacuaucaaacauaaaagaaaauaaauguaacgguacugacgcaaaagugaaacuaauuaaacaagaacucgacaaauacaaaaaugcuguaacagaccuacaaaugcuaaugugcucaacacccgcaaccggaucaggaucagccauagccuccggagucgcaguaugcaaaguauuacaucuugaaggagaaguaaauaaaauaaaaucagcauuacuauccacaaauaaagccguaguaucacuaucaaacgguguauccguccuuacauucaaaguauuagaucuaaaaaacuacauagauaaacaacuacuacccaucuuaaacaaacaaucaugcucaauucccaacccagaaacagucauggaauuucaacaaaaaaacaacagacucuuagaaauaacacgagaauuuucaguaaacgcaggaguaaccacaccaguaaguacauacaugcucaccaacucagaauuauuaucacuuauuaacgacaugccaauuacaaacgaccaaaaaaaauuaaugucaaacaauguccaaauuguuagacaacaaucauacucuauaauguguauaauaaaagaagaaguacuagcuuacguaguucaauuaccacuauauggcguaauagauacaccuugcuggaaacuacauacaucuccauuauguacaacuaacacaaaagaaggaucuaacauaugccuaacacgcacagaucgaggaugguacugcgauaaugcagguuccguaucauucuuuccacaagcagaaacauguaaaguaugcucaaacagaguauucugugacacuaugaacuccuuaacccuacccucagaagucaaucuaugcaacguugacauauuuaacccaaaauacgacuguaaaaucaugacaucuaaaacagacguaucaucaucaguuauuacaucccuaggagcaauaguaucuugcuacggaaaaacaaaauguacagcauccaacaaaaacaaaggaauaaucaaaacauucucaaacggcugcgacuacguaucaaacaaagguguagacacaguaucaguaggaaauacuuuauauuacguaaauaaacaagaaggacaaucucuauacguuaaaggcgaaccuauuauaaacuucuacgacccacucguauucccuucagacgaauuugacgcaucuauaucccaaguuaacgaaaaaaucaaccaaucauuagccuuuauaagaaaauccgacgaauuauuacauaacgucaacgcuggaaaaucaacaacuaacauaaugauaaccacaauaauaauagucaucauaguuauauuacuaagucuaauagccguaggccuccuacuuuauugcaaagcaagaucaacaccaguaacauuauccaaagaccaacucagcggcauaaacaauauagcuuuuucaaacuagggacuagucccuguucccagagcccacuuuuuuuucuuuuuuugaaauaaaauagccugucuuucagaucuaaaaaaaaaaaaaaaaaaaaaaaaaaaaaaaaaaaaaaaaaaaaaaaaaaaaaaaaaaaaaaaaugcaucccccccccccccccccccccccccccccccaaaggcucuuuucagagccaccagaauu

SEQ ID NO: 6088 - RNA, 1903 nt, Artificial Sequence
  mRNA product Design a-2 comprising derived and/or modified sequence from HRSV(A2)__F_DSCav1_mut6 (opt11)
gggagaguccgcucagccagguugcagaagcggcuuagcguguguccuaaucuucucucugcguguagguaggccugugccgcaaacaagcuuaccauggaacuccucauccucaaagccaacgcaaucacaaccauacuaacugcaguuacuuucugcuucgcauccggccaaaacaucaccgaagaguucuaccaaucaaccugcuccgcagucuccaaaggauaccucggagcccuucgcaccggcugguacaccuccgucauaaccaucgaacucucaaacauaaaagaaaacaaaugcaacggcacagacgcgaaagucaaacuuaucaaacaagaacucgacaaauacaaaaacgccgucaccgaccugcagaugcucaugugcucaacccccgccacaggaagcggcucugcuaucgcuuccggcgucgccgucugcaaaguccuccaccucgaaggcgaaguaaacaaaaucaagucagcccuccucuccaccaacaaagccgucgucucucucucaaacggcguauccguccucacauucaaaguccucgaccucaaaaacuacaucgacaaacaacuucuccccauccuaaacaaacaaucaugcuccauccccaaccccgaaacagucauggaauuucaacaaaagaacaaccgccucuuagaaaucacccgagaauuuuccgucaacgcgggagucacaacccccguuucuacguauaugcucaccaacuccgaacuccuuucccucauaaacgacaugccaaucaccaacgaccaaaagaaacucaugucaaacaacguccaaaucguccgacaacaauccuacucuauuaugugcaucaucaaagaagaaguucucgccuacgucguccaacuaccccucuacggcgugaucgacacccccugcuggaaacuacacaccucaccccucugcaccaccaacaccaaggaaggcuccaacaucugccucacccgcaccgaccgcggcugguacugcgacaacgcuggcuccgucucauucuucccgcaagccgaaacuugcaaaguaugcuccaacagaguauucugcgacaccaugaacucacuaacccucccuuccgaagucaaccuuugcaacguugacauauucaacccaaaguacgauugcaaaauuaugacauccaaaacagaugucuccuccuccgucaucacaucccucggugccauuguaucaugcuacggaaaaaccaaaugcaccgcauccaacaaaaacaaaggaaucaucaaaaccuucucaaacggcugcgauuacgucucaaacaaaggagucgacacagucuccgucggaaacacccuauacuacgucaacaaacaagaaggccaaucccuguacgucaaaggagaacccaucaucaacuucuacgacccccucgucuucccgagcgacgaguucgacgccuccaucucacaagucaaugaaaagaucaaccaaucccuugccuucauccggaaaucggacgaacuccuacacaacgugaacgcuggaaaaucaaccaccaacaucaugaucacaaccaucauuaucgucaucaucgucauacuccucucccuaaucgccgucggccuccuccuguauugcaaagcucgcuccacccccgucacccuguccaaagaccaacucuccggaaucaacaacaucgccuucucaaacuaaggacuagucccuguucccagagcccacuuuuuuuucuuuuuuugaaauaaaauagccugucuuucagaucuaaaaaaaaaaaaaaaaaaaaaaaaaaaaaaaaaaaaaaaaaaaaaaaaaaaaaaaaaaaaaaaaugcaucccccccccccccccccccccccccccccccaaaggcucuuuucagagccaccagaauu

SEQ ID NO: 6089 - RNA, 1981 nt, Artificial Sequence
  mRNA product Design a-3 comprising derived and/or modified sequence from HRSV(A2)__F_DSCav1_mut6 (opt1)
gggagagggcgcuuggcuugcaaggacccugagcugcggcauugaagcacacccaacccaacucgacugaagucagccucacugaaccggaucugagaaucuucucucucugggcuugccagggcucuccgaaccuagcuagcauccucuucaauuccaacuagaaagcuuaccauggagcugcucauccugaaggccaacgccaucaccaccauccugacggcggugaccuucugcuucgccagcggccagaacaucaccgaggaguucuaccaguccacgugcagcgccgucuccaagggguaccucggcgcccugcggaccggcugguacaccuccgugaucaccaucgagcugagcaacaucaaggagaacaagugcaacgggaccgacgccaaggugaagcucaucaagcaggagcuggacaaguacaagaacgcggucacggaccugcagaugcugaugugcuccaccccggcaaccggcuccggcuccgccaucgcgagcggcgucgccgugugcaaggugcugcaccucgagggggaggucaacaagaucaagagcgcccugcuguccaccaacaaggccguggugagccucuccaacggcgucagcgugcugaccuucaaggugcuggaccucaagaacuacaucgacaagcagcugcugcccauccugaacaagcagagcugcuccauccccaaccccgagacggugauggaguuccagcagaagaacaaccggcuccuggagaucacccgcgaguucagcgugaacgccggggucaccacccccguguccacguacaugcugaccaacagcgagcuccugucccugaucaacgacaugccgaucaccaacgaccagaagaagcucaugagcaacaacgugcagaucguccggcagcaguccuacagcaucaugugcaucaucaaggaggaggugcuggcguacgugguccagcugccccucuacggcgugaucgacacccccugcuggaagcugcacacgagcccccugugcaccaccaacaccaaggagggguccaacaucugccucacgcgcaccgaccggggcugguacugcgacaacgccggcagcgucuccuucuucccgcaggccgagaccugcaaggugugcagcaaccgcguguucugcgacaccaugaacucccugacgcugcccagcgagguaaaccucugcaacgucgacaucuucaaccccaaguacgacugcaagaucaugaccuccaagaccgacgugagcuccagcgugaucaccucccugggggccaucgucagcugcuacggcaagacgaagugcaccgccagcaacaagaacaaggggaucaucaagaccuucuccaacggcugcgacuacgugagcaacaagggcguggacaccguguccgucgggaacacccuguacuacgugaacaagcaggagggccagagccucuacgugaagggggagcccaucaucaacuucuacgacccgcuggucuuccccuccgacgaguucgacgcgagcaucucccaggugaacgagaagaucaaccagagccuggccuucauccgcaaguccgacgagcugcuccacaacgugaacgccggcaagagcacgaccaacaucaugaucaccaccaucaucaucgucaucaucgugauccugcugucccucaucgccguggggcugcugcucuacugcaaggcccggagcacgcccgucacccuguccaaggaccagcugagcggcaucaacaacaucgcguucuccaacugaggacuagucccuguucccagagcccacuuuuuuuucuuuuuuugaaauaaaauagccugucuuucagaucuaaaaaaaaaaaaaaaaaaaaaaaaaaaaaaaaaaaaaaaaaaaaaaaaaaaaaaaaaaaaaaaaugcaucccccccccccccccccccccccccccccccaaaggcucuuuucagagccaccagaauu

SEQ ID NO: 6090 - RNA, 1981 nt, Artificial Sequence
  mRNA product Design a-3 comprising derived and/or modified sequence from HRSV(A2)__F_DSCav1_mut6 (opt1)
gggagagggcgcuuggcuugcaaggacccugagcugcggcauugaagcacacccaacccaacucgacugaagucagccucacugaaccggaucugagaaucuucucucucugggcuugccagggcucuccgaaccuagcuagcauccucuucaauuccaacuagaaagcuuaccauggagcugcucauccugaaggccaacgccaucaccaccauccugacggcggugaccuucugcuucgccagcggccagaacaucaccgaggaguucuaccaguccacgugcagcgccgucuccaagggguaccucggcgcccugcgcaccgggugguacaccagcgugaucaccaucgagcuguccaacaucaaggagaacaagugcaacggcaccgacgccaaggugaagcucaucaagcaggagcuggacaaguacaagaacgcggucacggaccugcagaugcucaugugcagcacccccgccaccggguccggcagcgccaucgccuccggcguggcggugugcaagguccugcaccuggagggggaggugaacaagaucaagagcgcccuccuguccaccaacaaggccguggucagccuguccaacggcgugagcgugcucacguucaagguccuggaccugaagaacuacaucgacaagcagcuccugccgauccugaacaagcaguccugcagcauccccaaccccgagaccgugauggaguuccagcagaagaacaaccggcuccuggagaucacccgcgaguucuccgugaacgccggggucaccacgcccgugagcaccuacaugcugaccaacuccgagcuccugagccugaucaacgacaugccgaucaccaacgaccagaagaagcucaugagcaacaacgugcagaucguccggcagcaguccuacagcaucaugugcaucaucaaggaggaggugcuggccuacgugguccagcugccccucuacggcgugaucgacacgcccugcuggaagcugcacaccagcccccugugcaccaccaacacgaaggaggggagcaacaucugccucacccgcaccgaccggggcugguacugcgacaacgcgggcuccgugagcuucuucccgcaggccgagaccugcaaggucugcuccaaccgcguguucugcgacacgaugaacagccugacccugcccuccgaggucaaccucugcaacguggacaucuucaaccccaaguacgacugcaagaucaugaccagcaagaccgacguguccagcuccgucaucacgagccugggggccaucguguccugcuacggcaagaccaagugcaccgccagcaacaagaacaaggggaucaucaagaccuucuccaacggcugcgacuacgugagcaacaagggcgucgacacgguguccguggggaacacccuguacuacgucaacaagcaggagggccagagccucuacgugaagggggagcccaucaucaacuucuacgacccgcugguguuccccagcgacgaguucgacgccuccaucagccaggucaacgagaagaucaaccagucccuggcguucauccggaaguccgacgagcuccugcacaacgugaacgccggcaaguccaccaccaacaucaugaucaccacgaucaucaucgugaucaucgucauccugcucagccugaucgccguggggcugcuccuguacugcaaggcccgcuccacccccgugacccugagcaaggaccagcuguccggcaucaacaacaucgccuucagcaacugaggacuagucccuguucccagagcccacuuuuuuuucuuuuuuugaaauaaaauagccugucuuucagaucuaaaaaaaaaaaaaaaaaaaaaaaaaaaaaaaaaaaaaaaaaaaaaaaaaaaaaaaaaaaaaaaaugcaucccccccccccccccccccccccccccccccaaaggcucuuuucagagccaccagaauu

SEQ ID NO: 6091 - RNA, 1981 nt, Artificial Sequence
  mRNA product Design a-3 comprising derived and/or modified sequence from HRSV(A2)__F_DSCav1_mut6 (opt2)
gggagagggcgcuuggcuugcaaggacccugagcugcggcauugaagcacacccaacccaacucgacugaagucagccucacugaaccggaucugagaaucuucucucucugggcuugccagggcucuccgaaccuagcuagcauccucuucaauuccaacuagaaagcuuaccauggagcuccucauccucaaggccaacgccaucaccaccauccucaccgccgucaccuucugcuucgccuccggccagaacaucaccgaggaguucuaccaguccaccugcuccgccgucuccaagggcuaccucggcgcccuccgcaccggcugguacaccuccgucaucaccaucgagcucuccaacaucaaggagaacaagugcaacggcaccgacgccaaggucaagcucaucaagcaggagcucgacaaguacaagaacgccgucaccgaccuccagaugcucaugugcuccacccccgccaccggcuccggcuccgccaucgccuccggcgucgccgucugcaagguccuccaccucgagggcgaggucaacaagaucaaguccgcccuccucuccaccaacaaggccgucgucucccucuccaacggcgucuccguccucaccuucaagguccucgaccucaagaacuacaucgacaagcagcuccuccccauccucaacaagcaguccugcuccauccccaaccccgagaccgucauggaguuccagcagaagaacaaccgccuccucgagaucacccgcgaguucuccgucaacgccggcgucaccacccccgucuccaccuacaugcucaccaacuccgagcuccucucccucaucaacgacaugcccaucaccaacgaccagaagaagcucauguccaacaacguccagaucguccgccagcaguccuacuccaucaugugcaucaucaaggaggagguccucgccuacgucguccagcucccccucuacggcgucaucgacacccccugcuggaagcuccacaccuccccccucugcaccaccaacaccaaggagggcuccaacaucugccucacccgcaccgaccgcggcugguacugcgacaacgccggcuccgucuccuucuucccccaggccgagaccugcaaggucugcuccaaccgcgucuucugcgacaccaugaacucccucacccuccccuccgaggucaaccucugcaacgucgacaucuucaaccccaaguacgacugcaagaucaugaccuccaagaccgacgucuccuccuccgucaucaccucccucggcgccaucgucuccugcuacggcaagaccaagugcaccgccuccaacaagaacaagggcaucaucaagaccuucuccaacggcugcgacuacgucuccaacaagggcgucgacaccgucuccgucggcaacacccucuacuacgucaacaagcaggagggccagucccucuacgucaagggcgagcccaucaucaacuucuacgacccccucgucuuccccuccgacgaguucgacgccuccaucucccaggucaacgagaagaucaaccagucccucgccuucauccgcaaguccgacgagcuccuccacaacgucaacgccggcaaguccaccaccaacaucaugaucaccaccaucaucaucgucaucaucgucauccuccucucccucaucgccgucggccuccuccucuacugcaaggcccgcuccacccccgucacccucuccaaggaccagcucuccggcaucaacaacaucgccuucuccaacugaggacuagucccuguucccagagcccacuuuuuuuucuuuuuuugaaauaaaauagccugucuuucagaucuaaaaaaaaaaaaaaaaaaaaaaaaaaaaaaaaaaaaaaaaaaaaaaaaaaaaaaaaaaaaaaaaugcaucccccccccccccccccccccccccccccccaaaggcucuuuucagagccaccagaauu

SEQ ID NO: 6092 - RNA, 1981 nt, Artificial Sequence
  mRNA product Design a-3 comprising derived and/or modified sequence from HRSV(A2)__F_DSCav1_mut6 (opt3)
gggagagggcgcuuggcuugcaaggacccugagcugcggcauugaagcacacccaacccaacucgacugaagucagccucacugaaccggaucugagaaucuucucucucugggcuugccagggcucuccgaaccuagcuagcauccucuucaauuccaacuagaaagcuuaccauggagcugcucauccuuaaggccaacgcuauuaccacaauacugacugcagugacguucugcuuugccagcggccagaauaucaccgaagaguucuaccaauccacauguucugcggucucaaaaggguauuugggagcuuuaagaacugguugguacaccaguguuauuacaaucgaacugagcaacauuaaggagaauaaaugcaacggcaccgacgccaaggugaaacuaaucaagcaggaacucgauaaguauaaaaaugcaguaacugaccugcagaugcuuauguguuccacacccgccaccgggucuggaucggcuauagcaucaggcguggccgucugcaaggugcugcacuuggagggugagguuaacaaaaucaagagcgcucuccugaguacgaauaaagccguggucucccugucuaacggggugagcguacucacuuuuaagguuuuagaucugaagaauuacauugacaaacagcuuuugccuauccugaacaagcaauccuguucaauuccaaauccggaaaccgugauggaguuccagcagaaaaacaauaggcuacucgaaaucacacgggaguuuagugucaacgcgggagugacuacccccgugagcacauauaugcugaccaauucugagcuucuguccuugauaaacgauaugccuauuacgaacgaccagaagaaacucaugucaaauaacguccaaaucguucgccagcagagcuacaguauuaugugcaucaucaaggaagaggugcuggcauauguagugcaguuaccacuguacggcgucauugauacucccuguuggaaacuccauacaucuccucuuugcaccacuaauacaaaggaaggcuccaacauaugucugacccgaacggaccgugggugguacugcgauaaugccggaagcgugucguucuuuccacaagcugagaccuguaagguuugcucuaacagaguguucugcgacacaaugaacuccuugacucuacccucagaagucaaucuguguaauguggauaucuuuaacccuaaauaugacugcaagauuaugaccaguaaaacagauguaagcuccucuguuaucacuagccucggugccauagugucauguuacggcaagaccaaaugcacagcaaguaauaagaacaaggggauuaucaaaaccuucuccaauggaugugacuaugucagcaacaagggcguggacacugucucuguggguaauacgcuguacuauguuaacaaacaggaggggcagucacuuuacgugaagggagagccaaucauuaacuuuuaugauccgcugguauuccccagugacgaauuugaugcuagcaucucccaagucaaugagaaaauuaaccagucuuuggccuucauaaggaagucggacgaacuccugcacaaugugaacgcgggcaagagcacaaccaauaucaugauuacuaccaucaucauuguuauaaucgugauuuuacugucccuaaucgccgucggccuccugcuuuacugcaaagcacggucaacaccugugaccuugaguaaggaucagcugucugggauuaacaauaucgcuuucagcaacugaggacuagucccuguucccagagcccacuuuuuuuucuuuuuuugaaauaaaauagccugucuuucagaucuaaaaaaaaaaaaaaaaaaaaaaaaaaaaaaaaaaaaaaaaaaaaaaaaaaaaaaaaaaaaaaaaugcaucccccccccccccccccccccccccccccccaaaggcucuuuucagagccaccagaauu

SEQ ID NO: 6093 - RNA, 1981 nt, Artificial Sequence
  mRNA product Design a-3 comprising derived and/or modified sequence from HRSV(A2)__F_DSCav1_mut6 (opt4)
gggagagggcgcuuggcuugcaaggacccugagcugcggcauugaagcacacccaacccaacucgacugaagucagccucacugaaccggaucugagaaucuucucucucugggcuugccagggcucuccgaaccuagcuagcauccucuucaauuccaacuagaaagcuuaccauggagcugcugauccugaaggccaacgccaucaccaccauccugaccgccgugaccuucugcuucgccagcggccagaacaucaccgaggaguucuaccagagcaccugcagcgccgugagcaagggcuaccugggcgcccugagaaccggcugguacaccagcgugaucaccaucgagcugagcaacaucaaggagaacaagugcaacggcaccgacgccaaggugaagcugaucaagcaggagcuggacaaguacaagaacgccgugaccgaccugcagaugcugaugugcagcacccccgccaccggcagcggcagcgccaucgccagcggcguggccgugugcaaggugcugcaccuggagggcgaggugaacaagaucaagagcgcccugcugagcaccaacaaggccguggugagccugagcaacggcgugagcgugcugaccuucaaggugcuggaccugaagaacuacaucgacaagcagcugcugcccauccugaacaagcagagcugcagcauccccaaccccgagaccgugauggaguuccagcagaagaacaacagacugcuggagaucaccagagaguucagcgugaacgccggcgugaccacccccgugagcaccuacaugcugaccaacagcgagcugcugagccugaucaacgacaugcccaucaccaacgaccagaagaagcugaugagcaacaacgugcagaucgugagacagcagagcuacagcaucaugugcaucaucaaggaggaggugcuggccuacguggugcagcugccccuguacggcgugaucgacacccccugcuggaagcugcacaccagcccccugugcaccaccaacaccaaggagggcagcaacaucugccugaccagaaccgacagaggcugguacugcgacaacgccggcagcgugagcuucuucccccaggccgagaccugcaaggugugcagcaacagaguguucugcgacaccaugaacagccugacccugcccagcgaggugaaccugugcaacguggacaucuucaaccccaaguacgacugcaagaucaugaccagcaagaccgacgugagcagcagcgugaucaccagccugggcgccaucgugagcugcuacggcaagaccaagugcaccgccagcaacaagaacaagggcaucaucaagaccuucagcaacggcugcgacuacgugagcaacaagggcguggacaccgugagcgugggcaacacccuguacuacgugaacaagcaggagggccagagccuguacgugaagggcgagcccaucaucaacuucuacgacccccugguguuccccagcgacgaguucgacgccagcaucagccaggugaacgagaagaucaaccagagccuggccuucaucagaaagagcgacgagcugcugcacaacgugaacgccggcaagagcaccaccaacaucaugaucaccaccaucaucaucgugaucaucgugauccugcugagccugaucgccgugggccugcugcuguacugcaaggccagaagcacccccgugacccugagcaaggaccagcugagcggcaucaacaacaucgccuucagcaacugaggacuagucccuguucccagagcccacuuuuuuuucuuuuuuugaaauaaaauagccugucuuucagaucuaaaaaaaaaaaaaaaaaaaaaaaaaaaaaaaaaaaaaaaaaaaaaaaaaaaaaaaaaaaaaaaaugcaucccccccccccccccccccccccccccccccaaaggcucuuuucagagccaccagaauu

SEQ ID NO: 6094 - RNA, 1981 nt, Artificial Sequence
  mRNA product Design a-3 comprising derived and/or modified sequence from HRSV(A2)__F_DSCav1_mut6 (opt5)
gggagagggcgcuuggcuugcaaggacccugagcugcggcauugaagcacacccaacccaacucgacugaagucagccucacugaaccggaucugagaaucuucucucucugggcuugccagggcucuccgaaccuagcuagcauccucuucaauuccaacuagaaagcuuaccauggagcugcucauccugaaggccaacgcuauuaccacaauccuuacggccgugaccuucugcuuugcgagcggccagaauauuacagaagaguucuaccaauccaccuguucugcugucagcaaaggguaucugggagcccucagaacaggcugguacaccuccguuaucacaauugaacugucuaacaucaaggagaauaaaugcaacgggaccgacgccaaggugaaacuuaucaagcaggaacuggauaaguauaaaaaugcugugacggaccuccagaugcugauguguagcacccccgccacaggauccggcucugcuauugccagcggggucgcggugugcaagguucugcaccucgagggagaggugaacaaaaucaaguccgcccugcuuagcaccaauaaagcugucgugucucuguccaacggcguuagcgugcucacauuuaagguccuggaucuuaagaauuacauugacaaacagcugcucccuauccugaacaagcaaucuuguuccauuccgaaucccgaaaccgugauggaguuccagcagaaaaacaaucggcugcucgaaaucacgcgcgaguuuagcgugaacgccggcgucacaaccccuguuucuacauauaugcugaccaauuccgagcuucugagccucauuaacgauaugcccaucaccaacgaccagaagaaacugauguccaauaacgugcaaaucgugagacagcagucuuacagcauuaugugcaucauuaaggaagagguccuugcuuaugugguucagcugccucucuacggggugaucgauacacccuguuggaaacugcauacguccccucugugcaccacaaauaccaaggaaggaagcaacauuugucucacacggaccgaccgcggcugguacugcgauaaugccgggucugucuccuucuuuccgcaagcggagacguguaaggugugcagcaacagaguuuucugcgacacaaugaacucucugacccuucccagcgaagugaaucuguguaaugucgauaucuuuaacccuaaauaugacugcaagaucaugaccuccaaaacagaugugucuagcuccgucauuaccagccucggagccaucgugucuuguuacggcaagacaaaaugcacggcuuccaauaagaacaaggggauuaucaaaaccuucagcaauggaugugacuauguuucuaacaagggcguggacacagucuccgugggcaauacccuguacuauguuaacaaacaggaggggcagagccuuuacgugaagggagagcccauuaucaacuuuuaugauccucuggucuuccccuccgacgaauuugaugccucuaucagccaagugaaugagaaaauuaaccagucccucgcuuucauccggaagucugacgaacugcugcacaaugugaacgccggcaagagcacaaccaauauuaugaucacgaccauuaucauuguuaucaucgucauucuccugucccuuaucgccguggggcugcuccuguacugcaaagcucgcagcacaccggugacccugucuaaggaucagcuuuccggaauuaacaauaucgcguucagcaacugaggacuagucccuguucccagagcccacuuuuuuuucuuuuuuugaaauaaaauagccugucuuucagaucuaaaaaaaaaaaaaaaaaaaaaaaaaaaaaaaaaaaaaaaaaaaaaaaaaaaaaaaaaaaaaaaaugcaucccccccccccccccccccccccccccccccaaaggcucuuuucagagccaccagaauu

SEQ ID NO: 6095 - RNA, 1981 nt, Artificial Sequence
  mRNA product Design a-3 comprising derived and/or modified sequence from HRSV(A2)__F_DSCav1_mut6 (opt6)
gggagagggcgcuuggcuugcaaggacccugagcugcggcauugaagcacacccaacccaacucgacugaagucagccucacugaaccggaucugagaaucuucucucucugggcuugccagggcucuccgaaccuagcuagcauccucuucaauuccaacuagaaagcuuaccauggaacuauuaaucuuaaaagcaaaugcuauaaccacaauauuaacagcaguaacauucuguuuugccuccggacaaaacauaacagaagaauuuuaucaaucaacaugcucugcaguauccaaagguuacuuaggcgcacuacgcacuggaugguauacaucaguaauaacaauagaacuaucaaacauaaaagaaaauaaauguaacgguacugacgcaaaagugaaacuaauuaaacaagaacucgacaaauacaaaaaugcuguaacagaccuacaaaugcuaaugugcucaacacccgcaaccggaucaggaucagccauagccuccggagucgcaguaugcaaaguauuacaucuugaaggagaaguaaauaaaauaaaaucagcauuacuauccacaaauaaagccguaguaucacuaucaaacgguguauccguccuuacauucaaaguauuagaucuaaaaaacuacauagauaaacaacuacuacccaucuuaaacaaacaaucaugcucaauucccaacccagaaacagucauggaauuucaacaaaaaaacaacagacucuuagaaauaacacgagaauuuucaguaaacgcaggaguaaccacaccaguaaguacauacaugcucaccaacucagaauuauuaucacuuauuaacgacaugccaauuacaaacgaccaaaaaaaauuaaugucaaacaauguccaaauuguuagacaacaaucauacucuauaauguguauaauaaaagaagaaguacuagcuuacguaguucaauuaccacuauauggcguaauagauacaccuugcuggaaacuacauacaucuccauuauguacaacuaacacaaaagaaggaucuaacauaugccuaacacgcacagaucgaggaugguacugcgauaaugcagguuccguaucauucuuuccacaagcagaaacauguaaaguaugcucaaacagaguauucugugacacuaugaacuccuuaacccuacccucagaagucaaucuaugcaacguugacauauuuaacccaaaauacgacuguaaaaucaugacaucuaaaacagacguaucaucaucaguuauuacaucccuaggagcaauaguaucuugcuacggaaaaacaaaauguacagcauccaacaaaaacaaaggaauaaucaaaacauucucaaacggcugcgacuacguaucaaacaaagguguagacacaguaucaguaggaaauacuuuauauuacguaaauaaacaagaaggacaaucucuauacguuaaaggcgaaccuauuauaaacuucuacgacccacucguauucccuucagacgaauuugacgcaucuauaucccaaguuaacgaaaaaaucaaccaaucauuagccuuuauaagaaaauccgacgaauuauuacauaacgucaacgcuggaaaaucaacaacuaacauaaugauaaccacaauaauaauagucaucauaguuauauuacuaagucuaauagccguaggccuccuacuuuauugcaaagcaagaucaacaccaguaacauuauccaaagaccaacucagcggcauaaacaauauagcuuuuucaaacuagggacuagucccuguucccagagcccacuuuuuuuucuuuuuuugaaauaaaauagccugucuuucagaucuaaaaaaaaaaaaaaaaaaaaaaaaaaaaaaaaaaaaaaaaaaaaaaaaaaaaaaaaaaaaaaaaugcaucccccccccccccccccccccccccccccccaaaggcucuuuucagagccaccagaauu

SEQ ID NO: 6096 - RNA, 1981 nt, Artificial Sequence
  mRNA product Design a-3 comprising derived and/or modified sequence from HRSV(A2)__F_DSCav1_mut6 (opt11)
gggagagggcgcuuggcuugcaaggacccugagcugcggcauugaagcacacccaacccaacucgacugaagucagccucacugaaccggaucugagaaucuucucucucugggcuugccagggcucuccgaaccuagcuagcauccucuucaauuccaacuagaaagcuuaccauggaacuccucauccucaaagccaacgcaaucacaaccauacuaacugcaguuacuuucugcuucgcauccggccaaaacaucaccgaagaguucuaccaaucaaccugcuccgcagucuccaaaggauaccucggagcccuucgcaccggcugguacaccuccgucauaaccaucgaacucucaaacauaaaagaaaacaaaugcaacggcacagacgcgaaagucaaacuuaucaaacaagaacucgacaaauacaaaaacgccgucaccgaccugcagaugcucaugugcucaacccccgccacaggaagcggcucugcuaucgcuuccggcgucgccgucugcaaaguccuccaccucgaaggcgaaguaaacaaaaucaagucagcccuccucuccaccaacaaagccgucgucucucucucaaacggcguauccguccucacauucaaaguccucgaccucaaaaacuacaucgacaaacaacuucuccccauccuaaacaaacaaucaugcuccauccccaaccccgaaacagucauggaauuucaacaaaagaacaaccgccucuuagaaaucacccgagaauuuuccgucaacgcgggagucacaacccccguuucuacguauaugcucaccaacuccgaacuccuuucccucauaaacgacaugccaaucaccaacgaccaaaagaaacucaugucaaacaacguccaaaucguccgacaacaauccuacucuauuaugugcaucaucaaagaagaaguucucgccuacgucguccaacuaccccucuacggcgugaucgacacccccugcuggaaacuacacaccucaccccucugcaccaccaacaccaaggaaggcuccaacaucugccucacccgcaccgaccgcggcugguacugcgacaacgcuggcuccgucucauucuucccgcaagccgaaacuugcaaaguaugcuccaacagaguauucugcgacaccaugaacucacuaacccucccuuccgaagucaaccuuugcaacguugacauauucaacccaaaguacgauugcaaaauuaugacauccaaaacagaugucuccuccuccgucaucacaucccucggugccauuguaucaugcuacggaaaaaccaaaugcaccgcauccaacaaaaacaaaggaaucaucaaaaccuucucaaacggcugcgauuacgucucaaacaaaggagucgacacagucuccgucggaaacacccuauacuacgucaacaaacaagaaggccaaucccuguacgucaaaggagaacccaucaucaacuucuacgacccccucgucuucccgagcgacgaguucgacgccuccaucucacaagucaaugaaaagaucaaccaaucccuugccuucauccggaaaucggacgaacuccuacacaacgugaacgcuggaaaaucaaccaccaacaucaugaucacaaccaucauuaucgucaucaucgucauacuccucucccuaaucgccgucggccuccuccuguauugcaaagcucgcuccacccccgucacccuguccaaagaccaacucuccggaaucaacaacaucgccuucucaaacuaaggacuagucccuguucccagagcccacuuuuuuuucuuuuuuugaaauaaaauagccugucuuucagaucuaaaaaaaaaaaaaaaaaaaaaaaaaaaaaaaaaaaaaaaaaaaaaaaaaaaaaaaaaaaaaaaaugcaucccccccccccccccccccccccccccccccaaaggcucuuuucagagccaccagaauu

SEQ ID NO: 6097 - RNA, 1930 nt, Artificial Sequence
  mRNA product Design a-4 comprising derived and/or modified sequence from HRSV(A2)__F_DSCav1_mut6 (opt1)
gggagacuccugucgggcggaaguaggaggaguagaguuuaaaaacaguacucuuuuuccgguucgggacguaguugaagcaacgacaagccggauaaccgcucuugagacaggaagcuuaccauggagcugcucauccugaaggccaacgccaucaccaccauccugacggcggugaccuucugcuucgccagcggccagaacaucaccgaggaguucuaccaguccacgugcagcgccgucuccaagggguaccucggcgcccugcggaccggcugguacaccuccgugaucaccaucgagcugagcaacaucaaggagaacaagugcaacgggaccgacgccaaggugaagcucaucaagcaggagcuggacaaguacaagaacgcggucacggaccugcagaugcugaugugcuccaccccggcaaccggcuccggcuccgccaucgcgagcggcgucgccgugugcaaggugcugcaccucgagggggaggucaacaagaucaagagcgcccugcuguccaccaacaaggccguggugagccucuccaacggcgucagcgugcugaccuucaaggugcuggaccucaagaacuacaucgacaagcagcugcugcccauccugaacaagcagagcugcuccauccccaaccccgagacggugauggaguuccagcagaagaacaaccggcuccuggagaucacccgcgaguucagcgugaacgccggggucaccacccccguguccacguacaugcugaccaacagcgagcuccugucccugaucaacgacaugccgaucaccaacgaccagaagaagcucaugagcaacaacgugcagaucguccggcagcaguccuacagcaucaugugcaucaucaaggaggaggugcuggcguacgugguccagcugccccucuacggcgugaucgacacccccugcuggaagcugcacacgagcccccugugcaccaccaacaccaaggagggguccaacaucugccucacgcgcaccgaccggggcugguacugcgacaacgccggcagcgucuccuucuucccgcaggccgagaccugcaaggugugcagcaaccgcguguucugcgacaccaugaacucccugacgcugcccagcgagguaaaccucugcaacgucgacaucuucaaccccaaguacgacugcaagaucaugaccuccaagaccgacgugagcuccagcgugaucaccucccugggggccaucgucagcugcuacggcaagacgaagugcaccgccagcaacaagaacaaggggaucaucaagaccuucuccaacggcugcgacuacgugagcaacaagggcguggacaccguguccgucgggaacacccuguacuacgugaacaagcaggagggccagagccucuacgugaagggggagcccaucaucaacuucuacgacccgcuggucuuccccuccgacgaguucgacgcgagcaucucccaggugaacgagaagaucaaccagagccuggccuucauccgcaaguccgacgagcugcuccacaacgugaacgccggcaagagcacgaccaacaucaugaucaccaccaucaucaucgucaucaucgugauccugcugucccucaucgccguggggcugcugcucuacugcaaggcccggagcacgcccgucacccuguccaaggaccagcugagcggcaucaacaacaucgcguucuccaacugaggacuagucccuguucccagagcccacuuuuuuuucuuuuuuugaaauaaaauagccugucuuucagaucuaaaaaaaaaaaaaaaaaaaaaaaaaaaaaaaaaaaaaaaaaaaaaaaaaaaaaaaaaaaaaaaaugcaucccccccccccccccccccccccccccccccaaaggcucuuuucagagccaccagaauu

SEQ ID NO: 6098 - RNA, 1930 nt, Artificial Sequence
  mRNA product Design a-4 comprising derived and/or modified sequence from HRSV(A2)__F_DSCav1_mut6 (opt1)
gggagacuccugucgggcggaaguaggaggaguagaguuuaaaaacaguacucuuuuuccgguucgggacguaguugaagcaacgacaagccggauaaccgcucuugagacaggaagcuuaccauggagcugcucauccugaaggccaacgccaucaccaccauccugacggcggugaccuucugcuucgccagcggccagaacaucaccgaggaguucuaccaguccacgugcagcgccgucuccaagggguaccucggcgcccugcgcaccgggugguacaccagcgugaucaccaucgagcuguccaacaucaaggagaacaagugcaacggcaccgacgccaaggugaagcucaucaagcaggagcuggacaaguacaagaacgcggucacggaccugcagaugcucaugugcagcacccccgccaccggguccggcagcgccaucgccuccggcguggcggugugcaagguccugcaccuggagggggaggugaacaagaucaagagcgcccuccuguccaccaacaaggccguggucagccuguccaacggcgugagcgugcucacguucaagguccuggaccugaagaacuacaucgacaagcagcuccugccgauccugaacaagcaguccugcagcauccccaaccccgagaccgugauggaguuccagcagaagaacaaccggcuccuggagaucacccgcgaguucuccgugaacgccggggucaccacgcccgugagcaccuacaugcugaccaacuccgagcuccugagccugaucaacgacaugccgaucaccaacgaccagaagaagcucaugagcaacaacgugcagaucguccggcagcaguccuacagcaucaugugcaucaucaaggaggaggugcuggccuacgugguccagcugccccucuacggcgugaucgacacgcccugcuggaagcugcacaccagcccccugugcaccaccaacacgaaggaggggagcaacaucugccucacccgcaccgaccggggcugguacugcgacaacgcgggcuccgugagcuucuucccgcaggccgagaccugcaaggucugcuccaaccgcguguucugcgacacgaugaacagccugacccugcccuccgaggucaaccucugcaacguggacaucuucaaccccaaguacgacugcaagaucaugaccagcaagaccgacguguccagcuccgucaucacgagccugggggccaucguguccugcuacggcaagaccaagugcaccgccagcaacaagaacaaggggaucaucaagaccuucuccaacggcugcgacuacgugagcaacaagggcgucgacacgguguccguggggaacacccuguacuacgucaacaagcaggagggccagagccucuacgugaagggggagcccaucaucaacuucuacgacccgcugguguuccccagcgacgaguucgacgccuccaucagccaggucaacgagaagaucaaccagucccuggcguucauccggaaguccgacgagcuccugcacaacgugaacgccggcaaguccaccaccaacaucaugaucaccacgaucaucaucgugaucaucgucauccugcucagccugaucgccguggggcugcuccuguacugcaaggcccgcuccacccccgugacccugagcaaggaccagcuguccggcaucaacaacaucgccuucagcaacugaggacuagucccuguucccagagcccacuuuuuuuucuuuuuuugaaauaaaauagccugucuuucagaucuaaaaaaaaaaaaaaaaaaaaaaaaaaaaaaaaaaaaaaaaaaaaaaaaaaaaaaaaaaaaaaaaugcaucccccccccccccccccccccccccccccccaaaggcucuuuucagagccaccagaauu

SEQ ID NO: 6099 - RNA, 1930 nt, Artificial Sequence
  mRNA product Design a-4 comprising derived and/or modified sequence from HRSV(A2)__F_DSCav1_mut6 (opt2)
gggagacuccugucgggcggaaguaggaggaguagaguuuaaaaacaguacucuuuuuccgguucgggacguaguugaagcaacgacaagccggauaaccgcucuugagacaggaagcuuaccauggagcuccucauccucaaggccaacgccaucaccaccauccucaccgccgucaccuucugcuucgccuccggccagaacaucaccgaggaguucuaccaguccaccugcuccgccgucuccaagggcuaccucggcgcccuccgcaccggcugguacaccuccgucaucaccaucgagcucuccaacaucaaggagaacaagugcaacggcaccgacgccaaggucaagcucaucaagcaggagcucgacaaguacaagaacgccgucaccgaccuccagaugcucaugugcuccacccccgccaccggcuccggcuccgccaucgccuccggcgucgccgucugcaagguccuccaccucgagggcgaggucaacaagaucaaguccgcccuccucuccaccaacaaggccgucgucucccucuccaacggcgucuccguccucaccuucaagguccucgaccucaagaacuacaucgacaagcagcuccuccccauccucaacaagcaguccugcuccauccccaaccccgagaccgucauggaguuccagcagaagaacaaccgccuccucgagaucacccgcgaguucuccgucaacgccggcgucaccacccccgucuccaccuacaugcucaccaacuccgagcuccucucccucaucaacgacaugcccaucaccaacgaccagaagaagcucauguccaacaacguccagaucguccgccagcaguccuacuccaucaugugcaucaucaaggaggagguccucgccuacgucguccagcucccccucuacggcgucaucgacacccccugcuggaagcuccacaccuccccccucugcaccaccaacaccaaggagggcuccaacaucugccucacccgcaccgaccgcggcugguacugcgacaacgccggcuccgucuccuucuucccccaggccgagaccugcaaggucugcuccaaccgcgucuucugcgacaccaugaacucccucacccuccccuccgaggucaaccucugcaacgucgacaucuucaaccccaaguacgacugcaagaucaugaccuccaagaccgacgucuccuccuccgucaucaccucccucggcgccaucgucuccugcuacggcaagaccaagugcaccgccuccaacaagaacaagggcaucaucaagaccuucuccaacggcugcgacuacgucuccaacaagggcgucgacaccgucuccgucggcaacacccucuacuacgucaacaagcaggagggccagucccucuacgucaagggcgagcccaucaucaacuucuacgacccccucgucuuccccuccgacgaguucgacgccuccaucucccaggucaacgagaagaucaaccagucccucgccuucauccgcaaguccgacgagcuccuccacaacgucaacgccggcaaguccaccaccaacaucaugaucaccaccaucaucaucgucaucaucgucauccuccucucccucaucgccgucggccuccuccucuacugcaaggcccgcuccacccccgucacccucuccaaggaccagcucuccggcaucaacaacaucgccuucuccaacugaggacuagucccuguucccagagcccacuuuuuuuucuuuuuuugaaauaaaauagccugucuuucagaucuaaaaaaaaaaaaaaaaaaaaaaaaaaaaaaaaaaaaaaaaaaaaaaaaaaaaaaaaaaaaaaaaugcaucccccccccccccccccccccccccccccccaaaggcucuuuucagagccaccagaauu

SEQ ID NO: 6100 - RNA, 1930 nt, Artificial Sequence
  mRNA product Design a-4 comprising derived and/or modified sequence from HRSV(A2)__F_DSCav1_mut6 (opt3)
gggagacuccugucgggcggaaguaggaggaguagaguuuaaaaacaguacucuuuuuccgguucgggacguaguugaagcaacgacaagccggauaaccgcucuugagacaggaagcuuaccauggagcugcucauccuuaaggccaacgcuauuaccacaauacugacugcagugacguucugcuuugccagcggccagaauaucaccgaagaguucuaccaauccacauguucugcggucucaaaaggguauuugggagcuuuaagaacugguugguacaccaguguuauuacaaucgaacugagcaacauuaaggagaauaaaugcaacggcaccgacgccaaggugaaacuaaucaagcaggaacucgauaaguauaaaaaugcaguaacugaccugcagaugcuuauguguuccacacccgccaccgggucuggaucggcuauagcaucaggcguggccgucugcaaggugcugcacuuggagggugagguuaacaaaaucaagagcgcucuccugaguacgaauaaagccguggucucccugucuaacggggugagcguacucacuuuuaagguuuuagaucugaagaauuacauugacaaacagcuuuugccuauccugaacaagcaauccuguucaauuccaaauccggaaaccgugauggaguuccagcagaaaaacaauaggcuacucgaaaucacacgggaguuuagugucaacgcgggagugacuacccccgugagcacauauaugcugaccaauucugagcuucuguccuugauaaacgauaugccuauuacgaacgaccagaagaaacucaugucaaauaacguccaaaucguucgccagcagagcuacaguauuaugugcaucaucaaggaagaggugcuggcauauguagugcaguuaccacuguacggcgucauugauacucccuguuggaaacuccauacaucuccucuuugcaccacuaauacaaaggaaggcuccaacauaugucugacccgaacggaccgugggugguacugcgauaaugccggaagcgugucguucuuuccacaagcugagaccuguaagguuugcucuaacagaguguucugcgacacaaugaacuccuugacucuacccucagaagucaaucuguguaauguggauaucuuuaacccuaaauaugacugcaagauuaugaccaguaaaacagauguaagcuccucuguuaucacuagccucggugccauagugucauguuacggcaagaccaaaugcacagcaaguaauaagaacaaggggauuaucaaaaccuucuccaauggaugugacuaugucagcaacaagggcguggacacugucucuguggguaauacgcuguacuauguuaacaaacaggaggggcagucacuuuacgugaagggagagccaaucauuaacuuuuaugauccgcugguauuccccagugacgaauuugaugcuagcaucucccaagucaaugagaaaauuaaccagucuuuggccuucauaaggaagucggacgaacuccugcacaaugugaacgcgggcaagagcacaaccaauaucaugauuacuaccaucaucauuguuauaaucgugauuuuacugucccuaaucgccgucggccuccugcuuuacugcaaagcacggucaacaccugugaccuugaguaaggaucagcugucugggauuaacaauaucgcuuucagcaacugaggacuagucccuguucccagagcccacuuuuuuuucuuuuuuugaaauaaaauagccugucuuucagaucuaaaaaaaaaaaaaaaaaaaaaaaaaaaaaaaaaaaaaaaaaaaaaaaaaaaaaaaaaaaaaaaaugcaucccccccccccccccccccccccccccccccaaaggcucuuuucagagccaccagaauu

SEQ ID NO: 6101 - RNA, 1930 nt, Artificial Sequence
  mRNA product Design a-4 comprising derived and/or modified sequence from HRSV(A2)__F_DSCav1_mut6 (opt4)
gggagacuccugucgggcggaaguaggaggaguagaguuuaaaaacaguacucuuuuuccgguucgggacguaguugaagcaacgacaagccggauaaccgcucuugagacaggaagcuuaccauggagcugcugauccugaaggccaacgccaucaccaccauccugaccgccgugaccuucugcuucgccagcggccagaacaucaccgaggaguucuaccagagcaccugcagcgccgugagcaagggcuaccugggcgcccugagaaccggcugguacaccagcgugaucaccaucgagcugagcaacaucaaggagaacaagugcaacggcaccgacgccaaggugaagcugaucaagcaggagcuggacaaguacaagaacgccgugaccgaccugcagaugcugaugugcagcacccccgccaccggcagcggcagcgccaucgccagcggcguggccgugugcaaggugcugcaccuggagggcgaggugaacaagaucaagagcgcccugcugagcaccaacaaggccguggugagccugagcaacggcgugagcgugcugaccuucaaggugcuggaccugaagaacuacaucgacaagcagcugcugcccauccugaacaagcagagcugcagcauccccaaccccgagaccgugauggaguuccagcagaagaacaacagacugcuggagaucaccagagaguucagcgugaacgccggcgugaccacccccgugagcaccuacaugcugaccaacagcgagcugcugagccugaucaacgacaugcccaucaccaacgaccagaagaagcugaugagcaacaacgugcagaucgugagacagcagagcuacagcaucaugugcaucaucaaggaggaggugcuggccuacguggugcagcugccccuguacggcgugaucgacacccccugcuggaagcugcacaccagcccccugugcaccaccaacaccaaggagggcagcaacaucugccugaccagaaccgacagaggcugguacugcgacaacgccggcagcgugagcuucuucccccaggccgagaccugcaaggugugcagcaacagaguguucugcgacaccaugaacagccugacccugcccagcgaggugaaccugugcaacguggacaucuucaaccccaaguacgacugcaagaucaugaccagcaagaccgacgugagcagcagcgugaucaccagccugggcgccaucgugagcugcuacggcaagaccaagugcaccgccagcaacaagaacaagggcaucaucaagaccuucagcaacggcugcgacuacgugagcaacaagggcguggacaccgugagcgugggcaacacccuguacuacgugaacaagcaggagggccagagccuguacgugaagggcgagcccaucaucaacuucuacgacccccugguguuccccagcgacgaguucgacgccagcaucagccaggugaacgagaagaucaaccagagccuggccuucaucagaaagagcgacgagcugcugcacaacgugaacgccggcaagagcaccaccaacaucaugaucaccaccaucaucaucgugaucaucgugauccugcugagccugaucgccgugggccugcugcuguacugcaaggccagaagcacccccgugacccugagcaaggaccagcugagcggcaucaacaacaucgccuucagcaacugaggacuagucccuguucccagagcccacuuuuuuuucuuuuuuugaaauaaaauagccugucuuucagaucuaaaaaaaaaaaaaaaaaaaaaaaaaaaaaaaaaaaaaaaaaaaaaaaaaaaaaaaaaaaaaaaaugcaucccccccccccccccccccccccccccccccaaaggcucuuuucagagccaccagaauu

SEQ ID NO: 6102 - RNA, 1930 nt, Artificial Sequence
  mRNA product Design a-4 comprising derived and/or modified sequence from HRSV(A2)__F_DSCav1_mut6 (opt5)
gggagacuccugucgggcggaaguaggaggaguagaguuuaaaaacaguacucuuuuuccgguucgggacguaguugaagcaacgacaagccggauaaccgcucuugagacaggaagcuuaccauggagcugcucauccugaaggccaacgcuauuaccacaauccuuacggccgugaccuucugcuuugcgagcggccagaauauuacagaagaguucuaccaauccaccuguucugcugucagcaaaggguaucugggagcccucagaacaggcugguacaccuccguuaucacaauugaacugucuaacaucaaggagaauaaaugcaacgggaccgacgccaaggugaaacuuaucaagcaggaacuggauaaguauaaaaaugcugugacggaccuccagaugcugauguguagcacccccgccacaggauccggcucugcuauugccagcggggucgcggugugcaagguucugcaccucgagggagaggugaacaaaaucaaguccgcccugcuuagcaccaauaaagcugucgugucucuguccaacggcguuagcgugcucacauuuaagguccuggaucuuaagaauuacauugacaaacagcugcucccuauccugaacaagcaaucuuguuccauuccgaaucccgaaaccgugauggaguuccagcagaaaaacaaucggcugcucgaaaucacgcgcgaguuuagcgugaacgccggcgucacaaccccuguuucuacauauaugcugaccaauuccgagcuucugagccucauuaacgauaugcccaucaccaacgaccagaagaaacugauguccaauaacgugcaaaucgugagacagcagucuuacagcauuaugugcaucauuaaggaagagguccuugcuuaugugguucagcugccucucuacggggugaucgauacacccuguuggaaacugcauacguccccucugugcaccacaaauaccaaggaaggaagcaacauuugucucacacggaccgaccgcggcugguacugcgauaaugccgggucugucuccuucuuuccgcaagcggagacguguaaggugugcagcaacagaguuuucugcgacacaaugaacucucugacccuucccagcgaagugaaucuguguaaugucgauaucuuuaacccuaaauaugacugcaagaucaugaccuccaaaacagaugugucuagcuccgucauuaccagccucggagccaucgugucuuguuacggcaagacaaaaugcacggcuuccaauaagaacaaggggauuaucaaaaccuucagcaauggaugugacuauguuucuaacaagggcguggacacagucuccgugggcaauacccuguacuauguuaacaaacaggaggggcagagccuuuacgugaagggagagcccauuaucaacuuuuaugauccucuggucuuccccuccgacgaauuugaugccucuaucagccaagugaaugagaaaauuaaccagucccucgcuuucauccggaagucugacgaacugcugcacaaugugaacgccggcaagagcacaaccaauauuaugaucacgaccauuaucauuguuaucaucgucauucuccugucccuuaucgccguggggcugcuccuguacugcaaagcucgcagcacaccggugacccugucuaaggaucagcuuuccggaauuaacaauaucgcguucagcaacugaggacuagucccuguucccagagcccacuuuuuuuucuuuuuuugaaauaaaauagccugucuuucagaucuaaaaaaaaaaaaaaaaaaaaaaaaaaaaaaaaaaaaaaaaaaaaaaaaaaaaaaaaaaaaaaaaugcaucccccccccccccccccccccccccccccccaaaggcucuuuucagagccaccagaauu

SEQ ID NO: 6103 - RNA, 1930 nt, Artificial Sequence
  mRNA product Design a-4 comprising derived and/or modified sequence from HRSV(A2)__F_DSCav1_mut6 (opt6)
gggagacuccugucgggcggaaguaggaggaguagaguuuaaaaacaguacucuuuuuccgguucgggacguaguugaagcaacgacaagccggauaaccgcucuugagacaggaagcuuaccauggaacuauuaaucuuaaaagcaaaugcuauaaccacaauauuaacagcaguaacauucuguuuugccuccggacaaaacauaacagaagaauuuuaucaaucaacaugcucugcaguauccaaagguuacuuaggcgcacuacgcacuggaugguauacaucaguaauaacaauagaacuaucaaacauaaaagaaaauaaauguaacgguacugacgcaaaagugaaacuaauuaaacaagaacucgacaaauacaaaaaugcuguaacagaccuacaaaugcuaaugugcucaacacccgcaaccggaucaggaucagccauagccuccggagucgcaguaugcaaaguauuacaucuugaaggagaaguaaauaaaauaaaaucagcauuacuauccacaaauaaagccguaguaucacuaucaaacgguguauccguccuuacauucaaaguauuagaucuaaaaaacuacauagauaaacaacuacuacccaucuuaaacaaacaaucaugcucaauucccaacccagaaacagucauggaauuucaacaaaaaaacaacagacucuuagaaauaacacgagaauuuucaguaaacgcaggaguaaccacaccaguaaguacauacaugcucaccaacucagaauuauuaucacuuauuaacgacaugccaauuacaaacgaccaaaaaaaauuaaugucaaacaauguccaaauuguuagacaacaaucauacucuauaauguguauaauaaaagaagaaguacuagcuuacguaguucaauuaccacuauauggcguaauagauacaccuugcuggaaacuacauacaucuccauuauguacaacuaacacaaaagaaggaucuaacauaugccuaacacgcacagaucgaggaugguacugcgauaaugcagguuccguaucauucuuuccacaagcagaaacauguaaaguaugcucaaacagaguauucugugacacuaugaacuccuuaacccuacccucagaagucaaucuaugcaacguugacauauuuaacccaaaauacgacuguaaaaucaugacaucuaaaacagacguaucaucaucaguuauuacaucccuaggagcaauaguaucuugcuacggaaaaacaaaauguacagcauccaacaaaaacaaaggaauaaucaaaacauucucaaacggcugcgacuacguaucaaacaaagguguagacacaguaucaguaggaaauacuuuauauuacguaaauaaacaagaaggacaaucucuauacguuaaaggcgaaccuauuauaaacuucuacgacccacucguauucccuucagacgaauuugacgcaucuauaucccaaguuaacgaaaaaaucaaccaaucauuagccuuuauaagaaaauccgacgaauuauuacauaacgucaacgcuggaaaaucaacaacuaacauaaugauaaccacaauaauaauagucaucauaguuauauuacuaagucuaauagccguaggccuccuacuuuauugcaaagcaagaucaacaccaguaacauuauccaaagaccaacucagcggcauaaacaauauagcuuuuucaaacuagggacuagucccuguucccagagcccacuuuuuuuucuuuuuuugaaauaaaauagccugucuuucagaucuaaaaaaaaaaaaaaaaaaaaaaaaaaaaaaaaaaaaaaaaaaaaaaaaaaaaaaaaaaaaaaaaugcaucccccccccccccccccccccccccccccccaaaggcucuuuucagagccaccagaauu

SEQ ID NO: 6104 - RNA, 1930 nt, Artificial Sequence
  mRNA product Design a-4 comprising derived and/or modified sequence from HRSV(A2)__F_DSCav1_mut6 (opt11)
gggagacuccugucgggcggaaguaggaggaguagaguuuaaaaacaguacucuuuuuccgguucgggacguaguugaagcaacgacaagccggauaaccgcucuugagacaggaagcuuaccauggaacuccucauccucaaagccaacgcaaucacaaccauacuaacugcaguuacuuucugcuucgcauccggccaaaacaucaccgaagaguucuaccaaucaaccugcuccgcagucuccaaaggauaccucggagcccuucgcaccggcugguacaccuccgucauaaccaucgaacucucaaacauaaaagaaaacaaaugcaacggcacagacgcgaaagucaaacuuaucaaacaagaacucgacaaauacaaaaacgccgucaccgaccugcagaugcucaugugcucaacccccgccacaggaagcggcucugcuaucgcuuccggcgucgccgucugcaaaguccuccaccucgaaggcgaaguaaacaaaaucaagucagcccuccucuccaccaacaaagccgucgucucucucucaaacggcguauccguccucacauucaaaguccucgaccucaaaaacuacaucgacaaacaacuucuccccauccuaaacaaacaaucaugcuccauccccaaccccgaaacagucauggaauuucaacaaaagaacaaccgccucuuagaaaucacccgagaauuuuccgucaacgcgggagucacaacccccguuucuacguauaugcucaccaacuccgaacuccuuucccucauaaacgacaugccaaucaccaacgaccaaaagaaacucaugucaaacaacguccaaaucguccgacaacaauccuacucuauuaugugcaucaucaaagaagaaguucucgccuacgucguccaacuaccccucuacggcgugaucgacacccccugcuggaaacuacacaccucaccccucugcaccaccaacaccaaggaaggcuccaacaucugccucacccgcaccgaccgcggcugguacugcgacaacgcuggcuccgucucauucuucccgcaagccgaaacuugcaaaguaugcuccaacagaguauucugcgacaccaugaacucacuaacccucccuuccgaagucaaccuuugcaacguugacauauucaacccaaaguacgauugcaaaauuaugacauccaaaacagaugucuccuccuccgucaucacaucccucggugccauuguaucaugcuacggaaaaaccaaaugcaccgcauccaacaaaaacaaaggaaucaucaaaaccuucucaaacggcugcgauuacgucucaaacaaaggagucgacacagucuccgucggaaacacccuauacuacgucaacaaacaagaaggccaaucccuguacgucaaaggagaacccaucaucaacuucuacgacccccucgucuucccgagcgacgaguucgacgccuccaucucacaagucaaugaaaagaucaaccaaucccuugccuucauccggaaaucggacgaacuccuacacaacgugaacgcuggaaaaucaaccaccaacaucaugaucacaaccaucauuaucgucaucaucgucauacuccucucccuaaucgccgucggccuccuccuguauugcaaagcucgcuccacccccgucacccuguccaaagaccaacucuccggaaucaacaacaucgccuucucaaacuaaggacuagucccuguucccagagcccacuuuuuuuucuuuuuuugaaauaaaauagccugucuuucagaucuaaaaaaaaaaaaaaaaaaaaaaaaaaaaaaaaaaaaaaaaaaaaaaaaaaaaaaaaaaaaaaaaugcaucccccccccccccccccccccccccccccccaaaggcucuuuucagagccaccagaauu

SEQ ID NO: 6105 - RNA, 1876 nt, Artificial Sequence
  mRNA product Design a-5 comprising derived and/or modified sequence from HRSV(A2)__F_DSCav1_mut6 (opt1)
gggagacuuucccauucuguagcagaauuugguguugccuguggucuuggucccgcggagaagcuuaccauggagcugcucauccugaaggccaacgccaucaccaccauccugacggcggugaccuucugcuucgccagcggccagaacaucaccgaggaguucuaccaguccacgugcagcgccgucuccaagggguaccucggcgcccugcggaccggcugguacaccuccgugaucaccaucgagcugagcaacaucaaggagaacaagugcaacgggaccgacgccaaggugaagcucaucaagcaggagcuggacaaguacaagaacgcggucacggaccugcagaugcugaugugcuccaccccggcaaccggcuccggcuccgccaucgcgagcggcgucgccgugugcaaggugcugcaccucgagggggaggucaacaagaucaagagcgcccugcuguccaccaacaaggccguggugagccucuccaacggcgucagcgugcugaccuucaaggugcuggaccucaagaacuacaucgacaagcagcugcugcccauccugaacaagcagagcugcuccauccccaaccccgagacggugauggaguuccagcagaagaacaaccggcuccuggagaucacccgcgaguucagcgugaacgccggggucaccacccccguguccacguacaugcugaccaacagcgagcuccugucccugaucaacgacaugccgaucaccaacgaccagaagaagcucaugagcaacaacgugcagaucguccggcagcaguccuacagcaucaugugcaucaucaaggaggaggugcuggcguacgugguccagcugccccucuacggcgugaucgacacccccugcuggaagcugcacacgagcccccugugcaccaccaacaccaaggagggguccaacaucugccucacgcgcaccgaccggggcugguacugcgacaacgccggcagcgucuccuucuucccgcaggccgagaccugcaaggugugcagcaaccgcguguucugcgacaccaugaacucccugacgcugcccagcgagguaaaccucugcaacgucgacaucuucaaccccaaguacgacugcaagaucaugaccuccaagaccgacgugagcuccagcgugaucaccucccugggggccaucgucagcugcuacggcaagacgaagugcaccgccagcaacaagaacaaggggaucaucaagaccuucuccaacggcugcgacuacgugagcaacaagggcguggacaccguguccgucgggaacacccuguacuacgugaacaagcaggagggccagagccucuacgugaagggggagcccaucaucaacuucuacgacccgcuggucuuccccuccgacgaguucgacgcgagcaucucccaggugaacgagaagaucaaccagagccuggccuucauccgcaaguccgacgagcugcuccacaacgugaacgccggcaagagcacgaccaacaucaugaucaccaccaucaucaucgucaucaucgugauccugcugucccucaucgccguggggcugcugcucuacugcaaggcccggagcacgcccgucacccuguccaaggaccagcugagcggcaucaacaacaucgcguucuccaacugaggacuagucccuguucccagagcccacuuuuuuuucuuuuuuugaaauaaaauagccugucuuucagaucuaaaaaaaaaaaaaaaaaaaaaaaaaaaaaaaaaaaaaaaaaaaaaaaaaaaaaaaaaaaaaaaaugcaucccccccccccccccccccccccccccccccaaaggcucuuuucagagccaccagaauu

SEQ ID NO: 6106 - RNA, 1876 nt, Artificial Sequence
  mRNA product Design a-5 comprising derived and/or modified sequence from HRSV(A2)__F_DSCav1_mut6 (opt1)
gggagacuuucccauucuguagcagaauuugguguugccuguggucuuggucccgcggagaagcuuaccauggagcugcucauccugaaggccaacgccaucaccaccauccugacggcggugaccuucugcuucgccagcggccagaacaucaccgaggaguucuaccaguccacgugcagcgccgucuccaagggguaccucggcgcccugcgcaccgggugguacaccagcgugaucaccaucgagcuguccaacaucaaggagaacaagugcaacggcaccgacgccaaggugaagcucaucaagcaggagcuggacaaguacaagaacgcggucacggaccugcagaugcucaugugcagcacccccgccaccggguccggcagcgccaucgccuccggcguggcggugugcaagguccugcaccuggagggggaggugaacaagaucaagagcgcccuccuguccaccaacaaggccguggucagccuguccaacggcgugagcgugcucacguucaagguccuggaccugaagaacuacaucgacaagcagcuccugccgauccugaacaagcaguccugcagcauccccaaccccgagaccgugauggaguuccagcagaagaacaaccggcuccuggagaucacccgcgaguucuccgugaacgccggggucaccacgcccgugagcaccuacaugcugaccaacuccgagcuccugagccugaucaacgacaugccgaucaccaacgaccagaagaagcucaugagcaacaacgugcagaucguccggcagcaguccuacagcaucaugugcaucaucaaggaggaggugcuggccuacgugguccagcugccccucuacggcgugaucgacacgcccugcuggaagcugcacaccagcccccugugcaccaccaacacgaaggaggggagcaacaucugccucacccgcaccgaccggggcugguacugcgacaacgcgggcuccgugagcuucuucccgcaggccgagaccugcaaggucugcuccaaccgcguguucugcgacacgaugaacagccugacccugcccuccgaggucaaccucugcaacguggacaucuucaaccccaaguacgacugcaagaucaugaccagcaagaccgacguguccagcuccgucaucacgagccugggggccaucguguccugcuacggcaagaccaagugcaccgccagcaacaagaacaaggggaucaucaagaccuucuccaacggcugcgacuacgugagcaacaagggcgucgacacgguguccguggggaacacccuguacuacgucaacaagcaggagggccagagccucuacgugaagggggagcccaucaucaacuucuacgacccgcugguguuccccagcgacgaguucgacgccuccaucagccaggucaacgagaagaucaaccagucccuggcguucauccggaaguccgacgagcuccugcacaacgugaacgccggcaaguccaccaccaacaucaugaucaccacgaucaucaucgugaucaucgucauccugcucagccugaucgccguggggcugcuccuguacugcaaggcccgcuccacccccgugacccugagcaaggaccagcuguccggcaucaacaacaucgccuucagcaacugaggacuagucccuguucccagagcccacuuuuuuuucuuuuuuugaaauaaaauagccugucuuucagaucuaaaaaaaaaaaaaaaaaaaaaaaaaaaaaaaaaaaaaaaaaaaaaaaaaaaaaaaaaaaaaaaaugcaucccccccccccccccccccccccccccccccaaaggcucuuuucagagccaccagaauu

SEQ ID NO: 6107 - RNA, 1876 nt, Artificial Sequence
  mRNA product Design a-5 comprising derived and/or modified sequence from HRSV(A2)__F_DSCav1_mut6 (opt2)
gggagacuuucccauucuguagcagaauuugguguugccuguggucuuggucccgcggagaagcuuaccauggagcuccucauccucaaggccaacgccaucaccaccauccucaccgccgucaccuucugcuucgccuccggccagaacaucaccgaggaguucuaccaguccaccugcuccgccgucuccaagggcuaccucggcgcccuccgcaccggcugguacaccuccgucaucaccaucgagcucuccaacaucaaggagaacaagugcaacggcaccgacgccaaggucaagcucaucaagcaggagcucgacaaguacaagaacgccgucaccgaccuccagaugcucaugugcuccacccccgccaccggcuccggcuccgccaucgccuccggcgucgccgucugcaagguccuccaccucgagggcgaggucaacaagaucaaguccgcccuccucuccaccaacaaggccgucgucucccucuccaacggcgucuccguccucaccuucaagguccucgaccucaagaacuacaucgacaagcagcuccuccccauccucaacaagcaguccugcuccauccccaaccccgagaccgucauggaguuccagcagaagaacaaccgccuccucgagaucacccgcgaguucuccgucaacgccggcgucaccacccccgucuccaccuacaugcucaccaacuccgagcuccucucccucaucaacgacaugcccaucaccaacgaccagaagaagcucauguccaacaacguccagaucguccgccagcaguccuacuccaucaugugcaucaucaaggaggagguccucgccuacgucguccagcucccccucuacggcgucaucgacacccccugcuggaagcuccacaccuccccccucugcaccaccaacaccaaggagggcuccaacaucugccucacccgcaccgaccgcggcugguacugcgacaacgccggcuccgucuccuucuucccccaggccgagaccugcaaggucugcuccaaccgcgucuucugcgacaccaugaacucccucacccuccccuccgaggucaaccucugcaacgucgacaucuucaaccccaaguacgacugcaagaucaugaccuccaagaccgacgucuccuccuccgucaucaccucccucggcgccaucgucuccugcuacggcaagaccaagugcaccgccuccaacaagaacaagggcaucaucaagaccuucuccaacggcugcgacuacgucuccaacaagggcgucgacaccgucuccgucggcaacacccucuacuacgucaacaagcaggagggccagucccucuacgucaagggcgagcccaucaucaacuucuacgacccccucgucuuccccuccgacgaguucgacgccuccaucucccaggucaacgagaagaucaaccagucccucgccuucauccgcaaguccgacgagcuccuccacaacgucaacgccggcaaguccaccaccaacaucaugaucaccaccaucaucaucgucaucaucgucauccuccucucccucaucgccgucggccuccuccucuacugcaaggcccgcuccacccccgucacccucuccaaggaccagcucuccggcaucaacaacaucgccuucuccaacugaggacuagucccuguucccagagcccacuuuuuuuucuuuuuuugaaauaaaauagccugucuuucagaucuaaaaaaaaaaaaaaaaaaaaaaaaaaaaaaaaaaaaaaaaaaaaaaaaaaaaaaaaaaaaaaaaugcaucccccccccccccccccccccccccccccccaaaggcucuuuucagagccaccagaauu

SEQ ID NO: 6108 - RNA, 1876 nt, Artificial Sequence
  mRNA product Design a-5 comprising derived and/or modified sequence from HRSV(A2)__F_DSCav1_mut6 (opt3)
gggagacuuucccauucuguagcagaauuugguguugccuguggucuuggucccgcggagaagcuuaccauggagcugcucauccuuaaggccaacgcuauuaccacaauacugacugcagugacguucugcuuugccagcggccagaauaucaccgaagaguucuaccaauccacauguucugcggucucaaaaggguauuugggagcuuuaagaacugguugguacaccaguguuauuacaaucgaacugagcaacauuaaggagaauaaaugcaacggcaccgacgccaaggugaaacuaaucaagcaggaacucgauaaguauaaaaaugcaguaacugaccugcagaugcuuauguguuccacacccgccaccgggucuggaucggcuauagcaucaggcguggccgucugcaaggugcugcacuuggagggugagguuaacaaaaucaagagcgcucuccugaguacgaauaaagccguggucucccugucuaacggggugagcguacucacuuuuaagguuuuagaucugaagaauuacauugacaaacagcuuuugccuauccugaacaagcaauccuguucaauuccaaauccggaaaccgugauggaguuccagcagaaaaacaauaggcuacucgaaaucacacgggaguuuagugucaacgcgggagugacuacccccgugagcacauauaugcugaccaauucugagcuucuguccuugauaaacgauaugccuauuacgaacgaccagaagaaacucaugucaaauaacguccaaaucguucgccagcagagcuacaguauuaugugcaucaucaaggaagaggugcuggcauauguagugcaguuaccacuguacggcgucauugauacucccuguuggaaacuccauacaucuccucuuugcaccacuaauacaaaggaaggcuccaacauaugucugacccgaacggaccgugggugguacugcgauaaugccggaagcgugucguucuuuccacaagcugagaccuguaagguuugcucuaacagaguguucugcgacacaaugaacuccuugacucuacccucagaagucaaucuguguaauguggauaucuuuaacccuaaauaugacugcaagauuaugaccaguaaaacagauguaagcuccucuguuaucacuagccucggugccauagugucauguuacggcaagaccaaaugcacagcaaguaauaagaacaaggggauuaucaaaaccuucuccaauggaugugacuaugucagcaacaagggcguggacacugucucuguggguaauacgcuguacuauguuaacaaacaggaggggcagucacuuuacgugaagggagagccaaucauuaacuuuuaugauccgcugguauuccccagugacgaauuugaugcuagcaucucccaagucaaugagaaaauuaaccagucuuuggccuucauaaggaagucggacgaacuccugcacaaugugaacgcgggcaagagcacaaccaauaucaugauuacuaccaucaucauuguuauaaucgugauuuuacugucccuaaucgccgucggccuccugcuuuacugcaaagcacggucaacaccugugaccuugaguaaggaucagcugucugggauuaacaauaucgcuuucagcaacugaggacuagucccuguucccagagcccacuuuuuuuucuuuuuuugaaauaaaauagccugucuuucagaucuaaaaaaaaaaaaaaaaaaaaaaaaaaaaaaaaaaaaaaaaaaaaaaaaaaaaaaaaaaaaaaaaugcaucccccccccccccccccccccccccccccccaaaggcucuuuucagagccaccagaauu

SEQ ID NO: 6109 - RNA, 1876 nt, Artificial Sequence
  mRNA product Design a-5 comprising derived and/or modified sequence from HRSV(A2)__F_DSCav1_mut6 (opt4)
gggagacuuucccauucuguagcagaauuugguguugccuguggucuuggucccgcggagaagcuuaccauggagcugcugauccugaaggccaacgccaucaccaccauccugaccgccgugaccuucugcuucgccagcggccagaacaucaccgaggaguucuaccagagcaccugcagcgccgugagcaagggcuaccugggcgcccugagaaccggcugguacaccagcgugaucaccaucgagcugagcaacaucaaggagaacaagugcaacggcaccgacgccaaggugaagcugaucaagcaggagcuggacaaguacaagaacgccgugaccgaccugcagaugcugaugugcagcacccccgccaccggcagcggcagcgccaucgccagcggcguggccgugugcaaggugcugcaccuggagggcgaggugaacaagaucaagagcgcccugcugagcaccaacaaggccguggugagccugagcaacggcgugagcgugcugaccuucaaggugcuggaccugaagaacuacaucgacaagcagcugcugcccauccugaacaagcagagcugcagcauccccaaccccgagaccgugauggaguuccagcagaagaacaacagacugcuggagaucaccagagaguucagcgugaacgccggcgugaccacccccgugagcaccuacaugcugaccaacagcgagcugcugagccugaucaacgacaugcccaucaccaacgaccagaagaagcugaugagcaacaacgugcagaucgugagacagcagagcuacagcaucaugugcaucaucaaggaggaggugcuggccuacguggugcagcugccccuguacggcgugaucgacacccccugcuggaagcugcacaccagcccccugugcaccaccaacaccaaggagggcagcaacaucugccugaccagaaccgacagaggcugguacugcgacaacgccggcagcgugagcuucuucccccaggccgagaccugcaaggugugcagcaacagaguguucugcgacaccaugaacagccugacccugcccagcgaggugaaccugugcaacguggacaucuucaaccccaaguacgacugcaagaucaugaccagcaagaccgacgugagcagcagcgugaucaccagccugggcgccaucgugagcugcuacggcaagaccaagugcaccgccagcaacaagaacaagggcaucaucaagaccuucagcaacggcugcgacuacgugagcaacaagggcguggacaccgugagcgugggcaacacccuguacuacgugaacaagcaggagggccagagccuguacgugaagggcgagcccaucaucaacuucuacgacccccugguguuccccagcgacgaguucgacgccagcaucagccaggugaacgagaagaucaaccagagccuggccuucaucagaaagagcgacgagcugcugcacaacgugaacgccggcaagagcaccaccaacaucaugaucaccaccaucaucaucgugaucaucgugauccugcugagccugaucgccgugggccugcugcuguacugcaaggccagaagcacccccgugacccugagcaaggaccagcugagcggcaucaacaacaucgccuucagcaacugaggacuagucccuguucccagagcccacuuuuuuuucuuuuuuugaaauaaaauagccugucuuucagaucuaaaaaaaaaaaaaaaaaaaaaaaaaaaaaaaaaaaaaaaaaaaaaaaaaaaaaaaaaaaaaaaaugcaucccccccccccccccccccccccccccccccaaaggcucuuuucagagccaccagaauu

SEQ ID NO: 6110 - RNA, 1876 nt, Artificial Sequence
  mRNA product Design a-5 comprising derived and/or modified sequence from HRSV(A2)__F_DSCav1_mut6 (opt5)
gggagacuuucccauucuguagcagaauuugguguugccuguggucuuggucccgcggagaagcuuaccauggagcugcucauccugaaggccaacgcuauuaccacaauccuuacggccgugaccuucugcuuugcgagcggccagaauauuacagaagaguucuaccaauccaccuguucugcugucagcaaaggguaucugggagcccucagaacaggcugguacaccuccguuaucacaauugaacugucuaacaucaaggagaauaaaugcaacgggaccgacgccaaggugaaacuuaucaagcaggaacuggauaaguauaaaaaugcugugacggaccuccagaugcugauguguagcacccccgccacaggauccggcucugcuauugccagcggggucgcggugugcaagguucugcaccucgagggagaggugaacaaaaucaaguccgcccugcuuagcaccaauaaagcugucgugucucuguccaacggcguuagcgugcucacauuuaagguccuggaucuuaagaauuacauugacaaacagcugcucccuauccugaacaagcaaucuuguuccauuccgaaucccgaaaccgugauggaguuccagcagaaaaacaaucggcugcucgaaaucacgcgcgaguuuagcgugaacgccggcgucacaaccccuguuucuacauauaugcugaccaauuccgagcuucugagccucauuaacgauaugcccaucaccaacgaccagaagaaacugauguccaauaacgugcaaaucgugagacagcagucuuacagcauuaugugcaucauuaaggaagagguccuugcuuaugugguucagcugccucucuacggggugaucgauacacccuguuggaaacugcauacguccccucugugcaccacaaauaccaaggaaggaagcaacauuugucucacacggaccgaccgcggcugguacugcgauaaugccgggucugucuccuucuuuccgcaagcggagacguguaaggugugcagcaacagaguuuucugcgacacaaugaacucucugacccuucccagcgaagugaaucuguguaaugucgauaucuuuaacccuaaauaugacugcaagaucaugaccuccaaaacagaugugucuagcuccgucauuaccagccucggagccaucgugucuuguuacggcaagacaaaaugcacggcuuccaauaagaacaaggggauuaucaaaaccuucagcaauggaugugacuauguuucuaacaagggcguggacacagucuccgugggcaauacccuguacuauguuaacaaacaggaggggcagagccuuuacgugaagggagagcccauuaucaacuuuuaugauccucuggucuuccccuccgacgaauuugaugccucuaucagccaagugaaugagaaaauuaaccagucccucgcuuucauccggaagucugacgaacugcugcacaaugugaacgccggcaagagcacaaccaauauuaugaucacgaccauuaucauuguuaucaucgucauucuccugucccuuaucgccguggggcugcuccuguacugcaaagcucgcagcacaccggugacccugucuaaggaucagcuuuccggaauuaacaauaucgcguucagcaacugaggacuagucccuguucccagagcccacuuuuuuuucuuuuuuugaaauaaaauagccugucuuucagaucuaaaaaaaaaaaaaaaaaaaaaaaaaaaaaaaaaaaaaaaaaaaaaaaaaaaaaaaaaaaaaaaaugcaucccccccccccccccccccccccccccccccaaaggcucuuuucagagccaccagaauu

SEQ ID NO: 6111 - RNA, 1876 nt, Artificial Sequence
  mRNA product Design a-5 comprising derived and/or modified sequence from HRSV(A2)__F_DSCav1_mut6 (opt6)
gggagacuuucccauucuguagcagaauuugguguugccuguggucuuggucccgcggagaagcuuaccauggaacuauuaaucuuaaaagcaaaugcuauaaccacaauauuaacagcaguaacauucuguuuugccuccggacaaaacauaacagaagaauuuuaucaaucaacaugcucugcaguauccaaagguuacuuaggcgcacuacgcacuggaugguauacaucaguaauaacaauagaacuaucaaacauaaaagaaaauaaauguaacgguacugacgcaaaagugaaacuaauuaaacaagaacucgacaaauacaaaaaugcuguaacagaccuacaaaugcuaaugugcucaacacccgcaaccggaucaggaucagccauagccuccggagucgcaguaugcaaaguauuacaucuugaaggagaaguaaauaaaauaaaaucagcauuacuauccacaaauaaagccguaguaucacuaucaaacgguguauccguccuuacauucaaaguauuagaucuaaaaaacuacauagauaaacaacuacuacccaucuuaaacaaacaaucaugcucaauucccaacccagaaacagucauggaauuucaacaaaaaaacaacagacucuuagaaauaacacgagaauuuucaguaaacgcaggaguaaccacaccaguaaguacauacaugcucaccaacucagaauuauuaucacuuauuaacgacaugccaauuacaaacgaccaaaaaaaauuaaugucaaacaauguccaaauuguuagacaacaaucauacucuauaauguguauaauaaaagaagaaguacuagcuuacguaguucaauuaccacuauauggcguaauagauacaccuugcuggaaacuacauacaucuccauuauguacaacuaacacaaaagaaggaucuaacauaugccuaacacgcacagaucgaggaugguacugcgauaaugcagguuccguaucauucuuuccacaagcagaaacauguaaaguaugcucaaacagaguauucugugacacuaugaacuccuuaacccuacccucagaagucaaucuaugcaacguugacauauuuaacccaaaauacgacuguaaaaucaugacaucuaaaacagacguaucaucaucaguuauuacaucccuaggagcaauaguaucuugcuacggaaaaacaaaauguacagcauccaacaaaaacaaaggaauaaucaaaacauucucaaacggcugcgacuacguaucaaacaaagguguagacacaguaucaguaggaaauacuuuauauuacguaaauaaacaagaaggacaaucucuauacguuaaaggcgaaccuauuauaaacuucuacgacccacucguauucccuucagacgaauuugacgcaucuauaucccaaguuaacgaaaaaaucaaccaaucauuagccuuuauaagaaaauccgacgaauuauuacauaacgucaacgcuggaaaaucaacaacuaacauaaugauaaccacaauaauaauagucaucauaguuauauuacuaagucuaauagccguaggccuccuacuuuauugcaaagcaagaucaacaccaguaacauuauccaaagaccaacucagcggcauaaacaauauagcuuuuucaaacuagggacuagucccuguucccagagcccacuuuuuuuucuuuuuuugaaauaaaauagccugucuuucagaucuaaaaaaaaaaaaaaaaaaaaaaaaaaaaaaaaaaaaaaaaaaaaaaaaaaaaaaaaaaaaaaaaugcaucccccccccccccccccccccccccccccccaaaggcucuuuucagagccaccagaauu

SEQ ID NO: 6112 - RNA, 1876 nt, Artificial Sequence
  mRNA product Design a-5 comprising derived and/or modified sequence from HRSV(A2)__F_DSCav1_mut6 (opt11)
gggagacuuucccauucuguagcagaauuugguguugccuguggucuuggucccgcggagaagcuuaccauggaacuccucauccucaaagccaacgcaaucacaaccauacuaacugcaguuacuuucugcuucgcauccggccaaaacaucaccgaagaguucuaccaaucaaccugcuccgcagucuccaaaggauaccucggagcccuucgcaccggcugguacaccuccgucauaaccaucgaacucucaaacauaaaagaaaacaaaugcaacggcacagacgcgaaagucaaacuuaucaaacaagaacucgacaaauacaaaaacgccgucaccgaccugcagaugcucaugugcucaacccccgccacaggaagcggcucugcuaucgcuuccggcgucgccgucugcaaaguccuccaccucgaaggcgaaguaaacaaaaucaagucagcccuccucuccaccaacaaagccgucgucucucucucaaacggcguauccguccucacauucaaaguccucgaccucaaaaacuacaucgacaaacaacuucuccccauccuaaacaaacaaucaugcuccauccccaaccccgaaacagucauggaauuucaacaaaagaacaaccgccucuuagaaaucacccgagaauuuuccgucaacgcgggagucacaacccccguuucuacguauaugcucaccaacuccgaacuccuuucccucauaaacgacaugccaaucaccaacgaccaaaagaaacucaugucaaacaacguccaaaucguccgacaacaauccuacucuauuaugugcaucaucaaagaagaaguucucgccuacgucguccaacuaccccucuacggcgugaucgacacccccugcuggaaacuacacaccucaccccucugcaccaccaacaccaaggaaggcuccaacaucugccucacccgcaccgaccgcggcugguacugcgacaacgcuggcuccgucucauucuucccgcaagccgaaacuugcaaaguaugcuccaacagaguauucugcgacaccaugaacucacuaacccucccuuccgaagucaaccuuugcaacguugacauauucaacccaaaguacgauugcaaaauuaugacauccaaaacagaugucuccuccuccgucaucacaucccucggugccauuguaucaugcuacggaaaaaccaaaugcaccgcauccaacaaaaacaaaggaaucaucaaaaccuucucaaacggcugcgauuacgucucaaacaaaggagucgacacagucuccgucggaaacacccuauacuacgucaacaaacaagaaggccaaucccuguacgucaaaggagaacccaucaucaacuucuacgacccccucgucuucccgagcgacgaguucgacgccuccaucucacaagucaaugaaaagaucaaccaaucccuugccuucauccggaaaucggacgaacuccuacacaacgugaacgcuggaaaaucaaccaccaacaucaugaucacaaccaucauuaucgucaucaucgucauacuccucucccuaaucgccgucggccuccuccuguauugcaaagcucgcuccacccccgucacccuguccaaagaccaacucuccggaaucaacaacaucgccuucucaaacuaaggacuagucccuguucccagagcccacuuuuuuuucuuuuuuugaaauaaaauagccugucuuucagaucuaaaaaaaaaaaaaaaaaaaaaaaaaaaaaaaaaaaaaaaaaaaaaaaaaaaaaaaaaaaaaaaaugcaucccccccccccccccccccccccccccccccaaaggcucuuuucagagccaccagaauu

SEQ ID NO: 6113 - RNA, 2057 nt, Artificial Sequence
  mRNA product Design b-1 comprising derived and/or modified sequence from HRSV(A2)__F_DSCav1_mut6 (opt1)
gggagacggagacggccugcaggaccugcucucucagcccucagccgaggccuacgccgagccgagugcgcagccgacgaccgggaggagccgcagccuucaacucugagguacugugauccgcgcugcccgccgggccgccccaguccgcugcugcggcaccuccuucccucgcgcccucuucgcucgccagcgccuucccugugagccugcgucaccgcggccgccaagcuuaccauggagcugcucauccugaaggccaacgccaucaccaccauccugacggcggugaccuucugcuucgccagcggccagaacaucaccgaggaguucuaccaguccacgugcagcgccgucuccaagggguaccucggcgcccugcggaccggcugguacaccuccgugaucaccaucgagcugagcaacaucaaggagaacaagugcaacgggaccgacgccaaggugaagcucaucaagcaggagcuggacaaguacaagaacgcggucacggaccugcagaugcugaugugcuccaccccggcaaccggcuccggcuccgccaucgcgagcggcgucgccgugugcaaggugcugcaccucgagggggaggucaacaagaucaagagcgcccugcuguccaccaacaaggccguggugagccucuccaacggcgucagcgugcugaccuucaaggugcuggaccucaagaacuacaucgacaagcagcugcugcccauccugaacaagcagagcugcuccauccccaaccccgagacggugauggaguuccagcagaagaacaaccggcuccuggagaucacccgcgaguucagcgugaacgccggggucaccacccccguguccacguacaugcugaccaacagcgagcuccugucccugaucaacgacaugccgaucaccaacgaccagaagaagcucaugagcaacaacgugcagaucguccggcagcaguccuacagcaucaugugcaucaucaaggaggaggugcuggcguacgugguccagcugccccucuacggcgugaucgacacccccugcuggaagcugcacacgagcccccugugcaccaccaacaccaaggagggguccaacaucugccucacgcgcaccgaccggggcugguacugcgacaacgccggcagcgucuccuucuucccgcaggccgagaccugcaaggugugcagcaaccgcguguucugcgacaccaugaacucccugacgcugcccagcgagguaaaccucugcaacgucgacaucuucaaccccaaguacgacugcaagaucaugaccuccaagaccgacgugagcuccagcgugaucaccucccugggggccaucgucagcugcuacggcaagacgaagugcaccgccagcaacaagaacaaggggaucaucaagaccuucuccaacggcugcgacuacgugagcaacaagggcguggacaccguguccgucgggaacacccuguacuacgugaacaagcaggagggccagagccucuacgugaagggggagcccaucaucaacuucuacgacccgcuggucuuccccuccgacgaguucgacgcgagcaucucccaggugaacgagaagaucaaccagagccuggccuucauccgcaaguccgacgagcugcuccacaacgugaacgccggcaagagcacgaccaacaucaugaucaccaccaucaucaucgucaucaucgugauccugcugucccucaucgccguggggcugcugcucuacugcaaggcccggagcacgcccgucacccuguccaaggaccagcugagcggcaucaacaacaucgcguucuccaacugaggacuaguguccaccugucccuccugggcugcuggauugucucguuuuccugccaaauaaacaggaucagcgcuuuacagaucuaaaaaaaaaaaaaaaaaaaaaaaaaaaaaaaaaaaaaaaaaaaaaaaaaaaaaaaaaaaaaaaaugcaucccccccccccccccccccccccccccccccaaaggcucuuuucagagccaccagaauu

SEQ ID NO: 6114 - RNA, 2057 nt, Artificial Sequence
  mRNA product Design b-1 comprising derived and/or modified sequence from HRSV(A2)__F_DSCav1_mut6 (opt1)
gggagacggagacggccugcaggaccugcucucucagcccucagccgaggccuacgccgagccgagugcgcagccgacgaccgggaggagccgcagccuucaacucugagguacugugauccgcgcugcccgccgggccgccccaguccgcugcugcggcaccuccuucccucgcgcccucuucgcucgccagcgccuucccugugagccugcgucaccgcggccgccaagcuuaccauggagcugcucauccugaaggccaacgccaucaccaccauccugacggcggugaccuucugcuucgccagcggccagaacaucaccgaggaguucuaccaguccacgugcagcgccgucuccaagggguaccucggcgcccugcgcaccgggugguacaccagcgugaucaccaucgagcuguccaacaucaaggagaacaagugcaacggcaccgacgccaaggugaagcucaucaagcaggagcuggacaaguacaagaacgcggucacggaccugcagaugcucaugugcagcacccccgccaccggguccggcagcgccaucgccuccggcguggcggugugcaagguccugcaccuggagggggaggugaacaagaucaagagcgcccuccuguccaccaacaaggccguggucagccuguccaacggcgugagcgugcucacguucaagguccuggaccugaagaacuacaucgacaagcagcuccugccgauccugaacaagcaguccugcagcauccccaaccccgagaccgugauggaguuccagcagaagaacaaccggcuccuggagaucacccgcgaguucuccgugaacgccggggucaccacgcccgugagcaccuacaugcugaccaacuccgagcuccugagccugaucaacgacaugccgaucaccaacgaccagaagaagcucaugagcaacaacgugcagaucguccggcagcaguccuacagcaucaugugcaucaucaaggaggaggugcuggccuacgugguccagcugccccucuacggcgugaucgacacgcccugcuggaagcugcacaccagcccccugugcaccaccaacacgaaggaggggagcaacaucugccucacccgcaccgaccggggcugguacugcgacaacgcgggcuccgugagcuucuucccgcaggccgagaccugcaaggucugcuccaaccgcguguucugcgacacgaugaacagccugacccugcccuccgaggucaaccucugcaacguggacaucuucaaccccaaguacgacugcaagaucaugaccagcaagaccgacguguccagcuccgucaucacgagccugggggccaucguguccugcuacggcaagaccaagugcaccgccagcaacaagaacaaggggaucaucaagaccuucuccaacggcugcgacuacgugagcaacaagggcgucgacacgguguccguggggaacacccuguacuacgucaacaagcaggagggccagagccucuacgugaagggggagcccaucaucaacuucuacgacccgcugguguuccccagcgacgaguucgacgccuccaucagccaggucaacgagaagaucaaccagucccuggcguucauccggaaguccgacgagcuccugcacaacgugaacgccggcaaguccaccaccaacaucaugaucaccacgaucaucaucgugaucaucgucauccugcucagccugaucgccguggggcugcuccuguacugcaaggcccgcuccacccccgugacccugagcaaggaccagcuguccggcaucaacaacaucgccuucagcaacugaggacuaguguccaccugucccuccugggcugcuggauugucucguuuuccugccaaauaaacaggaucagcgcuuuacagaucuaaaaaaaaaaaaaaaaaaaaaaaaaaaaaaaaaaaaaaaaaaaaaaaaaaaaaaaaaaaaaaaaugcaucccccccccccccccccccccccccccccccaaaggcucuuuucagagccaccagaauu

SEQ ID NO: 6115 - RNA, 2057 nt, Artificial Sequence
  mRNA product Design b-1 comprising derived and/or modified sequence from HRSV(A2)__F_DSCav1_mut6 (opt2)
gggagacggagacggccugcaggaccugcucucucagcccucagccgaggccuacgccgagccgagugcgcagccgacgaccgggaggagccgcagccuucaacucugagguacugugauccgcgcugcccgccgggccgccccaguccgcugcugcggcaccuccuucccucgcgcccucuucgcucgccagcgccuucccugugagccugcgucaccgcggccgccaagcuuaccauggagcuccucauccucaaggccaacgccaucaccaccauccucaccgccgucaccuucugcuucgccuccggccagaacaucaccgaggaguucuaccaguccaccugcuccgccgucuccaagggcuaccucggcgcccuccgcaccggcugguacaccuccgucaucaccaucgagcucuccaacaucaaggagaacaagugcaacggcaccgacgccaaggucaagcucaucaagcaggagcucgacaaguacaagaacgccgucaccgaccuccagaugcucaugugcuccacccccgccaccggcuccggcuccgccaucgccuccggcgucgccgucugcaagguccuccaccucgagggcgaggucaacaagaucaaguccgcccuccucuccaccaacaaggccgucgucucccucuccaacggcgucuccguccucaccuucaagguccucgaccucaagaacuacaucgacaagcagcuccuccccauccucaacaagcaguccugcuccauccccaaccccgagaccgucauggaguuccagcagaagaacaaccgccuccucgagaucacccgcgaguucuccgucaacgccggcgucaccacccccgucuccaccuacaugcucaccaacuccgagcuccucucccucaucaacgacaugcccaucaccaacgaccagaagaagcucauguccaacaacguccagaucguccgccagcaguccuacuccaucaugugcaucaucaaggaggagguccucgccuacgucguccagcucccccucuacggcgucaucgacacccccugcuggaagcuccacaccuccccccucugcaccaccaacaccaaggagggcuccaacaucugccucacccgcaccgaccgcggcugguacugcgacaacgccggcuccgucuccuucuucccccaggccgagaccugcaaggucugcuccaaccgcgucuucugcgacaccaugaacucccucacccuccccuccgaggucaaccucugcaacgucgacaucuucaaccccaaguacgacugcaagaucaugaccuccaagaccgacgucuccuccuccgucaucaccucccucggcgccaucgucuccugcuacggcaagaccaagugcaccgccuccaacaagaacaagggcaucaucaagaccuucuccaacggcugcgacuacgucuccaacaagggcgucgacaccgucuccgucggcaacacccucuacuacgucaacaagcaggagggccagucccucuacgucaagggcgagcccaucaucaacuucuacgacccccucgucuuccccuccgacgaguucgacgccuccaucucccaggucaacgagaagaucaaccagucccucgccuucauccgcaaguccgacgagcuccuccacaacgucaacgccggcaaguccaccaccaacaucaugaucaccaccaucaucaucgucaucaucgucauccuccucucccucaucgccgucggccuccuccucuacugcaaggcccgcuccacccccgucacccucuccaaggaccagcucuccggcaucaacaacaucgccuucuccaacugaggacuaguguccaccugucccuccugggcugcuggauugucucguuuuccugccaaauaaacaggaucagcgcuuuacagaucuaaaaaaaaaaaaaaaaaaaaaaaaaaaaaaaaaaaaaaaaaaaaaaaaaaaaaaaaaaaaaaaaugcaucccccccccccccccccccccccccccccccaaaggcucuuuucagagccaccagaauu

SEQ ID NO: 6116 - RNA, 2057 nt, Artificial Sequence
  mRNA product Design b-1 comprising derived and/or modified sequence from HRSV(A2)__F_DSCav1_mut6 (opt3)
gggagacggagacggccugcaggaccugcucucucagcccucagccgaggccuacgccgagccgagugcgcagccgacgaccgggaggagccgcagccuucaacucugagguacugugauccgcgcugcccgccgggccgccccaguccgcugcugcggcaccuccuucccucgcgcccucuucgcucgccagcgccuucccugugagccugcgucaccgcggccgccaagcuuaccauggagcugcucauccuuaaggccaacgcuauuaccacaauacugacugcagugacguucugcuuugccagcggccagaauaucaccgaagaguucuaccaauccacauguucugcggucucaaaaggguauuugggagcuuuaagaacugguugguacaccaguguuauuacaaucgaacugagcaacauuaaggagaauaaaugcaacggcaccgacgccaaggugaaacuaaucaagcaggaacucgauaaguauaaaaaugcaguaacugaccugcagaugcuuauguguuccacacccgccaccgggucuggaucggcuauagcaucaggcguggccgucugcaaggugcugcacuuggagggugagguuaacaaaaucaagagcgcucuccugaguacgaauaaagccguggucucccugucuaacggggugagcguacucacuuuuaagguuuuagaucugaagaauuacauugacaaacagcuuuugccuauccugaacaagcaauccuguucaauuccaaauccggaaaccgugauggaguuccagcagaaaaacaauaggcuacucgaaaucacacgggaguuuagugucaacgcgggagugacuacccccgugagcacauauaugcugaccaauucugagcuucuguccuugauaaacgauaugccuauuacgaacgaccagaagaaacucaugucaaauaacguccaaaucguucgccagcagagcuacaguauuaugugcaucaucaaggaagaggugcuggcauauguagugcaguuaccacuguacggcgucauugauacucccuguuggaaacuccauacaucuccucuuugcaccacuaauacaaaggaaggcuccaacauaugucugacccgaacggaccgugggugguacugcgauaaugccggaagcgugucguucuuuccacaagcugagaccuguaagguuugcucuaacagaguguucugcgacacaaugaacuccuugacucuacccucagaagucaaucuguguaauguggauaucuuuaacccuaaauaugacugcaagauuaugaccaguaaaacagauguaagcuccucuguuaucacuagccucggugccauagugucauguuacggcaagaccaaaugcacagcaaguaauaagaacaaggggauuaucaaaaccuucuccaauggaugugacuaugucagcaacaagggcguggacacugucucuguggguaauacgcuguacuauguuaacaaacaggaggggcagucacuuuacgugaagggagagccaaucauuaacuuuuaugauccgcugguauuccccagugacgaauuugaugcuagcaucucccaagucaaugagaaaauuaaccagucuuuggccuucauaaggaagucggacgaacuccugcacaaugugaacgcgggcaagagcacaaccaauaucaugauuacuaccaucaucauuguuauaaucgugauuuuacugucccuaaucgccgucggccuccugcuuuacugcaaagcacggucaacaccugugaccuugaguaaggaucagcugucugggauuaacaauaucgcuuucagcaacugaggacuaguguccaccugucccuccugggcugcuggauugucucguuuuccugccaaauaaacaggaucagcgcuuuacagaucuaaaaaaaaaaaaaaaaaaaaaaaaaaaaaaaaaaaaaaaaaaaaaaaaaaaaaaaaaaaaaaaaugcaucccccccccccccccccccccccccccccccaaaggcucuuuucagagccaccagaauu

SEQ ID NO: 6117 - RNA, 2057 nt, Artificial Sequence
  mRNA product Design b-1 comprising derived and/or modified sequence from HRSV(A2)__F_DSCav1_mut6 (opt4)
gggagacggagacggccugcaggaccugcucucucagcccucagccgaggccuacgccgagccgagugcgcagccgacgaccgggaggagccgcagccuucaacucugagguacugugauccgcgcugcccgccgggccgccccaguccgcugcugcggcaccuccuucccucgcgcccucuucgcucgccagcgccuucccugugagccugcgucaccgcggccgccaagcuuaccauggagcugcugauccugaaggccaacgccaucaccaccauccugaccgccgugaccuucugcuucgccagcggccagaacaucaccgaggaguucuaccagagcaccugcagcgccgugagcaagggcuaccugggcgcccugagaaccggcugguacaccagcgugaucaccaucgagcugagcaacaucaaggagaacaagugcaacggcaccgacgccaaggugaagcugaucaagcaggagcuggacaaguacaagaacgccgugaccgaccugcagaugcugaugugcagcacccccgccaccggcagcggcagcgccaucgccagcggcguggccgugugcaaggugcugcaccuggagggcgaggugaacaagaucaagagcgcccugcugagcaccaacaaggccguggugagccugagcaacggcgugagcgugcugaccuucaaggugcuggaccugaagaacuacaucgacaagcagcugcugcccauccugaacaagcagagcugcagcauccccaaccccgagaccgugauggaguuccagcagaagaacaacagacugcuggagaucaccagagaguucagcgugaacgccggcgugaccacccccgugagcaccuacaugcugaccaacagcgagcugcugagccugaucaacgacaugcccaucaccaacgaccagaagaagcugaugagcaacaacgugcagaucgugagacagcagagcuacagcaucaugugcaucaucaaggaggaggugcuggccuacguggugcagcugccccuguacggcgugaucgacacccccugcuggaagcugcacaccagcccccugugcaccaccaacaccaaggagggcagcaacaucugccugaccagaaccgacagaggcugguacugcgacaacgccggcagcgugagcuucuucccccaggccgagaccugcaaggugugcagcaacagaguguucugcgacaccaugaacagccugacccugcccagcgaggugaaccugugcaacguggacaucuucaaccccaaguacgacugcaagaucaugaccagcaagaccgacgugagcagcagcgugaucaccagccugggcgccaucgugagcugcuacggcaagaccaagugcaccgccagcaacaagaacaagggcaucaucaagaccuucagcaacggcugcgacuacgugagcaacaagggcguggacaccgugagcgugggcaacacccuguacuacgugaacaagcaggagggccagagccuguacgugaagggcgagcccaucaucaacuucuacgacccccugguguuccccagcgacgaguucgacgccagcaucagccaggugaacgagaagaucaaccagagccuggccuucaucagaaagagcgacgagcugcugcacaacgugaacgccggcaagagcaccaccaacaucaugaucaccaccaucaucaucgugaucaucgugauccugcugagccugaucgccgugggccugcugcuguacugcaaggccagaagcacccccgugacccugagcaaggaccagcugagcggcaucaacaacaucgccuucagcaacugaggacuaguguccaccugucccuccugggcugcuggauugucucguuuuccugccaaauaaacaggaucagcgcuuuacagaucuaaaaaaaaaaaaaaaaaaaaaaaaaaaaaaaaaaaaaaaaaaaaaaaaaaaaaaaaaaaaaaaaugcaucccccccccccccccccccccccccccccccaaaggcucuuuucagagccaccagaauu

SEQ ID NO: 6118 - RNA, 2057 nt, Artificial Sequence
  mRNA product Design b-1 comprising derived and/or modified sequence from HRSV(A2)__F_DSCav1_mut6 (opt5)
gggagacggagacggccugcaggaccugcucucucagcccucagccgaggccuacgccgagccgagugcgcagccgacgaccgggaggagccgcagccuucaacucugagguacugugauccgcgcugcccgccgggccgccccaguccgcugcugcggcaccuccuucccucgcgcccucuucgcucgccagcgccuucccugugagccugcgucaccgcggccgccaagcuuaccauggagcugcucauccugaaggccaacgcuauuaccacaauccuuacggccgugaccuucugcuuugcgagcggccagaauauuacagaagaguucuaccaauccaccuguucugcugucagcaaaggguaucugggagcccucagaacaggcugguacaccuccguuaucacaauugaacugucuaacaucaaggagaauaaaugcaacgggaccgacgccaaggugaaacuuaucaagcaggaacuggauaaguauaaaaaugcugugacggaccuccagaugcugauguguagcacccccgccacaggauccggcucugcuauugccagcggggucgcggugugcaagguucugcaccucgagggagaggugaacaaaaucaaguccgcccugcuuagcaccaauaaagcugucgugucucuguccaacggcguuagcgugcucacauuuaagguccuggaucuuaagaauuacauugacaaacagcugcucccuauccugaacaagcaaucuuguuccauuccgaaucccgaaaccgugauggaguuccagcagaaaaacaaucggcugcucgaaaucacgcgcgaguuuagcgugaacgccggcgucacaaccccuguuucuacauauaugcugaccaauuccgagcuucugagccucauuaacgauaugcccaucaccaacgaccagaagaaacugauguccaauaacgugcaaaucgugagacagcagucuuacagcauuaugugcaucauuaaggaagagguccuugcuuaugugguucagcugccucucuacggggugaucgauacacccuguuggaaacugcauacguccccucugugcaccacaaauaccaaggaaggaagcaacauuugucucacacggaccgaccgcggcugguacugcgauaaugccgggucugucuccuucuuuccgcaagcggagacguguaaggugugcagcaacagaguuuucugcgacacaaugaacucucugacccuucccagcgaagugaaucuguguaaugucgauaucuuuaacccuaaauaugacugcaagaucaugaccuccaaaacagaugugucuagcuccgucauuaccagccucggagccaucgugucuuguuacggcaagacaaaaugcacggcuuccaauaagaacaaggggauuaucaaaaccuucagcaauggaugugacuauguuucuaacaagggcguggacacagucuccgugggcaauacccuguacuauguuaacaaacaggaggggcagagccuuuacgugaagggagagcccauuaucaacuuuuaugauccucuggucuuccccuccgacgaauuugaugccucuaucagccaagugaaugagaaaauuaaccagucccucgcuuucauccggaagucugacgaacugcugcacaaugugaacgccggcaagagcacaaccaauauuaugaucacgaccauuaucauuguuaucaucgucauucuccugucccuuaucgccguggggcugcuccuguacugcaaagcucgcagcacaccggugacccugucuaaggaucagcuuuccggaauuaacaauaucgcguucagcaacugaggacuaguguccaccugucccuccugggcugcuggauugucucguuuuccugccaaauaaacaggaucagcgcuuuacagaucuaaaaaaaaaaaaaaaaaaaaaaaaaaaaaaaaaaaaaaaaaaaaaaaaaaaaaaaaaaaaaaaaugcaucccccccccccccccccccccccccccccccaaaggcucuuuucagagccaccagaauu

SEQ ID NO: 6119 - RNA, 2057 nt, Artificial Sequence
  mRNA product Design b-1 comprising derived and/or modified sequence from HRSV(A2)__F_DSCav1_mut6 (opt6)
gggagacggagacggccugcaggaccugcucucucagcccucagccgaggccuacgccgagccgagugcgcagccgacgaccgggaggagccgcagccuucaacucugagguacugugauccgcgcugcccgccgggccgccccaguccgcugcugcggcaccuccuucccucgcgcccucuucgcucgccagcgccuucccugugagccugcgucaccgcggccgccaagcuuaccauggaacuauuaaucuuaaaagcaaaugcuauaaccacaauauuaacagcaguaacauucuguuuugccuccggacaaaacauaacagaagaauuuuaucaaucaacaugcucugcaguauccaaagguuacuuaggcgcacuacgcacuggaugguauacaucaguaauaacaauagaacuaucaaacauaaaagaaaauaaauguaacgguacugacgcaaaagugaaacuaauuaaacaagaacucgacaaauacaaaaaugcuguaacagaccuacaaaugcuaaugugcucaacacccgcaaccggaucaggaucagccauagccuccggagucgcaguaugcaaaguauuacaucuugaaggagaaguaaauaaaauaaaaucagcauuacuauccacaaauaaagccguaguaucacuaucaaacgguguauccguccuuacauucaaaguauuagaucuaaaaaacuacauagauaaacaacuacuacccaucuuaaacaaacaaucaugcucaauucccaacccagaaacagucauggaauuucaacaaaaaaacaacagacucuuagaaauaacacgagaauuuucaguaaacgcaggaguaaccacaccaguaaguacauacaugcucaccaacucagaauuauuaucacuuauuaacgacaugccaauuacaaacgaccaaaaaaaauuaaugucaaacaauguccaaauuguuagacaacaaucauacucuauaauguguauaauaaaagaagaaguacuagcuuacguaguucaauuaccacuauauggcguaauagauacaccuugcuggaaacuacauacaucuccauuauguacaacuaacacaaaagaaggaucuaacauaugccuaacacgcacagaucgaggaugguacugcgauaaugcagguuccguaucauucuuuccacaagcagaaacauguaaaguaugcucaaacagaguauucugugacacuaugaacuccuuaacccuacccucagaagucaaucuaugcaacguugacauauuuaacccaaaauacgacuguaaaaucaugacaucuaaaacagacguaucaucaucaguuauuacaucccuaggagcaauaguaucuugcuacggaaaaacaaaauguacagcauccaacaaaaacaaaggaauaaucaaaacauucucaaacggcugcgacuacguaucaaacaaagguguagacacaguaucaguaggaaauacuuuauauuacguaaauaaacaagaaggacaaucucuauacguuaaaggcgaaccuauuauaaacuucuacgacccacucguauucccuucagacgaauuugacgcaucuauaucccaaguuaacgaaaaaaucaaccaaucauuagccuuuauaagaaaauccgacgaauuauuacauaacgucaacgcuggaaaaucaacaacuaacauaaugauaaccacaauaauaauagucaucauaguuauauuacuaagucuaauagccguaggccuccuacuuuauugcaaagcaagaucaacaccaguaacauuauccaaagaccaacucagcggcauaaacaauauagcuuuuucaaacuagggacuaguguccaccugucccuccugggcugcuggauugucucguuuuccugccaaauaaacaggaucagcgcuuuacagaucuaaaaaaaaaaaaaaaaaaaaaaaaaaaaaaaaaaaaaaaaaaaaaaaaaaaaaaaaaaaaaaaaugcaucccccccccccccccccccccccccccccccaaaggcucuuuucagagccaccagaauu

SEQ ID NO: 6120 - RNA, 2057 nt, Artificial Sequence
  mRNA product Design b-1 comprising derived and/or modified sequence from HRSV(A2)__F_DSCav1_mut6 (opt11)
gggagacggagacggccugcaggaccugcucucucagcccucagccgaggccuacgccgagccgagugcgcagccgacgaccgggaggagccgcagccuucaacucugagguacugugauccgcgcugcccgccgggccgccccaguccgcugcugcggcaccuccuucccucgcgcccucuucgcucgccagcgccuucccugugagccugcgucaccgcggccgccaagcuuaccauggaacuccucauccucaaagccaacgcaaucacaaccauacuaacugcaguuacuuucugcuucgcauccggccaaaacaucaccgaagaguucuaccaaucaaccugcuccgcagucuccaaaggauaccucggagcccuucgcaccggcugguacaccuccgucauaaccaucgaacucucaaacauaaaagaaaacaaaugcaacggcacagacgcgaaagucaaacuuaucaaacaagaacucgacaaauacaaaaacgccgucaccgaccugcagaugcucaugugcucaacccccgccacaggaagcggcucugcuaucgcuuccggcgucgccgucugcaaaguccuccaccucgaaggcgaaguaaacaaaaucaagucagcccuccucuccaccaacaaagccgucgucucucucucaaacggcguauccguccucacauucaaaguccucgaccucaaaaacuacaucgacaaacaacuucuccccauccuaaacaaacaaucaugcuccauccccaaccccgaaacagucauggaauuucaacaaaagaacaaccgccucuuagaaaucacccgagaauuuuccgucaacgcgggagucacaacccccguuucuacguauaugcucaccaacuccgaacuccuuucccucauaaacgacaugccaaucaccaacgaccaaaagaaacucaugucaaacaacguccaaaucguccgacaacaauccuacucuauuaugugcaucaucaaagaagaaguucucgccuacgucguccaacuaccccucuacggcgugaucgacacccccugcuggaaacuacacaccucaccccucugcaccaccaacaccaaggaaggcuccaacaucugccucacccgcaccgaccgcggcugguacugcgacaacgcuggcuccgucucauucuucccgcaagccgaaacuugcaaaguaugcuccaacagaguauucugcgacaccaugaacucacuaacccucccuuccgaagucaaccuuugcaacguugacauauucaacccaaaguacgauugcaaaauuaugacauccaaaacagaugucuccuccuccgucaucacaucccucggugccauuguaucaugcuacggaaaaaccaaaugcaccgcauccaacaaaaacaaaggaaucaucaaaaccuucucaaacggcugcgauuacgucucaaacaaaggagucgacacagucuccgucggaaacacccuauacuacgucaacaaacaagaaggccaaucccuguacgucaaaggagaacccaucaucaacuucuacgacccccucgucuucccgagcgacgaguucgacgccuccaucucacaagucaaugaaaagaucaaccaaucccuugccuucauccggaaaucggacgaacuccuacacaacgugaacgcuggaaaaucaaccaccaacaucaugaucacaaccaucauuaucgucaucaucgucauacuccucucccuaaucgccgucggccuccuccuguauugcaaagcucgcuccacccccgucacccuguccaaagaccaacucuccggaaucaacaacaucgccuucucaaacuaaggacuaguguccaccugucccuccugggcugcuggauugucucguuuuccugccaaauaaacaggaucagcgcuuuacagaucuaaaaaaaaaaaaaaaaaaaaaaaaaaaaaaaaaaaaaaaaaaaaaaaaaaaaaaaaaaaaaaaaugcaucccccccccccccccccccccccccccccccaaaggcucuuuucagagccaccagaauu

SEQ ID NO: 6121 - RNA, 1877 nt, Artificial Sequence
  mRNA product Design b-2 comprising derived and/or modified sequence from HRSV(A2)__F_DSCav1_mut6 (opt1)
gggagagccucugcuggaguccggggaguggcguuggcugcuagagcgaagcuuaccauggagcugcucauccugaaggccaacgccaucaccaccauccugacggcggugaccuucugcuucgccagcggccagaacaucaccgaggaguucuaccaguccacgugcagcgccgucuccaagggguaccucggcgcccugcggaccggcugguacaccuccgugaucaccaucgagcugagcaacaucaaggagaacaagugcaacgggaccgacgccaaggugaagcucaucaagcaggagcuggacaaguacaagaacgcggucacggaccugcagaugcugaugugcuccaccccggcaaccggcuccggcuccgccaucgcgagcggcgucgccgugugcaaggugcugcaccucgagggggaggucaacaagaucaagagcgcccugcuguccaccaacaaggccguggugagccucuccaacggcgucagcgugcugaccuucaaggugcuggaccucaagaacuacaucgacaagcagcugcugcccauccugaacaagcagagcugcuccauccccaaccccgagacggugauggaguuccagcagaagaacaaccggcuccuggagaucacccgcgaguucagcgugaacgccggggucaccacccccguguccacguacaugcugaccaacagcgagcuccugucccugaucaacgacaugccgaucaccaacgaccagaagaagcucaugagcaacaacgugcagaucguccggcagcaguccuacagcaucaugugcaucaucaaggaggaggugcuggcguacgugguccagcugccccucuacggcgugaucgacacccccugcuggaagcugcacacgagcccccugugcaccaccaacaccaaggagggguccaacaucugccucacgcgcaccgaccggggcugguacugcgacaacgccggcagcgucuccuucuucccgcaggccgagaccugcaaggugugcagcaaccgcguguucugcgacaccaugaacucccugacgcugcccagcgagguaaaccucugcaacgucgacaucuucaaccccaaguacgacugcaagaucaugaccuccaagaccgacgugagcuccagcgugaucaccucccugggggccaucgucagcugcuacggcaagacgaagugcaccgccagcaacaagaacaaggggaucaucaagaccuucuccaacggcugcgacuacgugagcaacaagggcguggacaccguguccgucgggaacacccuguacuacgugaacaagcaggagggccagagccucuacgugaagggggagcccaucaucaacuucuacgacccgcuggucuuccccuccgacgaguucgacgcgagcaucucccaggugaacgagaagaucaaccagagccuggccuucauccgcaaguccgacgagcugcuccacaacgugaacgccggcaagagcacgaccaacaucaugaucaccaccaucaucaucgucaucaucgugauccugcugucccucaucgccguggggcugcugcucuacugcaaggcccggagcacgcccgucacccuguccaaggaccagcugagcggcaucaacaacaucgcguucuccaacugaggacuaguguccaccugucccuccugggcugcuggauugucucguuuuccugccaaauaaacaggaucagcgcuuuacagaucuaaaaaaaaaaaaaaaaaaaaaaaaaaaaaaaaaaaaaaaaaaaaaaaaaaaaaaaaaaaaaaaaugcaucccccccccccccccccccccccccccccccaaaggcucuuuucagagccaccagaauu

SEQ ID NO: 6122 - RNA, 1877 nt, Artificial Sequence
  mRNA product Design b-2 comprising derived and/or modified sequence from HRSV(A2)__F_DSCav1_mut6 (opt1)
gggagagccucugcuggaguccggggaguggcguuggcugcuagagcgaagcuuaccauggagcugcucauccugaaggccaacgccaucaccaccauccugacggcggugaccuucugcuucgccagcggccagaacaucaccgaggaguucuaccaguccacgugcagcgccgucuccaagggguaccucggcgcccugcgcaccgggugguacaccagcgugaucaccaucgagcuguccaacaucaaggagaacaagugcaacggcaccgacgccaaggugaagcucaucaagcaggagcuggacaaguacaagaacgcggucacggaccugcagaugcucaugugcagcacccccgccaccggguccggcagcgccaucgccuccggcguggcggugugcaagguccugcaccuggagggggaggugaacaagaucaagagcgcccuccuguccaccaacaaggccguggucagccuguccaacggcgugagcgugcucacguucaagguccuggaccugaagaacuacaucgacaagcagcuccugccgauccugaacaagcaguccugcagcauccccaaccccgagaccgugauggaguuccagcagaagaacaaccggcuccuggagaucacccgcgaguucuccgugaacgccggggucaccacgcccgugagcaccuacaugcugaccaacuccgagcuccugagccugaucaacgacaugccgaucaccaacgaccagaagaagcucaugagcaacaacgugcagaucguccggcagcaguccuacagcaucaugugcaucaucaaggaggaggugcuggccuacgugguccagcugccccucuacggcgugaucgacacgcccugcuggaagcugcacaccagcccccugugcaccaccaacacgaaggaggggagcaacaucugccucacccgcaccgaccggggcugguacugcgacaacgcgggcuccgugagcuucuucccgcaggccgagaccugcaaggucugcuccaaccgcguguucugcgacacgaugaacagccugacccugcccuccgaggucaaccucugcaacguggacaucuucaaccccaaguacgacugcaagaucaugaccagcaagaccgacguguccagcuccgucaucacgagccugggggccaucguguccugcuacggcaagaccaagugcaccgccagcaacaagaacaaggggaucaucaagaccuucuccaacggcugcgacuacgugagcaacaagggcgucgacacgguguccguggggaacacccuguacuacgucaacaagcaggagggccagagccucuacgugaagggggagcccaucaucaacuucuacgacccgcugguguuccccagcgacgaguucgacgccuccaucagccaggucaacgagaagaucaaccagucccuggcguucauccggaaguccgacgagcuccugcacaacgugaacgccggcaaguccaccaccaacaucaugaucaccacgaucaucaucgugaucaucgucauccugcucagccugaucgccguggggcugcuccuguacugcaaggcccgcuccacccccgugacccugagcaaggaccagcuguccggcaucaacaacaucgccuucagcaacugaggacuaguguccaccugucccuccugggcugcuggauugucucguuuuccugccaaauaaacaggaucagcgcuuuacagaucuaaaaaaaaaaaaaaaaaaaaaaaaaaaaaaaaaaaaaaaaaaaaaaaaaaaaaaaaaaaaaaaaugcaucccccccccccccccccccccccccccccccaaaggcucuuuucagagccaccagaauu

SEQ ID NO: 6123 - RNA, 1877 nt, Artificial Sequence
  mRNA product Design b-2 comprising derived and/or modified sequence from HRSV(A2)__F_DSCav1_mut6 (opt2)
gggagagccucugcuggaguccggggaguggcguuggcugcuagagcgaagcuuaccauggagcuccucauccucaaggccaacgccaucaccaccauccucaccgccgucaccuucugcuucgccuccggccagaacaucaccgaggaguucuaccaguccaccugcuccgccgucuccaagggcuaccucggcgcccuccgcaccggcugguacaccuccgucaucaccaucgagcucuccaacaucaaggagaacaagugcaacggcaccgacgccaaggucaagcucaucaagcaggagcucgacaaguacaagaacgccgucaccgaccuccagaugcucaugugcuccacccccgccaccggcuccggcuccgccaucgccuccggcgucgccgucugcaagguccuccaccucgagggcgaggucaacaagaucaaguccgcccuccucuccaccaacaaggccgucgucucccucuccaacggcgucuccguccucaccuucaagguccucgaccucaagaacuacaucgacaagcagcuccuccccauccucaacaagcaguccugcuccauccccaaccccgagaccgucauggaguuccagcagaagaacaaccgccuccucgagaucacccgcgaguucuccgucaacgccggcgucaccacccccgucuccaccuacaugcucaccaacuccgagcuccucucccucaucaacgacaugcccaucaccaacgaccagaagaagcucauguccaacaacguccagaucguccgccagcaguccuacuccaucaugugcaucaucaaggaggagguccucgccuacgucguccagcucccccucuacggcgucaucgacacccccugcuggaagcuccacaccuccccccucugcaccaccaacaccaaggagggcuccaacaucugccucacccgcaccgaccgcggcugguacugcgacaacgccggcuccgucuccuucuucccccaggccgagaccugcaaggucugcuccaaccgcgucuucugcgacaccaugaacucccucacccuccccuccgaggucaaccucugcaacgucgacaucuucaaccccaaguacgacugcaagaucaugaccuccaagaccgacgucuccuccuccgucaucaccucccucggcgccaucgucuccugcuacggcaagaccaagugcaccgccuccaacaagaacaagggcaucaucaagaccuucuccaacggcugcgacuacgucuccaacaagggcgucgacaccgucuccgucggcaacacccucuacuacgucaacaagcaggagggccagucccucuacgucaagggcgagcccaucaucaacuucuacgacccccucgucuuccccuccgacgaguucgacgccuccaucucccaggucaacgagaagaucaaccagucccucgccuucauccgcaaguccgacgagcuccuccacaacgucaacgccggcaaguccaccaccaacaucaugaucaccaccaucaucaucgucaucaucgucauccuccucucccucaucgccgucggccuccuccucuacugcaaggcccgcuccacccccgucacccucuccaaggaccagcucuccggcaucaacaacaucgccuucuccaacugaggacuaguguccaccugucccuccugggcugcuggauugucucguuuuccugccaaauaaacaggaucagcgcuuuacagaucuaaaaaaaaaaaaaaaaaaaaaaaaaaaaaaaaaaaaaaaaaaaaaaaaaaaaaaaaaaaaaaaaugcaucccccccccccccccccccccccccccccccaaaggcucuuuucagagccaccagaauu

SEQ ID NO: 6124 - RNA, 1877 nt, Artificial Sequence
  mRNA product Design b-2 comprising derived and/or modified sequence from HRSV(A2)__F_DSCav1_mut6 (opt3)
gggagagccucugcuggaguccggggaguggcguuggcugcuagagcgaagcuuaccauggagcugcucauccuuaaggccaacgcuauuaccacaauacugacugcagugacguucugcuuugccagcggccagaauaucaccgaagaguucuaccaauccacauguucugcggucucaaaaggguauuugggagcuuuaagaacugguugguacaccaguguuauuacaaucgaacugagcaacauuaaggagaauaaaugcaacggcaccgacgccaaggugaaacuaaucaagcaggaacucgauaaguauaaaaaugcaguaacugaccugcagaugcuuauguguuccacacccgccaccgggucuggaucggcuauagcaucaggcguggccgucugcaaggugcugcacuuggagggugagguuaacaaaaucaagagcgcucuccugaguacgaauaaagccguggucucccugucuaacggggugagcguacucacuuuuaagguuuuagaucugaagaauuacauugacaaacagcuuuugccuauccugaacaagcaauccuguucaauuccaaauccggaaaccgugauggaguuccagcagaaaaacaauaggcuacucgaaaucacacgggaguuuagugucaacgcgggagugacuacccccgugagcacauauaugcugaccaauucugagcuucuguccuugauaaacgauaugccuauuacgaacgaccagaagaaacucaugucaaauaacguccaaaucguucgccagcagagcuacaguauuaugugcaucaucaaggaagaggugcuggcauauguagugcaguuaccacuguacggcgucauugauacucccuguuggaaacuccauacaucuccucuuugcaccacuaauacaaaggaaggcuccaacauaugucugacccgaacggaccgugggugguacugcgauaaugccggaagcgugucguucuuuccacaagcugagaccuguaagguuugcucuaacagaguguucugcgacacaaugaacuccuugacucuacccucagaagucaaucuguguaauguggauaucuuuaacccuaaauaugacugcaagauuaugaccaguaaaacagauguaagcuccucuguuaucacuagccucggugccauagugucauguuacggcaagaccaaaugcacagcaaguaauaagaacaaggggauuaucaaaaccuucuccaauggaugugacuaugucagcaacaagggcguggacacugucucuguggguaauacgcuguacuauguuaacaaacaggaggggcagucacuuuacgugaagggagagccaaucauuaacuuuuaugauccgcugguauuccccagugacgaauuugaugcuagcaucucccaagucaaugagaaaauuaaccagucuuuggccuucauaaggaagucggacgaacuccugcacaaugugaacgcgggcaagagcacaaccaauaucaugauuacuaccaucaucauuguuauaaucgugauuuuacugucccuaaucgccgucggccuccugcuuuacugcaaagcacggucaacaccugugaccuugaguaaggaucagcugucugggauuaacaauaucgcuuucagcaacugaggacuaguguccaccugucccuccugggcugcuggauugucucguuuuccugccaaauaaacaggaucagcgcuuuacagaucuaaaaaaaaaaaaaaaaaaaaaaaaaaaaaaaaaaaaaaaaaaaaaaaaaaaaaaaaaaaaaaaaugcaucccccccccccccccccccccccccccccccaaaggcucuuuucagagccaccagaauu

SEQ ID NO: 6125 - RNA, 1877 nt, Artificial Sequence
  mRNA product Design b-2 comprising derived and/or modified sequence from HRSV(A2)__F_DSCav1_mut6 (opt4)
gggagagccucugcuggaguccggggaguggcguuggcugcuagagcgaagcuuaccauggagcugcugauccugaaggccaacgccaucaccaccauccugaccgccgugaccuucugcuucgccagcggccagaacaucaccgaggaguucuaccagagcaccugcagcgccgugagcaagggcuaccugggcgcccugagaaccggcugguacaccagcgugaucaccaucgagcugagcaacaucaaggagaacaagugcaacggcaccgacgccaaggugaagcugaucaagcaggagcuggacaaguacaagaacgccgugaccgaccugcagaugcugaugugcagcacccccgccaccggcagcggcagcgccaucgccagcggcguggccgugugcaaggugcugcaccuggagggcgaggugaacaagaucaagagcgcccugcugagcaccaacaaggccguggugagccugagcaacggcgugagcgugcugaccuucaaggugcuggaccugaagaacuacaucgacaagcagcugcugcccauccugaacaagcagagcugcagcauccccaaccccgagaccgugauggaguuccagcagaagaacaacagacugcuggagaucaccagagaguucagcgugaacgccggcgugaccacccccgugagcaccuacaugcugaccaacagcgagcugcugagccugaucaacgacaugcccaucaccaacgaccagaagaagcugaugagcaacaacgugcagaucgugagacagcagagcuacagcaucaugugcaucaucaaggaggaggugcuggccuacguggugcagcugccccuguacggcgugaucgacacccccugcuggaagcugcacaccagcccccugugcaccaccaacaccaaggagggcagcaacaucugccugaccagaaccgacagaggcugguacugcgacaacgccggcagcgugagcuucuucccccaggccgagaccugcaaggugugcagcaacagaguguucugcgacaccaugaacagccugacccugcccagcgaggugaaccugugcaacguggacaucuucaaccccaaguacgacugcaagaucaugaccagcaagaccgacgugagcagcagcgugaucaccagccugggcgccaucgugagcugcuacggcaagaccaagugcaccgccagcaacaagaacaagggcaucaucaagaccuucagcaacggcugcgacuacgugagcaacaagggcguggacaccgugagcgugggcaacacccuguacuacgugaacaagcaggagggccagagccuguacgugaagggcgagcccaucaucaacuucuacgacccccugguguuccccagcgacgaguucgacgccagcaucagccaggugaacgagaagaucaaccagagccuggccuucaucagaaagagcgacgagcugcugcacaacgugaacgccggcaagagcaccaccaacaucaugaucaccaccaucaucaucgugaucaucgugauccugcugagccugaucgccgugggccugcugcuguacugcaaggccagaagcacccccgugacccugagcaaggaccagcugagcggcaucaacaacaucgccuucagcaacugaggacuaguguccaccugucccuccugggcugcuggauugucucguuuuccugccaaauaaacaggaucagcgcuuuacagaucuaaaaaaaaaaaaaaaaaaaaaaaaaaaaaaaaaaaaaaaaaaaaaaaaaaaaaaaaaaaaaaaaugcaucccccccccccccccccccccccccccccccaaaggcucuuuucagagccaccagaauu

SEQ ID NO: 6126 - RNA, 1877 nt, Artificial Sequence
  mRNA product Design b-2 comprising derived and/or modified sequence from HRSV(A2)__F_DSCav1_mut6 (opt5)
gggagagccucugcuggaguccggggaguggcguuggcugcuagagcgaagcuuaccauggagcugcucauccugaaggccaacgcuauuaccacaauccuuacggccgugaccuucugcuuugcgagcggccagaauauuacagaagaguucuaccaauccaccuguucugcugucagcaaaggguaucugggagcccucagaacaggcugguacaccuccguuaucacaauugaacugucuaacaucaaggagaauaaaugcaacgggaccgacgccaaggugaaacuuaucaagcaggaacuggauaaguauaaaaaugcugugacggaccuccagaugcugauguguagcacccccgccacaggauccggcucugcuauugccagcggggucgcggugugcaagguucugcaccucgagggagaggugaacaaaaucaaguccgcccugcuuagcaccaauaaagcugucgugucucuguccaacggcguuagcgugcucacauuuaagguccuggaucuuaagaauuacauugacaaacagcugcucccuauccugaacaagcaaucuuguuccauuccgaaucccgaaaccgugauggaguuccagcagaaaaacaaucggcugcucgaaaucacgcgcgaguuuagcgugaacgccggcgucacaaccccuguuucuacauauaugcugaccaauuccgagcuucugagccucauuaacgauaugcccaucaccaacgaccagaagaaacugauguccaauaacgugcaaaucgugagacagcagucuuacagcauuaugugcaucauuaaggaagagguccuugcuuaugugguucagcugccucucuacggggugaucgauacacccuguuggaaacugcauacguccccucugugcaccacaaauaccaaggaaggaagcaacauuugucucacacggaccgaccgcggcugguacugcgauaaugccgggucugucuccuucuuuccgcaagcggagacguguaaggugugcagcaacagaguuuucugcgacacaaugaacucucugacccuucccagcgaagugaaucuguguaaugucgauaucuuuaacccuaaauaugacugcaagaucaugaccuccaaaacagaugugucuagcuccgucauuaccagccucggagccaucgugucuuguuacggcaagacaaaaugcacggcuuccaauaagaacaaggggauuaucaaaaccuucagcaauggaugugacuauguuucuaacaagggcguggacacagucuccgugggcaauacccuguacuauguuaacaaacaggaggggcagagccuuuacgugaagggagagcccauuaucaacuuuuaugauccucuggucuuccccuccgacgaauuugaugccucuaucagccaagugaaugagaaaauuaaccagucccucgcuuucauccggaagucugacgaacugcugcacaaugugaacgccggcaagagcacaaccaauauuaugaucacgaccauuaucauuguuaucaucgucauucuccugucccuuaucgccguggggcugcuccuguacugcaaagcucgcagcacaccggugacccugucuaaggaucagcuuuccggaauuaacaauaucgcguucagcaacugaggacuaguguccaccugucccuccugggcugcuggauugucucguuuuccugccaaauaaacaggaucagcgcuuuacagaucuaaaaaaaaaaaaaaaaaaaaaaaaaaaaaaaaaaaaaaaaaaaaaaaaaaaaaaaaaaaaaaaaugcaucccccccccccccccccccccccccccccccaaaggcucuuuucagagccaccagaauu

SEQ ID NO: 6127 - RNA, 1877 nt, Artificial Sequence
  mRNA product Design b-2 comprising derived and/or modified sequence from HRSV(A2)__F_DSCav1_mut6 (opt6)
gggagagccucugcuggaguccggggaguggcguuggcugcuagagcgaagcuuaccauggaacuauuaaucuuaaaagcaaaugcuauaaccacaauauuaacagcaguaacauucuguuuugccuccggacaaaacauaacagaagaauuuuaucaaucaacaugcucugcaguauccaaagguuacuuaggcgcacuacgcacuggaugguauacaucaguaauaacaauagaacuaucaaacauaaaagaaaauaaauguaacgguacugacgcaaaagugaaacuaauuaaacaagaacucgacaaauacaaaaaugcuguaacagaccuacaaaugcuaaugugcucaacacccgcaaccggaucaggaucagccauagccuccggagucgcaguaugcaaaguauuacaucuugaaggagaaguaaauaaaauaaaaucagcauuacuauccacaaauaaagccguaguaucacuaucaaacgguguauccguccuuacauucaaaguauuagaucuaaaaaacuacauagauaaacaacuacuacccaucuuaaacaaacaaucaugcucaauucccaacccagaaacagucauggaauuucaacaaaaaaacaacagacucuuagaaauaacacgagaauuuucaguaaacgcaggaguaaccacaccaguaaguacauacaugcucaccaacucagaauuauuaucacuuauuaacgacaugccaauuacaaacgaccaaaaaaaauuaaugucaaacaauguccaaauuguuagacaacaaucauacucuauaauguguauaauaaaagaagaaguacuagcuuacguaguucaauuaccacuauauggcguaauagauacaccuugcuggaaacuacauacaucuccauuauguacaacuaacacaaaagaaggaucuaacauaugccuaacacgcacagaucgaggaugguacugcgauaaugcagguuccguaucauucuuuccacaagcagaaacauguaaaguaugcucaaacagaguauucugugacacuaugaacuccuuaacccuacccucagaagucaaucuaugcaacguugacauauuuaacccaaaauacgacuguaaaaucaugacaucuaaaacagacguaucaucaucaguuauuacaucccuaggagcaauaguaucuugcuacggaaaaacaaaauguacagcauccaacaaaaacaaaggaauaaucaaaacauucucaaacggcugcgacuacguaucaaacaaagguguagacacaguaucaguaggaaauacuuuauauuacguaaauaaacaagaaggacaaucucuauacguuaaaggcgaaccuauuauaaacuucuacgacccacucguauucccuucagacgaauuugacgcaucuauaucccaaguuaacgaaaaaaucaaccaaucauuagccuuuauaagaaaauccgacgaauuauuacauaacgucaacgcuggaaaaucaacaacuaacauaaugauaaccacaauaauaauagucaucauaguuauauuacuaagucuaauagccguaggccuccuacuuuauugcaaagcaagaucaacaccaguaacauuauccaaagaccaacucagcggcauaaacaauauagcuuuuucaaacuagggacuaguguccaccugucccuccugggcugcuggauugucucguuuuccugccaaauaaacaggaucagcgcuuuacagaucuaaaaaaaaaaaaaaaaaaaaaaaaaaaaaaaaaaaaaaaaaaaaaaaaaaaaaaaaaaaaaaaaugcaucccccccccccccccccccccccccccccccaaaggcucuuuucagagccaccagaauu

SEQ ID NO: 6128 - RNA, 1877 nt, Artificial Sequence
  mRNA product Design b-2 comprising derived and/or modified sequence from HRSV(A2)__F_DSCav1_mut6 (opt11)
gggagagccucugcuggaguccggggaguggcguuggcugcuagagcgaagcuuaccauggaacuccucauccucaaagccaacgcaaucacaaccauacuaacugcaguuacuuucugcuucgcauccggccaaaacaucaccgaagaguucuaccaaucaaccugcuccgcagucuccaaaggauaccucggagcccuucgcaccggcugguacaccuccgucauaaccaucgaacucucaaacauaaaagaaaacaaaugcaacggcacagacgcgaaagucaaacuuaucaaacaagaacucgacaaauacaaaaacgccgucaccgaccugcagaugcucaugugcucaacccccgccacaggaagcggcucugcuaucgcuuccggcgucgccgucugcaaaguccuccaccucgaaggcgaaguaaacaaaaucaagucagcccuccucuccaccaacaaagccgucgucucucucucaaacggcguauccguccucacauucaaaguccucgaccucaaaaacuacaucgacaaacaacuucuccccauccuaaacaaacaaucaugcuccauccccaaccccgaaacagucauggaauuucaacaaaagaacaaccgccucuuagaaaucacccgagaauuuuccgucaacgcgggagucacaacccccguuucuacguauaugcucaccaacuccgaacuccuuucccucauaaacgacaugccaaucaccaacgaccaaaagaaacucaugucaaacaacguccaaaucguccgacaacaauccuacucuauuaugugcaucaucaaagaagaaguucucgccuacgucguccaacuaccccucuacggcgugaucgacacccccugcuggaaacuacacaccucaccccucugcaccaccaacaccaaggaaggcuccaacaucugccucacccgcaccgaccgcggcugguacugcgacaacgcuggcuccgucucauucuucccgcaagccgaaacuugcaaaguaugcuccaacagaguauucugcgacaccaugaacucacuaacccucccuuccgaagucaaccuuugcaacguugacauauucaacccaaaguacgauugcaaaauuaugacauccaaaacagaugucuccuccuccgucaucacaucccucggugccauuguaucaugcuacggaaaaaccaaaugcaccgcauccaacaaaaacaaaggaaucaucaaaaccuucucaaacggcugcgauuacgucucaaacaaaggagucgacacagucuccgucggaaacacccuauacuacgucaacaaacaagaaggccaaucccuguacgucaaaggagaacccaucaucaacuucuacgacccccucgucuucccgagcgacgaguucgacgccuccaucucacaagucaaugaaaagaucaaccaaucccuugccuucauccggaaaucggacgaacuccuacacaacgugaacgcuggaaaaucaaccaccaacaucaugaucacaaccaucauuaucgucaucaucgucauacuccucucccuaaucgccgucggccuccuccuguauugcaaagcucgcuccacccccgucacccuguccaaagaccaacucuccggaaucaacaacaucgccuucucaaacuaaggacuaguguccaccugucccuccugggcugcuggauugucucguuuuccugccaaauaaacaggaucagcgcuuuacagaucuaaaaaaaaaaaaaaaaaaaaaaaaaaaaaaaaaaaaaaaaaaaaaaaaaaaaaaaaaaaaaaaaugcaucccccccccccccccccccccccccccccccaaaggcucuuuucagagccaccagaauu

SEQ ID NO: 6129 - RNA, 1897 nt, Artificial Sequence
  mRNA product Design b-3 comprising derived and/or modified sequence from HRSV(A2)__F_DSCav1_mut6 (opt1)
gggagagucccgcagucggcguccagcggcucugcuuguucgugugugugucguugcaggccuuauucaagcuuaccauggagcugcucauccugaaggccaacgccaucaccaccauccugacggcggugaccuucugcuucgccagcggccagaacaucaccgaggaguucuaccaguccacgugcagcgccgucuccaagggguaccucggcgcccugcggaccggcugguacaccuccgugaucaccaucgagcugagcaacaucaaggagaacaagugcaacgggaccgacgccaaggugaagcucaucaagcaggagcuggacaaguacaagaacgcggucacggaccugcagaugcugaugugcuccaccccggcaaccggcuccggcuccgccaucgcgagcggcgucgccgugugcaaggugcugcaccucgagggggaggucaacaagaucaagagcgcccugcuguccaccaacaaggccguggugagccucuccaacggcgucagcgugcugaccuucaaggugcuggaccucaagaacuacaucgacaagcagcugcugcccauccugaacaagcagagcugcuccauccccaaccccgagacggugauggaguuccagcagaagaacaaccggcuccuggagaucacccgcgaguucagcgugaacgccggggucaccacccccguguccacguacaugcugaccaacagcgagcuccugucccugaucaacgacaugccgaucaccaacgaccagaagaagcucaugagcaacaacgugcagaucguccggcagcaguccuacagcaucaugugcaucaucaaggaggaggugcuggcguacgugguccagcugccccucuacggcgugaucgacacccccugcuggaagcugcacacgagcccccugugcaccaccaacaccaaggagggguccaacaucugccucacgcgcaccgaccggggcugguacugcgacaacgccggcagcgucuccuucuucccgcaggccgagaccugcaaggugugcagcaaccgcguguucugcgacaccaugaacucccugacgcugcccagcgagguaaaccucugcaacgucgacaucuucaaccccaaguacgacugcaagaucaugaccuccaagaccgacgugagcuccagcgugaucaccucccugggggccaucgucagcugcuacggcaagacgaagugcaccgccagcaacaagaacaaggggaucaucaagaccuucuccaacggcugcgacuacgugagcaacaagggcguggacaccguguccgucgggaacacccuguacuacgugaacaagcaggagggccagagccucuacgugaagggggagcccaucaucaacuucuacgacccgcuggucuuccccuccgacgaguucgacgcgagcaucucccaggugaacgagaagaucaaccagagccuggccuucauccgcaaguccgacgagcugcuccacaacgugaacgccggcaagagcacgaccaacaucaugaucaccaccaucaucaucgucaucaucgugauccugcugucccucaucgccguggggcugcugcucuacugcaaggcccggagcacgcccgucacccuguccaaggaccagcugagcggcaucaacaacaucgcguucuccaacugaggacuaguguccaccugucccuccugggcugcuggauugucucguuuuccugccaaauaaacaggaucagcgcuuuacagaucuaaaaaaaaaaaaaaaaaaaaaaaaaaaaaaaaaaaaaaaaaaaaaaaaaaaaaaaaaaaaaaaaugcaucccccccccccccccccccccccccccccccaaaggcucuuuucagagccaccagaauu

SEQ ID NO: 6130 - RNA, 1897 nt, Artificial Sequence
  mRNA product Design b-3 comprising derived and/or modified sequence from HRSV(A2)__F_DSCav1_mut6 (opt1)
gggagagucccgcagucggcguccagcggcucugcuuguucgugugugugucguugcaggccuuauucaagcuuaccauggagcugcucauccugaaggccaacgccaucaccaccauccugacggcggugaccuucugcuucgccagcggccagaacaucaccgaggaguucuaccaguccacgugcagcgccgucuccaagggguaccucggcgcccugcgcaccgggugguacaccagcgugaucaccaucgagcuguccaacaucaaggagaacaagugcaacggcaccgacgccaaggugaagcucaucaagcaggagcuggacaaguacaagaacgcggucacggaccugcagaugcucaugugcagcacccccgccaccggguccggcagcgccaucgccuccggcguggcggugugcaagguccugcaccuggagggggaggugaacaagaucaagagcgcccuccuguccaccaacaaggccguggucagccuguccaacggcgugagcgugcucacguucaagguccuggaccugaagaacuacaucgacaagcagcuccugccgauccugaacaagcaguccugcagcauccccaaccccgagaccgugauggaguuccagcagaagaacaaccggcuccuggagaucacccgcgaguucuccgugaacgccggggucaccacgcccgugagcaccuacaugcugaccaacuccgagcuccugagccugaucaacgacaugccgaucaccaacgaccagaagaagcucaugagcaacaacgugcagaucguccggcagcaguccuacagcaucaugugcaucaucaaggaggaggugcuggccuacgugguccagcugccccucuacggcgugaucgacacgcccugcuggaagcugcacaccagcccccugugcaccaccaacacgaaggaggggagcaacaucugccucacccgcaccgaccggggcugguacugcgacaacgcgggcuccgugagcuucuucccgcaggccgagaccugcaaggucugcuccaaccgcguguucugcgacacgaugaacagccugacccugcccuccgaggucaaccucugcaacguggacaucuucaaccccaaguacgacugcaagaucaugaccagcaagaccgacguguccagcuccgucaucacgagccugggggccaucguguccugcuacggcaagaccaagugcaccgccagcaacaagaacaaggggaucaucaagaccuucuccaacggcugcgacuacgugagcaacaagggcgucgacacgguguccguggggaacacccuguacuacgucaacaagcaggagggccagagccucuacgugaagggggagcccaucaucaacuucuacgacccgcugguguuccccagcgacgaguucgacgccuccaucagccaggucaacgagaagaucaaccagucccuggcguucauccggaaguccgacgagcuccugcacaacgugaacgccggcaaguccaccaccaacaucaugaucaccacgaucaucaucgugaucaucgucauccugcucagccugaucgccguggggcugcuccuguacugcaaggcccgcuccacccccgugacccugagcaaggaccagcuguccggcaucaacaacaucgccuucagcaacugaggacuaguguccaccugucccuccugggcugcuggauugucucguuuuccugccaaauaaacaggaucagcgcuuuacagaucuaaaaaaaaaaaaaaaaaaaaaaaaaaaaaaaaaaaaaaaaaaaaaaaaaaaaaaaaaaaaaaaaugcaucccccccccccccccccccccccccccccccaaaggcucuuuucagagccaccagaauu

SEQ ID NO: 6131 - RNA, 1897 nt, Artificial Sequence
  mRNA product Design b-3 comprising derived and/or modified sequence from HRSV(A2)__F_DSCav1_mut6 (opt2)
gggagagucccgcagucggcguccagcggcucugcuuguucgugugugugucguugcaggccuuauucaagcuuaccauggagcuccucauccucaaggccaacgccaucaccaccauccucaccgccgucaccuucugcuucgccuccggccagaacaucaccgaggaguucuaccaguccaccugcuccgccgucuccaagggcuaccucggcgcccuccgcaccggcugguacaccuccgucaucaccaucgagcucuccaacaucaaggagaacaagugcaacggcaccgacgccaaggucaagcucaucaagcaggagcucgacaaguacaagaacgccgucaccgaccuccagaugcucaugugcuccacccccgccaccggcuccggcuccgccaucgccuccggcgucgccgucugcaagguccuccaccucgagggcgaggucaacaagaucaaguccgcccuccucuccaccaacaaggccgucgucucccucuccaacggcgucuccguccucaccuucaagguccucgaccucaagaacuacaucgacaagcagcuccuccccauccucaacaagcaguccugcuccauccccaaccccgagaccgucauggaguuccagcagaagaacaaccgccuccucgagaucacccgcgaguucuccgucaacgccggcgucaccacccccgucuccaccuacaugcucaccaacuccgagcuccucucccucaucaacgacaugcccaucaccaacgaccagaagaagcucauguccaacaacguccagaucguccgccagcaguccuacuccaucaugugcaucaucaaggaggagguccucgccuacgucguccagcucccccucuacggcgucaucgacacccccugcuggaagcuccacaccuccccccucugcaccaccaacaccaaggagggcuccaacaucugccucacccgcaccgaccgcggcugguacugcgacaacgccggcuccgucuccuucuucccccaggccgagaccugcaaggucugcuccaaccgcgucuucugcgacaccaugaacucccucacccuccccuccgaggucaaccucugcaacgucgacaucuucaaccccaaguacgacugcaagaucaugaccuccaagaccgacgucuccuccuccgucaucaccucccucggcgccaucgucuccugcuacggcaagaccaagugcaccgccuccaacaagaacaagggcaucaucaagaccuucuccaacggcugcgacuacgucuccaacaagggcgucgacaccgucuccgucggcaacacccucuacuacgucaacaagcaggagggccagucccucuacgucaagggcgagcccaucaucaacuucuacgacccccucgucuuccccuccgacgaguucgacgccuccaucucccaggucaacgagaagaucaaccagucccucgccuucauccgcaaguccgacgagcuccuccacaacgucaacgccggcaaguccaccaccaacaucaugaucaccaccaucaucaucgucaucaucgucauccuccucucccucaucgccgucggccuccuccucuacugcaaggcccgcuccacccccgucacccucuccaaggaccagcucuccggcaucaacaacaucgccuucuccaacugaggacuaguguccaccugucccuccugggcugcuggauugucucguuuuccugccaaauaaacaggaucagcgcuuuacagaucuaaaaaaaaaaaaaaaaaaaaaaaaaaaaaaaaaaaaaaaaaaaaaaaaaaaaaaaaaaaaaaaaugcaucccccccccccccccccccccccccccccccaaaggcucuuuucagagccaccagaauu

SEQ ID NO: 6132 - RNA, 1897 nt, Artificial Sequence
  mRNA product Design b-3 comprising derived and/or modified sequence from HRSV(A2)__F_DSCav1_mut6 (opt3)
gggagagucccgcagucggcguccagcggcucugcuuguucgugugugugucguugcaggccuuauucaagcuuaccauggagcugcucauccuuaaggccaacgcuauuaccacaauacugacugcagugacguucugcuuugccagcggccagaauaucaccgaagaguucuaccaauccacauguucugcggucucaaaaggguauuugggagcuuuaagaacugguugguacaccaguguuauuacaaucgaacugagcaacauuaaggagaauaaaugcaacggcaccgacgccaaggugaaacuaaucaagcaggaacucgauaaguauaaaaaugcaguaacugaccugcagaugcuuauguguuccacacccgccaccgggucuggaucggcuauagcaucaggcguggccgucugcaaggugcugcacuuggagggugagguuaacaaaaucaagagcgcucuccugaguacgaauaaagccguggucucccugucuaacggggugagcguacucacuuuuaagguuuuagaucugaagaauuacauugacaaacagcuuuugccuauccugaacaagcaauccuguucaauuccaaauccggaaaccgugauggaguuccagcagaaaaacaauaggcuacucgaaaucacacgggaguuuagugucaacgcgggagugacuacccccgugagcacauauaugcugaccaauucugagcuucuguccuugauaaacgauaugccuauuacgaacgaccagaagaaacucaugucaaauaacguccaaaucguucgccagcagagcuacaguauuaugugcaucaucaaggaagaggugcuggcauauguagugcaguuaccacuguacggcgucauugauacucccuguuggaaacuccauacaucuccucuuugcaccacuaauacaaaggaaggcuccaacauaugucugacccgaacggaccgugggugguacugcgauaaugccggaagcgugucguucuuuccacaagcugagaccuguaagguuugcucuaacagaguguucugcgacacaaugaacuccuugacucuacccucagaagucaaucuguguaauguggauaucuuuaacccuaaauaugacugcaagauuaugaccaguaaaacagauguaagcuccucuguuaucacuagccucggugccauagugucauguuacggcaagaccaaaugcacagcaaguaauaagaacaaggggauuaucaaaaccuucuccaauggaugugacuaugucagcaacaagggcguggacacugucucuguggguaauacgcuguacuauguuaacaaacaggaggggcagucacuuuacgugaagggagagccaaucauuaacuuuuaugauccgcugguauuccccagugacgaauuugaugcuagcaucucccaagucaaugagaaaauuaaccagucuuuggccuucauaaggaagucggacgaacuccugcacaaugugaacgcgggcaagagcacaaccaauaucaugauuacuaccaucaucauuguuauaaucgugauuuuacugucccuaaucgccgucggccuccugcuuuacugcaaagcacggucaacaccugugaccuugaguaaggaucagcugucugggauuaacaauaucgcuuucagcaacugaggacuaguguccaccugucccuccugggcugcuggauugucucguuuuccugccaaauaaacaggaucagcgcuuuacagaucuaaaaaaaaaaaaaaaaaaaaaaaaaaaaaaaaaaaaaaaaaaaaaaaaaaaaaaaaaaaaaaaaugcaucccccccccccccccccccccccccccccccaaaggcucuuuucagagccaccagaauu

SEQ ID NO: 6133 - RNA, 1897 nt, Artificial Sequence
  mRNA product Design b-3 comprising derived and/or modified sequence from HRSV(A2)__F_DSCav1_mut6 (opt4)
gggagagucccgcagucggcguccagcggcucugcuuguucgugugugugucguugcaggccuuauucaagcuuaccauggagcugcugauccugaaggccaacgccaucaccaccauccugaccgccgugaccuucugcuucgccagcggccagaacaucaccgaggaguucuaccagagcaccugcagcgccgugagcaagggcuaccugggcgcccugagaaccggcugguacaccagcgugaucaccaucgagcugagcaacaucaaggagaacaagugcaacggcaccgacgccaaggugaagcugaucaagcaggagcuggacaaguacaagaacgccgugaccgaccugcagaugcugaugugcagcacccccgccaccggcagcggcagcgccaucgccagcggcguggccgugugcaaggugcugcaccuggagggcgaggugaacaagaucaagagcgcccugcugagcaccaacaaggccguggugagccugagcaacggcgugagcgugcugaccuucaaggugcuggaccugaagaacuacaucgacaagcagcugcugcccauccugaacaagcagagcugcagcauccccaaccccgagaccgugauggaguuccagcagaagaacaacagacugcuggagaucaccagagaguucagcgugaacgccggcgugaccacccccgugagcaccuacaugcugaccaacagcgagcugcugagccugaucaacgacaugcccaucaccaacgaccagaagaagcugaugagcaacaacgugcagaucgugagacagcagagcuacagcaucaugugcaucaucaaggaggaggugcuggccuacguggugcagcugccccuguacggcgugaucgacacccccugcuggaagcugcacaccagcccccugugcaccaccaacaccaaggagggcagcaacaucugccugaccagaaccgacagaggcugguacugcgacaacgccggcagcgugagcuucuucccccaggccgagaccugcaaggugugcagcaacagaguguucugcgacaccaugaacagccugacccugcccagcgaggugaaccugugcaacguggacaucuucaaccccaaguacgacugcaagaucaugaccagcaagaccgacgugagcagcagcgugaucaccagccugggcgccaucgugagcugcuacggcaagaccaagugcaccgccagcaacaagaacaagggcaucaucaagaccuucagcaacggcugcgacuacgugagcaacaagggcguggacaccgugagcgugggcaacacccuguacuacgugaacaagcaggagggccagagccuguacgugaagggcgagcccaucaucaacuucuacgacccccugguguuccccagcgacgaguucgacgccagcaucagccaggugaacgagaagaucaaccagagccuggccuucaucagaaagagcgacgagcugcugcacaacgugaacgccggcaagagcaccaccaacaucaugaucaccaccaucaucaucgugaucaucgugauccugcugagccugaucgccgugggccugcugcuguacugcaaggccagaagcacccccgugacccugagcaaggaccagcugagcggcaucaacaacaucgccuucagcaacugaggacuaguguccaccugucccuccugggcugcuggauugucucguuuuccugccaaauaaacaggaucagcgcuuuacagaucuaaaaaaaaaaaaaaaaaaaaaaaaaaaaaaaaaaaaaaaaaaaaaaaaaaaaaaaaaaaaaaaaugcaucccccccccccccccccccccccccccccccaaaggcucuuuucagagccaccagaauu

SEQ ID NO: 6134 - RNA, 1897 nt, Artificial Sequence
  mRNA product Design b-3 comprising derived and/or modified sequence from HRSV(A2)__F_DSCav1_mut6 (opt5)
gggagagucccgcagucggcguccagcggcucugcuuguucgugugugugucguugcaggccuuauucaagcuuaccauggagcugcucauccugaaggccaacgcuauuaccacaauccuuacggccgugaccuucugcuuugcgagcggccagaauauuacagaagaguucuaccaauccaccuguucugcugucagcaaaggguaucugggagcccucagaacaggcugguacaccuccguuaucacaauugaacugucuaacaucaaggagaauaaaugcaacgggaccgacgccaaggugaaacuuaucaagcaggaacuggauaaguauaaaaaugcugugacggaccuccagaugcugauguguagcacccccgccacaggauccggcucugcuauugccagcggggucgcggugugcaagguucugcaccucgagggagaggugaacaaaaucaaguccgcccugcuuagcaccaauaaagcugucgugucucuguccaacggcguuagcgugcucacauuuaagguccuggaucuuaagaauuacauugacaaacagcugcucccuauccugaacaagcaaucuuguuccauuccgaaucccgaaaccgugauggaguuccagcagaaaaacaaucggcugcucgaaaucacgcgcgaguuuagcgugaacgccggcgucacaaccccuguuucuacauauaugcugaccaauuccgagcuucugagccucauuaacgauaugcccaucaccaacgaccagaagaaacugauguccaauaacgugcaaaucgugagacagcagucuuacagcauuaugugcaucauuaaggaagagguccuugcuuaugugguucagcugccucucuacggggugaucgauacacccuguuggaaacugcauacguccccucugugcaccacaaauaccaaggaaggaagcaacauuugucucacacggaccgaccgcggcugguacugcgauaaugccgggucugucuccuucuuuccgcaagcggagacguguaaggugugcagcaacagaguuuucugcgacacaaugaacucucugacccuucccagcgaagugaaucuguguaaugucgauaucuuuaacccuaaauaugacugcaagaucaugaccuccaaaacagaugugucuagcuccgucauuaccagccucggagccaucgugucuuguuacggcaagacaaaaugcacggcuuccaauaagaacaaggggauuaucaaaaccuucagcaauggaugugacuauguuucuaacaagggcguggacacagucuccgugggcaauacccuguacuauguuaacaaacaggaggggcagagccuuuacgugaagggagagcccauuaucaacuuuuaugauccucuggucuuccccuccgacgaauuugaugccucuaucagccaagugaaugagaaaauuaaccagucccucgcuuucauccggaagucugacgaacugcugcacaaugugaacgccggcaagagcacaaccaauauuaugaucacgaccauuaucauuguuaucaucgucauucuccugucccuuaucgccguggggcugcuccuguacugcaaagcucgcagcacaccggugacccugucuaaggaucagcuuuccggaauuaacaauaucgcguucagcaacugaggacuaguguccaccugucccuccugggcugcuggauugucucguuuuccugccaaauaaacaggaucagcgcuuuacagaucuaaaaaaaaaaaaaaaaaaaaaaaaaaaaaaaaaaaaaaaaaaaaaaaaaaaaaaaaaaaaaaaaugcaucccccccccccccccccccccccccccccccaaaggcucuuuucagagccaccagaauu

SEQ ID NO: 6135 - RNA, 1897 nt, Artificial Sequence
  mRNA product Design b-3 comprising derived and/or modified sequence from HRSV(A2)__F_DSCav1_mut6 (opt6)
gggagagucccgcagucggcguccagcggcucugcuuguucgugugugugucguugcaggccuuauucaagcuuaccauggaacuauuaaucuuaaaagcaaaugcuauaaccacaauauuaacagcaguaacauucuguuuugccuccggacaaaacauaacagaagaauuuuaucaaucaacaugcucugcaguauccaaagguuacuuaggcgcacuacgcacuggaugguauacaucaguaauaacaauagaacuaucaaacauaaaagaaaauaaauguaacgguacugacgcaaaagugaaacuaauuaaacaagaacucgacaaauacaaaaaugcuguaacagaccuacaaaugcuaaugugcucaacacccgcaaccggaucaggaucagccauagccuccggagucgcaguaugcaaaguauuacaucuugaaggagaaguaaauaaaauaaaaucagcauuacuauccacaaauaaagccguaguaucacuaucaaacgguguauccguccuuacauucaaaguauuagaucuaaaaaacuacauagauaaacaacuacuacccaucuuaaacaaacaaucaugcucaauucccaacccagaaacagucauggaauuucaacaaaaaaacaacagacucuuagaaauaacacgagaauuuucaguaaacgcaggaguaaccacaccaguaaguacauacaugcucaccaacucagaauuauuaucacuuauuaacgacaugccaauuacaaacgaccaaaaaaaauuaaugucaaacaauguccaaauuguuagacaacaaucauacucuauaauguguauaauaaaagaagaaguacuagcuuacguaguucaauuaccacuauauggcguaauagauacaccuugcuggaaacuacauacaucuccauuauguacaacuaacacaaaagaaggaucuaacauaugccuaacacgcacagaucgaggaugguacugcgauaaugcagguuccguaucauucuuuccacaagcagaaacauguaaaguaugcucaaacagaguauucugugacacuaugaacuccuuaacccuacccucagaagucaaucuaugcaacguugacauauuuaacccaaaauacgacuguaaaaucaugacaucuaaaacagacguaucaucaucaguuauuacaucccuaggagcaauaguaucuugcuacggaaaaacaaaauguacagcauccaacaaaaacaaaggaauaaucaaaacauucucaaacggcugcgacuacguaucaaacaaagguguagacacaguaucaguaggaaauacuuuauauuacguaaauaaacaagaaggacaaucucuauacguuaaaggcgaaccuauuauaaacuucuacgacccacucguauucccuucagacgaauuugacgcaucuauaucccaaguuaacgaaaaaaucaaccaaucauuagccuuuauaagaaaauccgacgaauuauuacauaacgucaacgcuggaaaaucaacaacuaacauaaugauaaccacaauaauaauagucaucauaguuauauuacuaagucuaauagccguaggccuccuacuuuauugcaaagcaagaucaacaccaguaacauuauccaaagaccaacucagcggcauaaacaauauagcuuuuucaaacuagggacuaguguccaccugucccuccugggcugcuggauugucucguuuuccugccaaauaaacaggaucagcgcuuuacagaucuaaaaaaaaaaaaaaaaaaaaaaaaaaaaaaaaaaaaaaaaaaaaaaaaaaaaaaaaaaaaaaaaugcaucccccccccccccccccccccccccccccccaaaggcucuuuucagagccaccagaauu

SEQ ID NO: 6136 - RNA, 1897 nt, Artificial Sequence
  mRNA product Design b-3 comprising derived and/or modified sequence from HRSV(A2)__F_DSCav1_mut6 (opt11)
gggagagucccgcagucggcguccagcggcucugcuuguucgugugugugucguugcaggccuuauucaagcuuaccauggaacuccucauccucaaagccaacgcaaucacaaccauacuaacugcaguuacuuucugcuucgcauccggccaaaacaucaccgaagaguucuaccaaucaaccugcuccgcagucuccaaaggauaccucggagcccuucgcaccggcugguacaccuccgucauaaccaucgaacucucaaacauaaaagaaaacaaaugcaacggcacagacgcgaaagucaaacuuaucaaacaagaacucgacaaauacaaaaacgccgucaccgaccugcagaugcucaugugcucaacccccgccacaggaagcggcucugcuaucgcuuccggcgucgccgucugcaaaguccuccaccucgaaggcgaaguaaacaaaaucaagucagcccuccucuccaccaacaaagccgucgucucucucucaaacggcguauccguccucacauucaaaguccucgaccucaaaaacuacaucgacaaacaacuucuccccauccuaaacaaacaaucaugcuccauccccaaccccgaaacagucauggaauuucaacaaaagaacaaccgccucuuagaaaucacccgagaauuuuccgucaacgcgggagucacaacccccguuucuacguauaugcucaccaacuccgaacuccuuucccucauaaacgacaugccaaucaccaacgaccaaaagaaacucaugucaaacaacguccaaaucguccgacaacaauccuacucuauuaugugcaucaucaaagaagaaguucucgccuacgucguccaacuaccccucuacggcgugaucgacacccccugcuggaaacuacacaccucaccccucugcaccaccaacaccaaggaaggcuccaacaucugccucacccgcaccgaccgcggcugguacugcgacaacgcuggcuccgucucauucuucccgcaagccgaaacuugcaaaguaugcuccaacagaguauucugcgacaccaugaacucacuaacccucccuuccgaagucaaccuuugcaacguugacauauucaacccaaaguacgauugcaaaauuaugacauccaaaacagaugucuccuccuccgucaucacaucccucggugccauuguaucaugcuacggaaaaaccaaaugcaccgcauccaacaaaaacaaaggaaucaucaaaaccuucucaaacggcugcgauuacgucucaaacaaaggagucgacacagucuccgucggaaacacccuauacuacgucaacaaacaagaaggccaaucccuguacgucaaaggagaacccaucaucaacuucuacgacccccucgucuucccgagcgacgaguucgacgccuccaucucacaagucaaugaaaagaucaaccaaucccuugccuucauccggaaaucggacgaacuccuacacaacgugaacgcuggaaaaucaaccaccaacaucaugaucacaaccaucauuaucgucaucaucgucauacuccucucccuaaucgccgucggccuccuccuguauugcaaagcucgcuccacccccgucacccuguccaaagaccaacucuccggaaucaacaacaucgccuucucaaacuaaggacuaguguccaccugucccuccugggcugcuggauugucucguuuuccugccaaauaaacaggaucagcgcuuuacagaucuaaaaaaaaaaaaaaaaaaaaaaaaaaaaaaaaaaaaaaaaaaaaaaaaaaaaaaaaaaaaaaaaugcaucccccccccccccccccccccccccccccccaaaggcucuuuucagagccaccagaauu

SEQ ID NO: 6137 - RNA, 1948 nt, Artificial Sequence
  mRNA product Design b-4 comprising derived and/or modified sequence from HRSV(A2)__F_DSCav1_mut6 (opt1)
gggagagucccgcagucggcguccagcggcucugcuuguucgugugugugucguugcaggccuuauucaagcuuaccauggagcugcucauccugaaggccaacgccaucaccaccauccugacggcggugaccuucugcuucgccagcggccagaacaucaccgaggaguucuaccaguccacgugcagcgccgucuccaagggguaccucggcgcccugcggaccggcugguacaccuccgugaucaccaucgagcugagcaacaucaaggagaacaagugcaacgggaccgacgccaaggugaagcucaucaagcaggagcuggacaaguacaagaacgcggucacggaccugcagaugcugaugugcuccaccccggcaaccggcuccggcuccgccaucgcgagcggcgucgccgugugcaaggugcugcaccucgagggggaggucaacaagaucaagagcgcccugcuguccaccaacaaggccguggugagccucuccaacggcgucagcgugcugaccuucaaggugcuggaccucaagaacuacaucgacaagcagcugcugcccauccugaacaagcagagcugcuccauccccaaccccgagacggugauggaguuccagcagaagaacaaccggcuccuggagaucacccgcgaguucagcgugaacgccggggucaccacccccguguccacguacaugcugaccaacagcgagcuccugucccugaucaacgacaugccgaucaccaacgaccagaagaagcucaugagcaacaacgugcagaucguccggcagcaguccuacagcaucaugugcaucaucaaggaggaggugcuggcguacgugguccagcugccccucuacggcgugaucgacacccccugcuggaagcugcacacgagcccccugugcaccaccaacaccaaggagggguccaacaucugccucacgcgcaccgaccggggcugguacugcgacaacgccggcagcgucuccuucuucccgcaggccgagaccugcaaggugugcagcaaccgcguguucugcgacaccaugaacucccugacgcugcccagcgagguaaaccucugcaacgucgacaucuucaaccccaaguacgacugcaagaucaugaccuccaagaccgacgugagcuccagcgugaucaccucccugggggccaucgucagcugcuacggcaagacgaagugcaccgccagcaacaagaacaaggggaucaucaagaccuucuccaacggcugcgacuacgugagcaacaagggcguggacaccguguccgucgggaacacccuguacuacgugaacaagcaggagggccagagccucuacgugaagggggagcccaucaucaacuucuacgacccgcuggucuuccccuccgacgaguucgacgcgagcaucucccaggugaacgagaagaucaaccagagccuggccuucauccgcaaguccgacgagcugcuccacaacgugaacgccggcaagagcacgaccaacaucaugaucaccaccaucaucaucgucaucaucgugauccugcugucccucaucgccguggggcugcugcucuacugcaaggcccggagcacgcccgucacccuguccaaggaccagcugagcggcaucaacaacaucgcguucuccaacugaggacuaguaauaaggaaacuguaugaaugucugugggcaggaagugaagagauccuucuguaaagguuuuuggaauuaugucugcugaauaauaaacuuuuuugaaauaauaaaucugguagaaaaaugagaucuaaaaaaaaaaaaaaaaaaaaaaaaaaaaaaaaaaaaaaaaaaaaaaaaaaaaaaaaaaaaaaaaugcaucccccccccccccccccccccccccccccccaaaggcucuuuucagagccaccagaauu

SEQ ID NO: 6138 - RNA, 1948 nt, Artificial Sequence
  mRNA product Design b-4 comprising derived and/or modified sequence from HRSV(A2)__F_DSCav1_mut6 (opt1)
gggagagucccgcagucggcguccagcggcucugcuuguucgugugugugucguugcaggccuuauucaagcuuaccauggagcugcucauccugaaggccaacgccaucaccaccauccugacggcggugaccuucugcuucgccagcggccagaacaucaccgaggaguucuaccaguccacgugcagcgccgucuccaagggguaccucggcgcccugcgcaccgggugguacaccagcgugaucaccaucgagcuguccaacaucaaggagaacaagugcaacggcaccgacgccaaggugaagcucaucaagcaggagcuggacaaguacaagaacgcggucacggaccugcagaugcucaugugcagcacccccgccaccggguccggcagcgccaucgccuccggcguggcggugugcaagguccugcaccuggagggggaggugaacaagaucaagagcgcccuccuguccaccaacaaggccguggucagccuguccaacggcgugagcgugcucacguucaagguccuggaccugaagaacuacaucgacaagcagcuccugccgauccugaacaagcaguccugcagcauccccaaccccgagaccgugauggaguuccagcagaagaacaaccggcuccuggagaucacccgcgaguucuccgugaacgccggggucaccacgcccgugagcaccuacaugcugaccaacuccgagcuccugagccugaucaacgacaugccgaucaccaacgaccagaagaagcucaugagcaacaacgugcagaucguccggcagcaguccuacagcaucaugugcaucaucaaggaggaggugcuggccuacgugguccagcugccccucuacggcgugaucgacacgcccugcuggaagcugcacaccagcccccugugcaccaccaacacgaaggaggggagcaacaucugccucacccgcaccgaccggggcugguacugcgacaacgcgggcuccgugagcuucuucccgcaggccgagaccugcaaggucugcuccaaccgcguguucugcgacacgaugaacagccugacccugcccuccgaggucaaccucugcaacguggacaucuucaaccccaaguacgacugcaagaucaugaccagcaagaccgacguguccagcuccgucaucacgagccugggggccaucguguccugcuacggcaagaccaagugcaccgccagcaacaagaacaaggggaucaucaagaccuucuccaacggcugcgacuacgugagcaacaagggcgucgacacgguguccguggggaacacccuguacuacgucaacaagcaggagggccagagccucuacgugaagggggagcccaucaucaacuucuacgacccgcugguguuccccagcgacgaguucgacgccuccaucagccaggucaacgagaagaucaaccagucccuggcguucauccggaaguccgacgagcuccugcacaacgugaacgccggcaaguccaccaccaacaucaugaucaccacgaucaucaucgugaucaucgucauccugcucagccugaucgccguggggcugcuccuguacugcaaggcccgcuccacccccgugacccugagcaaggaccagcuguccggcaucaacaacaucgccuucagcaacugaggacuaguaauaaggaaacuguaugaaugucugugggcaggaagugaagagauccuucuguaaagguuuuuggaauuaugucugcugaauaauaaacuuuuuugaaauaauaaaucugguagaaaaaugagaucuaaaaaaaaaaaaaaaaaaaaaaaaaaaaaaaaaaaaaaaaaaaaaaaaaaaaaaaaaaaaaaaaugcaucccccccccccccccccccccccccccccccaaaggcucuuuucagagccaccagaauu

SEQ ID NO: 6139 - RNA, 1948 nt, Artificial Sequence
  mRNA product Design b-4 comprising derived and/or modified sequence from HRSV(A2)__F_DSCav1_mut6 (opt2)
gggagagucccgcagucggcguccagcggcucugcuuguucgugugugugucguugcaggccuuauucaagcuuaccauggagcuccucauccucaaggccaacgccaucaccaccauccucaccgccgucaccuucugcuucgccuccggccagaacaucaccgaggaguucuaccaguccaccugcuccgccgucuccaagggcuaccucggcgcccuccgcaccggcugguacaccuccgucaucaccaucgagcucuccaacaucaaggagaacaagugcaacggcaccgacgccaaggucaagcucaucaagcaggagcucgacaaguacaagaacgccgucaccgaccuccagaugcucaugugcuccacccccgccaccggcuccggcuccgccaucgccuccggcgucgccgucugcaagguccuccaccucgagggcgaggucaacaagaucaaguccgcccuccucuccaccaacaaggccgucgucucccucuccaacggcgucuccguccucaccuucaagguccucgaccucaagaacuacaucgacaagcagcuccuccccauccucaacaagcaguccugcuccauccccaaccccgagaccgucauggaguuccagcagaagaacaaccgccuccucgagaucacccgcgaguucuccgucaacgccggcgucaccacccccgucuccaccuacaugcucaccaacuccgagcuccucucccucaucaacgacaugcccaucaccaacgaccagaagaagcucauguccaacaacguccagaucguccgccagcaguccuacuccaucaugugcaucaucaaggaggagguccucgccuacgucguccagcucccccucuacggcgucaucgacacccccugcuggaagcuccacaccuccccccucugcaccaccaacaccaaggagggcuccaacaucugccucacccgcaccgaccgcggcugguacugcgacaacgccggcuccgucuccuucuucccccaggccgagaccugcaaggucugcuccaaccgcgucuucugcgacaccaugaacucccucacccuccccuccgaggucaaccucugcaacgucgacaucuucaaccccaaguacgacugcaagaucaugaccuccaagaccgacgucuccuccuccgucaucaccucccucggcgccaucgucuccugcuacggcaagaccaagugcaccgccuccaacaagaacaagggcaucaucaagaccuucuccaacggcugcgacuacgucuccaacaagggcgucgacaccgucuccgucggcaacacccucuacuacgucaacaagcaggagggccagucccucuacgucaagggcgagcccaucaucaacuucuacgacccccucgucuuccccuccgacgaguucgacgccuccaucucccaggucaacgagaagaucaaccagucccucgccuucauccgcaaguccgacgagcuccuccacaacgucaacgccggcaaguccaccaccaacaucaugaucaccaccaucaucaucgucaucaucgucauccuccucucccucaucgccgucggccuccuccucuacugcaaggcccgcuccacccccgucacccucuccaaggaccagcucuccggcaucaacaacaucgccuucuccaacugaggacuaguaauaaggaaacuguaugaaugucugugggcaggaagugaagagauccuucuguaaagguuuuuggaauuaugucugcugaauaauaaacuuuuuugaaauaauaaaucugguagaaaaaugagaucuaaaaaaaaaaaaaaaaaaaaaaaaaaaaaaaaaaaaaaaaaaaaaaaaaaaaaaaaaaaaaaaaugcaucccccccccccccccccccccccccccccccaaaggcucuuuucagagccaccagaauu

SEQ ID NO: 6140 - RNA, 1948 nt, Artificial Sequence
  mRNA product Design b-4 comprising derived and/or modified sequence from HRSV(A2)__F_DSCav1_mut6 (opt3)
gggagagucccgcagucggcguccagcggcucugcuuguucgugugugugucguugcaggccuuauucaagcuuaccauggagcugcucauccuuaaggccaacgcuauuaccacaauacugacugcagugacguucugcuuugccagcggccagaauaucaccgaagaguucuaccaauccacauguucugcggucucaaaaggguauuugggagcuuuaagaacugguugguacaccaguguuauuacaaucgaacugagcaacauuaaggagaauaaaugcaacggcaccgacgccaaggugaaacuaaucaagcaggaacucgauaaguauaaaaaugcaguaacugaccugcagaugcuuauguguuccacacccgccaccgggucuggaucggcuauagcaucaggcguggccgucugcaaggugcugcacuuggagggugagguuaacaaaaucaagagcgcucuccugaguacgaauaaagccguggucucccugucuaacggggugagcguacucacuuuuaagguuuuagaucugaagaauuacauugacaaacagcuuuugccuauccugaacaagcaauccuguucaauuccaaauccggaaaccgugauggaguuccagcagaaaaacaauaggcuacucgaaaucacacgggaguuuagugucaacgcgggagugacuacccccgugagcacauauaugcugaccaauucugagcuucuguccuugauaaacgauaugccuauuacgaacgaccagaagaaacucaugucaaauaacguccaaaucguucgccagcagagcuacaguauuaugugcaucaucaaggaagaggugcuggcauauguagugcaguuaccacuguacggcgucauugauacucccuguuggaaacuccauacaucuccucuuugcaccacuaauacaaaggaaggcuccaacauaugucugacccgaacggaccgugggugguacugcgauaaugccggaagcgugucguucuuuccacaagcugagaccuguaagguuugcucuaacagaguguucugcgacacaaugaacuccuugacucuacccucagaagucaaucuguguaauguggauaucuuuaacccuaaauaugacugcaagauuaugaccaguaaaacagauguaagcuccucuguuaucacuagccucggugccauagugucauguuacggcaagaccaaaugcacagcaaguaauaagaacaaggggauuaucaaaaccuucuccaauggaugugacuaugucagcaacaagggcguggacacugucucuguggguaauacgcuguacuauguuaacaaacaggaggggcagucacuuuacgugaagggagagccaaucauuaacuuuuaugauccgcugguauuccccagugacgaauuugaugcuagcaucucccaagucaaugagaaaauuaaccagucuuuggccuucauaaggaagucggacgaacuccugcacaaugugaacgcgggcaagagcacaaccaauaucaugauuacuaccaucaucauuguuauaaucgugauuuuacugucccuaaucgccgucggccuccugcuuuacugcaaagcacggucaacaccugugaccuugaguaaggaucagcugucugggauuaacaauaucgcuuucagcaacugaggacuaguaauaaggaaacuguaugaaugucugugggcaggaagugaagagauccuucuguaaagguuuuuggaauuaugucugcugaauaauaaacuuuuuugaaauaauaaaucugguagaaaaaugagaucuaaaaaaaaaaaaaaaaaaaaaaaaaaaaaaaaaaaaaaaaaaaaaaaaaaaaaaaaaaaaaaaaugcaucccccccccccccccccccccccccccccccaaaggcucuuuucagagccaccagaauu

SEQ ID NO: 6141 - RNA, 1948 nt, Artificial Sequence
  mRNA product Design b-4 comprising derived and/or modified sequence from HRSV(A2)__F_DSCav1_mut6 (opt4)
gggagagucccgcagucggcguccagcggcucugcuuguucgugugugugucguugcaggccuuauucaagcuuaccauggagcugcugauccugaaggccaacgccaucaccaccauccugaccgccgugaccuucugcuucgccagcggccagaacaucaccgaggaguucuaccagagcaccugcagcgccgugagcaagggcuaccugggcgcccugagaaccggcugguacaccagcgugaucaccaucgagcugagcaacaucaaggagaacaagugcaacggcaccgacgccaaggugaagcugaucaagcaggagcuggacaaguacaagaacgccgugaccgaccugcagaugcugaugugcagcacccccgccaccggcagcggcagcgccaucgccagcggcguggccgugugcaaggugcugcaccuggagggcgaggugaacaagaucaagagcgcccugcugagcaccaacaaggccguggugagccugagcaacggcgugagcgugcugaccuucaaggugcuggaccugaagaacuacaucgacaagcagcugcugcccauccugaacaagcagagcugcagcauccccaaccccgagaccgugauggaguuccagcagaagaacaacagacugcuggagaucaccagagaguucagcgugaacgccggcgugaccacccccgugagcaccuacaugcugaccaacagcgagcugcugagccugaucaacgacaugcccaucaccaacgaccagaagaagcugaugagcaacaacgugcagaucgugagacagcagagcuacagcaucaugugcaucaucaaggaggaggugcuggccuacguggugcagcugccccuguacggcgugaucgacacccccugcuggaagcugcacaccagcccccugugcaccaccaacaccaaggagggcagcaacaucugccugaccagaaccgacagaggcugguacugcgacaacgccggcagcgugagcuucuucccccaggccgagaccugcaaggugugcagcaacagaguguucugcgacaccaugaacagccugacccugcccagcgaggugaaccugugcaacguggacaucuucaaccccaaguacgacugcaagaucaugaccagcaagaccgacgugagcagcagcgugaucaccagccugggcgccaucgugagcugcuacggcaagaccaagugcaccgccagcaacaagaacaagggcaucaucaagaccuucagcaacggcugcgacuacgugagcaacaagggcguggacaccgugagcgugggcaacacccuguacuacgugaacaagcaggagggccagagccuguacgugaagggcgagcccaucaucaacuucuacgacccccugguguuccccagcgacgaguucgacgccagcaucagccaggugaacgagaagaucaaccagagccuggccuucaucagaaagagcgacgagcugcugcacaacgugaacgccggcaagagcaccaccaacaucaugaucaccaccaucaucaucgugaucaucgugauccugcugagccugaucgccgugggccugcugcuguacugcaaggccagaagcacccccgugacccugagcaaggaccagcugagcggcaucaacaacaucgccuucagcaacugaggacuaguaauaaggaaacuguaugaaugucugugggcaggaagugaagagauccuucuguaaagguuuuuggaauuaugucugcugaauaauaaacuuuuuugaaauaauaaaucugguagaaaaaugagaucuaaaaaaaaaaaaaaaaaaaaaaaaaaaaaaaaaaaaaaaaaaaaaaaaaaaaaaaaaaaaaaaaugcaucccccccccccccccccccccccccccccccaaaggcucuuuucagagccaccagaauu

SEQ ID NO: 6142 - RNA, 1948 nt, Artificial Sequence
  mRNA product Design b-4 comprising derived and/or modified sequence from HRSV(A2)__F_DSCav1_mut6 (opt5)
gggagagucccgcagucggcguccagcggcucugcuuguucgugugugugucguugcaggccuuauucaagcuuaccauggagcugcucauccugaaggccaacgcuauuaccacaauccuuacggccgugaccuucugcuuugcgagcggccagaauauuacagaagaguucuaccaauccaccuguucugcugucagcaaaggguaucugggagcccucagaacaggcugguacaccuccguuaucacaauugaacugucuaacaucaaggagaauaaaugcaacgggaccgacgccaaggugaaacuuaucaagcaggaacuggauaaguauaaaaaugcugugacggaccuccagaugcugauguguagcacccccgccacaggauccggcucugcuauugccagcggggucgcggugugcaagguucugcaccucgagggagaggugaacaaaaucaaguccgcccugcuuagcaccaauaaagcugucgugucucuguccaacggcguuagcgugcucacauuuaagguccuggaucuuaagaauuacauugacaaacagcugcucccuauccugaacaagcaaucuuguuccauuccgaaucccgaaaccgugauggaguuccagcagaaaaacaaucggcugcucgaaaucacgcgcgaguuuagcgugaacgccggcgucacaaccccuguuucuacauauaugcugaccaauuccgagcuucugagccucauuaacgauaugcccaucaccaacgaccagaagaaacugauguccaauaacgugcaaaucgugagacagcagucuuacagcauuaugugcaucauuaaggaagagguccuugcuuaugugguucagcugccucucuacggggugaucgauacacccuguuggaaacugcauacguccccucugugcaccacaaauaccaaggaaggaagcaacauuugucucacacggaccgaccgcggcugguacugcgauaaugccgggucugucuccuucuuuccgcaagcggagacguguaaggugugcagcaacagaguuuucugcgacacaaugaacucucugacccuucccagcgaagugaaucuguguaaugucgauaucuuuaacccuaaauaugacugcaagaucaugaccuccaaaacagaugugucuagcuccgucauuaccagccucggagccaucgugucuuguuacggcaagacaaaaugcacggcuuccaauaagaacaaggggauuaucaaaaccuucagcaauggaugugacuauguuucuaacaagggcguggacacagucuccgugggcaauacccuguacuauguuaacaaacaggaggggcagagccuuuacgugaagggagagcccauuaucaacuuuuaugauccucuggucuuccccuccgacgaauuugaugccucuaucagccaagugaaugagaaaauuaaccagucccucgcuuucauccggaagucugacgaacugcugcacaaugugaacgccggcaagagcacaaccaauauuaugaucacgaccauuaucauuguuaucaucgucauucuccugucccuuaucgccguggggcugcuccuguacugcaaagcucgcagcacaccggugacccugucuaaggaucagcuuuccggaauuaacaauaucgcguucagcaacugaggacuaguaauaaggaaacuguaugaaugucugugggcaggaagugaagagauccuucuguaaagguuuuuggaauuaugucugcugaauaauaaacuuuuuugaaauaauaaaucugguagaaaaaugagaucuaaaaaaaaaaaaaaaaaaaaaaaaaaaaaaaaaaaaaaaaaaaaaaaaaaaaaaaaaaaaaaaaugcaucccccccccccccccccccccccccccccccaaaggcucuuuucagagccaccagaauu

SEQ ID NO: 6143 - RNA, 1948 nt, Artificial Sequence
  mRNA product Design b-4 comprising derived and/or modified sequence from HRSV(A2)__F_DSCav1_mut6 (opt6)
gggagagucccgcagucggcguccagcggcucugcuuguucgugugugugucguugcaggccuuauucaagcuuaccauggaacuauuaaucuuaaaagcaaaugcuauaaccacaauauuaacagcaguaacauucuguuuugccuccggacaaaacauaacagaagaauuuuaucaaucaacaugcucugcaguauccaaagguuacuuaggcgcacuacgcacuggaugguauacaucaguaauaacaauagaacuaucaaacauaaaagaaaauaaauguaacgguacugacgcaaaagugaaacuaauuaaacaagaacucgacaaauacaaaaaugcuguaacagaccuacaaaugcuaaugugcucaacacccgcaaccggaucaggaucagccauagccuccggagucgcaguaugcaaaguauuacaucuugaaggagaaguaaauaaaauaaaaucagcauuacuauccacaaauaaagccguaguaucacuaucaaacgguguauccguccuuacauucaaaguauuagaucuaaaaaacuacauagauaaacaacuacuacccaucuuaaacaaacaaucaugcucaauucccaacccagaaacagucauggaauuucaacaaaaaaacaacagacucuuagaaauaacacgagaauuuucaguaaacgcaggaguaaccacaccaguaaguacauacaugcucaccaacucagaauuauuaucacuuauuaacgacaugccaauuacaaacgaccaaaaaaaauuaaugucaaacaauguccaaauuguuagacaacaaucauacucuauaauguguauaauaaaagaagaaguacuagcuuacguaguucaauuaccacuauauggcguaauagauacaccuugcuggaaacuacauacaucuccauuauguacaacuaacacaaaagaaggaucuaacauaugccuaacacgcacagaucgaggaugguacugcgauaaugcagguuccguaucauucuuuccacaagcagaaacauguaaaguaugcucaaacagaguauucugugacacuaugaacuccuuaacccuacccucagaagucaaucuaugcaacguugacauauuuaacccaaaauacgacuguaaaaucaugacaucuaaaacagacguaucaucaucaguuauuacaucccuaggagcaauaguaucuugcuacggaaaaacaaaauguacagcauccaacaaaaacaaaggaauaaucaaaacauucucaaacggcugcgacuacguaucaaacaaagguguagacacaguaucaguaggaaauacuuuauauuacguaaauaaacaagaaggacaaucucuauacguuaaaggcgaaccuauuauaaacuucuacgacccacucguauucccuucagacgaauuugacgcaucuauaucccaaguuaacgaaaaaaucaaccaaucauuagccuuuauaagaaaauccgacgaauuauuacauaacgucaacgcuggaaaaucaacaacuaacauaaugauaaccacaauaauaauagucaucauaguuauauuacuaagucuaauagccguaggccuccuacuuuauugcaaagcaagaucaacaccaguaacauuauccaaagaccaacucagcggcauaaacaauauagcuuuuucaaacuagggacuaguaauaaggaaacuguaugaaugucugugggcaggaagugaagagauccuucuguaaagguuuuuggaauuaugucugcugaauaauaaacuuuuuugaaauaauaaaucugguagaaaaaugagaucuaaaaaaaaaaaaaaaaaaaaaaaaaaaaaaaaaaaaaaaaaaaaaaaaaaaaaaaaaaaaaaaaugcaucccccccccccccccccccccccccccccccaaaggcucuuuucagagccaccagaauu

SEQ ID NO: 6144 - RNA, 1948 nt, Artificial Sequence
  mRNA product Design b-4 comprising derived and/or modified sequence from HRSV(A2)__F_DSCav1_mut6 (opt11)
gggagagucccgcagucggcguccagcggcucugcuuguucgugugugugucguugcaggccuuauucaagcuuaccauggaacuccucauccucaaagccaacgcaaucacaaccauacuaacugcaguuacuuucugcuucgcauccggccaaaacaucaccgaagaguucuaccaaucaaccugcuccgcagucuccaaaggauaccucggagcccuucgcaccggcugguacaccuccgucauaaccaucgaacucucaaacauaaaagaaaacaaaugcaacggcacagacgcgaaagucaaacuuaucaaacaagaacucgacaaauacaaaaacgccgucaccgaccugcagaugcucaugugcucaacccccgccacaggaagcggcucugcuaucgcuuccggcgucgccgucugcaaaguccuccaccucgaaggcgaaguaaacaaaaucaagucagcccuccucuccaccaacaaagccgucgucucucucucaaacggcguauccguccucacauucaaaguccucgaccucaaaaacuacaucgacaaacaacuucuccccauccuaaacaaacaaucaugcuccauccccaaccccgaaacagucauggaauuucaacaaaagaacaaccgccucuuagaaaucacccgagaauuuuccgucaacgcgggagucacaacccccguuucuacguauaugcucaccaacuccgaacuccuuucccucauaaacgacaugccaaucaccaacgaccaaaagaaacucaugucaaacaacguccaaaucguccgacaacaauccuacucuauuaugugcaucaucaaagaagaaguucucgccuacgucguccaacuaccccucuacggcgugaucgacacccccugcuggaaacuacacaccucaccccucugcaccaccaacaccaaggaaggcuccaacaucugccucacccgcaccgaccgcggcugguacugcgacaacgcuggcuccgucucauucuucccgcaagccgaaacuugcaaaguaugcuccaacagaguauucugcgacaccaugaacucacuaacccucccuuccgaagucaaccuuugcaacguugacauauucaacccaaaguacgauugcaaaauuaugacauccaaaacagaugucuccuccuccgucaucacaucccucggugccauuguaucaugcuacggaaaaaccaaaugcaccgcauccaacaaaaacaaaggaaucaucaaaaccuucucaaacggcugcgauuacgucucaaacaaaggagucgacacagucuccgucggaaacacccuauacuacgucaacaaacaagaaggccaaucccuguacgucaaaggagaacccaucaucaacuucuacgacccccucgucuucccgagcgacgaguucgacgccuccaucucacaagucaaugaaaagaucaaccaaucccuugccuucauccggaaaucggacgaacuccuacacaacgugaacgcuggaaaaucaaccaccaacaucaugaucacaaccaucauuaucgucaucaucgucauacuccucucccuaaucgccgucggccuccuccuguauugcaaagcucgcuccacccccgucacccuguccaaagaccaacucuccggaaucaacaacaucgccuucucaaacuaaggacuaguaauaaggaaacuguaugaaugucugugggcaggaagugaagagauccuucuguaaagguuuuuggaauuaugucugcugaauaauaaacuuuuuugaaauaauaaaucugguagaaaaaugagaucuaaaaaaaaaaaaaaaaaaaaaaaaaaaaaaaaaaaaaaaaaaaaaaaaaaaaaaaaaaaaaaaaugcaucccccccccccccccccccccccccccccccaaaggcucuuuucagagccaccagaauu

SEQ ID NO: 6145 - RNA, 2010 nt, Artificial Sequence
  mRNA product Design b-5 comprising derived and/or modified sequence from HRSV(A2)__F_DSCav1_mut6 (opt1)
gggagacuccugucgggcggaaguaggaggaguagaguuuaaaaacaguacucuuuuuccgguucgggacguaguugaagcaacgacaagccggauaaccgcucuugagacaggaagcuuaccauggagcugcucauccugaaggccaacgccaucaccaccauccugacggcggugaccuucugcuucgccagcggccagaacaucaccgaggaguucuaccaguccacgugcagcgccgucuccaagggguaccucggcgcccugcggaccggcugguacaccuccgugaucaccaucgagcugagcaacaucaaggagaacaagugcaacgggaccgacgccaaggugaagcucaucaagcaggagcuggacaaguacaagaacgcggucacggaccugcagaugcugaugugcuccaccccggcaaccggcuccggcuccgccaucgcgagcggcgucgccgugugcaaggugcugcaccucgagggggaggucaacaagaucaagagcgcccugcuguccaccaacaaggccguggugagccucuccaacggcgucagcgugcugaccuucaaggugcuggaccucaagaacuacaucgacaagcagcugcugcccauccugaacaagcagagcugcuccauccccaaccccgagacggugauggaguuccagcagaagaacaaccggcuccuggagaucacccgcgaguucagcgugaacgccggggucaccacccccguguccacguacaugcugaccaacagcgagcuccugucccugaucaacgacaugccgaucaccaacgaccagaagaagcucaugagcaacaacgugcagaucguccggcagcaguccuacagcaucaugugcaucaucaaggaggaggugcuggcguacgugguccagcugccccucuacggcgugaucgacacccccugcuggaagcugcacacgagcccccugugcaccaccaacaccaaggagggguccaacaucugccucacgcgcaccgaccggggcugguacugcgacaacgccggcagcgucuccuucuucccgcaggccgagaccugcaaggugugcagcaaccgcguguucugcgacaccaugaacucccugacgcugcccagcgagguaaaccucugcaacgucgacaucuucaaccccaaguacgacugcaagaucaugaccuccaagaccgacgugagcuccagcgugaucaccucccugggggccaucgucagcugcuacggcaagacgaagugcaccgccagcaacaagaacaaggggaucaucaagaccuucuccaacggcugcgacuacgugagcaacaagggcguggacaccguguccgucgggaacacccuguacuacgugaacaagcaggagggccagagccucuacgugaagggggagcccaucaucaacuucuacgacccgcuggucuuccccuccgacgaguucgacgcgagcaucucccaggugaacgagaagaucaaccagagccuggccuucauccgcaaguccgacgagcugcuccacaacgugaacgccggcaagagcacgaccaacaucaugaucaccaccaucaucaucgucaucaucgugauccugcugucccucaucgccguggggcugcugcucuacugcaaggcccggagcacgcccgucacccuguccaaggaccagcugagcggcaucaacaacaucgcguucuccaacugaggacuaguacuggcugcaucucccuuuccucuguccuccauccuucucccaggauggugaagggggaccugguacccagugauccccaccccaggauccuaaaucaugacuuaccugcuaauaaaaacucauuggaaaagugagaagaucuaaaaaaaaaaaaaaaaaaaaaaaaaaaaaaaaaaaaaaaaaaaaaaaaaaaaaaaaaaaaaaaaugcaucccccccccccccccccccccccccccccccaaaggcucuuuucagagccaccagaauu

SEQ ID NO: 6146 - RNA, 2010 nt, Artificial Sequence
  mRNA product Design b-5 comprising derived and/or modified sequence from HRSV(A2)__F_DSCav1_mut6 (opt1)
gggagacuccugucgggcggaaguaggaggaguagaguuuaaaaacaguacucuuuuuccgguucgggacguaguugaagcaacgacaagccggauaaccgcucuugagacaggaagcuuaccauggagcugcucauccugaaggccaacgccaucaccaccauccugacggcggugaccuucugcuucgccagcggccagaacaucaccgaggaguucuaccaguccacgugcagcgccgucuccaagggguaccucggcgcccugcgcaccgggugguacaccagcgugaucaccaucgagcuguccaacaucaaggagaacaagugcaacggcaccgacgccaaggugaagcucaucaagcaggagcuggacaaguacaagaacgcggucacggaccugcagaugcucaugugcagcacccccgccaccggguccggcagcgccaucgccuccggcguggcggugugcaagguccugcaccuggagggggaggugaacaagaucaagagcgcccuccuguccaccaacaaggccguggucagccuguccaacggcgugagcgugcucacguucaagguccuggaccugaagaacuacaucgacaagcagcuccugccgauccugaacaagcaguccugcagcauccccaaccccgagaccgugauggaguuccagcagaagaacaaccggcuccuggagaucacccgcgaguucuccgugaacgccggggucaccacgcccgugagcaccuacaugcugaccaacuccgagcuccugagccugaucaacgacaugccgaucaccaacgaccagaagaagcucaugagcaacaacgugcagaucguccggcagcaguccuacagcaucaugugcaucaucaaggaggaggugcuggccuacgugguccagcugccccucuacggcgugaucgacacgcccugcuggaagcugcacaccagcccccugugcaccaccaacacgaaggaggggagcaacaucugccucacccgcaccgaccggggcugguacugcgacaacgcgggcuccgugagcuucuucccgcaggccgagaccugcaaggucugcuccaaccgcguguucugcgacacgaugaacagccugacccugcccuccgaggucaaccucugcaacguggacaucuucaaccccaaguacgacugcaagaucaugaccagcaagaccgacguguccagcuccgucaucacgagccugggggccaucguguccugcuacggcaagaccaagugcaccgccagcaacaagaacaaggggaucaucaagaccuucuccaacggcugcgacuacgugagcaacaagggcgucgacacgguguccguggggaacacccuguacuacgucaacaagcaggagggccagagccucuacgugaagggggagcccaucaucaacuucuacgacccgcugguguuccccagcgacgaguucgacgccuccaucagccaggucaacgagaagaucaaccagucccuggcguucauccggaaguccgacgagcuccugcacaacgugaacgccggcaaguccaccaccaacaucaugaucaccacgaucaucaucgugaucaucgucauccugcucagccugaucgccguggggcugcuccuguacugcaaggcccgcuccacccccgugacccugagcaaggaccagcuguccggcaucaacaacaucgccuucagcaacugaggacuaguacuggcugcaucucccuuuccucuguccuccauccuucucccaggauggugaagggggaccugguacccagugauccccaccccaggauccuaaaucaugacuuaccugcuaauaaaaacucauuggaaaagugagaagaucuaaaaaaaaaaaaaaaaaaaaaaaaaaaaaaaaaaaaaaaaaaaaaaaaaaaaaaaaaaaaaaaaugcaucccccccccccccccccccccccccccccccaaaggcucuuuucagagccaccagaauu

SEQ ID NO: 6147 - RNA, 2010 nt, Artificial Sequence
  mRNA product Design b-5 comprising derived and/or modified sequence from HRSV(A2)__F_DSCav1_mut6 (opt2)
gggagacuccugucgggcggaaguaggaggaguagaguuuaaaaacaguacucuuuuuccgguucgggacguaguugaagcaacgacaagccggauaaccgcucuugagacaggaagcuuaccauggagcuccucauccucaaggccaacgccaucaccaccauccucaccgccgucaccuucugcuucgccuccggccagaacaucaccgaggaguucuaccaguccaccugcuccgccgucuccaagggcuaccucggcgcccuccgcaccggcugguacaccuccgucaucaccaucgagcucuccaacaucaaggagaacaagugcaacggcaccgacgccaaggucaagcucaucaagcaggagcucgacaaguacaagaacgccgucaccgaccuccagaugcucaugugcuccacccccgccaccggcuccggcuccgccaucgccuccggcgucgccgucugcaagguccuccaccucgagggcgaggucaacaagaucaaguccgcccuccucuccaccaacaaggccgucgucucccucuccaacggcgucuccguccucaccuucaagguccucgaccucaagaacuacaucgacaagcagcuccuccccauccucaacaagcaguccugcuccauccccaaccccgagaccgucauggaguuccagcagaagaacaaccgccuccucgagaucacccgcgaguucuccgucaacgccggcgucaccacccccgucuccaccuacaugcucaccaacuccgagcuccucucccucaucaacgacaugcccaucaccaacgaccagaagaagcucauguccaacaacguccagaucguccgccagcaguccuacuccaucaugugcaucaucaaggaggagguccucgccuacgucguccagcucccccucuacggcgucaucgacacccccugcuggaagcuccacaccuccccccucugcaccaccaacaccaaggagggcuccaacaucugccucacccgcaccgaccgcggcugguacugcgacaacgccggcuccgucuccuucuucccccaggccgagaccugcaaggucugcuccaaccgcgucuucugcgacaccaugaacucccucacccuccccuccgaggucaaccucugcaacgucgacaucuucaaccccaaguacgacugcaagaucaugaccuccaagaccgacgucuccuccuccgucaucaccucccucggcgccaucgucuccugcuacggcaagaccaagugcaccgccuccaacaagaacaagggcaucaucaagaccuucuccaacggcugcgacuacgucuccaacaagggcgucgacaccgucuccgucggcaacacccucuacuacgucaacaagcaggagggccagucccucuacgucaagggcgagcccaucaucaacuucuacgacccccucgucuuccccuccgacgaguucgacgccuccaucucccaggucaacgagaagaucaaccagucccucgccuucauccgcaaguccgacgagcuccuccacaacgucaacgccggcaaguccaccaccaacaucaugaucaccaccaucaucaucgucaucaucgucauccuccucucccucaucgccgucggccuccuccucuacugcaaggcccgcuccacccccgucacccucuccaaggaccagcucuccggcaucaacaacaucgccuucuccaacugaggacuaguacuggcugcaucucccuuuccucuguccuccauccuucucccaggauggugaagggggaccugguacccagugauccccaccccaggauccuaaaucaugacuuaccugcuaauaaaaacucauuggaaaagugagaagaucuaaaaaaaaaaaaaaaaaaaaaaaaaaaaaaaaaaaaaaaaaaaaaaaaaaaaaaaaaaaaaaaaugcaucccccccccccccccccccccccccccccccaaaggcucuuuucagagccaccagaauu

SEQ ID NO: 6148 - RNA, 2010 nt, Artificial Sequence
  mRNA product Design b-5 comprising derived and/or modified sequence from HRSV(A2)__F_DSCav1_mut6 (opt3)
gggagacuccugucgggcggaaguaggaggaguagaguuuaaaaacaguacucuuuuuccgguucgggacguaguugaagcaacgacaagccggauaaccgcucuugagacaggaagcuuaccauggagcugcucauccuuaaggccaacgcuauuaccacaauacugacugcagugacguucugcuuugccagcggccagaauaucaccgaagaguucuaccaauccacauguucugcggucucaaaaggguauuugggagcuuuaagaacugguugguacaccaguguuauuacaaucgaacugagcaacauuaaggagaauaaaugcaacggcaccgacgccaaggugaaacuaaucaagcaggaacucgauaaguauaaaaaugcaguaacugaccugcagaugcuuauguguuccacacccgccaccgggucuggaucggcuauagcaucaggcguggccgucugcaaggugcugcacuuggagggugagguuaacaaaaucaagagcgcucuccugaguacgaauaaagccguggucucccugucuaacggggugagcguacucacuuuuaagguuuuagaucugaagaauuacauugacaaacagcuuuugccuauccugaacaagcaauccuguucaauuccaaauccggaaaccgugauggaguuccagcagaaaaacaauaggcuacucgaaaucacacgggaguuuagugucaacgcgggagugacuacccccgugagcacauauaugcugaccaauucugagcuucuguccuugauaaacgauaugccuauuacgaacgaccagaagaaacucaugucaaauaacguccaaaucguucgccagcagagcuacaguauuaugugcaucaucaaggaagaggugcuggcauauguagugcaguuaccacuguacggcgucauugauacucccuguuggaaacuccauacaucuccucuuugcaccacuaauacaaaggaaggcuccaacauaugucugacccgaacggaccgugggugguacugcgauaaugccggaagcgugucguucuuuccacaagcugagaccuguaagguuugcucuaacagaguguucugcgacacaaugaacuccuugacucuacccucagaagucaaucuguguaauguggauaucuuuaacccuaaauaugacugcaagauuaugaccaguaaaacagauguaagcuccucuguuaucacuagccucggugccauagugucauguuacggcaagaccaaaugcacagcaaguaauaagaacaaggggauuaucaaaaccuucuccaauggaugugacuaugucagcaacaagggcguggacacugucucuguggguaauacgcuguacuauguuaacaaacaggaggggcagucacuuuacgugaagggagagccaaucauuaacuuuuaugauccgcugguauuccccagugacgaauuugaugcuagcaucucccaagucaaugagaaaauuaaccagucuuuggccuucauaaggaagucggacgaacuccugcacaaugugaacgcgggcaagagcacaaccaauaucaugauuacuaccaucaucauuguuauaaucgugauuuuacugucccuaaucgccgucggccuccugcuuuacugcaaagcacggucaacaccugugaccuugaguaaggaucagcugucugggauuaacaauaucgcuuucagcaacugaggacuaguacuggcugcaucucccuuuccucuguccuccauccuucucccaggauggugaagggggaccugguacccagugauccccaccccaggauccuaaaucaugacuuaccugcuaauaaaaacucauuggaaaagugagaagaucuaaaaaaaaaaaaaaaaaaaaaaaaaaaaaaaaaaaaaaaaaaaaaaaaaaaaaaaaaaaaaaaaugcaucccccccccccccccccccccccccccccccaaaggcucuuuucagagccaccagaauu

SEQ ID NO: 6149 - RNA, 2010 nt, Artificial Sequence
  mRNA product Design b-5 comprising derived and/or modified sequence from HRSV(A2)__F_DSCav1_mut6 (opt4)
gggagacuccugucgggcggaaguaggaggaguagaguuuaaaaacaguacucuuuuuccgguucgggacguaguugaagcaacgacaagccggauaaccgcucuugagacaggaagcuuaccauggagcugcugauccugaaggccaacgccaucaccaccauccugaccgccgugaccuucugcuucgccagcggccagaacaucaccgaggaguucuaccagagcaccugcagcgccgugagcaagggcuaccugggcgcccugagaaccggcugguacaccagcgugaucaccaucgagcugagcaacaucaaggagaacaagugcaacggcaccgacgccaaggugaagcugaucaagcaggagcuggacaaguacaagaacgccgugaccgaccugcagaugcugaugugcagcacccccgccaccggcagcggcagcgccaucgccagcggcguggccgugugcaaggugcugcaccuggagggcgaggugaacaagaucaagagcgcccugcugagcaccaacaaggccguggugagccugagcaacggcgugagcgugcugaccuucaaggugcuggaccugaagaacuacaucgacaagcagcugcugcccauccugaacaagcagagcugcagcauccccaaccccgagaccgugauggaguuccagcagaagaacaacagacugcuggagaucaccagagaguucagcgugaacgccggcgugaccacccccgugagcaccuacaugcugaccaacagcgagcugcugagccugaucaacgacaugcccaucaccaacgaccagaagaagcugaugagcaacaacgugcagaucgugagacagcagagcuacagcaucaugugcaucaucaaggaggaggugcuggccuacguggugcagcugccccuguacggcgugaucgacacccccugcuggaagcugcacaccagcccccugugcaccaccaacaccaaggagggcagcaacaucugccugaccagaaccgacagaggcugguacugcgacaacgccggcagcgugagcuucuucccccaggccgagaccugcaaggugugcagcaacagaguguucugcgacaccaugaacagccugacccugcccagcgaggugaaccugugcaacguggacaucuucaaccccaaguacgacugcaagaucaugaccagcaagaccgacgugagcagcagcgugaucaccagccugggcgccaucgugagcugcuacggcaagaccaagugcaccgccagcaacaagaacaagggcaucaucaagaccuucagcaacggcugcgacuacgugagcaacaagggcguggacaccgugagcgugggcaacacccuguacuacgugaacaagcaggagggccagagccuguacgugaagggcgagcccaucaucaacuucuacgacccccugguguuccccagcgacgaguucgacgccagcaucagccaggugaacgagaagaucaaccagagccuggccuucaucagaaagagcgacgagcugcugcacaacgugaacgccggcaagagcaccaccaacaucaugaucaccaccaucaucaucgugaucaucgugauccugcugagccugaucgccgugggccugcugcuguacugcaaggccagaagcacccccgugacccugagcaaggaccagcugagcggcaucaacaacaucgccuucagcaacugaggacuaguacuggcugcaucucccuuuccucuguccuccauccuucucccaggauggugaagggggaccugguacccagugauccccaccccaggauccuaaaucaugacuuaccugcuaauaaaaacucauuggaaaagugagaagaucuaaaaaaaaaaaaaaaaaaaaaaaaaaaaaaaaaaaaaaaaaaaaaaaaaaaaaaaaaaaaaaaaugcaucccccccccccccccccccccccccccccccaaaggcucuuuucagagccaccagaauu

SEQ ID NO: 6150 - RNA, 2010 nt, Artificial Sequence
  mRNA product Design b-5 comprising derived and/or modified sequence from HRSV(A2)__F_DSCav1_mut6 (opt5)
gggagacuccugucgggcggaaguaggaggaguagaguuuaaaaacaguacucuuuuuccgguucgggacguaguugaagcaacgacaagccggauaaccgcucuugagacaggaagcuuaccauggagcugcucauccugaaggccaacgcuauuaccacaauccuuacggccgugaccuucugcuuugcgagcggccagaauauuacagaagaguucuaccaauccaccuguucugcugucagcaaaggguaucugggagcccucagaacaggcugguacaccuccguuaucacaauugaacugucuaacaucaaggagaauaaaugcaacgggaccgacgccaaggugaaacuuaucaagcaggaacuggauaaguauaaaaaugcugugacggaccuccagaugcugauguguagcacccccgccacaggauccggcucugcuauugccagcggggucgcggugugcaagguucugcaccucgagggagaggugaacaaaaucaaguccgcccugcuuagcaccaauaaagcugucgugucucuguccaacggcguuagcgugcucacauuuaagguccuggaucuuaagaauuacauugacaaacagcugcucccuauccugaacaagcaaucuuguuccauuccgaaucccgaaaccgugauggaguuccagcagaaaaacaaucggcugcucgaaaucacgcgcgaguuuagcgugaacgccggcgucacaaccccuguuucuacauauaugcugaccaauuccgagcuucugagccucauuaacgauaugcccaucaccaacgaccagaagaaacugauguccaauaacgugcaaaucgugagacagcagucuuacagcauuaugugcaucauuaaggaagagguccuugcuuaugugguucagcugccucucuacggggugaucgauacacccuguuggaaacugcauacguccccucugugcaccacaaauaccaaggaaggaagcaacauuugucucacacggaccgaccgcggcugguacugcgauaaugccgggucugucuccuucuuuccgcaagcggagacguguaaggugugcagcaacagaguuuucugcgacacaaugaacucucugacccuucccagcgaagugaaucuguguaaugucgauaucuuuaacccuaaauaugacugcaagaucaugaccuccaaaacagaugugucuagcuccgucauuaccagccucggagccaucgugucuuguuacggcaagacaaaaugcacggcuuccaauaagaacaaggggauuaucaaaaccuucagcaauggaugugacuauguuucuaacaagggcguggacacagucuccgugggcaauacccuguacuauguuaacaaacaggaggggcagagccuuuacgugaagggagagcccauuaucaacuuuuaugauccucuggucuuccccuccgacgaauuugaugccucuaucagccaagugaaugagaaaauuaaccagucccucgcuuucauccggaagucugacgaacugcugcacaaugugaacgccggcaagagcacaaccaauauuaugaucacgaccauuaucauuguuaucaucgucauucuccugucccuuaucgccguggggcugcuccuguacugcaaagcucgcagcacaccggugacccugucuaaggaucagcuuuccggaauuaacaauaucgcguucagcaacugaggacuaguacuggcugcaucucccuuuccucuguccuccauccuucucccaggauggugaagggggaccugguacccagugauccccaccccaggauccuaaaucaugacuuaccugcuaauaaaaacucauuggaaaagugagaagaucuaaaaaaaaaaaaaaaaaaaaaaaaaaaaaaaaaaaaaaaaaaaaaaaaaaaaaaaaaaaaaaaaugcaucccccccccccccccccccccccccccccccaaaggcucuuuucagagccaccagaauu

SEQ ID NO: 6151 - RNA, 2010 nt, Artificial Sequence
  mRNA product Design b-5 comprising derived and/or modified sequence from HRSV(A2)__F_DSCav1_mut6 (opt6)
gggagacuccugucgggcggaaguaggaggaguagaguuuaaaaacaguacucuuuuuccgguucgggacguaguugaagcaacgacaagccggauaaccgcucuugagacaggaagcuuaccauggaacuauuaaucuuaaaagcaaaugcuauaaccacaauauuaacagcaguaacauucuguuuugccuccggacaaaacauaacagaagaauuuuaucaaucaacaugcucugcaguauccaaagguuacuuaggcgcacuacgcacuggaugguauacaucaguaauaacaauagaacuaucaaacauaaaagaaaauaaauguaacgguacugacgcaaaagugaaacuaauuaaacaagaacucgacaaauacaaaaaugcuguaacagaccuacaaaugcuaaugugcucaacacccgcaaccggaucaggaucagccauagccuccggagucgcaguaugcaaaguauuacaucuugaaggagaaguaaauaaaauaaaaucagcauuacuauccacaaauaaagccguaguaucacuaucaaacgguguauccguccuuacauucaaaguauuagaucuaaaaaacuacauagauaaacaacuacuacccaucuuaaacaaacaaucaugcucaauucccaacccagaaacagucauggaauuucaacaaaaaaacaacagacucuuagaaauaacacgagaauuuucaguaaacgcaggaguaaccacaccaguaaguacauacaugcucaccaacucagaauuauuaucacuuauuaacgacaugccaauuacaaacgaccaaaaaaaauuaaugucaaacaauguccaaauuguuagacaacaaucauacucuauaauguguauaauaaaagaagaaguacuagcuuacguaguucaauuaccacuauauggcguaauagauacaccuugcuggaaacuacauacaucuccauuauguacaacuaacacaaaagaaggaucuaacauaugccuaacacgcacagaucgaggaugguacugcgauaaugcagguuccguaucauucuuuccacaagcagaaacauguaaaguaugcucaaacagaguauucugugacacuaugaacuccuuaacccuacccucagaagucaaucuaugcaacguugacauauuuaacccaaaauacgacuguaaaaucaugacaucuaaaacagacguaucaucaucaguuauuacaucccuaggagcaauaguaucuugcuacggaaaaacaaaauguacagcauccaacaaaaacaaaggaauaaucaaaacauucucaaacggcugcgacuacguaucaaacaaagguguagacacaguaucaguaggaaauacuuuauauuacguaaauaaacaagaaggacaaucucuauacguuaaaggcgaaccuauuauaaacuucuacgacccacucguauucccuucagacgaauuugacgcaucuauaucccaaguuaacgaaaaaaucaaccaaucauuagccuuuauaagaaaauccgacgaauuauuacauaacgucaacgcuggaaaaucaacaacuaacauaaugauaaccacaauaauaauagucaucauaguuauauuacuaagucuaauagccguaggccuccuacuuuauugcaaagcaagaucaacaccaguaacauuauccaaagaccaacucagcggcauaaacaauauagcuuuuucaaacuagggacuaguacuggcugcaucucccuuuccucuguccuccauccuucucccaggauggugaagggggaccugguacccagugauccccaccccaggauccuaaaucaugacuuaccugcuaauaaaaacucauuggaaaagugagaagaucuaaaaaaaaaaaaaaaaaaaaaaaaaaaaaaaaaaaaaaaaaaaaaaaaaaaaaaaaaaaaaaaaugcaucccccccccccccccccccccccccccccccaaaggcucuuuucagagccaccagaauu

SEQ ID NO: 6152 - RNA, 2010 nt, Artificial Sequence
  mRNA product Design b-5 comprising derived and/or modified sequence from HRSV(A2)__F_DSCav1_mut6 (opt11)
gggagacuccugucgggcggaaguaggaggaguagaguuuaaaaacaguacucuuuuuccgguucgggacguaguugaagcaacgacaagccggauaaccgcucuugagacaggaagcuuaccauggaacuccucauccucaaagccaacgcaaucacaaccauacuaacugcaguuacuuucugcuucgcauccggccaaaacaucaccgaagaguucuaccaaucaaccugcuccgcagucuccaaaggauaccucggagcccuucgcaccggcugguacaccuccgucauaaccaucgaacucucaaacauaaaagaaaacaaaugcaacggcacagacgcgaaagucaaacuuaucaaacaagaacucgacaaauacaaaaacgccgucaccgaccugcagaugcucaugugcucaacccccgccacaggaagcggcucugcuaucgcuuccggcgucgccgucugcaaaguccuccaccucgaaggcgaaguaaacaaaaucaagucagcccuccucuccaccaacaaagccgucgucucucucucaaacggcguauccguccucacauucaaaguccucgaccucaaaaacuacaucgacaaacaacuucuccccauccuaaacaaacaaucaugcuccauccccaaccccgaaacagucauggaauuucaacaaaagaacaaccgccucuuagaaaucacccgagaauuuuccgucaacgcgggagucacaacccccguuucuacguauaugcucaccaacuccgaacuccuuucccucauaaacgacaugccaaucaccaacgaccaaaagaaacucaugucaaacaacguccaaaucguccgacaacaauccuacucuauuaugugcaucaucaaagaagaaguucucgccuacgucguccaacuaccccucuacggcgugaucgacacccccugcuggaaacuacacaccucaccccucugcaccaccaacaccaaggaaggcuccaacaucugccucacccgcaccgaccgcggcugguacugcgacaacgcuggcuccgucucauucuucccgcaagccgaaacuugcaaaguaugcuccaacagaguauucugcgacaccaugaacucacuaacccucccuuccgaagucaaccuuugcaacguugacauauucaacccaaaguacgauugcaaaauuaugacauccaaaacagaugucuccuccuccgucaucacaucccucggugccauuguaucaugcuacggaaaaaccaaaugcaccgcauccaacaaaaacaaaggaaucaucaaaaccuucucaaacggcugcgauuacgucucaaacaaaggagucgacacagucuccgucggaaacacccuauacuacgucaacaaacaagaaggccaaucccuguacgucaaaggagaacccaucaucaacuucuacgacccccucgucuucccgagcgacgaguucgacgccuccaucucacaagucaaugaaaagaucaaccaaucccuugccuucauccggaaaucggacgaacuccuacacaacgugaacgcuggaaaaucaaccaccaacaucaugaucacaaccaucauuaucgucaucaucgucauacuccucucccuaaucgccgucggccuccuccuguauugcaaagcucgcuccacccccgucacccuguccaaagaccaacucuccggaaucaacaacaucgccuucucaaacuaaggacuaguacuggcugcaucucccuuuccucuguccuccauccuucucccaggauggugaagggggaccugguacccagugauccccaccccaggauccuaaaucaugacuuaccugcuaauaaaaacucauuggaaaagugagaagaucuaaaaaaaaaaaaaaaaaaaaaaaaaaaaaaaaaaaaaaaaaaaaaaaaaaaaaaaaaaaaaaaaugcaucccccccccccccccccccccccccccccccaaaggcucuuuucagagccaccagaauu

SEQ ID NO: 6153 - RNA, 1916 nt, Artificial Sequence
  mRNA product Design c-1 comprising derived and/or modified sequence from HRSV(A2)__F_DSCav1_mut6 (opt1)
gggagaguccgcucagccagguugcagaagcggcuuagcguguguccuaaucuucucucugcguguagguaggccugugccgcaaacaagcuuaccauggagcugcucauccugaaggccaacgccaucaccaccauccugacggcggugaccuucugcuucgccagcggccagaacaucaccgaggaguucuaccaguccacgugcagcgccgucuccaagggguaccucggcgcccugcggaccggcugguacaccuccgugaucaccaucgagcugagcaacaucaaggagaacaagugcaacgggaccgacgccaaggugaagcucaucaagcaggagcuggacaaguacaagaacgcggucacggaccugcagaugcugaugugcuccaccccggcaaccggcuccggcuccgccaucgcgagcggcgucgccgugugcaaggugcugcaccucgagggggaggucaacaagaucaagagcgcccugcuguccaccaacaaggccguggugagccucuccaacggcgucagcgugcugaccuucaaggugcuggaccucaagaacuacaucgacaagcagcugcugcccauccugaacaagcagagcugcuccauccccaaccccgagacggugauggaguuccagcagaagaacaaccggcuccuggagaucacccgcgaguucagcgugaacgccggggucaccacccccguguccacguacaugcugaccaacagcgagcuccugucccugaucaacgacaugccgaucaccaacgaccagaagaagcucaugagcaacaacgugcagaucguccggcagcaguccuacagcaucaugugcaucaucaaggaggaggugcuggcguacgugguccagcugccccucuacggcgugaucgacacccccugcuggaagcugcacacgagcccccugugcaccaccaacaccaaggagggguccaacaucugccucacgcgcaccgaccggggcugguacugcgacaacgccggcagcgucuccuucuucccgcaggccgagaccugcaaggugugcagcaaccgcguguucugcgacaccaugaacucccugacgcugcccagcgagguaaaccucugcaacgucgacaucuucaaccccaaguacgacugcaagaucaugaccuccaagaccgacgugagcuccagcgugaucaccucccugggggccaucgucagcugcuacggcaagacgaagugcaccgccagcaacaagaacaaggggaucaucaagaccuucuccaacggcugcgacuacgugagcaacaagggcguggacaccguguccgucgggaacacccuguacuacgugaacaagcaggagggccagagccucuacgugaagggggagcccaucaucaacuucuacgacccgcuggucuuccccuccgacgaguucgacgcgagcaucucccaggugaacgagaagaucaaccagagccuggccuucauccgcaaguccgacgagcugcuccacaacgugaacgccggcaagagcacgaccaacaucaugaucaccaccaucaucaucgucaucaucgugauccugcugucccucaucgccguggggcugcugcucuacugcaaggcccggagcacgcccgucacccuguccaaggaccagcugagcggcaucaacaacaucgcguucuccaacugaggacuaguguccaccugucccuccugggcugcuggauugucucguuuuccugccaaauaaacaggaucagcgcuuuacagaucuaaaaaaaaaaaaaaaaaaaaaaaaaaaaaaaaaaaaaaaaaaaaaaaaaaaaaaaaaaaaaaaaugcaucccccccccccccccccccccccccccccccaaaggcucuuuucagagccaccagaauu

SEQ ID NO: 6154 - RNA, 1916 nt, Artificial Sequence
  mRNA product Design c-1 comprising derived and/or modified sequence from HRSV(A2)__F_DSCav1_mut6 (opt1)
gggagaguccgcucagccagguugcagaagcggcuuagcguguguccuaaucuucucucugcguguagguaggccugugccgcaaacaagcuuaccauggagcugcucauccugaaggccaacgccaucaccaccauccugacggcggugaccuucugcuucgccagcggccagaacaucaccgaggaguucuaccaguccacgugcagcgccgucuccaagggguaccucggcgcccugcgcaccgggugguacaccagcgugaucaccaucgagcuguccaacaucaaggagaacaagugcaacggcaccgacgccaaggugaagcucaucaagcaggagcuggacaaguacaagaacgcggucacggaccugcagaugcucaugugcagcacccccgccaccggguccggcagcgccaucgccuccggcguggcggugugcaagguccugcaccuggagggggaggugaacaagaucaagagcgcccuccuguccaccaacaaggccguggucagccuguccaacggcgugagcgugcucacguucaagguccuggaccugaagaacuacaucgacaagcagcuccugccgauccugaacaagcaguccugcagcauccccaaccccgagaccgugauggaguuccagcagaagaacaaccggcuccuggagaucacccgcgaguucuccgugaacgccggggucaccacgcccgugagcaccuacaugcugaccaacuccgagcuccugagccugaucaacgacaugccgaucaccaacgaccagaagaagcucaugagcaacaacgugcagaucguccggcagcaguccuacagcaucaugugcaucaucaaggaggaggugcuggccuacgugguccagcugccccucuacggcgugaucgacacgcccugcuggaagcugcacaccagcccccugugcaccaccaacacgaaggaggggagcaacaucugccucacccgcaccgaccggggcugguacugcgacaacgcgggcuccgugagcuucuucccgcaggccgagaccugcaaggucugcuccaaccgcguguucugcgacacgaugaacagccugacccugcccuccgaggucaaccucugcaacguggacaucuucaaccccaaguacgacugcaagaucaugaccagcaagaccgacguguccagcuccgucaucacgagccugggggccaucguguccugcuacggcaagaccaagugcaccgccagcaacaagaacaaggggaucaucaagaccuucuccaacggcugcgacuacgugagcaacaagggcgucgacacgguguccguggggaacacccuguacuacgucaacaagcaggagggccagagccucuacgugaagggggagcccaucaucaacuucuacgacccgcugguguuccccagcgacgaguucgacgccuccaucagccaggucaacgagaagaucaaccagucccuggcguucauccggaaguccgacgagcuccugcacaacgugaacgccggcaaguccaccaccaacaucaugaucaccacgaucaucaucgugaucaucgucauccugcucagccugaucgccguggggcugcuccuguacugcaaggcccgcuccacccccgugacccugagcaaggaccagcuguccggcaucaacaacaucgccuucagcaacugaggacuaguguccaccugucccuccugggcugcuggauugucucguuuuccugccaaauaaacaggaucagcgcuuuacagaucuaaaaaaaaaaaaaaaaaaaaaaaaaaaaaaaaaaaaaaaaaaaaaaaaaaaaaaaaaaaaaaaaugcaucccccccccccccccccccccccccccccccaaaggcucuuuucagagccaccagaauu

SEQ ID NO: 6155 - RNA, 1916 nt, Artificial Sequence
  mRNA product Design c-1 comprising derived and/or modified sequence from HRSV(A2)__F_DSCav1_mut6 (opt2)
gggagaguccgcucagccagguugcagaagcggcuuagcguguguccuaaucuucucucugcguguagguaggccugugccgcaaacaagcuuaccauggagcuccucauccucaaggccaacgccaucaccaccauccucaccgccgucaccuucugcuucgccuccggccagaacaucaccgaggaguucuaccaguccaccugcuccgccgucuccaagggcuaccucggcgcccuccgcaccggcugguacaccuccgucaucaccaucgagcucuccaacaucaaggagaacaagugcaacggcaccgacgccaaggucaagcucaucaagcaggagcucgacaaguacaagaacgccgucaccgaccuccagaugcucaugugcuccacccccgccaccggcuccggcuccgccaucgccuccggcgucgccgucugcaagguccuccaccucgagggcgaggucaacaagaucaaguccgcccuccucuccaccaacaaggccgucgucucccucuccaacggcgucuccguccucaccuucaagguccucgaccucaagaacuacaucgacaagcagcuccuccccauccucaacaagcaguccugcuccauccccaaccccgagaccgucauggaguuccagcagaagaacaaccgccuccucgagaucacccgcgaguucuccgucaacgccggcgucaccacccccgucuccaccuacaugcucaccaacuccgagcuccucucccucaucaacgacaugcccaucaccaacgaccagaagaagcucauguccaacaacguccagaucguccgccagcaguccuacuccaucaugugcaucaucaaggaggagguccucgccuacgucguccagcucccccucuacggcgucaucgacacccccugcuggaagcuccacaccuccccccucugcaccaccaacaccaaggagggcuccaacaucugccucacccgcaccgaccgcggcugguacugcgacaacgccggcuccgucuccuucuucccccaggccgagaccugcaaggucugcuccaaccgcgucuucugcgacaccaugaacucccucacccuccccuccgaggucaaccucugcaacgucgacaucuucaaccccaaguacgacugcaagaucaugaccuccaagaccgacgucuccuccuccgucaucaccucccucggcgccaucgucuccugcuacggcaagaccaagugcaccgccuccaacaagaacaagggcaucaucaagaccuucuccaacggcugcgacuacgucuccaacaagggcgucgacaccgucuccgucggcaacacccucuacuacgucaacaagcaggagggccagucccucuacgucaagggcgagcccaucaucaacuucuacgacccccucgucuuccccuccgacgaguucgacgccuccaucucccaggucaacgagaagaucaaccagucccucgccuucauccgcaaguccgacgagcuccuccacaacgucaacgccggcaaguccaccaccaacaucaugaucaccaccaucaucaucgucaucaucgucauccuccucucccucaucgccgucggccuccuccucuacugcaaggcccgcuccacccccgucacccucuccaaggaccagcucuccggcaucaacaacaucgccuucuccaacugaggacuaguguccaccugucccuccugggcugcuggauugucucguuuuccugccaaauaaacaggaucagcgcuuuacagaucuaaaaaaaaaaaaaaaaaaaaaaaaaaaaaaaaaaaaaaaaaaaaaaaaaaaaaaaaaaaaaaaaugcaucccccccccccccccccccccccccccccccaaaggcucuuuucagagccaccagaauu

SEQ ID NO: 6156 - RNA, 1916 nt, Artificial Sequence
  mRNA product Design c-1 comprising derived and/or modified sequence from HRSV(A2)__F_DSCav1_mut6 (opt3)
gggagaguccgcucagccagguugcagaagcggcuuagcguguguccuaaucuucucucugcguguagguaggccugugccgcaaacaagcuuaccauggagcugcucauccuuaaggccaacgcuauuaccacaauacugacugcagugacguucugcuuugccagcggccagaauaucaccgaagaguucuaccaauccacauguucugcggucucaaaaggguauuugggagcuuuaagaacugguugguacaccaguguuauuacaaucgaacugagcaacauuaaggagaauaaaugcaacggcaccgacgccaaggugaaacuaaucaagcaggaacucgauaaguauaaaaaugcaguaacugaccugcagaugcuuauguguuccacacccgccaccgggucuggaucggcuauagcaucaggcguggccgucugcaaggugcugcacuuggagggugagguuaacaaaaucaagagcgcucuccugaguacgaauaaagccguggucucccugucuaacggggugagcguacucacuuuuaagguuuuagaucugaagaauuacauugacaaacagcuuuugccuauccugaacaagcaauccuguucaauuccaaauccggaaaccgugauggaguuccagcagaaaaacaauaggcuacucgaaaucacacgggaguuuagugucaacgcgggagugacuacccccgugagcacauauaugcugaccaauucugagcuucuguccuugauaaacgauaugccuauuacgaacgaccagaagaaacucaugucaaauaacguccaaaucguucgccagcagagcuacaguauuaugugcaucaucaaggaagaggugcuggcauauguagugcaguuaccacuguacggcgucauugauacucccuguuggaaacuccauacaucuccucuuugcaccacuaauacaaaggaaggcuccaacauaugucugacccgaacggaccgugggugguacugcgauaaugccggaagcgugucguucuuuccacaagcugagaccuguaagguuugcucuaacagaguguucugcgacacaaugaacuccuugacucuacccucagaagucaaucuguguaauguggauaucuuuaacccuaaauaugacugcaagauuaugaccaguaaaacagauguaagcuccucuguuaucacuagccucggugccauagugucauguuacggcaagaccaaaugcacagcaaguaauaagaacaaggggauuaucaaaaccuucuccaauggaugugacuaugucagcaacaagggcguggacacugucucuguggguaauacgcuguacuauguuaacaaacaggaggggcagucacuuuacgugaagggagagccaaucauuaacuuuuaugauccgcugguauuccccagugacgaauuugaugcuagcaucucccaagucaaugagaaaauuaaccagucuuuggccuucauaaggaagucggacgaacuccugcacaaugugaacgcgggcaagagcacaaccaauaucaugauuacuaccaucaucauuguuauaaucgugauuuuacugucccuaaucgccgucggccuccugcuuuacugcaaagcacggucaacaccugugaccuugaguaaggaucagcugucugggauuaacaauaucgcuuucagcaacugaggacuaguguccaccugucccuccugggcugcuggauugucucguuuuccugccaaauaaacaggaucagcgcuuuacagaucuaaaaaaaaaaaaaaaaaaaaaaaaaaaaaaaaaaaaaaaaaaaaaaaaaaaaaaaaaaaaaaaaugcaucccccccccccccccccccccccccccccccaaaggcucuuuucagagccaccagaauu

SEQ ID NO: 6157 - RNA, 1916 nt, Artificial Sequence
  mRNA product Design c-1 comprising derived and/or modified sequence from HRSV(A2)__F_DSCav1_mut6 (opt4)
gggagaguccgcucagccagguugcagaagcggcuuagcguguguccuaaucuucucucugcguguagguaggccugugccgcaaacaagcuuaccauggagcugcugauccugaaggccaacgccaucaccaccauccugaccgccgugaccuucugcuucgccagcggccagaacaucaccgaggaguucuaccagagcaccugcagcgccgugagcaagggcuaccugggcgcccugagaaccggcugguacaccagcgugaucaccaucgagcugagcaacaucaaggagaacaagugcaacggcaccgacgccaaggugaagcugaucaagcaggagcuggacaaguacaagaacgccgugaccgaccugcagaugcugaugugcagcacccccgccaccggcagcggcagcgccaucgccagcggcguggccgugugcaaggugcugcaccuggagggcgaggugaacaagaucaagagcgcccugcugagcaccaacaaggccguggugagccugagcaacggcgugagcgugcugaccuucaaggugcuggaccugaagaacuacaucgacaagcagcugcugcccauccugaacaagcagagcugcagcauccccaaccccgagaccgugauggaguuccagcagaagaacaacagacugcuggagaucaccagagaguucagcgugaacgccggcgugaccacccccgugagcaccuacaugcugaccaacagcgagcugcugagccugaucaacgacaugcccaucaccaacgaccagaagaagcugaugagcaacaacgugcagaucgugagacagcagagcuacagcaucaugugcaucaucaaggaggaggugcuggccuacguggugcagcugccccuguacggcgugaucgacacccccugcuggaagcugcacaccagcccccugugcaccaccaacaccaaggagggcagcaacaucugccugaccagaaccgacagaggcugguacugcgacaacgccggcagcgugagcuucuucccccaggccgagaccugcaaggugugcagcaacagaguguucugcgacaccaugaacagccugacccugcccagcgaggugaaccugugcaacguggacaucuucaaccccaaguacgacugcaagaucaugaccagcaagaccgacgugagcagcagcgugaucaccagccugggcgccaucgugagcugcuacggcaagaccaagugcaccgccagcaacaagaacaagggcaucaucaagaccuucagcaacggcugcgacuacgugagcaacaagggcguggacaccgugagcgugggcaacacccuguacuacgugaacaagcaggagggccagagccuguacgugaagggcgagcccaucaucaacuucuacgacccccugguguuccccagcgacgaguucgacgccagcaucagccaggugaacgagaagaucaaccagagccuggccuucaucagaaagagcgacgagcugcugcacaacgugaacgccggcaagagcaccaccaacaucaugaucaccaccaucaucaucgugaucaucgugauccugcugagccugaucgccgugggccugcugcuguacugcaaggccagaagcacccccgugacccugagcaaggaccagcugagcggcaucaacaacaucgccuucagcaacugaggacuaguguccaccugucccuccugggcugcuggauugucucguuuuccugccaaauaaacaggaucagcgcuuuacagaucuaaaaaaaaaaaaaaaaaaaaaaaaaaaaaaaaaaaaaaaaaaaaaaaaaaaaaaaaaaaaaaaaugcaucccccccccccccccccccccccccccccccaaaggcucuuuucagagccaccagaauu

SEQ ID NO: 6158 - RNA, 1916 nt, Artificial Sequence
  mRNA product Design c-1 comprising derived and/or modified sequence from HRSV(A2)__F_DSCav1_mut6 (opt5)
gggagaguccgcucagccagguugcagaagcggcuuagcguguguccuaaucuucucucugcguguagguaggccugugccgcaaacaagcuuaccauggagcugcucauccugaaggccaacgcuauuaccacaauccuuacggccgugaccuucugcuuugcgagcggccagaauauuacagaagaguucuaccaauccaccuguucugcugucagcaaaggguaucugggagcccucagaacaggcugguacaccuccguuaucacaauugaacugucuaacaucaaggagaauaaaugcaacgggaccgacgccaaggugaaacuuaucaagcaggaacuggauaaguauaaaaaugcugugacggaccuccagaugcugauguguagcacccccgccacaggauccggcucugcuauugccagcggggucgcggugugcaagguucugcaccucgagggagaggugaacaaaaucaaguccgcccugcuuagcaccaauaaagcugucgugucucuguccaacggcguuagcgugcucacauuuaagguccuggaucuuaagaauuacauugacaaacagcugcucccuauccugaacaagcaaucuuguuccauuccgaaucccgaaaccgugauggaguuccagcagaaaaacaaucggcugcucgaaaucacgcgcgaguuuagcgugaacgccggcgucacaaccccuguuucuacauauaugcugaccaauuccgagcuucugagccucauuaacgauaugcccaucaccaacgaccagaagaaacugauguccaauaacgugcaaaucgugagacagcagucuuacagcauuaugugcaucauuaaggaagagguccuugcuuaugugguucagcugccucucuacggggugaucgauacacccuguuggaaacugcauacguccccucugugcaccacaaauaccaaggaaggaagcaacauuugucucacacggaccgaccgcggcugguacugcgauaaugccgggucugucuccuucuuuccgcaagcggagacguguaaggugugcagcaacagaguuuucugcgacacaaugaacucucugacccuucccagcgaagugaaucuguguaaugucgauaucuuuaacccuaaauaugacugcaagaucaugaccuccaaaacagaugugucuagcuccgucauuaccagccucggagccaucgugucuuguuacggcaagacaaaaugcacggcuuccaauaagaacaaggggauuaucaaaaccuucagcaauggaugugacuauguuucuaacaagggcguggacacagucuccgugggcaauacccuguacuauguuaacaaacaggaggggcagagccuuuacgugaagggagagcccauuaucaacuuuuaugauccucuggucuuccccuccgacgaauuugaugccucuaucagccaagugaaugagaaaauuaaccagucccucgcuuucauccggaagucugacgaacugcugcacaaugugaacgccggcaagagcacaaccaauauuaugaucacgaccauuaucauuguuaucaucgucauucuccugucccuuaucgccguggggcugcuccuguacugcaaagcucgcagcacaccggugacccugucuaaggaucagcuuuccggaauuaacaauaucgcguucagcaacugaggacuaguguccaccugucccuccugggcugcuggauugucucguuuuccugccaaauaaacaggaucagcgcuuuacagaucuaaaaaaaaaaaaaaaaaaaaaaaaaaaaaaaaaaaaaaaaaaaaaaaaaaaaaaaaaaaaaaaaugcaucccccccccccccccccccccccccccccccaaaggcucuuuucagagccaccagaauu

SEQ ID NO: 6159 - RNA, 1916 nt, Artificial Sequence
  mRNA product Design c-1 comprising derived and/or modified sequence from HRSV(A2)__F_DSCav1_mut6 (opt6)
gggagaguccgcucagccagguugcagaagcggcuuagcguguguccuaaucuucucucugcguguagguaggccugugccgcaaacaagcuuaccauggaacuauuaaucuuaaaagcaaaugcuauaaccacaauauuaacagcaguaacauucuguuuugccuccggacaaaacauaacagaagaauuuuaucaaucaacaugcucugcaguauccaaagguuacuuaggcgcacuacgcacuggaugguauacaucaguaauaacaauagaacuaucaaacauaaaagaaaauaaauguaacgguacugacgcaaaagugaaacuaauuaaacaagaacucgacaaauacaaaaaugcuguaacagaccuacaaaugcuaaugugcucaacacccgcaaccggaucaggaucagccauagccuccggagucgcaguaugcaaaguauuacaucuugaaggagaaguaaauaaaauaaaaucagcauuacuauccacaaauaaagccguaguaucacuaucaaacgguguauccguccuuacauucaaaguauuagaucuaaaaaacuacauagauaaacaacuacuacccaucuuaaacaaacaaucaugcucaauucccaacccagaaacagucauggaauuucaacaaaaaaacaacagacucuuagaaauaacacgagaauuuucaguaaacgcaggaguaaccacaccaguaaguacauacaugcucaccaacucagaauuauuaucacuuauuaacgacaugccaauuacaaacgaccaaaaaaaauuaaugucaaacaauguccaaauuguuagacaacaaucauacucuauaauguguauaauaaaagaagaaguacuagcuuacguaguucaauuaccacuauauggcguaauagauacaccuugcuggaaacuacauacaucuccauuauguacaacuaacacaaaagaaggaucuaacauaugccuaacacgcacagaucgaggaugguacugcgauaaugcagguuccguaucauucuuuccacaagcagaaacauguaaaguaugcucaaacagaguauucugugacacuaugaacuccuuaacccuacccucagaagucaaucuaugcaacguugacauauuuaacccaaaauacgacuguaaaaucaugacaucuaaaacagacguaucaucaucaguuauuacaucccuaggagcaauaguaucuugcuacggaaaaacaaaauguacagcauccaacaaaaacaaaggaauaaucaaaacauucucaaacggcugcgacuacguaucaaacaaagguguagacacaguaucaguaggaaauacuuuauauuacguaaauaaacaagaaggacaaucucuauacguuaaaggcgaaccuauuauaaacuucuacgacccacucguauucccuucagacgaauuugacgcaucuauaucccaaguuaacgaaaaaaucaaccaaucauuagccuuuauaagaaaauccgacgaauuauuacauaacgucaacgcuggaaaaucaacaacuaacauaaugauaaccacaauaauaauagucaucauaguuauauuacuaagucuaauagccguaggccuccuacuuuauugcaaagcaagaucaacaccaguaacauuauccaaagaccaacucagcggcauaaacaauauagcuuuuucaaacuagggacuaguguccaccugucccuccugggcugcuggauugucucguuuuccugccaaauaaacaggaucagcgcuuuacagaucuaaaaaaaaaaaaaaaaaaaaaaaaaaaaaaaaaaaaaaaaaaaaaaaaaaaaaaaaaaaaaaaaugcaucccccccccccccccccccccccccccccccaaaggcucuuuucagagccaccagaauu

SEQ ID NO: 6160 - RNA, 1916 nt, Artificial Sequence
  mRNA product Design c-1 comprising derived and/or modified sequence from HRSV(A2)__F_DSCav1_mut6 (opt11)
gggagaguccgcucagccagguugcagaagcggcuuagcguguguccuaaucuucucucugcguguagguaggccugugccgcaaacaagcuuaccauggaacuccucauccucaaagccaacgcaaucacaaccauacuaacugcaguuacuuucugcuucgcauccggccaaaacaucaccgaagaguucuaccaaucaaccugcuccgcagucuccaaaggauaccucggagcccuucgcaccggcugguacaccuccgucauaaccaucgaacucucaaacauaaaagaaaacaaaugcaacggcacagacgcgaaagucaaacuuaucaaacaagaacucgacaaauacaaaaacgccgucaccgaccugcagaugcucaugugcucaacccccgccacaggaagcggcucugcuaucgcuuccggcgucgccgucugcaaaguccuccaccucgaaggcgaaguaaacaaaaucaagucagcccuccucuccaccaacaaagccgucgucucucucucaaacggcguauccguccucacauucaaaguccucgaccucaaaaacuacaucgacaaacaacuucuccccauccuaaacaaacaaucaugcuccauccccaaccccgaaacagucauggaauuucaacaaaagaacaaccgccucuuagaaaucacccgagaauuuuccgucaacgcgggagucacaacccccguuucuacguauaugcucaccaacuccgaacuccuuucccucauaaacgacaugccaaucaccaacgaccaaaagaaacucaugucaaacaacguccaaaucguccgacaacaauccuacucuauuaugugcaucaucaaagaagaaguucucgccuacgucguccaacuaccccucuacggcgugaucgacacccccugcuggaaacuacacaccucaccccucugcaccaccaacaccaaggaaggcuccaacaucugccucacccgcaccgaccgcggcugguacugcgacaacgcuggcuccgucucauucuucccgcaagccgaaacuugcaaaguaugcuccaacagaguauucugcgacaccaugaacucacuaacccucccuuccgaagucaaccuuugcaacguugacauauucaacccaaaguacgauugcaaaauuaugacauccaaaacagaugucuccuccuccgucaucacaucccucggugccauuguaucaugcuacggaaaaaccaaaugcaccgcauccaacaaaaacaaaggaaucaucaaaaccuucucaaacggcugcgauuacgucucaaacaaaggagucgacacagucuccgucggaaacacccuauacuacgucaacaaacaagaaggccaaucccuguacgucaaaggagaacccaucaucaacuucuacgacccccucgucuucccgagcgacgaguucgacgccuccaucucacaagucaaugaaaagaucaaccaaucccuugccuucauccggaaaucggacgaacuccuacacaacgugaacgcuggaaaaucaaccaccaacaucaugaucacaaccaucauuaucgucaucaucgucauacuccucucccuaaucgccgucggccuccuccuguauugcaaagcucgcuccacccccgucacccuguccaaagaccaacucuccggaaucaacaacaucgccuucucaaacuaaggacuaguguccaccugucccuccugggcugcuggauugucucguuuuccugccaaauaaacaggaucagcgcuuuacagaucuaaaaaaaaaaaaaaaaaaaaaaaaaaaaaaaaaaaaaaaaaaaaaaaaaaaaaaaaaaaaaaaaugcaucccccccccccccccccccccccccccccccaaaggcucuuuucagagccaccagaauu

SEQ ID NO: 6161 - RNA, 2006 nt, Artificial Sequence
  mRNA product Design c-2 comprising derived and/or modified sequence from HRSV(A2)__F_DSCav1_mut6 (opt1)
gggagacuccugucgggcggaaguaggaggaguagaguuuaaaaacaguacucuuuuuccgguucgggacguaguugaagcaacgacaagccggauaaccgcucuugagacaggaagcuuaccauggagcugcucauccugaaggccaacgccaucaccaccauccugacggcggugaccuucugcuucgccagcggccagaacaucaccgaggaguucuaccaguccacgugcagcgccgucuccaagggguaccucggcgcccugcggaccggcugguacaccuccgugaucaccaucgagcugagcaacaucaaggagaacaagugcaacgggaccgacgccaaggugaagcucaucaagcaggagcuggacaaguacaagaacgcggucacggaccugcagaugcugaugugcuccaccccggcaaccggcuccggcuccgccaucgcgagcggcgucgccgugugcaaggugcugcaccucgagggggaggucaacaagaucaagagcgcccugcuguccaccaacaaggccguggugagccucuccaacggcgucagcgugcugaccuucaaggugcuggaccucaagaacuacaucgacaagcagcugcugcccauccugaacaagcagagcugcuccauccccaaccccgagacggugauggaguuccagcagaagaacaaccggcuccuggagaucacccgcgaguucagcgugaacgccggggucaccacccccguguccacguacaugcugaccaacagcgagcuccugucccugaucaacgacaugccgaucaccaacgaccagaagaagcucaugagcaacaacgugcagaucguccggcagcaguccuacagcaucaugugcaucaucaaggaggaggugcuggcguacgugguccagcugccccucuacggcgugaucgacacccccugcuggaagcugcacacgagcccccugugcaccaccaacaccaaggagggguccaacaucugccucacgcgcaccgaccggggcugguacugcgacaacgccggcagcgucuccuucuucccgcaggccgagaccugcaaggugugcagcaaccgcguguucugcgacaccaugaacucccugacgcugcccagcgagguaaaccucugcaacgucgacaucuucaaccccaaguacgacugcaagaucaugaccuccaagaccgacgugagcuccagcgugaucaccucccugggggccaucgucagcugcuacggcaagacgaagugcaccgccagcaacaagaacaaggggaucaucaagaccuucuccaacggcugcgacuacgugagcaacaagggcguggacaccguguccgucgggaacacccuguacuacgugaacaagcaggagggccagagccucuacgugaagggggagcccaucaucaacuucuacgacccgcuggucuuccccuccgacgaguucgacgcgagcaucucccaggugaacgagaagaucaaccagagccuggccuucauccgcaaguccgacgagcugcuccacaacgugaacgccggcaagagcacgaccaacaucaugaucaccaccaucaucaucgucaucaucgugauccugcugucccucaucgccguggggcugcugcucuacugcaaggcccggagcacgcccgucacccuguccaaggaccagcugagcggcaucaacaacaucgcguucuccaacugaggacuaguggaagcauuuuccuggcugauuaaaagaaauuacucagcuauggucaucuguuccuguuagaaggcuaugcagcauauuauauacuaugcgcauguuaugaaaugcauaauaaaaaauuuuaaaaaaucuaaaagaucuaaaaaaaaaaaaaaaaaaaaaaaaaaaaaaaaaaaaaaaaaaaaaaaaaaaaaaaaaaaaaaaaugcaucccccccccccccccccccccccccccccccaaaggcucuuuucagagccaccagaauu

SEQ ID NO: 6162 - RNA, 2006 nt, Artificial Sequence
  mRNA product Design c-2 comprising derived and/or modified sequence from HRSV(A2)__F_DSCav1_mut6 (opt1)
gggagacuccugucgggcggaaguaggaggaguagaguuuaaaaacaguacucuuuuuccgguucgggacguaguugaagcaacgacaagccggauaaccgcucuugagacaggaagcuuaccauggagcugcucauccugaaggccaacgccaucaccaccauccugacggcggugaccuucugcuucgccagcggccagaacaucaccgaggaguucuaccaguccacgugcagcgccgucuccaagggguaccucggcgcccugcgcaccgggugguacaccagcgugaucaccaucgagcuguccaacaucaaggagaacaagugcaacggcaccgacgccaaggugaagcucaucaagcaggagcuggacaaguacaagaacgcggucacggaccugcagaugcucaugugcagcacccccgccaccggguccggcagcgccaucgccuccggcguggcggugugcaagguccugcaccuggagggggaggugaacaagaucaagagcgcccuccuguccaccaacaaggccguggucagccuguccaacggcgugagcgugcucacguucaagguccuggaccugaagaacuacaucgacaagcagcuccugccgauccugaacaagcaguccugcagcauccccaaccccgagaccgugauggaguuccagcagaagaacaaccggcuccuggagaucacccgcgaguucuccgugaacgccggggucaccacgcccgugagcaccuacaugcugaccaacuccgagcuccugagccugaucaacgacaugccgaucaccaacgaccagaagaagcucaugagcaacaacgugcagaucguccggcagcaguccuacagcaucaugugcaucaucaaggaggaggugcuggccuacgugguccagcugccccucuacggcgugaucgacacgcccugcuggaagcugcacaccagcccccugugcaccaccaacacgaaggaggggagcaacaucugccucacccgcaccgaccggggcugguacugcgacaacgcgggcuccgugagcuucuucccgcaggccgagaccugcaaggucugcuccaaccgcguguucugcgacacgaugaacagccugacccugcccuccgaggucaaccucugcaacguggacaucuucaaccccaaguacgacugcaagaucaugaccagcaagaccgacguguccagcuccgucaucacgagccugggggccaucguguccugcuacggcaagaccaagugcaccgccagcaacaagaacaaggggaucaucaagaccuucuccaacggcugcgacuacgugagcaacaagggcgucgacacgguguccguggggaacacccuguacuacgucaacaagcaggagggccagagccucuacgugaagggggagcccaucaucaacuucuacgacccgcugguguuccccagcgacgaguucgacgccuccaucagccaggucaacgagaagaucaaccagucccuggcguucauccggaaguccgacgagcuccugcacaacgugaacgccggcaaguccaccaccaacaucaugaucaccacgaucaucaucgugaucaucgucauccugcucagccugaucgccguggggcugcuccuguacugcaaggcccgcuccacccccgugacccugagcaaggaccagcuguccggcaucaacaacaucgccuucagcaacugaggacuaguggaagcauuuuccuggcugauuaaaagaaauuacucagcuauggucaucuguuccuguuagaaggcuaugcagcauauuauauacuaugcgcauguuaugaaaugcauaauaaaaaauuuuaaaaaaucuaaaagaucuaaaaaaaaaaaaaaaaaaaaaaaaaaaaaaaaaaaaaaaaaaaaaaaaaaaaaaaaaaaaaaaaugcaucccccccccccccccccccccccccccccccaaaggcucuuuucagagccaccagaauu

SEQ ID NO: 6163 - RNA, 2006 nt, Artificial Sequence
  mRNA product Design c-2 comprising derived and/or modified sequence from HRSV(A2)__F_DSCav1_mut6 (opt2)
gggagacuccugucgggcggaaguaggaggaguagaguuuaaaaacaguacucuuuuuccgguucgggacguaguugaagcaacgacaagccggauaaccgcucuugagacaggaagcuuaccauggagcuccucauccucaaggccaacgccaucaccaccauccucaccgccgucaccuucugcuucgccuccggccagaacaucaccgaggaguucuaccaguccaccugcuccgccgucuccaagggcuaccucggcgcccuccgcaccggcugguacaccuccgucaucaccaucgagcucuccaacaucaaggagaacaagugcaacggcaccgacgccaaggucaagcucaucaagcaggagcucgacaaguacaagaacgccgucaccgaccuccagaugcucaugugcuccacccccgccaccggcuccggcuccgccaucgccuccggcgucgccgucugcaagguccuccaccucgagggcgaggucaacaagaucaaguccgcccuccucuccaccaacaaggccgucgucucccucuccaacggcgucuccguccucaccuucaagguccucgaccucaagaacuacaucgacaagcagcuccuccccauccucaacaagcaguccugcuccauccccaaccccgagaccgucauggaguuccagcagaagaacaaccgccuccucgagaucacccgcgaguucuccgucaacgccggcgucaccacccccgucuccaccuacaugcucaccaacuccgagcuccucucccucaucaacgacaugcccaucaccaacgaccagaagaagcucauguccaacaacguccagaucguccgccagcaguccuacuccaucaugugcaucaucaaggaggagguccucgccuacgucguccagcucccccucuacggcgucaucgacacccccugcuggaagcuccacaccuccccccucugcaccaccaacaccaaggagggcuccaacaucugccucacccgcaccgaccgcggcugguacugcgacaacgccggcuccgucuccuucuucccccaggccgagaccugcaaggucugcuccaaccgcgucuucugcgacaccaugaacucccucacccuccccuccgaggucaaccucugcaacgucgacaucuucaaccccaaguacgacugcaagaucaugaccuccaagaccgacgucuccuccuccgucaucaccucccucggcgccaucgucuccugcuacggcaagaccaagugcaccgccuccaacaagaacaagggcaucaucaagaccuucuccaacggcugcgacuacgucuccaacaagggcgucgacaccgucuccgucggcaacacccucuacuacgucaacaagcaggagggccagucccucuacgucaagggcgagcccaucaucaacuucuacgacccccucgucuuccccuccgacgaguucgacgccuccaucucccaggucaacgagaagaucaaccagucccucgccuucauccgcaaguccgacgagcuccuccacaacgucaacgccggcaaguccaccaccaacaucaugaucaccaccaucaucaucgucaucaucgucauccuccucucccucaucgccgucggccuccuccucuacugcaaggcccgcuccacccccgucacccucuccaaggaccagcucuccggcaucaacaacaucgccuucuccaacugaggacuaguggaagcauuuuccuggcugauuaaaagaaauuacucagcuauggucaucuguuccuguuagaaggcuaugcagcauauuauauacuaugcgcauguuaugaaaugcauaauaaaaaauuuuaaaaaaucuaaaagaucuaaaaaaaaaaaaaaaaaaaaaaaaaaaaaaaaaaaaaaaaaaaaaaaaaaaaaaaaaaaaaaaaugcaucccccccccccccccccccccccccccccccaaaggcucuuuucagagccaccagaauu

SEQ ID NO: 6164 - RNA, 2006 nt, Artificial Sequence
  mRNA product Design c-2 comprising derived and/or modified sequence from HRSV(A2)__F_DSCav1_mut6 (opt3)
gggagacuccugucgggcggaaguaggaggaguagaguuuaaaaacaguacucuuuuuccgguucgggacguaguugaagcaacgacaagccggauaaccgcucuugagacaggaagcuuaccauggagcugcucauccuuaaggccaacgcuauuaccacaauacugacugcagugacguucugcuuugccagcggccagaauaucaccgaagaguucuaccaauccacauguucugcggucucaaaaggguauuugggagcuuuaagaacugguugguacaccaguguuauuacaaucgaacugagcaacauuaaggagaauaaaugcaacggcaccgacgccaaggugaaacuaaucaagcaggaacucgauaaguauaaaaaugcaguaacugaccugcagaugcuuauguguuccacacccgccaccgggucuggaucggcuauagcaucaggcguggccgucugcaaggugcugcacuuggagggugagguuaacaaaaucaagagcgcucuccugaguacgaauaaagccguggucucccugucuaacggggugagcguacucacuuuuaagguuuuagaucugaagaauuacauugacaaacagcuuuugccuauccugaacaagcaauccuguucaauuccaaauccggaaaccgugauggaguuccagcagaaaaacaauaggcuacucgaaaucacacgggaguuuagugucaacgcgggagugacuacccccgugagcacauauaugcugaccaauucugagcuucuguccuugauaaacgauaugccuauuacgaacgaccagaagaaacucaugucaaauaacguccaaaucguucgccagcagagcuacaguauuaugugcaucaucaaggaagaggugcuggcauauguagugcaguuaccacuguacggcgucauugauacucccuguuggaaacuccauacaucuccucuuugcaccacuaauacaaaggaaggcuccaacauaugucugacccgaacggaccgugggugguacugcgauaaugccggaagcgugucguucuuuccacaagcugagaccuguaagguuugcucuaacagaguguucugcgacacaaugaacuccuugacucuacccucagaagucaaucuguguaauguggauaucuuuaacccuaaauaugacugcaagauuaugaccaguaaaacagauguaagcuccucuguuaucacuagccucggugccauagugucauguuacggcaagaccaaaugcacagcaaguaauaagaacaaggggauuaucaaaaccuucuccaauggaugugacuaugucagcaacaagggcguggacacugucucuguggguaauacgcuguacuauguuaacaaacaggaggggcagucacuuuacgugaagggagagccaaucauuaacuuuuaugauccgcugguauuccccagugacgaauuugaugcuagcaucucccaagucaaugagaaaauuaaccagucuuuggccuucauaaggaagucggacgaacuccugcacaaugugaacgcgggcaagagcacaaccaauaucaugauuacuaccaucaucauuguuauaaucgugauuuuacugucccuaaucgccgucggccuccugcuuuacugcaaagcacggucaacaccugugaccuugaguaaggaucagcugucugggauuaacaauaucgcuuucagcaacugaggacuaguggaagcauuuuccuggcugauuaaaagaaauuacucagcuauggucaucuguuccuguuagaaggcuaugcagcauauuauauacuaugcgcauguuaugaaaugcauaauaaaaaauuuuaaaaaaucuaaaagaucuaaaaaaaaaaaaaaaaaaaaaaaaaaaaaaaaaaaaaaaaaaaaaaaaaaaaaaaaaaaaaaaaugcaucccccccccccccccccccccccccccccccaaaggcucuuuucagagccaccagaauu

SEQ ID NO: 6165 - RNA, 2006 nt, Artificial Sequence
  mRNA product Design c-2 comprising derived and/or modified sequence from HRSV(A2)__F_DSCav1_mut6 (opt4)
gggagacuccugucgggcggaaguaggaggaguagaguuuaaaaacaguacucuuuuuccgguucgggacguaguugaagcaacgacaagccggauaaccgcucuugagacaggaagcuuaccauggagcugcugauccugaaggccaacgccaucaccaccauccugaccgccgugaccuucugcuucgccagcggccagaacaucaccgaggaguucuaccagagcaccugcagcgccgugagcaagggcuaccugggcgcccugagaaccggcugguacaccagcgugaucaccaucgagcugagcaacaucaaggagaacaagugcaacggcaccgacgccaaggugaagcugaucaagcaggagcuggacaaguacaagaacgccgugaccgaccugcagaugcugaugugcagcacccccgccaccggcagcggcagcgccaucgccagcggcguggccgugugcaaggugcugcaccuggagggcgaggugaacaagaucaagagcgcccugcugagcaccaacaaggccguggugagccugagcaacggcgugagcgugcugaccuucaaggugcuggaccugaagaacuacaucgacaagcagcugcugcccauccugaacaagcagagcugcagcauccccaaccccgagaccgugauggaguuccagcagaagaacaacagacugcuggagaucaccagagaguucagcgugaacgccggcgugaccacccccgugagcaccuacaugcugaccaacagcgagcugcugagccugaucaacgacaugcccaucaccaacgaccagaagaagcugaugagcaacaacgugcagaucgugagacagcagagcuacagcaucaugugcaucaucaaggaggaggugcuggccuacguggugcagcugccccuguacggcgugaucgacacccccugcuggaagcugcacaccagcccccugugcaccaccaacaccaaggagggcagcaacaucugccugaccagaaccgacagaggcugguacugcgacaacgccggcagcgugagcuucuucccccaggccgagaccugcaaggugugcagcaacagaguguucugcgacaccaugaacagccugacccugcccagcgaggugaaccugugcaacguggacaucuucaaccccaaguacgacugcaagaucaugaccagcaagaccgacgugagcagcagcgugaucaccagccugggcgccaucgugagcugcuacggcaagaccaagugcaccgccagcaacaagaacaagggcaucaucaagaccuucagcaacggcugcgacuacgugagcaacaagggcguggacaccgugagcgugggcaacacccuguacuacgugaacaagcaggagggccagagccuguacgugaagggcgagcccaucaucaacuucuacgacccccugguguuccccagcgacgaguucgacgccagcaucagccaggugaacgagaagaucaaccagagccuggccuucaucagaaagagcgacgagcugcugcacaacgugaacgccggcaagagcaccaccaacaucaugaucaccaccaucaucaucgugaucaucgugauccugcugagccugaucgccgugggccugcugcuguacugcaaggccagaagcacccccgugacccugagcaaggaccagcugagcggcaucaacaacaucgccuucagcaacugaggacuaguggaagcauuuuccuggcugauuaaaagaaauuacucagcuauggucaucuguuccuguuagaaggcuaugcagcauauuauauacuaugcgcauguuaugaaaugcauaauaaaaaauuuuaaaaaaucuaaaagaucuaaaaaaaaaaaaaaaaaaaaaaaaaaaaaaaaaaaaaaaaaaaaaaaaaaaaaaaaaaaaaaaaugcaucccccccccccccccccccccccccccccccaaaggcucuuuucagagccaccagaauu

SEQ ID NO: 6166 - RNA, 2006 nt, Artificial Sequence
  mRNA product Design c-2 comprising derived and/or modified sequence from HRSV(A2)__F_DSCav1_mut6 (opt5)
gggagacuccugucgggcggaaguaggaggaguagaguuuaaaaacaguacucuuuuuccgguucgggacguaguugaagcaacgacaagccggauaaccgcucuugagacaggaagcuuaccauggagcugcucauccugaaggccaacgcuauuaccacaauccuuacggccgugaccuucugcuuugcgagcggccagaauauuacagaagaguucuaccaauccaccuguucugcugucagcaaaggguaucugggagcccucagaacaggcugguacaccuccguuaucacaauugaacugucuaacaucaaggagaauaaaugcaacgggaccgacgccaaggugaaacuuaucaagcaggaacuggauaaguauaaaaaugcugugacggaccuccagaugcugauguguagcacccccgccacaggauccggcucugcuauugccagcggggucgcggugugcaagguucugcaccucgagggagaggugaacaaaaucaaguccgcccugcuuagcaccaauaaagcugucgugucucuguccaacggcguuagcgugcucacauuuaagguccuggaucuuaagaauuacauugacaaacagcugcucccuauccugaacaagcaaucuuguuccauuccgaaucccgaaaccgugauggaguuccagcagaaaaacaaucggcugcucgaaaucacgcgcgaguuuagcgugaacgccggcgucacaaccccuguuucuacauauaugcugaccaauuccgagcuucugagccucauuaacgauaugcccaucaccaacgaccagaagaaacugauguccaauaacgugcaaaucgugagacagcagucuuacagcauuaugugcaucauuaaggaagagguccuugcuuaugugguucagcugccucucuacggggugaucgauacacccuguuggaaacugcauacguccccucugugcaccacaaauaccaaggaaggaagcaacauuugucucacacggaccgaccgcggcugguacugcgauaaugccgggucugucuccuucuuuccgcaagcggagacguguaaggugugcagcaacagaguuuucugcgacacaaugaacucucugacccuucccagcgaagugaaucuguguaaugucgauaucuuuaacccuaaauaugacugcaagaucaugaccuccaaaacagaugugucuagcuccgucauuaccagccucggagccaucgugucuuguuacggcaagacaaaaugcacggcuuccaauaagaacaaggggauuaucaaaaccuucagcaauggaugugacuauguuucuaacaagggcguggacacagucuccgugggcaauacccuguacuauguuaacaaacaggaggggcagagccuuuacgugaagggagagcccauuaucaacuuuuaugauccucuggucuuccccuccgacgaauuugaugccucuaucagccaagugaaugagaaaauuaaccagucccucgcuuucauccggaagucugacgaacugcugcacaaugugaacgccggcaagagcacaaccaauauuaugaucacgaccauuaucauuguuaucaucgucauucuccugucccuuaucgccguggggcugcuccuguacugcaaagcucgcagcacaccggugacccugucuaaggaucagcuuuccggaauuaacaauaucgcguucagcaacugaggacuaguggaagcauuuuccuggcugauuaaaagaaauuacucagcuauggucaucuguuccuguuagaaggcuaugcagcauauuauauacuaugcgcauguuaugaaaugcauaauaaaaaauuuuaaaaaaucuaaaagaucuaaaaaaaaaaaaaaaaaaaaaaaaaaaaaaaaaaaaaaaaaaaaaaaaaaaaaaaaaaaaaaaaugcaucccccccccccccccccccccccccccccccaaaggcucuuuucagagccaccagaauu

SEQ ID NO: 6167 - RNA, 2006 nt, Artificial Sequence
  mRNA product Design c-2 comprising derived and/or modified sequence from HRSV(A2)__F_DSCav1_mut6 (opt6)
gggagacuccugucgggcggaaguaggaggaguagaguuuaaaaacaguacucuuuuuccgguucgggacguaguugaagcaacgacaagccggauaaccgcucuugagacaggaagcuuaccauggaacuauuaaucuuaaaagcaaaugcuauaaccacaauauuaacagcaguaacauucuguuuugccuccggacaaaacauaacagaagaauuuuaucaaucaacaugcucugcaguauccaaagguuacuuaggcgcacuacgcacuggaugguauacaucaguaauaacaauagaacuaucaaacauaaaagaaaauaaauguaacgguacugacgcaaaagugaaacuaauuaaacaagaacucgacaaauacaaaaaugcuguaacagaccuacaaaugcuaaugugcucaacacccgcaaccggaucaggaucagccauagccuccggagucgcaguaugcaaaguauuacaucuugaaggagaaguaaauaaaauaaaaucagcauuacuauccacaaauaaagccguaguaucacuaucaaacgguguauccguccuuacauucaaaguauuagaucuaaaaaacuacauagauaaacaacuacuacccaucuuaaacaaacaaucaugcucaauucccaacccagaaacagucauggaauuucaacaaaaaaacaacagacucuuagaaauaacacgagaauuuucaguaaacgcaggaguaaccacaccaguaaguacauacaugcucaccaacucagaauuauuaucacuuauuaacgacaugccaauuacaaacgaccaaaaaaaauuaaugucaaacaauguccaaauuguuagacaacaaucauacucuauaauguguauaauaaaagaagaaguacuagcuuacguaguucaauuaccacuauauggcguaauagauacaccuugcuggaaacuacauacaucuccauuauguacaacuaacacaaaagaaggaucuaacauaugccuaacacgcacagaucgaggaugguacugcgauaaugcagguuccguaucauucuuuccacaagcagaaacauguaaaguaugcucaaacagaguauucugugacacuaugaacuccuuaacccuacccucagaagucaaucuaugcaacguugacauauuuaacccaaaauacgacuguaaaaucaugacaucuaaaacagacguaucaucaucaguuauuacaucccuaggagcaauaguaucuugcuacggaaaaacaaaauguacagcauccaacaaaaacaaaggaauaaucaaaacauucucaaacggcugcgacuacguaucaaacaaagguguagacacaguaucaguaggaaauacuuuauauuacguaaauaaacaagaaggacaaucucuauacguuaaaggcgaaccuauuauaaacuucuacgacccacucguauucccuucagacgaauuugacgcaucuauaucccaaguuaacgaaaaaaucaaccaaucauuagccuuuauaagaaaauccgacgaauuauuacauaacgucaacgcuggaaaaucaacaacuaacauaaugauaaccacaauaauaauagucaucauaguuauauuacuaagucuaauagccguaggccuccuacuuuauugcaaagcaagaucaacaccaguaacauuauccaaagaccaacucagcggcauaaacaauauagcuuuuucaaacuagggacuaguggaagcauuuuccuggcugauuaaaagaaauuacucagcuauggucaucuguuccuguuagaaggcuaugcagcauauuauauacuaugcgcauguuaugaaaugcauaauaaaaaauuuuaaaaaaucuaaaagaucuaaaaaaaaaaaaaaaaaaaaaaaaaaaaaaaaaaaaaaaaaaaaaaaaaaaaaaaaaaaaaaaaugcaucccccccccccccccccccccccccccccccaaaggcucuuuucagagccaccagaauu

SEQ ID NO: 6168 - RNA, 2006 nt, Artificial Sequence
  mRNA product Design c-2 comprising derived and/or modified sequence from HRSV(A2)__F_DSCav1_mut6 (opt11)
gggagacuccugucgggcggaaguaggaggaguagaguuuaaaaacaguacucuuuuuccgguucgggacguaguugaagcaacgacaagccggauaaccgcucuugagacaggaagcuuaccauggaacuccucauccucaaagccaacgcaaucacaaccauacuaacugcaguuacuuucugcuucgcauccggccaaaacaucaccgaagaguucuaccaaucaaccugcuccgcagucuccaaaggauaccucggagcccuucgcaccggcugguacaccuccgucauaaccaucgaacucucaaacauaaaagaaaacaaaugcaacggcacagacgcgaaagucaaacuuaucaaacaagaacucgacaaauacaaaaacgccgucaccgaccugcagaugcucaugugcucaacccccgccacaggaagcggcucugcuaucgcuuccggcgucgccgucugcaaaguccuccaccucgaaggcgaaguaaacaaaaucaagucagcccuccucuccaccaacaaagccgucgucucucucucaaacggcguauccguccucacauucaaaguccucgaccucaaaaacuacaucgacaaacaacuucuccccauccuaaacaaacaaucaugcuccauccccaaccccgaaacagucauggaauuucaacaaaagaacaaccgccucuuagaaaucacccgagaauuuuccgucaacgcgggagucacaacccccguuucuacguauaugcucaccaacuccgaacuccuuucccucauaaacgacaugccaaucaccaacgaccaaaagaaacucaugucaaacaacguccaaaucguccgacaacaauccuacucuauuaugugcaucaucaaagaagaaguucucgccuacgucguccaacuaccccucuacggcgugaucgacacccccugcuggaaacuacacaccucaccccucugcaccaccaacaccaaggaaggcuccaacaucugccucacccgcaccgaccgcggcugguacugcgacaacgcuggcuccgucucauucuucccgcaagccgaaacuugcaaaguaugcuccaacagaguauucugcgacaccaugaacucacuaacccucccuuccgaagucaaccuuugcaacguugacauauucaacccaaaguacgauugcaaaauuaugacauccaaaacagaugucuccuccuccgucaucacaucccucggugccauuguaucaugcuacggaaaaaccaaaugcaccgcauccaacaaaaacaaaggaaucaucaaaaccuucucaaacggcugcgauuacgucucaaacaaaggagucgacacagucuccgucggaaacacccuauacuacgucaacaaacaagaaggccaaucccuguacgucaaaggagaacccaucaucaacuucuacgacccccucgucuucccgagcgacgaguucgacgccuccaucucacaagucaaugaaaagaucaaccaaucccuugccuucauccggaaaucggacgaacuccuacacaacgugaacgcuggaaaaucaaccaccaacaucaugaucacaaccaucauuaucgucaucaucgucauacuccucucccuaaucgccgucggccuccuccuguauugcaaagcucgcuccacccccgucacccuguccaaagaccaacucuccggaaucaacaacaucgccuucucaaacuaaggacuaguggaagcauuuuccuggcugauuaaaagaaauuacucagcuauggucaucuguuccuguuagaaggcuaugcagcauauuauauacuaugcgcauguuaugaaaugcauaauaaaaaauuuuaaaaaaucuaaaagaucuaaaaaaaaaaaaaaaaaaaaaaaaaaaaaaaaaaaaaaaaaaaaaaaaaaaaaaaaaaaaaaaaugcaucccccccccccccccccccccccccccccccaaaggcucuuuucagagccaccagaauu

SEQ ID NO: 6169 - RNA, 1983 nt, Artificial Sequence
  mRNA product Design c-3 comprising derived and/or modified sequence from HRSV(A2)__F_DSCav1_mut6 (opt1)
gggagaguccgcucagccagguugcagaagcggcuuagcguguguccuaaucuucucucugcguguagguaggccugugccgcaaacaagcuuaccauggagcugcucauccugaaggccaacgccaucaccaccauccugacggcggugaccuucugcuucgccagcggccagaacaucaccgaggaguucuaccaguccacgugcagcgccgucuccaagggguaccucggcgcccugcggaccggcugguacaccuccgugaucaccaucgagcugagcaacaucaaggagaacaagugcaacgggaccgacgccaaggugaagcucaucaagcaggagcuggacaaguacaagaacgcggucacggaccugcagaugcugaugugcuccaccccggcaaccggcuccggcuccgccaucgcgagcggcgucgccgugugcaaggugcugcaccucgagggggaggucaacaagaucaagagcgcccugcuguccaccaacaaggccguggugagccucuccaacggcgucagcgugcugaccuucaaggugcuggaccucaagaacuacaucgacaagcagcugcugcccauccugaacaagcagagcugcuccauccccaaccccgagacggugauggaguuccagcagaagaacaaccggcuccuggagaucacccgcgaguucagcgugaacgccggggucaccacccccguguccacguacaugcugaccaacagcgagcuccugucccugaucaacgacaugccgaucaccaacgaccagaagaagcucaugagcaacaacgugcagaucguccggcagcaguccuacagcaucaugugcaucaucaaggaggaggugcuggcguacgugguccagcugccccucuacggcgugaucgacacccccugcuggaagcugcacacgagcccccugugcaccaccaacaccaaggagggguccaacaucugccucacgcgcaccgaccggggcugguacugcgacaacgccggcagcgucuccuucuucccgcaggccgagaccugcaaggugugcagcaaccgcguguucugcgacaccaugaacucccugacgcugcccagcgagguaaaccucugcaacgucgacaucuucaaccccaaguacgacugcaagaucaugaccuccaagaccgacgugagcuccagcgugaucaccucccugggggccaucgucagcugcuacggcaagacgaagugcaccgccagcaacaagaacaaggggaucaucaagaccuucuccaacggcugcgacuacgugagcaacaagggcguggacaccguguccgucgggaacacccuguacuacgugaacaagcaggagggccagagccucuacgugaagggggagcccaucaucaacuucuacgacccgcuggucuuccccuccgacgaguucgacgcgagcaucucccaggugaacgagaagaucaaccagagccuggccuucauccgcaaguccgacgagcugcuccacaacgugaacgccggcaagagcacgaccaacaucaugaucaccaccaucaucaucgucaucaucgugauccugcugucccucaucgccguggggcugcugcucuacugcaaggcccggagcacgcccgucacccuguccaaggaccagcugagcggcaucaacaacaucgcguucuccaacugaggacuaguacuggcugcaucucccuuuccucuguccuccauccuucucccaggauggugaagggggaccugguacccagugauccccaccccaggauccuaaaucaugacuuaccugcuaauaaaaacucauuggaaaagugagaagaucuaaaaaaaaaaaaaaaaaaaaaaaaaaaaaaaaaaaaaaaaaaaaaaaaaaaaaaaaaaaaaaaaugcaucccccccccccccccccccccccccccccccaaaggcucuuuucagagccaccagaauu

SEQ ID NO: 6170 - RNA, 1983 nt, Artificial Sequence
  mRNA product Design c-3 comprising derived and/or modified sequence from HRSV(A2)__F_DSCav1_mut6 (opt1)
gggagaguccgcucagccagguugcagaagcggcuuagcguguguccuaaucuucucucugcguguagguaggccugugccgcaaacaagcuuaccauggagcugcucauccugaaggccaacgccaucaccaccauccugacggcggugaccuucugcuucgccagcggccagaacaucaccgaggaguucuaccaguccacgugcagcgccgucuccaagggguaccucggcgcccugcgcaccgggugguacaccagcgugaucaccaucgagcuguccaacaucaaggagaacaagugcaacggcaccgacgccaaggugaagcucaucaagcaggagcuggacaaguacaagaacgcggucacggaccugcagaugcucaugugcagcacccccgccaccggguccggcagcgccaucgccuccggcguggcggugugcaagguccugcaccuggagggggaggugaacaagaucaagagcgcccuccuguccaccaacaaggccguggucagccuguccaacggcgugagcgugcucacguucaagguccuggaccugaagaacuacaucgacaagcagcuccugccgauccugaacaagcaguccugcagcauccccaaccccgagaccgugauggaguuccagcagaagaacaaccggcuccuggagaucacccgcgaguucuccgugaacgccggggucaccacgcccgugagcaccuacaugcugaccaacuccgagcuccugagccugaucaacgacaugccgaucaccaacgaccagaagaagcucaugagcaacaacgugcagaucguccggcagcaguccuacagcaucaugugcaucaucaaggaggaggugcuggccuacgugguccagcugccccucuacggcgugaucgacacgcccugcuggaagcugcacaccagcccccugugcaccaccaacacgaaggaggggagcaacaucugccucacccgcaccgaccggggcugguacugcgacaacgcgggcuccgugagcuucuucccgcaggccgagaccugcaaggucugcuccaaccgcguguucugcgacacgaugaacagccugacccugcccuccgaggucaaccucugcaacguggacaucuucaaccccaaguacgacugcaagaucaugaccagcaagaccgacguguccagcuccgucaucacgagccugggggccaucguguccugcuacggcaagaccaagugcaccgccagcaacaagaacaaggggaucaucaagaccuucuccaacggcugcgacuacgugagcaacaagggcgucgacacgguguccguggggaacacccuguacuacgucaacaagcaggagggccagagccucuacgugaagggggagcccaucaucaacuucuacgacccgcugguguuccccagcgacgaguucgacgccuccaucagccaggucaacgagaagaucaaccagucccuggcguucauccggaaguccgacgagcuccugcacaacgugaacgccggcaaguccaccaccaacaucaugaucaccacgaucaucaucgugaucaucgucauccugcucagccugaucgccguggggcugcuccuguacugcaaggcccgcuccacccccgugacccugagcaaggaccagcuguccggcaucaacaacaucgccuucagcaacugaggacuaguacuggcugcaucucccuuuccucuguccuccauccuucucccaggauggugaagggggaccugguacccagugauccccaccccaggauccuaaaucaugacuuaccugcuaauaaaaacucauuggaaaagugagaagaucuaaaaaaaaaaaaaaaaaaaaaaaaaaaaaaaaaaaaaaaaaaaaaaaaaaaaaaaaaaaaaaaaugcaucccccccccccccccccccccccccccccccaaaggcucuuuucagagccaccagaauu

SEQ ID NO: 6171 - RNA, 1983 nt, Artificial Sequence
  mRNA product Design c-3 comprising derived and/or modified sequence from HRSV(A2)__F_DSCav1_mut6 (opt2)
gggagaguccgcucagccagguugcagaagcggcuuagcguguguccuaaucuucucucugcguguagguaggccugugccgcaaacaagcuuaccauggagcuccucauccucaaggccaacgccaucaccaccauccucaccgccgucaccuucugcuucgccuccggccagaacaucaccgaggaguucuaccaguccaccugcuccgccgucuccaagggcuaccucggcgcccuccgcaccggcugguacaccuccgucaucaccaucgagcucuccaacaucaaggagaacaagugcaacggcaccgacgccaaggucaagcucaucaagcaggagcucgacaaguacaagaacgccgucaccgaccuccagaugcucaugugcuccacccccgccaccggcuccggcuccgccaucgccuccggcgucgccgucugcaagguccuccaccucgagggcgaggucaacaagaucaaguccgcccuccucuccaccaacaaggccgucgucucccucuccaacggcgucuccguccucaccuucaagguccucgaccucaagaacuacaucgacaagcagcuccuccccauccucaacaagcaguccugcuccauccccaaccccgagaccgucauggaguuccagcagaagaacaaccgccuccucgagaucacccgcgaguucuccgucaacgccggcgucaccacccccgucuccaccuacaugcucaccaacuccgagcuccucucccucaucaacgacaugcccaucaccaacgaccagaagaagcucauguccaacaacguccagaucguccgccagcaguccuacuccaucaugugcaucaucaaggaggagguccucgccuacgucguccagcucccccucuacggcgucaucgacacccccugcuggaagcuccacaccuccccccucugcaccaccaacaccaaggagggcuccaacaucugccucacccgcaccgaccgcggcugguacugcgacaacgccggcuccgucuccuucuucccccaggccgagaccugcaaggucugcuccaaccgcgucuucugcgacaccaugaacucccucacccuccccuccgaggucaaccucugcaacgucgacaucuucaaccccaaguacgacugcaagaucaugaccuccaagaccgacgucuccuccuccgucaucaccucccucggcgccaucgucuccugcuacggcaagaccaagugcaccgccuccaacaagaacaagggcaucaucaagaccuucuccaacggcugcgacuacgucuccaacaagggcgucgacaccgucuccgucggcaacacccucuacuacgucaacaagcaggagggccagucccucuacgucaagggcgagcccaucaucaacuucuacgacccccucgucuuccccuccgacgaguucgacgccuccaucucccaggucaacgagaagaucaaccagucccucgccuucauccgcaaguccgacgagcuccuccacaacgucaacgccggcaaguccaccaccaacaucaugaucaccaccaucaucaucgucaucaucgucauccuccucucccucaucgccgucggccuccuccucuacugcaaggcccgcuccacccccgucacccucuccaaggaccagcucuccggcaucaacaacaucgccuucuccaacugaggacuaguacuggcugcaucucccuuuccucuguccuccauccuucucccaggauggugaagggggaccugguacccagugauccccaccccaggauccuaaaucaugacuuaccugcuaauaaaaacucauuggaaaagugagaagaucuaaaaaaaaaaaaaaaaaaaaaaaaaaaaaaaaaaaaaaaaaaaaaaaaaaaaaaaaaaaaaaaaugcaucccccccccccccccccccccccccccccccaaaggcucuuuucagagccaccagaauu

SEQ ID NO: 6172 - RNA, 1983 nt, Artificial Sequence
  mRNA product Design c-3 comprising derived and/or modified sequence from HRSV(A2)__F_DSCav1_mut6 (opt3)
gggagaguccgcucagccagguugcagaagcggcuuagcguguguccuaaucuucucucugcguguagguaggccugugccgcaaacaagcuuaccauggagcugcucauccuuaaggccaacgcuauuaccacaauacugacugcagugacguucugcuuugccagcggccagaauaucaccgaagaguucuaccaauccacauguucugcggucucaaaaggguauuugggagcuuuaagaacugguugguacaccaguguuauuacaaucgaacugagcaacauuaaggagaauaaaugcaacggcaccgacgccaaggugaaacuaaucaagcaggaacucgauaaguauaaaaaugcaguaacugaccugcagaugcuuauguguuccacacccgccaccgggucuggaucggcuauagcaucaggcguggccgucugcaaggugcugcacuuggagggugagguuaacaaaaucaagagcgcucuccugaguacgaauaaagccguggucucccugucuaacggggugagcguacucacuuuuaagguuuuagaucugaagaauuacauugacaaacagcuuuugccuauccugaacaagcaauccuguucaauuccaaauccggaaaccgugauggaguuccagcagaaaaacaauaggcuacucgaaaucacacgggaguuuagugucaacgcgggagugacuacccccgugagcacauauaugcugaccaauucugagcuucuguccuugauaaacgauaugccuauuacgaacgaccagaagaaacucaugucaaauaacguccaaaucguucgccagcagagcuacaguauuaugugcaucaucaaggaagaggugcuggcauauguagugcaguuaccacuguacggcgucauugauacucccuguuggaaacuccauacaucuccucuuugcaccacuaauacaaaggaaggcuccaacauaugucugacccgaacggaccgugggugguacugcgauaaugccggaagcgugucguucuuuccacaagcugagaccuguaagguuugcucuaacagaguguucugcgacacaaugaacuccuugacucuacccucagaagucaaucuguguaauguggauaucuuuaacccuaaauaugacugcaagauuaugaccaguaaaacagauguaagcuccucuguuaucacuagccucggugccauagugucauguuacggcaagaccaaaugcacagcaaguaauaagaacaaggggauuaucaaaaccuucuccaauggaugugacuaugucagcaacaagggcguggacacugucucuguggguaauacgcuguacuauguuaacaaacaggaggggcagucacuuuacgugaagggagagccaaucauuaacuuuuaugauccgcugguauuccccagugacgaauuugaugcuagcaucucccaagucaaugagaaaauuaaccagucuuuggccuucauaaggaagucggacgaacuccugcacaaugugaacgcgggcaagagcacaaccaauaucaugauuacuaccaucaucauuguuauaaucgugauuuuacugucccuaaucgccgucggccuccugcuuuacugcaaagcacggucaacaccugugaccuugaguaaggaucagcugucugggauuaacaauaucgcuuucagcaacugaggacuaguacuggcugcaucucccuuuccucuguccuccauccuucucccaggauggugaagggggaccugguacccagugauccccaccccaggauccuaaaucaugacuuaccugcuaauaaaaacucauuggaaaagugagaagaucuaaaaaaaaaaaaaaaaaaaaaaaaaaaaaaaaaaaaaaaaaaaaaaaaaaaaaaaaaaaaaaaaugcaucccccccccccccccccccccccccccccccaaaggcucuuuucagagccaccagaauu

SEQ ID NO: 6173 - RNA, 1983 nt, Artificial Sequence
  mRNA product Design c-3 comprising derived and/or modified sequence from HRSV(A2)__F_DSCav1_mut6 (opt4)
gggagaguccgcucagccagguugcagaagcggcuuagcguguguccuaaucuucucucugcguguagguaggccugugccgcaaacaagcuuaccauggagcugcugauccugaaggccaacgccaucaccaccauccugaccgccgugaccuucugcuucgccagcggccagaacaucaccgaggaguucuaccagagcaccugcagcgccgugagcaagggcuaccugggcgcccugagaaccggcugguacaccagcgugaucaccaucgagcugagcaacaucaaggagaacaagugcaacggcaccgacgccaaggugaagcugaucaagcaggagcuggacaaguacaagaacgccgugaccgaccugcagaugcugaugugcagcacccccgccaccggcagcggcagcgccaucgccagcggcguggccgugugcaaggugcugcaccuggagggcgaggugaacaagaucaagagcgcccugcugagcaccaacaaggccguggugagccugagcaacggcgugagcgugcugaccuucaaggugcuggaccugaagaacuacaucgacaagcagcugcugcccauccugaacaagcagagcugcagcauccccaaccccgagaccgugauggaguuccagcagaagaacaacagacugcuggagaucaccagagaguucagcgugaacgccggcgugaccacccccgugagcaccuacaugcugaccaacagcgagcugcugagccugaucaacgacaugcccaucaccaacgaccagaagaagcugaugagcaacaacgugcagaucgugagacagcagagcuacagcaucaugugcaucaucaaggaggaggugcuggccuacguggugcagcugccccuguacggcgugaucgacacccccugcuggaagcugcacaccagcccccugugcaccaccaacaccaaggagggcagcaacaucugccugaccagaaccgacagaggcugguacugcgacaacgccggcagcgugagcuucuucccccaggccgagaccugcaaggugugcagcaacagaguguucugcgacaccaugaacagccugacccugcccagcgaggugaaccugugcaacguggacaucuucaaccccaaguacgacugcaagaucaugaccagcaagaccgacgugagcagcagcgugaucaccagccugggcgccaucgugagcugcuacggcaagaccaagugcaccgccagcaacaagaacaagggcaucaucaagaccuucagcaacggcugcgacuacgugagcaacaagggcguggacaccgugagcgugggcaacacccuguacuacgugaacaagcaggagggccagagccuguacgugaagggcgagcccaucaucaacuucuacgacccccugguguuccccagcgacgaguucgacgccagcaucagccaggugaacgagaagaucaaccagagccuggccuucaucagaaagagcgacgagcugcugcacaacgugaacgccggcaagagcaccaccaacaucaugaucaccaccaucaucaucgugaucaucgugauccugcugagccugaucgccgugggccugcugcuguacugcaaggccagaagcacccccgugacccugagcaaggaccagcugagcggcaucaacaacaucgccuucagcaacugaggacuaguacuggcugcaucucccuuuccucuguccuccauccuucucccaggauggugaagggggaccugguacccagugauccccaccccaggauccuaaaucaugacuuaccugcuaauaaaaacucauuggaaaagugagaagaucuaaaaaaaaaaaaaaaaaaaaaaaaaaaaaaaaaaaaaaaaaaaaaaaaaaaaaaaaaaaaaaaaugcaucccccccccccccccccccccccccccccccaaaggcucuuuucagagccaccagaauu

SEQ ID NO: 6174 - RNA, 1983 nt, Artificial Sequence
  mRNA product Design c-3 comprising derived and/or modified sequence from HRSV(A2)__F_DSCav1_mut6 (opt5)
gggagaguccgcucagccagguugcagaagcggcuuagcguguguccuaaucuucucucugcguguagguaggccugugccgcaaacaagcuuaccauggagcugcucauccugaaggccaacgcuauuaccacaauccuuacggccgugaccuucugcuuugcgagcggccagaauauuacagaagaguucuaccaauccaccuguucugcugucagcaaaggguaucugggagcccucagaacaggcugguacaccuccguuaucacaauugaacugucuaacaucaaggagaauaaaugcaacgggaccgacgccaaggugaaacuuaucaagcaggaacuggauaaguauaaaaaugcugugacggaccuccagaugcugauguguagcacccccgccacaggauccggcucugcuauugccagcggggucgcggugugcaagguucugcaccucgagggagaggugaacaaaaucaaguccgcccugcuuagcaccaauaaagcugucgugucucuguccaacggcguuagcgugcucacauuuaagguccuggaucuuaagaauuacauugacaaacagcugcucccuauccugaacaagcaaucuuguuccauuccgaaucccgaaaccgugauggaguuccagcagaaaaacaaucggcugcucgaaaucacgcgcgaguuuagcgugaacgccggcgucacaaccccuguuucuacauauaugcugaccaauuccgagcuucugagccucauuaacgauaugcccaucaccaacgaccagaagaaacugauguccaauaacgugcaaaucgugagacagcagucuuacagcauuaugugcaucauuaaggaagagguccuugcuuaugugguucagcugccucucuacggggugaucgauacacccuguuggaaacugcauacguccccucugugcaccacaaauaccaaggaaggaagcaacauuugucucacacggaccgaccgcggcugguacugcgauaaugccgggucugucuccuucuuuccgcaagcggagacguguaaggugugcagcaacagaguuuucugcgacacaaugaacucucugacccuucccagcgaagugaaucuguguaaugucgauaucuuuaacccuaaauaugacugcaagaucaugaccuccaaaacagaugugucuagcuccgucauuaccagccucggagccaucgugucuuguuacggcaagacaaaaugcacggcuuccaauaagaacaaggggauuaucaaaaccuucagcaauggaugugacuauguuucuaacaagggcguggacacagucuccgugggcaauacccuguacuauguuaacaaacaggaggggcagagccuuuacgugaagggagagcccauuaucaacuuuuaugauccucuggucuuccccuccgacgaauuugaugccucuaucagccaagugaaugagaaaauuaaccagucccucgcuuucauccggaagucugacgaacugcugcacaaugugaacgccggcaagagcacaaccaauauuaugaucacgaccauuaucauuguuaucaucgucauucuccugucccuuaucgccguggggcugcuccuguacugcaaagcucgcagcacaccggugacccugucuaaggaucagcuuuccggaauuaacaauaucgcguucagcaacugaggacuaguacuggcugcaucucccuuuccucuguccuccauccuucucccaggauggugaagggggaccugguacccagugauccccaccccaggauccuaaaucaugacuuaccugcuaauaaaaacucauuggaaaagugagaagaucuaaaaaaaaaaaaaaaaaaaaaaaaaaaaaaaaaaaaaaaaaaaaaaaaaaaaaaaaaaaaaaaaugcaucccccccccccccccccccccccccccccccaaaggcucuuuucagagccaccagaauu

SEQ ID NO: 6175 - RNA, 1983 nt, Artificial Sequence
  mRNA product Design c-3 comprising derived and/or modified sequence from HRSV(A2)__F_DSCav1_mut6 (opt6)
gggagaguccgcucagccagguugcagaagcggcuuagcguguguccuaaucuucucucugcguguagguaggccugugccgcaaacaagcuuaccauggaacuauuaaucuuaaaagcaaaugcuauaaccacaauauuaacagcaguaacauucuguuuugccuccggacaaaacauaacagaagaauuuuaucaaucaacaugcucugcaguauccaaagguuacuuaggcgcacuacgcacuggaugguauacaucaguaauaacaauagaacuaucaaacauaaaagaaaauaaauguaacgguacugacgcaaaagugaaacuaauuaaacaagaacucgacaaauacaaaaaugcuguaacagaccuacaaaugcuaaugugcucaacacccgcaaccggaucaggaucagccauagccuccggagucgcaguaugcaaaguauuacaucuugaaggagaaguaaauaaaauaaaaucagcauuacuauccacaaauaaagccguaguaucacuaucaaacgguguauccguccuuacauucaaaguauuagaucuaaaaaacuacauagauaaacaacuacuacccaucuuaaacaaacaaucaugcucaauucccaacccagaaacagucauggaauuucaacaaaaaaacaacagacucuuagaaauaacacgagaauuuucaguaaacgcaggaguaaccacaccaguaaguacauacaugcucaccaacucagaauuauuaucacuuauuaacgacaugccaauuacaaacgaccaaaaaaaauuaaugucaaacaauguccaaauuguuagacaacaaucauacucuauaauguguauaauaaaagaagaaguacuagcuuacguaguucaauuaccacuauauggcguaauagauacaccuugcuggaaacuacauacaucuccauuauguacaacuaacacaaaagaaggaucuaacauaugccuaacacgcacagaucgaggaugguacugcgauaaugcagguuccguaucauucuuuccacaagcagaaacauguaaaguaugcucaaacagaguauucugugacacuaugaacuccuuaacccuacccucagaagucaaucuaugcaacguugacauauuuaacccaaaauacgacuguaaaaucaugacaucuaaaacagacguaucaucaucaguuauuacaucccuaggagcaauaguaucuugcuacggaaaaacaaaauguacagcauccaacaaaaacaaaggaauaaucaaaacauucucaaacggcugcgacuacguaucaaacaaagguguagacacaguaucaguaggaaauacuuuauauuacguaaauaaacaagaaggacaaucucuauacguuaaaggcgaaccuauuauaaacuucuacgacccacucguauucccuucagacgaauuugacgcaucuauaucccaaguuaacgaaaaaaucaaccaaucauuagccuuuauaagaaaauccgacgaauuauuacauaacgucaacgcuggaaaaucaacaacuaacauaaugauaaccacaauaauaauagucaucauaguuauauuacuaagucuaauagccguaggccuccuacuuuauugcaaagcaagaucaacaccaguaacauuauccaaagaccaacucagcggcauaaacaauauagcuuuuucaaacuagggacuaguacuggcugcaucucccuuuccucuguccuccauccuucucccaggauggugaagggggaccugguacccagugauccccaccccaggauccuaaaucaugacuuaccugcuaauaaaaacucauuggaaaagugagaagaucuaaaaaaaaaaaaaaaaaaaaaaaaaaaaaaaaaaaaaaaaaaaaaaaaaaaaaaaaaaaaaaaaugcaucccccccccccccccccccccccccccccccaaaggcucuuuucagagccaccagaauu

SEQ ID NO: 6176 - RNA, 1983 nt, Artificial Sequence
  mRNA product Design c-3 comprising derived and/or modified sequence from HRSV(A2)__F_DSCav1_mut6 (opt11)
gggagaguccgcucagccagguugcagaagcggcuuagcguguguccuaaucuucucucugcguguagguaggccugugccgcaaacaagcuuaccauggaacuccucauccucaaagccaacgcaaucacaaccauacuaacugcaguuacuuucugcuucgcauccggccaaaacaucaccgaagaguucuaccaaucaaccugcuccgcagucuccaaaggauaccucggagcccuucgcaccggcugguacaccuccgucauaaccaucgaacucucaaacauaaaagaaaacaaaugcaacggcacagacgcgaaagucaaacuuaucaaacaagaacucgacaaauacaaaaacgccgucaccgaccugcagaugcucaugugcucaacccccgccacaggaagcggcucugcuaucgcuuccggcgucgccgucugcaaaguccuccaccucgaaggcgaaguaaacaaaaucaagucagcccuccucuccaccaacaaagccgucgucucucucucaaacggcguauccguccucacauucaaaguccucgaccucaaaaacuacaucgacaaacaacuucuccccauccuaaacaaacaaucaugcuccauccccaaccccgaaacagucauggaauuucaacaaaagaacaaccgccucuuagaaaucacccgagaauuuuccgucaacgcgggagucacaacccccguuucuacguauaugcucaccaacuccgaacuccuuucccucauaaacgacaugccaaucaccaacgaccaaaagaaacucaugucaaacaacguccaaaucguccgacaacaauccuacucuauuaugugcaucaucaaagaagaaguucucgccuacgucguccaacuaccccucuacggcgugaucgacacccccugcuggaaacuacacaccucaccccucugcaccaccaacaccaaggaaggcuccaacaucugccucacccgcaccgaccgcggcugguacugcgacaacgcuggcuccgucucauucuucccgcaagccgaaacuugcaaaguaugcuccaacagaguauucugcgacaccaugaacucacuaacccucccuuccgaagucaaccuuugcaacguugacauauucaacccaaaguacgauugcaaaauuaugacauccaaaacagaugucuccuccuccgucaucacaucccucggugccauuguaucaugcuacggaaaaaccaaaugcaccgcauccaacaaaaacaaaggaaucaucaaaaccuucucaaacggcugcgauuacgucucaaacaaaggagucgacacagucuccgucggaaacacccuauacuacgucaacaaacaagaaggccaaucccuguacgucaaaggagaacccaucaucaacuucuacgacccccucgucuucccgagcgacgaguucgacgccuccaucucacaagucaaugaaaagaucaaccaaucccuugccuucauccggaaaucggacgaacuccuacacaacgugaacgcuggaaaaucaaccaccaacaucaugaucacaaccaucauuaucgucaucaucgucauacuccucucccuaaucgccgucggccuccuccuguauugcaaagcucgcuccacccccgucacccuguccaaagaccaacucuccggaaucaacaacaucgccuucucaaacuaaggacuaguacuggcugcaucucccuuuccucuguccuccauccuucucccaggauggugaagggggaccugguacccagugauccccaccccaggauccuaaaucaugacuuaccugcuaauaaaaacucauuggaaaagugagaagaucuaaaaaaaaaaaaaaaaaaaaaaaaaaaaaaaaaaaaaaaaaaaaaaaaaaaaaaaaaaaaaaaaugcaucccccccccccccccccccccccccccccccaaaggcucuuuucagagccaccagaauu

SEQ ID NO: 6177 - RNA, 1979 nt, Artificial Sequence
  mRNA product Design c-4 comprising derived and/or modified sequence from HRSV(A2)__F_DSCav1_mut6 (opt1)
gggagaguccgcucagccagguugcagaagcggcuuagcguguguccuaaucuucucucugcguguagguaggccugugccgcaaacaagcuuaccauggagcugcucauccugaaggccaacgccaucaccaccauccugacggcggugaccuucugcuucgccagcggccagaacaucaccgaggaguucuaccaguccacgugcagcgccgucuccaagggguaccucggcgcccugcggaccggcugguacaccuccgugaucaccaucgagcugagcaacaucaaggagaacaagugcaacgggaccgacgccaaggugaagcucaucaagcaggagcuggacaaguacaagaacgcggucacggaccugcagaugcugaugugcuccaccccggcaaccggcuccggcuccgccaucgcgagcggcgucgccgugugcaaggugcugcaccucgagggggaggucaacaagaucaagagcgcccugcuguccaccaacaaggccguggugagccucuccaacggcgucagcgugcugaccuucaaggugcuggaccucaagaacuacaucgacaagcagcugcugcccauccugaacaagcagagcugcuccauccccaaccccgagacggugauggaguuccagcagaagaacaaccggcuccuggagaucacccgcgaguucagcgugaacgccggggucaccacccccguguccacguacaugcugaccaacagcgagcuccugucccugaucaacgacaugccgaucaccaacgaccagaagaagcucaugagcaacaacgugcagaucguccggcagcaguccuacagcaucaugugcaucaucaaggaggaggugcuggcguacgugguccagcugccccucuacggcgugaucgacacccccugcuggaagcugcacacgagcccccugugcaccaccaacaccaaggagggguccaacaucugccucacgcgcaccgaccggggcugguacugcgacaacgccggcagcgucuccuucuucccgcaggccgagaccugcaaggugugcagcaaccgcguguucugcgacaccaugaacucccugacgcugcccagcgagguaaaccucugcaacgucgacaucuucaaccccaaguacgacugcaagaucaugaccuccaagaccgacgugagcuccagcgugaucaccucccugggggccaucgucagcugcuacggcaagacgaagugcaccgccagcaacaagaacaaggggaucaucaagaccuucuccaacggcugcgacuacgugagcaacaagggcguggacaccguguccgucgggaacacccuguacuacgugaacaagcaggagggccagagccucuacgugaagggggagcccaucaucaacuucuacgacccgcuggucuuccccuccgacgaguucgacgcgagcaucucccaggugaacgagaagaucaaccagagccuggccuucauccgcaaguccgacgagcugcuccacaacgugaacgccggcaagagcacgaccaacaucaugaucaccaccaucaucaucgucaucaucgugauccugcugucccucaucgccguggggcugcugcucuacugcaaggcccggagcacgcccgucacccuguccaaggaccagcugagcggcaucaacaacaucgcguucuccaacugaggacuaguggaagcauuuuccuggcugauuaaaagaaauuacucagcuauggucaucuguuccuguuagaaggcuaugcagcauauuauauacuaugcgcauguuaugaaaugcauaauaaaaaauuuuaaaaaaucuaaaagaucuaaaaaaaaaaaaaaaaaaaaaaaaaaaaaaaaaaaaaaaaaaaaaaaaaaaaaaaaaaaaaaaaugcaucccccccccccccccccccccccccccccccaaaggcucuuuucagagccaccagaauu

SEQ ID NO: 6178 - RNA, 1979 nt, Artificial Sequence
  mRNA product Design c-4 comprising derived and/or modified sequence from HRSV(A2)__F_DSCav1_mut6 (opt1)
gggagaguccgcucagccagguugcagaagcggcuuagcguguguccuaaucuucucucugcguguagguaggccugugccgcaaacaagcuuaccauggagcugcucauccugaaggccaacgccaucaccaccauccugacggcggugaccuucugcuucgccagcggccagaacaucaccgaggaguucuaccaguccacgugcagcgccgucuccaagggguaccucggcgcccugcgcaccgggugguacaccagcgugaucaccaucgagcuguccaacaucaaggagaacaagugcaacggcaccgacgccaaggugaagcucaucaagcaggagcuggacaaguacaagaacgcggucacggaccugcagaugcucaugugcagcacccccgccaccggguccggcagcgccaucgccuccggcguggcggugugcaagguccugcaccuggagggggaggugaacaagaucaagagcgcccuccuguccaccaacaaggccguggucagccuguccaacggcgugagcgugcucacguucaagguccuggaccugaagaacuacaucgacaagcagcuccugccgauccugaacaagcaguccugcagcauccccaaccccgagaccgugauggaguuccagcagaagaacaaccggcuccuggagaucacccgcgaguucuccgugaacgccggggucaccacgcccgugagcaccuacaugcugaccaacuccgagcuccugagccugaucaacgacaugccgaucaccaacgaccagaagaagcucaugagcaacaacgugcagaucguccggcagcaguccuacagcaucaugugcaucaucaaggaggaggugcuggccuacgugguccagcugccccucuacggcgugaucgacacgcccugcuggaagcugcacaccagcccccugugcaccaccaacacgaaggaggggagcaacaucugccucacccgcaccgaccggggcugguacugcgacaacgcgggcuccgugagcuucuucccgcaggccgagaccugcaaggucugcuccaaccgcguguucugcgacacgaugaacagccugacccugcccuccgaggucaaccucugcaacguggacaucuucaaccccaaguacgacugcaagaucaugaccagcaagaccgacguguccagcuccgucaucacgagccugggggccaucguguccugcuacggcaagaccaagugcaccgccagcaacaagaacaaggggaucaucaagaccuucuccaacggcugcgacuacgugagcaacaagggcgucgacacgguguccguggggaacacccuguacuacgucaacaagcaggagggccagagccucuacgugaagggggagcccaucaucaacuucuacgacccgcugguguuccccagcgacgaguucgacgccuccaucagccaggucaacgagaagaucaaccagucccuggcguucauccggaaguccgacgagcuccugcacaacgugaacgccggcaaguccaccaccaacaucaugaucaccacgaucaucaucgugaucaucgucauccugcucagccugaucgccguggggcugcuccuguacugcaaggcccgcuccacccccgugacccugagcaaggaccagcuguccggcaucaacaacaucgccuucagcaacugaggacuaguggaagcauuuuccuggcugauuaaaagaaauuacucagcuauggucaucuguuccuguuagaaggcuaugcagcauauuauauacuaugcgcauguuaugaaaugcauaauaaaaaauuuuaaaaaaucuaaaagaucuaaaaaaaaaaaaaaaaaaaaaaaaaaaaaaaaaaaaaaaaaaaaaaaaaaaaaaaaaaaaaaaaugcaucccccccccccccccccccccccccccccccaaaggcucuuuucagagccaccagaauu

SEQ ID NO: 6179 - RNA, 1979 nt, Artificial Sequence
  mRNA product Design c-4 comprising derived and/or modified sequence from HRSV(A2)__F_DSCav1_mut6 (opt2)
gggagaguccgcucagccagguugcagaagcggcuuagcguguguccuaaucuucucucugcguguagguaggccugugccgcaaacaagcuuaccauggagcuccucauccucaaggccaacgccaucaccaccauccucaccgccgucaccuucugcuucgccuccggccagaacaucaccgaggaguucuaccaguccaccugcuccgccgucuccaagggcuaccucggcgcccuccgcaccggcugguacaccuccgucaucaccaucgagcucuccaacaucaaggagaacaagugcaacggcaccgacgccaaggucaagcucaucaagcaggagcucgacaaguacaagaacgccgucaccgaccuccagaugcucaugugcuccacccccgccaccggcuccggcuccgccaucgccuccggcgucgccgucugcaagguccuccaccucgagggcgaggucaacaagaucaaguccgcccuccucuccaccaacaaggccgucgucucccucuccaacggcgucuccguccucaccuucaagguccucgaccucaagaacuacaucgacaagcagcuccuccccauccucaacaagcaguccugcuccauccccaaccccgagaccgucauggaguuccagcagaagaacaaccgccuccucgagaucacccgcgaguucuccgucaacgccggcgucaccacccccgucuccaccuacaugcucaccaacuccgagcuccucucccucaucaacgacaugcccaucaccaacgaccagaagaagcucauguccaacaacguccagaucguccgccagcaguccuacuccaucaugugcaucaucaaggaggagguccucgccuacgucguccagcucccccucuacggcgucaucgacacccccugcuggaagcuccacaccuccccccucugcaccaccaacaccaaggagggcuccaacaucugccucacccgcaccgaccgcggcugguacugcgacaacgccggcuccgucuccuucuucccccaggccgagaccugcaaggucugcuccaaccgcgucuucugcgacaccaugaacucccucacccuccccuccgaggucaaccucugcaacgucgacaucuucaaccccaaguacgacugcaagaucaugaccuccaagaccgacgucuccuccuccgucaucaccucccucggcgccaucgucuccugcuacggcaagaccaagugcaccgccuccaacaagaacaagggcaucaucaagaccuucuccaacggcugcgacuacgucuccaacaagggcgucgacaccgucuccgucggcaacacccucuacuacgucaacaagcaggagggccagucccucuacgucaagggcgagcccaucaucaacuucuacgacccccucgucuuccccuccgacgaguucgacgccuccaucucccaggucaacgagaagaucaaccagucccucgccuucauccgcaaguccgacgagcuccuccacaacgucaacgccggcaaguccaccaccaacaucaugaucaccaccaucaucaucgucaucaucgucauccuccucucccucaucgccgucggccuccuccucuacugcaaggcccgcuccacccccgucacccucuccaaggaccagcucuccggcaucaacaacaucgccuucuccaacugaggacuaguggaagcauuuuccuggcugauuaaaagaaauuacucagcuauggucaucuguuccuguuagaaggcuaugcagcauauuauauacuaugcgcauguuaugaaaugcauaauaaaaaauuuuaaaaaaucuaaaagaucuaaaaaaaaaaaaaaaaaaaaaaaaaaaaaaaaaaaaaaaaaaaaaaaaaaaaaaaaaaaaaaaaugcaucccccccccccccccccccccccccccccccaaaggcucuuuucagagccaccagaauu

SEQ ID NO: 6180 - RNA, 1979 nt, Artificial Sequence
  mRNA product Design c-4 comprising derived and/or modified sequence from HRSV(A2)__F_DSCav1_mut6 (opt3)
gggagaguccgcucagccagguugcagaagcggcuuagcguguguccuaaucuucucucugcguguagguaggccugugccgcaaacaagcuuaccauggagcugcucauccuuaaggccaacgcuauuaccacaauacugacugcagugacguucugcuuugccagcggccagaauaucaccgaagaguucuaccaauccacauguucugcggucucaaaaggguauuugggagcuuuaagaacugguugguacaccaguguuauuacaaucgaacugagcaacauuaaggagaauaaaugcaacggcaccgacgccaaggugaaacuaaucaagcaggaacucgauaaguauaaaaaugcaguaacugaccugcagaugcuuauguguuccacacccgccaccgggucuggaucggcuauagcaucaggcguggccgucugcaaggugcugcacuuggagggugagguuaacaaaaucaagagcgcucuccugaguacgaauaaagccguggucucccugucuaacggggugagcguacucacuuuuaagguuuuagaucugaagaauuacauugacaaacagcuuuugccuauccugaacaagcaauccuguucaauuccaaauccggaaaccgugauggaguuccagcagaaaaacaauaggcuacucgaaaucacacgggaguuuagugucaacgcgggagugacuacccccgugagcacauauaugcugaccaauucugagcuucuguccuugauaaacgauaugccuauuacgaacgaccagaagaaacucaugucaaauaacguccaaaucguucgccagcagagcuacaguauuaugugcaucaucaaggaagaggugcuggcauauguagugcaguuaccacuguacggcgucauugauacucccuguuggaaacuccauacaucuccucuuugcaccacuaauacaaaggaaggcuccaacauaugucugacccgaacggaccgugggugguacugcgauaaugccggaagcgugucguucuuuccacaagcugagaccuguaagguuugcucuaacagaguguucugcgacacaaugaacuccuugacucuacccucagaagucaaucuguguaauguggauaucuuuaacccuaaauaugacugcaagauuaugaccaguaaaacagauguaagcuccucuguuaucacuagccucggugccauagugucauguuacggcaagaccaaaugcacagcaaguaauaagaacaaggggauuaucaaaaccuucuccaauggaugugacuaugucagcaacaagggcguggacacugucucuguggguaauacgcuguacuauguuaacaaacaggaggggcagucacuuuacgugaagggagagccaaucauuaacuuuuaugauccgcugguauuccccagugacgaauuugaugcuagcaucucccaagucaaugagaaaauuaaccagucuuuggccuucauaaggaagucggacgaacuccugcacaaugugaacgcgggcaagagcacaaccaauaucaugauuacuaccaucaucauuguuauaaucgugauuuuacugucccuaaucgccgucggccuccugcuuuacugcaaagcacggucaacaccugugaccuugaguaaggaucagcugucugggauuaacaauaucgcuuucagcaacugaggacuaguggaagcauuuuccuggcugauuaaaagaaauuacucagcuauggucaucuguuccuguuagaaggcuaugcagcauauuauauacuaugcgcauguuaugaaaugcauaauaaaaaauuuuaaaaaaucuaaaagaucuaaaaaaaaaaaaaaaaaaaaaaaaaaaaaaaaaaaaaaaaaaaaaaaaaaaaaaaaaaaaaaaaugcaucccccccccccccccccccccccccccccccaaaggcucuuuucagagccaccagaauu

SEQ ID NO: 6181 - RNA, 1979 nt, Artificial Sequence
  mRNA product Design c-4 comprising derived and/or modified sequence from HRSV(A2)__F_DSCav1_mut6 (opt4)
gggagaguccgcucagccagguugcagaagcggcuuagcguguguccuaaucuucucucugcguguagguaggccugugccgcaaacaagcuuaccauggagcugcugauccugaaggccaacgccaucaccaccauccugaccgccgugaccuucugcuucgccagcggccagaacaucaccgaggaguucuaccagagcaccugcagcgccgugagcaagggcuaccugggcgcccugagaaccggcugguacaccagcgugaucaccaucgagcugagcaacaucaaggagaacaagugcaacggcaccgacgccaaggugaagcugaucaagcaggagcuggacaaguacaagaacgccgugaccgaccugcagaugcugaugugcagcacccccgccaccggcagcggcagcgccaucgccagcggcguggccgugugcaaggugcugcaccuggagggcgaggugaacaagaucaagagcgcccugcugagcaccaacaaggccguggugagccugagcaacggcgugagcgugcugaccuucaaggugcuggaccugaagaacuacaucgacaagcagcugcugcccauccugaacaagcagagcugcagcauccccaaccccgagaccgugauggaguuccagcagaagaacaacagacugcuggagaucaccagagaguucagcgugaacgccggcgugaccacccccgugagcaccuacaugcugaccaacagcgagcugcugagccugaucaacgacaugcccaucaccaacgaccagaagaagcugaugagcaacaacgugcagaucgugagacagcagagcuacagcaucaugugcaucaucaaggaggaggugcuggccuacguggugcagcugccccuguacggcgugaucgacacccccugcuggaagcugcacaccagcccccugugcaccaccaacaccaaggagggcagcaacaucugccugaccagaaccgacagaggcugguacugcgacaacgccggcagcgugagcuucuucccccaggccgagaccugcaaggugugcagcaacagaguguucugcgacaccaugaacagccugacccugcccagcgaggugaaccugugcaacguggacaucuucaaccccaaguacgacugcaagaucaugaccagcaagaccgacgugagcagcagcgugaucaccagccugggcgccaucgugagcugcuacggcaagaccaagugcaccgccagcaacaagaacaagggcaucaucaagaccuucagcaacggcugcgacuacgugagcaacaagggcguggacaccgugagcgugggcaacacccuguacuacgugaacaagcaggagggccagagccuguacgugaagggcgagcccaucaucaacuucuacgacccccugguguuccccagcgacgaguucgacgccagcaucagccaggugaacgagaagaucaaccagagccuggccuucaucagaaagagcgacgagcugcugcacaacgugaacgccggcaagagcaccaccaacaucaugaucaccaccaucaucaucgugaucaucgugauccugcugagccugaucgccgugggccugcugcuguacugcaaggccagaagcacccccgugacccugagcaaggaccagcugagcggcaucaacaacaucgccuucagcaacugaggacuaguggaagcauuuuccuggcugauuaaaagaaauuacucagcuauggucaucuguuccuguuagaaggcuaugcagcauauuauauacuaugcgcauguuaugaaaugcauaauaaaaaauuuuaaaaaaucuaaaagaucuaaaaaaaaaaaaaaaaaaaaaaaaaaaaaaaaaaaaaaaaaaaaaaaaaaaaaaaaaaaaaaaaugcaucccccccccccccccccccccccccccccccaaaggcucuuuucagagccaccagaauu

SEQ ID NO: 6182 - RNA, 1979 nt, Artificial Sequence
  mRNA product Design c-4 comprising derived and/or modified sequence from HRSV(A2)__F_DSCav1_mut6 (opt5)
gggagaguccgcucagccagguugcagaagcggcuuagcguguguccuaaucuucucucugcguguagguaggccugugccgcaaacaagcuuaccauggagcugcucauccugaaggccaacgcuauuaccacaauccuuacggccgugaccuucugcuuugcgagcggccagaauauuacagaagaguucuaccaauccaccuguucugcugucagcaaaggguaucugggagcccucagaacaggcugguacaccuccguuaucacaauugaacugucuaacaucaaggagaauaaaugcaacgggaccgacgccaaggugaaacuuaucaagcaggaacuggauaaguauaaaaaugcugugacggaccuccagaugcugauguguagcacccccgccacaggauccggcucugcuauugccagcggggucgcggugugcaagguucugcaccucgagggagaggugaacaaaaucaaguccgcccugcuuagcaccaauaaagcugucgugucucuguccaacggcguuagcgugcucacauuuaagguccuggaucuuaagaauuacauugacaaacagcugcucccuauccugaacaagcaaucuuguuccauuccgaaucccgaaaccgugauggaguuccagcagaaaaacaaucggcugcucgaaaucacgcgcgaguuuagcgugaacgccggcgucacaaccccuguuucuacauauaugcugaccaauuccgagcuucugagccucauuaacgauaugcccaucaccaacgaccagaagaaacugauguccaauaacgugcaaaucgugagacagcagucuuacagcauuaugugcaucauuaaggaagagguccuugcuuaugugguucagcugccucucuacggggugaucgauacacccuguuggaaacugcauacguccccucugugcaccacaaauaccaaggaaggaagcaacauuugucucacacggaccgaccgcggcugguacugcgauaaugccgggucugucuccuucuuuccgcaagcggagacguguaaggugugcagcaacagaguuuucugcgacacaaugaacucucugacccuucccagcgaagugaaucuguguaaugucgauaucuuuaacccuaaauaugacugcaagaucaugaccuccaaaacagaugugucuagcuccgucauuaccagccucggagccaucgugucuuguuacggcaagacaaaaugcacggcuuccaauaagaacaaggggauuaucaaaaccuucagcaauggaugugacuauguuucuaacaagggcguggacacagucuccgugggcaauacccuguacuauguuaacaaacaggaggggcagagccuuuacgugaagggagagcccauuaucaacuuuuaugauccucuggucuuccccuccgacgaauuugaugccucuaucagccaagugaaugagaaaauuaaccagucccucgcuuucauccggaagucugacgaacugcugcacaaugugaacgccggcaagagcacaaccaauauuaugaucacgaccauuaucauuguuaucaucgucauucuccugucccuuaucgccguggggcugcuccuguacugcaaagcucgcagcacaccggugacccugucuaaggaucagcuuuccggaauuaacaauaucgcguucagcaacugaggacuaguggaagcauuuuccuggcugauuaaaagaaauuacucagcuauggucaucuguuccuguuagaaggcuaugcagcauauuauauacuaugcgcauguuaugaaaugcauaauaaaaaauuuuaaaaaaucuaaaagaucuaaaaaaaaaaaaaaaaaaaaaaaaaaaaaaaaaaaaaaaaaaaaaaaaaaaaaaaaaaaaaaaaugcaucccccccccccccccccccccccccccccccaaaggcucuuuucagagccaccagaauu

SEQ ID NO: 6183 - RNA, 1979 nt, Artificial Sequence
  mRNA product Design c-4 comprising derived and/or modified sequence from HRSV(A2)__F_DSCav1_mut6 (opt6)
gggagaguccgcucagccagguugcagaagcggcuuagcguguguccuaaucuucucucugcguguagguaggccugugccgcaaacaagcuuaccauggaacuauuaaucuuaaaagcaaaugcuauaaccacaauauuaacagcaguaacauucuguuuugccuccggacaaaacauaacagaagaauuuuaucaaucaacaugcucugcaguauccaaagguuacuuaggcgcacuacgcacuggaugguauacaucaguaauaacaauagaacuaucaaacauaaaagaaaauaaauguaacgguacugacgcaaaagugaaacuaauuaaacaagaacucgacaaauacaaaaaugcuguaacagaccuacaaaugcuaaugugcucaacacccgcaaccggaucaggaucagccauagccuccggagucgcaguaugcaaaguauuacaucuugaaggagaaguaaauaaaauaaaaucagcauuacuauccacaaauaaagccguaguaucacuaucaaacgguguauccguccuuacauucaaaguauuagaucuaaaaaacuacauagauaaacaacuacuacccaucuuaaacaaacaaucaugcucaauucccaacccagaaacagucauggaauuucaacaaaaaaacaacagacucuuagaaauaacacgagaauuuucaguaaacgcaggaguaaccacaccaguaaguacauacaugcucaccaacucagaauuauuaucacuuauuaacgacaugccaauuacaaacgaccaaaaaaaauuaaugucaaacaauguccaaauuguuagacaacaaucauacucuauaauguguauaauaaaagaagaaguacuagcuuacguaguucaauuaccacuauauggcguaauagauacaccuugcuggaaacuacauacaucuccauuauguacaacuaacacaaaagaaggaucuaacauaugccuaacacgcacagaucgaggaugguacugcgauaaugcagguuccguaucauucuuuccacaagcagaaacauguaaaguaugcucaaacagaguauucugugacacuaugaacuccuuaacccuacccucagaagucaaucuaugcaacguugacauauuuaacccaaaauacgacuguaaaaucaugacaucuaaaacagacguaucaucaucaguuauuacaucccuaggagcaauaguaucuugcuacggaaaaacaaaauguacagcauccaacaaaaacaaaggaauaaucaaaacauucucaaacggcugcgacuacguaucaaacaaagguguagacacaguaucaguaggaaauacuuuauauuacguaaauaaacaagaaggacaaucucuauacguuaaaggcgaaccuauuauaaacuucuacgacccacucguauucccuucagacgaauuugacgcaucuauaucccaaguuaacgaaaaaaucaaccaaucauuagccuuuauaagaaaauccgacgaauuauuacauaacgucaacgcuggaaaaucaacaacuaacauaaugauaaccacaauaauaauagucaucauaguuauauuacuaagucuaauagccguaggccuccuacuuuauugcaaagcaagaucaacaccaguaacauuauccaaagaccaacucagcggcauaaacaauauagcuuuuucaaacuagggacuaguggaagcauuuuccuggcugauuaaaagaaauuacucagcuauggucaucuguuccuguuagaaggcuaugcagcauauuauauacuaugcgcauguuaugaaaugcauaauaaaaaauuuuaaaaaaucuaaaagaucuaaaaaaaaaaaaaaaaaaaaaaaaaaaaaaaaaaaaaaaaaaaaaaaaaaaaaaaaaaaaaaaaugcaucccccccccccccccccccccccccccccccaaaggcucuuuucagagccaccagaauu

SEQ ID NO: 6184 - RNA, 1979 nt, Artificial Sequence
  mRNA product Design c-4 comprising derived and/or modified sequence from HRSV(A2)__F_DSCav1_mut6 (opt11)
gggagaguccgcucagccagguugcagaagcggcuuagcguguguccuaaucuucucucugcguguagguaggccugugccgcaaacaagcuuaccauggaacuccucauccucaaagccaacgcaaucacaaccauacuaacugcaguuacuuucugcuucgcauccggccaaaacaucaccgaagaguucuaccaaucaaccugcuccgcagucuccaaaggauaccucggagcccuucgcaccggcugguacaccuccgucauaaccaucgaacucucaaacauaaaagaaaacaaaugcaacggcacagacgcgaaagucaaacuuaucaaacaagaacucgacaaauacaaaaacgccgucaccgaccugcagaugcucaugugcucaacccccgccacaggaagcggcucugcuaucgcuuccggcgucgccgucugcaaaguccuccaccucgaaggcgaaguaaacaaaaucaagucagcccuccucuccaccaacaaagccgucgucucucucucaaacggcguauccguccucacauucaaaguccucgaccucaaaaacuacaucgacaaacaacuucuccccauccuaaacaaacaaucaugcuccauccccaaccccgaaacagucauggaauuucaacaaaagaacaaccgccucuuagaaaucacccgagaauuuuccgucaacgcgggagucacaacccccguuucuacguauaugcucaccaacuccgaacuccuuucccucauaaacgacaugccaaucaccaacgaccaaaagaaacucaugucaaacaacguccaaaucguccgacaacaauccuacucuauuaugugcaucaucaaagaagaaguucucgccuacgucguccaacuaccccucuacggcgugaucgacacccccugcuggaaacuacacaccucaccccucugcaccaccaacaccaaggaaggcuccaacaucugccucacccgcaccgaccgcggcugguacugcgacaacgcuggcuccgucucauucuucccgcaagccgaaacuugcaaaguaugcuccaacagaguauucugcgacaccaugaacucacuaacccucccuuccgaagucaaccuuugcaacguugacauauucaacccaaaguacgauugcaaaauuaugacauccaaaacagaugucuccuccuccgucaucacaucccucggugccauuguaucaugcuacggaaaaaccaaaugcaccgcauccaacaaaaacaaaggaaucaucaaaaccuucucaaacggcugcgauuacgucucaaacaaaggagucgacacagucuccgucggaaacacccuauacuacgucaacaaacaagaaggccaaucccuguacgucaaaggagaacccaucaucaacuucuacgacccccucgucuucccgagcgacgaguucgacgccuccaucucacaagucaaugaaaagaucaaccaaucccuugccuucauccggaaaucggacgaacuccuacacaacgugaacgcuggaaaaucaaccaccaacaucaugaucacaaccaucauuaucgucaucaucgucauacuccucucccuaaucgccgucggccuccuccuguauugcaaagcucgcuccacccccgucacccuguccaaagaccaacucuccggaaucaacaacaucgccuucucaaacuaaggacuaguggaagcauuuuccuggcugauuaaaagaaauuacucagcuauggucaucuguuccuguuagaaggcuaugcagcauauuauauacuaugcgcauguuaugaaaugcauaauaaaaaauuuuaaaaaaucuaaaagaucuaaaaaaaaaaaaaaaaaaaaaaaaaaaaaaaaaaaaaaaaaaaaaaaaaaaaaaaaaaaaaaaaugcaucccccccccccccccccccccccccccccccaaaggcucuuuucagagccaccagaauu

SEQ ID NO: 6185 - RNA, 1897 nt, Artificial Sequence
  mRNA product Design c-5 comprising derived and/or modified sequence from HRSV(A2)__F_DSCav1_mut6 (opt1)
gggagagcggcucggccauuuugucccagucaguccggaggcugcggcugcagaaguaccgccugcggaguaacugcaaagaagcuuaccauggagcugcucauccugaaggccaacgccaucaccaccauccugacggcggugaccuucugcuucgccagcggccagaacaucaccgaggaguucuaccaguccacgugcagcgccgucuccaagggguaccucggcgcccugcggaccggcugguacaccuccgugaucaccaucgagcugagcaacaucaaggagaacaagugcaacgggaccgacgccaaggugaagcucaucaagcaggagcuggacaaguacaagaacgcggucacggaccugcagaugcugaugugcuccaccccggcaaccggcuccggcuccgccaucgcgagcggcgucgccgugugcaaggugcugcaccucgagggggaggucaacaagaucaagagcgcccugcuguccaccaacaaggccguggugagccucuccaacggcgucagcgugcugaccuucaaggugcuggaccucaagaacuacaucgacaagcagcugcugcccauccugaacaagcagagcugcuccauccccaaccccgagacggugauggaguuccagcagaagaacaaccggcuccuggagaucacccgcgaguucagcgugaacgccggggucaccacccccguguccacguacaugcugaccaacagcgagcuccugucccugaucaacgacaugccgaucaccaacgaccagaagaagcucaugagcaacaacgugcagaucguccggcagcaguccuacagcaucaugugcaucaucaaggaggaggugcuggcguacgugguccagcugccccucuacggcgugaucgacacccccugcuggaagcugcacacgagcccccugugcaccaccaacaccaaggagggguccaacaucugccucacgcgcaccgaccggggcugguacugcgacaacgccggcagcgucuccuucuucccgcaggccgagaccugcaaggugugcagcaaccgcguguucugcgacaccaugaacucccugacgcugcccagcgagguaaaccucugcaacgucgacaucuucaaccccaaguacgacugcaagaucaugaccuccaagaccgacgugagcuccagcgugaucaccucccugggggccaucgucagcugcuacggcaagacgaagugcaccgccagcaacaagaacaaggggaucaucaagaccuucuccaacggcugcgacuacgugagcaacaagggcguggacaccguguccgucgggaacacccuguacuacgugaacaagcaggagggccagagccucuacgugaagggggagcccaucaucaacuucuacgacccgcuggucuuccccuccgacgaguucgacgcgagcaucucccaggugaacgagaagaucaaccagagccuggccuucauccgcaaguccgacgagcugcuccacaacgugaacgccggcaagagcacgaccaacaucaugaucaccaccaucaucaucgucaucaucgugauccugcugucccucaucgccguggggcugcugcucuacugcaaggcccggagcacgcccgucacccuguccaaggaccagcugagcggcaucaacaacaucgcguucuccaacugaggacuagucccuguucccagagcccacuuuuuuuucuuuuuuugaaauaaaauagccugucuuucagaucuaaaaaaaaaaaaaaaaaaaaaaaaaaaaaaaaaaaaaaaaaaaaaaaaaaaaaaaaaaaaaaaaugcaucccccccccccccccccccccccccccccccaaaggcucuuuucagagccaccagaauu

SEQ ID NO: 6186 - RNA, 1897 nt, Artificial Sequence
  mRNA product Design c-5 comprising derived and/or modified sequence from HRSV(A2)__F_DSCav1_mut6 (opt1)
gggagagcggcucggccauuuugucccagucaguccggaggcugcggcugcagaaguaccgccugcggaguaacugcaaagaagcuuaccauggagcugcucauccugaaggccaacgccaucaccaccauccugacggcggugaccuucugcuucgccagcggccagaacaucaccgaggaguucuaccaguccacgugcagcgccgucuccaagggguaccucggcgcccugcgcaccgggugguacaccagcgugaucaccaucgagcuguccaacaucaaggagaacaagugcaacggcaccgacgccaaggugaagcucaucaagcaggagcuggacaaguacaagaacgcggucacggaccugcagaugcucaugugcagcacccccgccaccggguccggcagcgccaucgccuccggcguggcggugugcaagguccugcaccuggagggggaggugaacaagaucaagagcgcccuccuguccaccaacaaggccguggucagccuguccaacggcgugagcgugcucacguucaagguccuggaccugaagaacuacaucgacaagcagcuccugccgauccugaacaagcaguccugcagcauccccaaccccgagaccgugauggaguuccagcagaagaacaaccggcuccuggagaucacccgcgaguucuccgugaacgccggggucaccacgcccgugagcaccuacaugcugaccaacuccgagcuccugagccugaucaacgacaugccgaucaccaacgaccagaagaagcucaugagcaacaacgugcagaucguccggcagcaguccuacagcaucaugugcaucaucaaggaggaggugcuggccuacgugguccagcugccccucuacggcgugaucgacacgcccugcuggaagcugcacaccagcccccugugcaccaccaacacgaaggaggggagcaacaucugccucacccgcaccgaccggggcugguacugcgacaacgcgggcuccgugagcuucuucccgcaggccgagaccugcaaggucugcuccaaccgcguguucugcgacacgaugaacagccugacccugcccuccgaggucaaccucugcaacguggacaucuucaaccccaaguacgacugcaagaucaugaccagcaagaccgacguguccagcuccgucaucacgagccugggggccaucguguccugcuacggcaagaccaagugcaccgccagcaacaagaacaaggggaucaucaagaccuucuccaacggcugcgacuacgugagcaacaagggcgucgacacgguguccguggggaacacccuguacuacgucaacaagcaggagggccagagccucuacgugaagggggagcccaucaucaacuucuacgacccgcugguguuccccagcgacgaguucgacgccuccaucagccaggucaacgagaagaucaaccagucccuggcguucauccggaaguccgacgagcuccugcacaacgugaacgccggcaaguccaccaccaacaucaugaucaccacgaucaucaucgugaucaucgucauccugcucagccugaucgccguggggcugcuccuguacugcaaggcccgcuccacccccgugacccugagcaaggaccagcuguccggcaucaacaacaucgccuucagcaacugaggacuagucccuguucccagagcccacuuuuuuuucuuuuuuugaaauaaaauagccugucuuucagaucuaaaaaaaaaaaaaaaaaaaaaaaaaaaaaaaaaaaaaaaaaaaaaaaaaaaaaaaaaaaaaaaaugcaucccccccccccccccccccccccccccccccaaaggcucuuuucagagccaccagaauu

SEQ ID NO: 6187 - RNA, 1897 nt, Artificial Sequence
  mRNA product Design c-5 comprising derived and/or modified sequence from HRSV(A2)__F_DSCav1_mut6 (opt2)
gggagagcggcucggccauuuugucccagucaguccggaggcugcggcugcagaaguaccgccugcggaguaacugcaaagaagcuuaccauggagcuccucauccucaaggccaacgccaucaccaccauccucaccgccgucaccuucugcuucgccuccggccagaacaucaccgaggaguucuaccaguccaccugcuccgccgucuccaagggcuaccucggcgcccuccgcaccggcugguacaccuccgucaucaccaucgagcucuccaacaucaaggagaacaagugcaacggcaccgacgccaaggucaagcucaucaagcaggagcucgacaaguacaagaacgccgucaccgaccuccagaugcucaugugcuccacccccgccaccggcuccggcuccgccaucgccuccggcgucgccgucugcaagguccuccaccucgagggcgaggucaacaagaucaaguccgcccuccucuccaccaacaaggccgucgucucccucuccaacggcgucuccguccucaccuucaagguccucgaccucaagaacuacaucgacaagcagcuccuccccauccucaacaagcaguccugcuccauccccaaccccgagaccgucauggaguuccagcagaagaacaaccgccuccucgagaucacccgcgaguucuccgucaacgccggcgucaccacccccgucuccaccuacaugcucaccaacuccgagcuccucucccucaucaacgacaugcccaucaccaacgaccagaagaagcucauguccaacaacguccagaucguccgccagcaguccuacuccaucaugugcaucaucaaggaggagguccucgccuacgucguccagcucccccucuacggcgucaucgacacccccugcuggaagcuccacaccuccccccucugcaccaccaacaccaaggagggcuccaacaucugccucacccgcaccgaccgcggcugguacugcgacaacgccggcuccgucuccuucuucccccaggccgagaccugcaaggucugcuccaaccgcgucuucugcgacaccaugaacucccucacccuccccuccgaggucaaccucugcaacgucgacaucuucaaccccaaguacgacugcaagaucaugaccuccaagaccgacgucuccuccuccgucaucaccucccucggcgccaucgucuccugcuacggcaagaccaagugcaccgccuccaacaagaacaagggcaucaucaagaccuucuccaacggcugcgacuacgucuccaacaagggcgucgacaccgucuccgucggcaacacccucuacuacgucaacaagcaggagggccagucccucuacgucaagggcgagcccaucaucaacuucuacgacccccucgucuuccccuccgacgaguucgacgccuccaucucccaggucaacgagaagaucaaccagucccucgccuucauccgcaaguccgacgagcuccuccacaacgucaacgccggcaaguccaccaccaacaucaugaucaccaccaucaucaucgucaucaucgucauccuccucucccucaucgccgucggccuccuccucuacugcaaggcccgcuccacccccgucacccucuccaaggaccagcucuccggcaucaacaacaucgccuucuccaacugaggacuagucccuguucccagagcccacuuuuuuuucuuuuuuugaaauaaaauagccugucuuucagaucuaaaaaaaaaaaaaaaaaaaaaaaaaaaaaaaaaaaaaaaaaaaaaaaaaaaaaaaaaaaaaaaaugcaucccccccccccccccccccccccccccccccaaaggcucuuuucagagccaccagaauu

SEQ ID NO: 6188 - RNA, 1897 nt, Artificial Sequence
  mRNA product Design c-5 comprising derived and/or modified sequence from HRSV(A2)__F_DSCav1_mut6 (opt3)
gggagagcggcucggccauuuugucccagucaguccggaggcugcggcugcagaaguaccgccugcggaguaacugcaaagaagcuuaccauggagcugcucauccuuaaggccaacgcuauuaccacaauacugacugcagugacguucugcuuugccagcggccagaauaucaccgaagaguucuaccaauccacauguucugcggucucaaaaggguauuugggagcuuuaagaacugguugguacaccaguguuauuacaaucgaacugagcaacauuaaggagaauaaaugcaacggcaccgacgccaaggugaaacuaaucaagcaggaacucgauaaguauaaaaaugcaguaacugaccugcagaugcuuauguguuccacacccgccaccgggucuggaucggcuauagcaucaggcguggccgucugcaaggugcugcacuuggagggugagguuaacaaaaucaagagcgcucuccugaguacgaauaaagccguggucucccugucuaacggggugagcguacucacuuuuaagguuuuagaucugaagaauuacauugacaaacagcuuuugccuauccugaacaagcaauccuguucaauuccaaauccggaaaccgugauggaguuccagcagaaaaacaauaggcuacucgaaaucacacgggaguuuagugucaacgcgggagugacuacccccgugagcacauauaugcugaccaauucugagcuucuguccuugauaaacgauaugccuauuacgaacgaccagaagaaacucaugucaaauaacguccaaaucguucgccagcagagcuacaguauuaugugcaucaucaaggaagaggugcuggcauauguagugcaguuaccacuguacggcgucauugauacucccuguuggaaacuccauacaucuccucuuugcaccacuaauacaaaggaaggcuccaacauaugucugacccgaacggaccgugggugguacugcgauaaugccggaagcgugucguucuuuccacaagcugagaccuguaagguuugcucuaacagaguguucugcgacacaaugaacuccuugacucuacccucagaagucaaucuguguaauguggauaucuuuaacccuaaauaugacugcaagauuaugaccaguaaaacagauguaagcuccucuguuaucacuagccucggugccauagugucauguuacggcaagaccaaaugcacagcaaguaauaagaacaaggggauuaucaaaaccuucuccaauggaugugacuaugucagcaacaagggcguggacacugucucuguggguaauacgcuguacuauguuaacaaacaggaggggcagucacuuuacgugaagggagagccaaucauuaacuuuuaugauccgcugguauuccccagugacgaauuugaugcuagcaucucccaagucaaugagaaaauuaaccagucuuuggccuucauaaggaagucggacgaacuccugcacaaugugaacgcgggcaagagcacaaccaauaucaugauuacuaccaucaucauuguuauaaucgugauuuuacugucccuaaucgccgucggccuccugcuuuacugcaaagcacggucaacaccugugaccuugaguaaggaucagcugucugggauuaacaauaucgcuuucagcaacugaggacuagucccuguucccagagcccacuuuuuuuucuuuuuuugaaauaaaauagccugucuuucagaucuaaaaaaaaaaaaaaaaaaaaaaaaaaaaaaaaaaaaaaaaaaaaaaaaaaaaaaaaaaaaaaaaugcaucccccccccccccccccccccccccccccccaaaggcucuuuucagagccaccagaauu

SEQ ID NO: 6189 - RNA, 1897 nt, Artificial Sequence
  mRNA product Design c-5 comprising derived and/or modified sequence from HRSV(A2)__F_DSCav1_mut6 (opt4)
gggagagcggcucggccauuuugucccagucaguccggaggcugcggcugcagaaguaccgccugcggaguaacugcaaagaagcuuaccauggagcugcugauccugaaggccaacgccaucaccaccauccugaccgccgugaccuucugcuucgccagcggccagaacaucaccgaggaguucuaccagagcaccugcagcgccgugagcaagggcuaccugggcgcccugagaaccggcugguacaccagcgugaucaccaucgagcugagcaacaucaaggagaacaagugcaacggcaccgacgccaaggugaagcugaucaagcaggagcuggacaaguacaagaacgccgugaccgaccugcagaugcugaugugcagcacccccgccaccggcagcggcagcgccaucgccagcggcguggccgugugcaaggugcugcaccuggagggcgaggugaacaagaucaagagcgcccugcugagcaccaacaaggccguggugagccugagcaacggcgugagcgugcugaccuucaaggugcuggaccugaagaacuacaucgacaagcagcugcugcccauccugaacaagcagagcugcagcauccccaaccccgagaccgugauggaguuccagcagaagaacaacagacugcuggagaucaccagagaguucagcgugaacgccggcgugaccacccccgugagcaccuacaugcugaccaacagcgagcugcugagccugaucaacgacaugcccaucaccaacgaccagaagaagcugaugagcaacaacgugcagaucgugagacagcagagcuacagcaucaugugcaucaucaaggaggaggugcuggccuacguggugcagcugccccuguacggcgugaucgacacccccugcuggaagcugcacaccagcccccugugcaccaccaacaccaaggagggcagcaacaucugccugaccagaaccgacagaggcugguacugcgacaacgccggcagcgugagcuucuucccccaggccgagaccugcaaggugugcagcaacagaguguucugcgacaccaugaacagccugacccugcccagcgaggugaaccugugcaacguggacaucuucaaccccaaguacgacugcaagaucaugaccagcaagaccgacgugagcagcagcgugaucaccagccugggcgccaucgugagcugcuacggcaagaccaagugcaccgccagcaacaagaacaagggcaucaucaagaccuucagcaacggcugcgacuacgugagcaacaagggcguggacaccgugagcgugggcaacacccuguacuacgugaacaagcaggagggccagagccuguacgugaagggcgagcccaucaucaacuucuacgacccccugguguuccccagcgacgaguucgacgccagcaucagccaggugaacgagaagaucaaccagagccuggccuucaucagaaagagcgacgagcugcugcacaacgugaacgccggcaagagcaccaccaacaucaugaucaccaccaucaucaucgugaucaucgugauccugcugagccugaucgccgugggccugcugcuguacugcaaggccagaagcacccccgugacccugagcaaggaccagcugagcggcaucaacaacaucgccuucagcaacugaggacuagucccuguucccagagcccacuuuuuuuucuuuuuuugaaauaaaauagccugucuuucagaucuaaaaaaaaaaaaaaaaaaaaaaaaaaaaaaaaaaaaaaaaaaaaaaaaaaaaaaaaaaaaaaaaugcaucccccccccccccccccccccccccccccccaaaggcucuuuucagagccaccagaauu

SEQ ID NO: 6190 - RNA, 1897 nt, Artificial Sequence
  mRNA product Design c-5 comprising derived and/or modified sequence from HRSV(A2)__F_DSCav1_mut6 (opt5)
gggagagcggcucggccauuuugucccagucaguccggaggcugcggcugcagaaguaccgccugcggaguaacugcaaagaagcuuaccauggagcugcucauccugaaggccaacgcuauuaccacaauccuuacggccgugaccuucugcuuugcgagcggccagaauauuacagaagaguucuaccaauccaccuguucugcugucagcaaaggguaucugggagcccucagaacaggcugguacaccuccguuaucacaauugaacugucuaacaucaaggagaauaaaugcaacgggaccgacgccaaggugaaacuuaucaagcaggaacuggauaaguauaaaaaugcugugacggaccuccagaugcugauguguagcacccccgccacaggauccggcucugcuauugccagcggggucgcggugugcaagguucugcaccucgagggagaggugaacaaaaucaaguccgcccugcuuagcaccaauaaagcugucgugucucuguccaacggcguuagcgugcucacauuuaagguccuggaucuuaagaauuacauugacaaacagcugcucccuauccugaacaagcaaucuuguuccauuccgaaucccgaaaccgugauggaguuccagcagaaaaacaaucggcugcucgaaaucacgcgcgaguuuagcgugaacgccggcgucacaaccccuguuucuacauauaugcugaccaauuccgagcuucugagccucauuaacgauaugcccaucaccaacgaccagaagaaacugauguccaauaacgugcaaaucgugagacagcagucuuacagcauuaugugcaucauuaaggaagagguccuugcuuaugugguucagcugccucucuacggggugaucgauacacccuguuggaaacugcauacguccccucugugcaccacaaauaccaaggaaggaagcaacauuugucucacacggaccgaccgcggcugguacugcgauaaugccgggucugucuccuucuuuccgcaagcggagacguguaaggugugcagcaacagaguuuucugcgacacaaugaacucucugacccuucccagcgaagugaaucuguguaaugucgauaucuuuaacccuaaauaugacugcaagaucaugaccuccaaaacagaugugucuagcuccgucauuaccagccucggagccaucgugucuuguuacggcaagacaaaaugcacggcuuccaauaagaacaaggggauuaucaaaaccuucagcaauggaugugacuauguuucuaacaagggcguggacacagucuccgugggcaauacccuguacuauguuaacaaacaggaggggcagagccuuuacgugaagggagagcccauuaucaacuuuuaugauccucuggucuuccccuccgacgaauuugaugccucuaucagccaagugaaugagaaaauuaaccagucccucgcuuucauccggaagucugacgaacugcugcacaaugugaacgccggcaagagcacaaccaauauuaugaucacgaccauuaucauuguuaucaucgucauucuccugucccuuaucgccguggggcugcuccuguacugcaaagcucgcagcacaccggugacccugucuaaggaucagcuuuccggaauuaacaauaucgcguucagcaacugaggacuagucccuguucccagagcccacuuuuuuuucuuuuuuugaaauaaaauagccugucuuucagaucuaaaaaaaaaaaaaaaaaaaaaaaaaaaaaaaaaaaaaaaaaaaaaaaaaaaaaaaaaaaaaaaaugcaucccccccccccccccccccccccccccccccaaaggcucuuuucagagccaccagaauu

SEQ ID NO: 6191 - RNA, 1897 nt, Artificial Sequence
  mRNA product Design c-5 comprising derived and/or modified sequence from HRSV(A2)__F_DSCav1_mut6 (opt6)
gggagagcggcucggccauuuugucccagucaguccggaggcugcggcugcagaaguaccgccugcggaguaacugcaaagaagcuuaccauggaacuauuaaucuuaaaagcaaaugcuauaaccacaauauuaacagcaguaacauucuguuuugccuccggacaaaacauaacagaagaauuuuaucaaucaacaugcucugcaguauccaaagguuacuuaggcgcacuacgcacuggaugguauacaucaguaauaacaauagaacuaucaaacauaaaagaaaauaaauguaacgguacugacgcaaaagugaaacuaauuaaacaagaacucgacaaauacaaaaaugcuguaacagaccuacaaaugcuaaugugcucaacacccgcaaccggaucaggaucagccauagccuccggagucgcaguaugcaaaguauuacaucuugaaggagaaguaaauaaaauaaaaucagcauuacuauccacaaauaaagccguaguaucacuaucaaacgguguauccguccuuacauucaaaguauuagaucuaaaaaacuacauagauaaacaacuacuacccaucuuaaacaaacaaucaugcucaauucccaacccagaaacagucauggaauuucaacaaaaaaacaacagacucuuagaaauaacacgagaauuuucaguaaacgcaggaguaaccacaccaguaaguacauacaugcucaccaacucagaauuauuaucacuuauuaacgacaugccaauuacaaacgaccaaaaaaaauuaaugucaaacaauguccaaauuguuagacaacaaucauacucuauaauguguauaauaaaagaagaaguacuagcuuacguaguucaauuaccacuauauggcguaauagauacaccuugcuggaaacuacauacaucuccauuauguacaacuaacacaaaagaaggaucuaacauaugccuaacacgcacagaucgaggaugguacugcgauaaugcagguuccguaucauucuuuccacaagcagaaacauguaaaguaugcucaaacagaguauucugugacacuaugaacuccuuaacccuacccucagaagucaaucuaugcaacguugacauauuuaacccaaaauacgacuguaaaaucaugacaucuaaaacagacguaucaucaucaguuauuacaucccuaggagcaauaguaucuugcuacggaaaaacaaaauguacagcauccaacaaaaacaaaggaauaaucaaaacauucucaaacggcugcgacuacguaucaaacaaagguguagacacaguaucaguaggaaauacuuuauauuacguaaauaaacaagaaggacaaucucuauacguuaaaggcgaaccuauuauaaacuucuacgacccacucguauucccuucagacgaauuugacgcaucuauaucccaaguuaacgaaaaaaucaaccaaucauuagccuuuauaagaaaauccgacgaauuauuacauaacgucaacgcuggaaaaucaacaacuaacauaaugauaaccacaauaauaauagucaucauaguuauauuacuaagucuaauagccguaggccuccuacuuuauugcaaagcaagaucaacaccaguaacauuauccaaagaccaacucagcggcauaaacaauauagcuuuuucaaacuagggacuagucccuguucccagagcccacuuuuuuuucuuuuuuugaaauaaaauagccugucuuucagaucuaaaaaaaaaaaaaaaaaaaaaaaaaaaaaaaaaaaaaaaaaaaaaaaaaaaaaaaaaaaaaaaaugcaucccccccccccccccccccccccccccccccaaaggcucuuuucagagccaccagaauu

SEQ ID NO: 6192 - RNA, 1897 nt, Artificial Sequence
  mRNA product Design c-5 comprising derived and/or modified sequence from HRSV(A2)__F_DSCav1_mut6 (opt11)
gggagagcggcucggccauuuugucccagucaguccggaggcugcggcugcagaaguaccgccugcggaguaacugcaaagaagcuuaccauggaacuccucauccucaaagccaacgcaaucacaaccauacuaacugcaguuacuuucugcuucgcauccggccaaaacaucaccgaagaguucuaccaaucaaccugcuccgcagucuccaaaggauaccucggagcccuucgcaccggcugguacaccuccgucauaaccaucgaacucucaaacauaaaagaaaacaaaugcaacggcacagacgcgaaagucaaacuuaucaaacaagaacucgacaaauacaaaaacgccgucaccgaccugcagaugcucaugugcucaacccccgccacaggaagcggcucugcuaucgcuuccggcgucgccgucugcaaaguccuccaccucgaaggcgaaguaaacaaaaucaagucagcccuccucuccaccaacaaagccgucgucucucucucaaacggcguauccguccucacauucaaaguccucgaccucaaaaacuacaucgacaaacaacuucuccccauccuaaacaaacaaucaugcuccauccccaaccccgaaacagucauggaauuucaacaaaagaacaaccgccucuuagaaaucacccgagaauuuuccgucaacgcgggagucacaacccccguuucuacguauaugcucaccaacuccgaacuccuuucccucauaaacgacaugccaaucaccaacgaccaaaagaaacucaugucaaacaacguccaaaucguccgacaacaauccuacucuauuaugugcaucaucaaagaagaaguucucgccuacgucguccaacuaccccucuacggcgugaucgacacccccugcuggaaacuacacaccucaccccucugcaccaccaacaccaaggaaggcuccaacaucugccucacccgcaccgaccgcggcugguacugcgacaacgcuggcuccgucucauucuucccgcaagccgaaacuugcaaaguaugcuccaacagaguauucugcgacaccaugaacucacuaacccucccuuccgaagucaaccuuugcaacguugacauauucaacccaaaguacgauugcaaaauuaugacauccaaaacagaugucuccuccuccgucaucacaucccucggugccauuguaucaugcuacggaaaaaccaaaugcaccgcauccaacaaaaacaaaggaaucaucaaaaccuucucaaacggcugcgauuacgucucaaacaaaggagucgacacagucuccgucggaaacacccuauacuacgucaacaaacaagaaggccaaucccuguacgucaaaggagaacccaucaucaacuucuacgacccccucgucuucccgagcgacgaguucgacgccuccaucucacaagucaaugaaaagaucaaccaaucccuugccuucauccggaaaucggacgaacuccuacacaacgugaacgcuggaaaaucaaccaccaacaucaugaucacaaccaucauuaucgucaucaucgucauacuccucucccuaaucgccgucggccuccuccuguauugcaaagcucgcuccacccccgucacccuguccaaagaccaacucuccggaaucaacaacaucgccuucucaaacuaaggacuagucccuguucccagagcccacuuuuuuuucuuuuuuugaaauaaaauagccugucuuucagaucuaaaaaaaaaaaaaaaaaaaaaaaaaaaaaaaaaaaaaaaaaaaaaaaaaaaaaaaaaaaaaaaaugcaucccccccccccccccccccccccccccccccaaaggcucuuuucagagccaccagaauu

SEQ ID NO: 6193 - RNA, 1906 nt, Artificial Sequence
  mRNA product Design d-1 comprising derived and/or modified sequence from HRSV(A2)__F_DSCav1_mut6 (opt1)
gggagacccgugacccggaaguuguacggcuacgcgacuuucccucccacaaacccucgcgcccuuccuuuccuacuugggcccggcagaaagcuuaccauggagcugcucauccugaaggccaacgccaucaccaccauccugacggcggugaccuucugcuucgccagcggccagaacaucaccgaggaguucuaccaguccacgugcagcgccgucuccaagggguaccucggcgcccugcggaccggcugguacaccuccgugaucaccaucgagcugagcaacaucaaggagaacaagugcaacgggaccgacgccaaggugaagcucaucaagcaggagcuggacaaguacaagaacgcggucacggaccugcagaugcugaugugcuccaccccggcaaccggcuccggcuccgccaucgcgagcggcgucgccgugugcaaggugcugcaccucgagggggaggucaacaagaucaagagcgcccugcuguccaccaacaaggccguggugagccucuccaacggcgucagcgugcugaccuucaaggugcuggaccucaagaacuacaucgacaagcagcugcugcccauccugaacaagcagagcugcuccauccccaaccccgagacggugauggaguuccagcagaagaacaaccggcuccuggagaucacccgcgaguucagcgugaacgccggggucaccacccccguguccacguacaugcugaccaacagcgagcuccugucccugaucaacgacaugccgaucaccaacgaccagaagaagcucaugagcaacaacgugcagaucguccggcagcaguccuacagcaucaugugcaucaucaaggaggaggugcuggcguacgugguccagcugccccucuacggcgugaucgacacccccugcuggaagcugcacacgagcccccugugcaccaccaacaccaaggagggguccaacaucugccucacgcgcaccgaccggggcugguacugcgacaacgccggcagcgucuccuucuucccgcaggccgagaccugcaaggugugcagcaaccgcguguucugcgacaccaugaacucccugacgcugcccagcgagguaaaccucugcaacgucgacaucuucaaccccaaguacgacugcaagaucaugaccuccaagaccgacgugagcuccagcgugaucaccucccugggggccaucgucagcugcuacggcaagacgaagugcaccgccagcaacaagaacaaggggaucaucaagaccuucuccaacggcugcgacuacgugagcaacaagggcguggacaccguguccgucgggaacacccuguacuacgugaacaagcaggagggccagagccucuacgugaagggggagcccaucaucaacuucuacgacccgcuggucuuccccuccgacgaguucgacgcgagcaucucccaggugaacgagaagaucaaccagagccuggccuucauccgcaaguccgacgagcugcuccacaacgugaacgccggcaagagcacgaccaacaucaugaucaccaccaucaucaucgucaucaucgugauccugcugucccucaucgccguggggcugcugcucuacugcaaggcccggagcacgcccgucacccuguccaaggaccagcugagcggcaucaacaacaucgcguucuccaacugaggacuagucccuguucccagagcccacuuuuuuuucuuuuuuugaaauaaaauagccugucuuucagaucuaaaaaaaaaaaaaaaaaaaaaaaaaaaaaaaaaaaaaaaaaaaaaaaaaaaaaaaaaaaaaaaaugcaucccccccccccccccccccccccccccccccaaaggcucuuuucagagccaccagaauu

SEQ ID NO: 6194 - RNA, 1906 nt, Artificial Sequence
  mRNA product Design d-1 comprising derived and/or modified sequence from HRSV(A2)__F_DSCav1_mut6 (opt1)
gggagacccgugacccggaaguuguacggcuacgcgacuuucccucccacaaacccucgcgcccuuccuuuccuacuugggcccggcagaaagcuuaccauggagcugcucauccugaaggccaacgccaucaccaccauccugacggcggugaccuucugcuucgccagcggccagaacaucaccgaggaguucuaccaguccacgugcagcgccgucuccaagggguaccucggcgcccugcgcaccgggugguacaccagcgugaucaccaucgagcuguccaacaucaaggagaacaagugcaacggcaccgacgccaaggugaagcucaucaagcaggagcuggacaaguacaagaacgcggucacggaccugcagaugcucaugugcagcacccccgccaccggguccggcagcgccaucgccuccggcguggcggugugcaagguccugcaccuggagggggaggugaacaagaucaagagcgcccuccuguccaccaacaaggccguggucagccuguccaacggcgugagcgugcucacguucaagguccuggaccugaagaacuacaucgacaagcagcuccugccgauccugaacaagcaguccugcagcauccccaaccccgagaccgugauggaguuccagcagaagaacaaccggcuccuggagaucacccgcgaguucuccgugaacgccggggucaccacgcccgugagcaccuacaugcugaccaacuccgagcuccugagccugaucaacgacaugccgaucaccaacgaccagaagaagcucaugagcaacaacgugcagaucguccggcagcaguccuacagcaucaugugcaucaucaaggaggaggugcuggccuacgugguccagcugccccucuacggcgugaucgacacgcccugcuggaagcugcacaccagcccccugugcaccaccaacacgaaggaggggagcaacaucugccucacccgcaccgaccggggcugguacugcgacaacgcgggcuccgugagcuucuucccgcaggccgagaccugcaaggucugcuccaaccgcguguucugcgacacgaugaacagccugacccugcccuccgaggucaaccucugcaacguggacaucuucaaccccaaguacgacugcaagaucaugaccagcaagaccgacguguccagcuccgucaucacgagccugggggccaucguguccugcuacggcaagaccaagugcaccgccagcaacaagaacaaggggaucaucaagaccuucuccaacggcugcgacuacgugagcaacaagggcgucgacacgguguccguggggaacacccuguacuacgucaacaagcaggagggccagagccucuacgugaagggggagcccaucaucaacuucuacgacccgcugguguuccccagcgacgaguucgacgccuccaucagccaggucaacgagaagaucaaccagucccuggcguucauccggaaguccgacgagcuccugcacaacgugaacgccggcaaguccaccaccaacaucaugaucaccacgaucaucaucgugaucaucgucauccugcucagccugaucgccguggggcugcuccuguacugcaaggcccgcuccacccccgugacccugagcaaggaccagcuguccggcaucaacaacaucgccuucagcaacugaggacuagucccuguucccagagcccacuuuuuuuucuuuuuuugaaauaaaauagccugucuuucagaucuaaaaaaaaaaaaaaaaaaaaaaaaaaaaaaaaaaaaaaaaaaaaaaaaaaaaaaaaaaaaaaaaugcaucccccccccccccccccccccccccccccccaaaggcucuuuucagagccaccagaauu

SEQ ID NO: 6195 - RNA, 1906 nt, Artificial Sequence
  mRNA product Design d-1 comprising derived and/or modified sequence from HRSV(A2)__F_DSCav1_mut6 (opt2)
gggagacccgugacccggaaguuguacggcuacgcgacuuucccucccacaaacccucgcgcccuuccuuuccuacuugggcccggcagaaagcuuaccauggagcuccucauccucaaggccaacgccaucaccaccauccucaccgccgucaccuucugcuucgccuccggccagaacaucaccgaggaguucuaccaguccaccugcuccgccgucuccaagggcuaccucggcgcccuccgcaccggcugguacaccuccgucaucaccaucgagcucuccaacaucaaggagaacaagugcaacggcaccgacgccaaggucaagcucaucaagcaggagcucgacaaguacaagaacgccgucaccgaccuccagaugcucaugugcuccacccccgccaccggcuccggcuccgccaucgccuccggcgucgccgucugcaagguccuccaccucgagggcgaggucaacaagaucaaguccgcccuccucuccaccaacaaggccgucgucucccucuccaacggcgucuccguccucaccuucaagguccucgaccucaagaacuacaucgacaagcagcuccuccccauccucaacaagcaguccugcuccauccccaaccccgagaccgucauggaguuccagcagaagaacaaccgccuccucgagaucacccgcgaguucuccgucaacgccggcgucaccacccccgucuccaccuacaugcucaccaacuccgagcuccucucccucaucaacgacaugcccaucaccaacgaccagaagaagcucauguccaacaacguccagaucguccgccagcaguccuacuccaucaugugcaucaucaaggaggagguccucgccuacgucguccagcucccccucuacggcgucaucgacacccccugcuggaagcuccacaccuccccccucugcaccaccaacaccaaggagggcuccaacaucugccucacccgcaccgaccgcggcugguacugcgacaacgccggcuccgucuccuucuucccccaggccgagaccugcaaggucugcuccaaccgcgucuucugcgacaccaugaacucccucacccuccccuccgaggucaaccucugcaacgucgacaucuucaaccccaaguacgacugcaagaucaugaccuccaagaccgacgucuccuccuccgucaucaccucccucggcgccaucgucuccugcuacggcaagaccaagugcaccgccuccaacaagaacaagggcaucaucaagaccuucuccaacggcugcgacuacgucuccaacaagggcgucgacaccgucuccgucggcaacacccucuacuacgucaacaagcaggagggccagucccucuacgucaagggcgagcccaucaucaacuucuacgacccccucgucuuccccuccgacgaguucgacgccuccaucucccaggucaacgagaagaucaaccagucccucgccuucauccgcaaguccgacgagcuccuccacaacgucaacgccggcaaguccaccaccaacaucaugaucaccaccaucaucaucgucaucaucgucauccuccucucccucaucgccgucggccuccuccucuacugcaaggcccgcuccacccccgucacccucuccaaggaccagcucuccggcaucaacaacaucgccuucuccaacugaggacuagucccuguucccagagcccacuuuuuuuucuuuuuuugaaauaaaauagccugucuuucagaucuaaaaaaaaaaaaaaaaaaaaaaaaaaaaaaaaaaaaaaaaaaaaaaaaaaaaaaaaaaaaaaaaugcaucccccccccccccccccccccccccccccccaaaggcucuuuucagagccaccagaauu

SEQ ID NO: 6196 - RNA, 1906 nt, Artificial Sequence
  mRNA product Design d-1 comprising derived and/or modified sequence from HRSV(A2)__F_DSCav1_mut6 (opt3)
gggagacccgugacccggaaguuguacggcuacgcgacuuucccucccacaaacccucgcgcccuuccuuuccuacuugggcccggcagaaagcuuaccauggagcugcucauccuuaaggccaacgcuauuaccacaauacugacugcagugacguucugcuuugccagcggccagaauaucaccgaagaguucuaccaauccacauguucugcggucucaaaaggguauuugggagcuuuaagaacugguugguacaccaguguuauuacaaucgaacugagcaacauuaaggagaauaaaugcaacggcaccgacgccaaggugaaacuaaucaagcaggaacucgauaaguauaaaaaugcaguaacugaccugcagaugcuuauguguuccacacccgccaccgggucuggaucggcuauagcaucaggcguggccgucugcaaggugcugcacuuggagggugagguuaacaaaaucaagagcgcucuccugaguacgaauaaagccguggucucccugucuaacggggugagcguacucacuuuuaagguuuuagaucugaagaauuacauugacaaacagcuuuugccuauccugaacaagcaauccuguucaauuccaaauccggaaaccgugauggaguuccagcagaaaaacaauaggcuacucgaaaucacacgggaguuuagugucaacgcgggagugacuacccccgugagcacauauaugcugaccaauucugagcuucuguccuugauaaacgauaugccuauuacgaacgaccagaagaaacucaugucaaauaacguccaaaucguucgccagcagagcuacaguauuaugugcaucaucaaggaagaggugcuggcauauguagugcaguuaccacuguacggcgucauugauacucccuguuggaaacuccauacaucuccucuuugcaccacuaauacaaaggaaggcuccaacauaugucugacccgaacggaccgugggugguacugcgauaaugccggaagcgugucguucuuuccacaagcugagaccuguaagguuugcucuaacagaguguucugcgacacaaugaacuccuugacucuacccucagaagucaaucuguguaauguggauaucuuuaacccuaaauaugacugcaagauuaugaccaguaaaacagauguaagcuccucuguuaucacuagccucggugccauagugucauguuacggcaagaccaaaugcacagcaaguaauaagaacaaggggauuaucaaaaccuucuccaauggaugugacuaugucagcaacaagggcguggacacugucucuguggguaauacgcuguacuauguuaacaaacaggaggggcagucacuuuacgugaagggagagccaaucauuaacuuuuaugauccgcugguauuccccagugacgaauuugaugcuagcaucucccaagucaaugagaaaauuaaccagucuuuggccuucauaaggaagucggacgaacuccugcacaaugugaacgcgggcaagagcacaaccaauaucaugauuacuaccaucaucauuguuauaaucgugauuuuacugucccuaaucgccgucggccuccugcuuuacugcaaagcacggucaacaccugugaccuugaguaaggaucagcugucugggauuaacaauaucgcuuucagcaacugaggacuagucccuguucccagagcccacuuuuuuuucuuuuuuugaaauaaaauagccugucuuucagaucuaaaaaaaaaaaaaaaaaaaaaaaaaaaaaaaaaaaaaaaaaaaaaaaaaaaaaaaaaaaaaaaaugcaucccccccccccccccccccccccccccccccaaaggcucuuuucagagccaccagaauu

SEQ ID NO: 6197 - RNA, 1906 nt, Artificial Sequence
  mRNA product Design d-1 comprising derived and/or modified sequence from HRSV(A2)__F_DSCav1_mut6 (opt4)
gggagacccgugacccggaaguuguacggcuacgcgacuuucccucccacaaacccucgcgcccuuccuuuccuacuugggcccggcagaaagcuuaccauggagcugcugauccugaaggccaacgccaucaccaccauccugaccgccgugaccuucugcuucgccagcggccagaacaucaccgaggaguucuaccagagcaccugcagcgccgugagcaagggcuaccugggcgcccugagaaccggcugguacaccagcgugaucaccaucgagcugagcaacaucaaggagaacaagugcaacggcaccgacgccaaggugaagcugaucaagcaggagcuggacaaguacaagaacgccgugaccgaccugcagaugcugaugugcagcacccccgccaccggcagcggcagcgccaucgccagcggcguggccgugugcaaggugcugcaccuggagggcgaggugaacaagaucaagagcgcccugcugagcaccaacaaggccguggugagccugagcaacggcgugagcgugcugaccuucaaggugcuggaccugaagaacuacaucgacaagcagcugcugcccauccugaacaagcagagcugcagcauccccaaccccgagaccgugauggaguuccagcagaagaacaacagacugcuggagaucaccagagaguucagcgugaacgccggcgugaccacccccgugagcaccuacaugcugaccaacagcgagcugcugagccugaucaacgacaugcccaucaccaacgaccagaagaagcugaugagcaacaacgugcagaucgugagacagcagagcuacagcaucaugugcaucaucaaggaggaggugcuggccuacguggugcagcugccccuguacggcgugaucgacacccccugcuggaagcugcacaccagcccccugugcaccaccaacaccaaggagggcagcaacaucugccugaccagaaccgacagaggcugguacugcgacaacgccggcagcgugagcuucuucccccaggccgagaccugcaaggugugcagcaacagaguguucugcgacaccaugaacagccugacccugcccagcgaggugaaccugugcaacguggacaucuucaaccccaaguacgacugcaagaucaugaccagcaagaccgacgugagcagcagcgugaucaccagccugggcgccaucgugagcugcuacggcaagaccaagugcaccgccagcaacaagaacaagggcaucaucaagaccuucagcaacggcugcgacuacgugagcaacaagggcguggacaccgugagcgugggcaacacccuguacuacgugaacaagcaggagggccagagccuguacgugaagggcgagcccaucaucaacuucuacgacccccugguguuccccagcgacgaguucgacgccagcaucagccaggugaacgagaagaucaaccagagccuggccuucaucagaaagagcgacgagcugcugcacaacgugaacgccggcaagagcaccaccaacaucaugaucaccaccaucaucaucgugaucaucgugauccugcugagccugaucgccgugggccugcugcuguacugcaaggccagaagcacccccgugacccugagcaaggaccagcugagcggcaucaacaacaucgccuucagcaacugaggacuagucccuguucccagagcccacuuuuuuuucuuuuuuugaaauaaaauagccugucuuucagaucuaaaaaaaaaaaaaaaaaaaaaaaaaaaaaaaaaaaaaaaaaaaaaaaaaaaaaaaaaaaaaaaaugcaucccccccccccccccccccccccccccccccaaaggcucuuuucagagccaccagaauu

SEQ ID NO: 6198 - RNA, 1906 nt, Artificial Sequence
  mRNA product Design d-1 comprising derived and/or modified sequence from HRSV(A2)__F_DSCav1_mut6 (opt5)
gggagacccgugacccggaaguuguacggcuacgcgacuuucccucccacaaacccucgcgcccuuccuuuccuacuugggcccggcagaaagcuuaccauggagcugcucauccugaaggccaacgcuauuaccacaauccuuacggccgugaccuucugcuuugcgagcggccagaauauuacagaagaguucuaccaauccaccuguucugcugucagcaaaggguaucugggagcccucagaacaggcugguacaccuccguuaucacaauugaacugucuaacaucaaggagaauaaaugcaacgggaccgacgccaaggugaaacuuaucaagcaggaacuggauaaguauaaaaaugcugugacggaccuccagaugcugauguguagcacccccgccacaggauccggcucugcuauugccagcggggucgcggugugcaagguucugcaccucgagggagaggugaacaaaaucaaguccgcccugcuuagcaccaauaaagcugucgugucucuguccaacggcguuagcgugcucacauuuaagguccuggaucuuaagaauuacauugacaaacagcugcucccuauccugaacaagcaaucuuguuccauuccgaaucccgaaaccgugauggaguuccagcagaaaaacaaucggcugcucgaaaucacgcgcgaguuuagcgugaacgccggcgucacaaccccuguuucuacauauaugcugaccaauuccgagcuucugagccucauuaacgauaugcccaucaccaacgaccagaagaaacugauguccaauaacgugcaaaucgugagacagcagucuuacagcauuaugugcaucauuaaggaagagguccuugcuuaugugguucagcugccucucuacggggugaucgauacacccuguuggaaacugcauacguccccucugugcaccacaaauaccaaggaaggaagcaacauuugucucacacggaccgaccgcggcugguacugcgauaaugccgggucugucuccuucuuuccgcaagcggagacguguaaggugugcagcaacagaguuuucugcgacacaaugaacucucugacccuucccagcgaagugaaucuguguaaugucgauaucuuuaacccuaaauaugacugcaagaucaugaccuccaaaacagaugugucuagcuccgucauuaccagccucggagccaucgugucuuguuacggcaagacaaaaugcacggcuuccaauaagaacaaggggauuaucaaaaccuucagcaauggaugugacuauguuucuaacaagggcguggacacagucuccgugggcaauacccuguacuauguuaacaaacaggaggggcagagccuuuacgugaagggagagcccauuaucaacuuuuaugauccucuggucuuccccuccgacgaauuugaugccucuaucagccaagugaaugagaaaauuaaccagucccucgcuuucauccggaagucugacgaacugcugcacaaugugaacgccggcaagagcacaaccaauauuaugaucacgaccauuaucauuguuaucaucgucauucuccugucccuuaucgccguggggcugcuccuguacugcaaagcucgcagcacaccggugacccugucuaaggaucagcuuuccggaauuaacaauaucgcguucagcaacugaggacuagucccuguucccagagcccacuuuuuuuucuuuuuuugaaauaaaauagccugucuuucagaucuaaaaaaaaaaaaaaaaaaaaaaaaaaaaaaaaaaaaaaaaaaaaaaaaaaaaaaaaaaaaaaaaugcaucccccccccccccccccccccccccccccccaaaggcucuuuucagagccaccagaauu

SEQ ID NO: 6199 - RNA, 1906 nt, Artificial Sequence
  mRNA product Design d-1 comprising derived and/or modified sequence from HRSV(A2)__F_DSCav1_mut6 (opt6)
gggagacccgugacccggaaguuguacggcuacgcgacuuucccucccacaaacccucgcgcccuuccuuuccuacuugggcccggcagaaagcuuaccauggaacuauuaaucuuaaaagcaaaugcuauaaccacaauauuaacagcaguaacauucuguuuugccuccggacaaaacauaacagaagaauuuuaucaaucaacaugcucugcaguauccaaagguuacuuaggcgcacuacgcacuggaugguauacaucaguaauaacaauagaacuaucaaacauaaaagaaaauaaauguaacgguacugacgcaaaagugaaacuaauuaaacaagaacucgacaaauacaaaaaugcuguaacagaccuacaaaugcuaaugugcucaacacccgcaaccggaucaggaucagccauagccuccggagucgcaguaugcaaaguauuacaucuugaaggagaaguaaauaaaauaaaaucagcauuacuauccacaaauaaagccguaguaucacuaucaaacgguguauccguccuuacauucaaaguauuagaucuaaaaaacuacauagauaaacaacuacuacccaucuuaaacaaacaaucaugcucaauucccaacccagaaacagucauggaauuucaacaaaaaaacaacagacucuuagaaauaacacgagaauuuucaguaaacgcaggaguaaccacaccaguaaguacauacaugcucaccaacucagaauuauuaucacuuauuaacgacaugccaauuacaaacgaccaaaaaaaauuaaugucaaacaauguccaaauuguuagacaacaaucauacucuauaauguguauaauaaaagaagaaguacuagcuuacguaguucaauuaccacuauauggcguaauagauacaccuugcuggaaacuacauacaucuccauuauguacaacuaacacaaaagaaggaucuaacauaugccuaacacgcacagaucgaggaugguacugcgauaaugcagguuccguaucauucuuuccacaagcagaaacauguaaaguaugcucaaacagaguauucugugacacuaugaacuccuuaacccuacccucagaagucaaucuaugcaacguugacauauuuaacccaaaauacgacuguaaaaucaugacaucuaaaacagacguaucaucaucaguuauuacaucccuaggagcaauaguaucuugcuacggaaaaacaaaauguacagcauccaacaaaaacaaaggaauaaucaaaacauucucaaacggcugcgacuacguaucaaacaaagguguagacacaguaucaguaggaaauacuuuauauuacguaaauaaacaagaaggacaaucucuauacguuaaaggcgaaccuauuauaaacuucuacgacccacucguauucccuucagacgaauuugacgcaucuauaucccaaguuaacgaaaaaaucaaccaaucauuagccuuuauaagaaaauccgacgaauuauuacauaacgucaacgcuggaaaaucaacaacuaacauaaugauaaccacaauaauaauagucaucauaguuauauuacuaagucuaauagccguaggccuccuacuuuauugcaaagcaagaucaacaccaguaacauuauccaaagaccaacucagcggcauaaacaauauagcuuuuucaaacuagggacuagucccuguucccagagcccacuuuuuuuucuuuuuuugaaauaaaauagccugucuuucagaucuaaaaaaaaaaaaaaaaaaaaaaaaaaaaaaaaaaaaaaaaaaaaaaaaaaaaaaaaaaaaaaaaugcaucccccccccccccccccccccccccccccccaaaggcucuuuucagagccaccagaauu

SEQ ID NO: 6200 - RNA, 1906 nt, Artificial Sequence
  mRNA product Design d-1 comprising derived and/or modified sequence from HRSV(A2)__F_DSCav1_mut6 (opt11)
gggagacccgugacccggaaguuguacggcuacgcgacuuucccucccacaaacccucgcgcccuuccuuuccuacuugggcccggcagaaagcuuaccauggaacuccucauccucaaagccaacgcaaucacaaccauacuaacugcaguuacuuucugcuucgcauccggccaaaacaucaccgaagaguucuaccaaucaaccugcuccgcagucuccaaaggauaccucggagcccuucgcaccggcugguacaccuccgucauaaccaucgaacucucaaacauaaaagaaaacaaaugcaacggcacagacgcgaaagucaaacuuaucaaacaagaacucgacaaauacaaaaacgccgucaccgaccugcagaugcucaugugcucaacccccgccacaggaagcggcucugcuaucgcuuccggcgucgccgucugcaaaguccuccaccucgaaggcgaaguaaacaaaaucaagucagcccuccucuccaccaacaaagccgucgucucucucucaaacggcguauccguccucacauucaaaguccucgaccucaaaaacuacaucgacaaacaacuucuccccauccuaaacaaacaaucaugcuccauccccaaccccgaaacagucauggaauuucaacaaaagaacaaccgccucuuagaaaucacccgagaauuuuccgucaacgcgggagucacaacccccguuucuacguauaugcucaccaacuccgaacuccuuucccucauaaacgacaugccaaucaccaacgaccaaaagaaacucaugucaaacaacguccaaaucguccgacaacaauccuacucuauuaugugcaucaucaaagaagaaguucucgccuacgucguccaacuaccccucuacggcgugaucgacacccccugcuggaaacuacacaccucaccccucugcaccaccaacaccaaggaaggcuccaacaucugccucacccgcaccgaccgcggcugguacugcgacaacgcuggcuccgucucauucuucccgcaagccgaaacuugcaaaguaugcuccaacagaguauucugcgacaccaugaacucacuaacccucccuuccgaagucaaccuuugcaacguugacauauucaacccaaaguacgauugcaaaauuaugacauccaaaacagaugucuccuccuccgucaucacaucccucggugccauuguaucaugcuacggaaaaaccaaaugcaccgcauccaacaaaaacaaaggaaucaucaaaaccuucucaaacggcugcgauuacgucucaaacaaaggagucgacacagucuccgucggaaacacccuauacuacgucaacaaacaagaaggccaaucccuguacgucaaaggagaacccaucaucaacuucuacgacccccucgucuucccgagcgacgaguucgacgccuccaucucacaagucaaugaaaagaucaaccaaucccuugccuucauccggaaaucggacgaacuccuacacaacgugaacgcuggaaaaucaaccaccaacaucaugaucacaaccaucauuaucgucaucaucgucauacuccucucccuaaucgccgucggccuccuccuguauugcaaagcucgcuccacccccgucacccuguccaaagaccaacucuccggaaucaacaacaucgccuucucaaacuaaggacuagucccuguucccagagcccacuuuuuuuucuuuuuuugaaauaaaauagccugucuuucagaucuaaaaaaaaaaaaaaaaaaaaaaaaaaaaaaaaaaaaaaaaaaaaaaaaaaaaaaaaaaaaaaaaugcaucccccccccccccccccccccccccccccccaaaggcucuuuucagagccaccagaauu

SEQ ID NO: 6201 - RNA, 1961 nt, Artificial Sequence
  mRNA product Design d-2 comprising derived and/or modified sequence from HRSV(A2)__F_DSCav1_mut6 (opt1)
gggagagcggcucggccauuuugucccagucaguccggaggcugcggcugcagaaguaccgccugcggaguaacugcaaagaagcuuaccauggagcugcucauccugaaggccaacgccaucaccaccauccugacggcggugaccuucugcuucgccagcggccagaacaucaccgaggaguucuaccaguccacgugcagcgccgucuccaagggguaccucggcgcccugcggaccggcugguacaccuccgugaucaccaucgagcugagcaacaucaaggagaacaagugcaacgggaccgacgccaaggugaagcucaucaagcaggagcuggacaaguacaagaacgcggucacggaccugcagaugcugaugugcuccaccccggcaaccggcuccggcuccgccaucgcgagcggcgucgccgugugcaaggugcugcaccucgagggggaggucaacaagaucaagagcgcccugcuguccaccaacaaggccguggugagccucuccaacggcgucagcgugcugaccuucaaggugcuggaccucaagaacuacaucgacaagcagcugcugcccauccugaacaagcagagcugcuccauccccaaccccgagacggugauggaguuccagcagaagaacaaccggcuccuggagaucacccgcgaguucagcgugaacgccggggucaccacccccguguccacguacaugcugaccaacagcgagcuccugucccugaucaacgacaugccgaucaccaacgaccagaagaagcucaugagcaacaacgugcagaucguccggcagcaguccuacagcaucaugugcaucaucaaggaggaggugcuggcguacgugguccagcugccccucuacggcgugaucgacacccccugcuggaagcugcacacgagcccccugugcaccaccaacaccaaggagggguccaacaucugccucacgcgcaccgaccggggcugguacugcgacaacgccggcagcgucuccuucuucccgcaggccgagaccugcaaggugugcagcaaccgcguguucugcgacaccaugaacucccugacgcugcccagcgagguaaaccucugcaacgucgacaucuucaaccccaaguacgacugcaagaucaugaccuccaagaccgacgugagcuccagcgugaucaccucccugggggccaucgucagcugcuacggcaagacgaagugcaccgccagcaacaagaacaaggggaucaucaagaccuucuccaacggcugcgacuacgugagcaacaagggcguggacaccguguccgucgggaacacccuguacuacgugaacaagcaggagggccagagccucuacgugaagggggagcccaucaucaacuucuacgacccgcuggucuuccccuccgacgaguucgacgcgagcaucucccaggugaacgagaagaucaaccagagccuggccuucauccgcaaguccgacgagcugcuccacaacgugaacgccggcaagagcacgaccaacaucaugaucaccaccaucaucaucgucaucaucgugauccugcugucccucaucgccguggggcugcugcucuacugcaaggcccggagcacgcccgucacccuguccaaggaccagcugagcggcaucaacaacaucgcguucuccaacugaggacuaguaauaaggaaacuguaugaaugucugugggcaggaagugaagagauccuucuguaaagguuuuuggaauuaugucugcugaauaauaaacuuuuuugaaauaauaaaucugguagaaaaaugagaucuaaaaaaaaaaaaaaaaaaaaaaaaaaaaaaaaaaaaaaaaaaaaaaaaaaaaaaaaaaaaaaaaugcaucccccccccccccccccccccccccccccccaaaggcucuuuucagagccaccagaauu

SEQ ID NO: 6202 - RNA, 1961 nt, Artificial Sequence
  mRNA product Design d-2 comprising derived and/or modified sequence from HRSV(A2)__F_DSCav1_mut6 (opt1)
gggagagcggcucggccauuuugucccagucaguccggaggcugcggcugcagaaguaccgccugcggaguaacugcaaagaagcuuaccauggagcugcucauccugaaggccaacgccaucaccaccauccugacggcggugaccuucugcuucgccagcggccagaacaucaccgaggaguucuaccaguccacgugcagcgccgucuccaagggguaccucggcgcccugcgcaccgggugguacaccagcgugaucaccaucgagcuguccaacaucaaggagaacaagugcaacggcaccgacgccaaggugaagcucaucaagcaggagcuggacaaguacaagaacgcggucacggaccugcagaugcucaugugcagcacccccgccaccggguccggcagcgccaucgccuccggcguggcggugugcaagguccugcaccuggagggggaggugaacaagaucaagagcgcccuccuguccaccaacaaggccguggucagccuguccaacggcgugagcgugcucacguucaagguccuggaccugaagaacuacaucgacaagcagcuccugccgauccugaacaagcaguccugcagcauccccaaccccgagaccgugauggaguuccagcagaagaacaaccggcuccuggagaucacccgcgaguucuccgugaacgccggggucaccacgcccgugagcaccuacaugcugaccaacuccgagcuccugagccugaucaacgacaugccgaucaccaacgaccagaagaagcucaugagcaacaacgugcagaucguccggcagcaguccuacagcaucaugugcaucaucaaggaggaggugcuggccuacgugguccagcugccccucuacggcgugaucgacacgcccugcuggaagcugcacaccagcccccugugcaccaccaacacgaaggaggggagcaacaucugccucacccgcaccgaccggggcugguacugcgacaacgcgggcuccgugagcuucuucccgcaggccgagaccugcaaggucugcuccaaccgcguguucugcgacacgaugaacagccugacccugcccuccgaggucaaccucugcaacguggacaucuucaaccccaaguacgacugcaagaucaugaccagcaagaccgacguguccagcuccgucaucacgagccugggggccaucguguccugcuacggcaagaccaagugcaccgccagcaacaagaacaaggggaucaucaagaccuucuccaacggcugcgacuacgugagcaacaagggcgucgacacgguguccguggggaacacccuguacuacgucaacaagcaggagggccagagccucuacgugaagggggagcccaucaucaacuucuacgacccgcugguguuccccagcgacgaguucgacgccuccaucagccaggucaacgagaagaucaaccagucccuggcguucauccggaaguccgacgagcuccugcacaacgugaacgccggcaaguccaccaccaacaucaugaucaccacgaucaucaucgugaucaucgucauccugcucagccugaucgccguggggcugcuccuguacugcaaggcccgcuccacccccgugacccugagcaaggaccagcuguccggcaucaacaacaucgccuucagcaacugaggacuaguaauaaggaaacuguaugaaugucugugggcaggaagugaagagauccuucuguaaagguuuuuggaauuaugucugcugaauaauaaacuuuuuugaaauaauaaaucugguagaaaaaugagaucuaaaaaaaaaaaaaaaaaaaaaaaaaaaaaaaaaaaaaaaaaaaaaaaaaaaaaaaaaaaaaaaaugcaucccccccccccccccccccccccccccccccaaaggcucuuuucagagccaccagaauu

SEQ ID NO: 6203 - RNA, 1961 nt, Artificial Sequence
  mRNA product Design d-2 comprising derived and/or modified sequence from HRSV(A2)__F_DSCav1_mut6 (opt2)
gggagagcggcucggccauuuugucccagucaguccggaggcugcggcugcagaaguaccgccugcggaguaacugcaaagaagcuuaccauggagcuccucauccucaaggccaacgccaucaccaccauccucaccgccgucaccuucugcuucgccuccggccagaacaucaccgaggaguucuaccaguccaccugcuccgccgucuccaagggcuaccucggcgcccuccgcaccggcugguacaccuccgucaucaccaucgagcucuccaacaucaaggagaacaagugcaacggcaccgacgccaaggucaagcucaucaagcaggagcucgacaaguacaagaacgccgucaccgaccuccagaugcucaugugcuccacccccgccaccggcuccggcuccgccaucgccuccggcgucgccgucugcaagguccuccaccucgagggcgaggucaacaagaucaaguccgcccuccucuccaccaacaaggccgucgucucccucuccaacggcgucuccguccucaccuucaagguccucgaccucaagaacuacaucgacaagcagcuccuccccauccucaacaagcaguccugcuccauccccaaccccgagaccgucauggaguuccagcagaagaacaaccgccuccucgagaucacccgcgaguucuccgucaacgccggcgucaccacccccgucuccaccuacaugcucaccaacuccgagcuccucucccucaucaacgacaugcccaucaccaacgaccagaagaagcucauguccaacaacguccagaucguccgccagcaguccuacuccaucaugugcaucaucaaggaggagguccucgccuacgucguccagcucccccucuacggcgucaucgacacccccugcuggaagcuccacaccuccccccucugcaccaccaacaccaaggagggcuccaacaucugccucacccgcaccgaccgcggcugguacugcgacaacgccggcuccgucuccuucuucccccaggccgagaccugcaaggucugcuccaaccgcgucuucugcgacaccaugaacucccucacccuccccuccgaggucaaccucugcaacgucgacaucuucaaccccaaguacgacugcaagaucaugaccuccaagaccgacgucuccuccuccgucaucaccucccucggcgccaucgucuccugcuacggcaagaccaagugcaccgccuccaacaagaacaagggcaucaucaagaccuucuccaacggcugcgacuacgucuccaacaagggcgucgacaccgucuccgucggcaacacccucuacuacgucaacaagcaggagggccagucccucuacgucaagggcgagcccaucaucaacuucuacgacccccucgucuuccccuccgacgaguucgacgccuccaucucccaggucaacgagaagaucaaccagucccucgccuucauccgcaaguccgacgagcuccuccacaacgucaacgccggcaaguccaccaccaacaucaugaucaccaccaucaucaucgucaucaucgucauccuccucucccucaucgccgucggccuccuccucuacugcaaggcccgcuccacccccgucacccucuccaaggaccagcucuccggcaucaacaacaucgccuucuccaacugaggacuaguaauaaggaaacuguaugaaugucugugggcaggaagugaagagauccuucuguaaagguuuuuggaauuaugucugcugaauaauaaacuuuuuugaaauaauaaaucugguagaaaaaugagaucuaaaaaaaaaaaaaaaaaaaaaaaaaaaaaaaaaaaaaaaaaaaaaaaaaaaaaaaaaaaaaaaaugcaucccccccccccccccccccccccccccccccaaaggcucuuuucagagccaccagaauu

SEQ ID NO: 6204 - RNA, 1961 nt, Artificial Sequence
  mRNA product Design d-2 comprising derived and/or modified sequence from HRSV(A2)__F_DSCav1_mut6 (opt3)
gggagagcggcucggccauuuugucccagucaguccggaggcugcggcugcagaaguaccgccugcggaguaacugcaaagaagcuuaccauggagcugcucauccuuaaggccaacgcuauuaccacaauacugacugcagugacguucugcuuugccagcggccagaauaucaccgaagaguucuaccaauccacauguucugcggucucaaaaggguauuugggagcuuuaagaacugguugguacaccaguguuauuacaaucgaacugagcaacauuaaggagaauaaaugcaacggcaccgacgccaaggugaaacuaaucaagcaggaacucgauaaguauaaaaaugcaguaacugaccugcagaugcuuauguguuccacacccgccaccgggucuggaucggcuauagcaucaggcguggccgucugcaaggugcugcacuuggagggugagguuaacaaaaucaagagcgcucuccugaguacgaauaaagccguggucucccugucuaacggggugagcguacucacuuuuaagguuuuagaucugaagaauuacauugacaaacagcuuuugccuauccugaacaagcaauccuguucaauuccaaauccggaaaccgugauggaguuccagcagaaaaacaauaggcuacucgaaaucacacgggaguuuagugucaacgcgggagugacuacccccgugagcacauauaugcugaccaauucugagcuucuguccuugauaaacgauaugccuauuacgaacgaccagaagaaacucaugucaaauaacguccaaaucguucgccagcagagcuacaguauuaugugcaucaucaaggaagaggugcuggcauauguagugcaguuaccacuguacggcgucauugauacucccuguuggaaacuccauacaucuccucuuugcaccacuaauacaaaggaaggcuccaacauaugucugacccgaacggaccgugggugguacugcgauaaugccggaagcgugucguucuuuccacaagcugagaccuguaagguuugcucuaacagaguguucugcgacacaaugaacuccuugacucuacccucagaagucaaucuguguaauguggauaucuuuaacccuaaauaugacugcaagauuaugaccaguaaaacagauguaagcuccucuguuaucacuagccucggugccauagugucauguuacggcaagaccaaaugcacagcaaguaauaagaacaaggggauuaucaaaaccuucuccaauggaugugacuaugucagcaacaagggcguggacacugucucuguggguaauacgcuguacuauguuaacaaacaggaggggcagucacuuuacgugaagggagagccaaucauuaacuuuuaugauccgcugguauuccccagugacgaauuugaugcuagcaucucccaagucaaugagaaaauuaaccagucuuuggccuucauaaggaagucggacgaacuccugcacaaugugaacgcgggcaagagcacaaccaauaucaugauuacuaccaucaucauuguuauaaucgugauuuuacugucccuaaucgccgucggccuccugcuuuacugcaaagcacggucaacaccugugaccuugaguaaggaucagcugucugggauuaacaauaucgcuuucagcaacugaggacuaguaauaaggaaacuguaugaaugucugugggcaggaagugaagagauccuucuguaaagguuuuuggaauuaugucugcugaauaauaaacuuuuuugaaauaauaaaucugguagaaaaaugagaucuaaaaaaaaaaaaaaaaaaaaaaaaaaaaaaaaaaaaaaaaaaaaaaaaaaaaaaaaaaaaaaaaugcaucccccccccccccccccccccccccccccccaaaggcucuuuucagagccaccagaauu

SEQ ID NO: 6205 - RNA, 1961 nt, Artificial Sequence
  mRNA product Design d-2 comprising derived and/or modified sequence from HRSV(A2)__F_DSCav1_mut6 (opt4)
gggagagcggcucggccauuuugucccagucaguccggaggcugcggcugcagaaguaccgccugcggaguaacugcaaagaagcuuaccauggagcugcugauccugaaggccaacgccaucaccaccauccugaccgccgugaccuucugcuucgccagcggccagaacaucaccgaggaguucuaccagagcaccugcagcgccgugagcaagggcuaccugggcgcccugagaaccggcugguacaccagcgugaucaccaucgagcugagcaacaucaaggagaacaagugcaacggcaccgacgccaaggugaagcugaucaagcaggagcuggacaaguacaagaacgccgugaccgaccugcagaugcugaugugcagcacccccgccaccggcagcggcagcgccaucgccagcggcguggccgugugcaaggugcugcaccuggagggcgaggugaacaagaucaagagcgcccugcugagcaccaacaaggccguggugagccugagcaacggcgugagcgugcugaccuucaaggugcuggaccugaagaacuacaucgacaagcagcugcugcccauccugaacaagcagagcugcagcauccccaaccccgagaccgugauggaguuccagcagaagaacaacagacugcuggagaucaccagagaguucagcgugaacgccggcgugaccacccccgugagcaccuacaugcugaccaacagcgagcugcugagccugaucaacgacaugcccaucaccaacgaccagaagaagcugaugagcaacaacgugcagaucgugagacagcagagcuacagcaucaugugcaucaucaaggaggaggugcuggccuacguggugcagcugccccuguacggcgugaucgacacccccugcuggaagcugcacaccagcccccugugcaccaccaacaccaaggagggcagcaacaucugccugaccagaaccgacagaggcugguacugcgacaacgccggcagcgugagcuucuucccccaggccgagaccugcaaggugugcagcaacagaguguucugcgacaccaugaacagccugacccugcccagcgaggugaaccugugcaacguggacaucuucaaccccaaguacgacugcaagaucaugaccagcaagaccgacgugagcagcagcgugaucaccagccugggcgccaucgugagcugcuacggcaagaccaagugcaccgccagcaacaagaacaagggcaucaucaagaccuucagcaacggcugcgacuacgugagcaacaagggcguggacaccgugagcgugggcaacacccuguacuacgugaacaagcaggagggccagagccuguacgugaagggcgagcccaucaucaacuucuacgacccccugguguuccccagcgacgaguucgacgccagcaucagccaggugaacgagaagaucaaccagagccuggccuucaucagaaagagcgacgagcugcugcacaacgugaacgccggcaagagcaccaccaacaucaugaucaccaccaucaucaucgugaucaucgugauccugcugagccugaucgccgugggccugcugcuguacugcaaggccagaagcacccccgugacccugagcaaggaccagcugagcggcaucaacaacaucgccuucagcaacugaggacuaguaauaaggaaacuguaugaaugucugugggcaggaagugaagagauccuucuguaaagguuuuuggaauuaugucugcugaauaauaaacuuuuuugaaauaauaaaucugguagaaaaaugagaucuaaaaaaaaaaaaaaaaaaaaaaaaaaaaaaaaaaaaaaaaaaaaaaaaaaaaaaaaaaaaaaaaugcaucccccccccccccccccccccccccccccccaaaggcucuuuucagagccaccagaauu

SEQ ID NO: 6206 - RNA, 1961 nt, Artificial Sequence
  mRNA product Design d-2 comprising derived and/or modified sequence from HRSV(A2)__F_DSCav1_mut6 (opt5)
gggagagcggcucggccauuuugucccagucaguccggaggcugcggcugcagaaguaccgccugcggaguaacugcaaagaagcuuaccauggagcugcucauccugaaggccaacgcuauuaccacaauccuuacggccgugaccuucugcuuugcgagcggccagaauauuacagaagaguucuaccaauccaccuguucugcugucagcaaaggguaucugggagcccucagaacaggcugguacaccuccguuaucacaauugaacugucuaacaucaaggagaauaaaugcaacgggaccgacgccaaggugaaacuuaucaagcaggaacuggauaaguauaaaaaugcugugacggaccuccagaugcugauguguagcacccccgccacaggauccggcucugcuauugccagcggggucgcggugugcaagguucugcaccucgagggagaggugaacaaaaucaaguccgcccugcuuagcaccaauaaagcugucgugucucuguccaacggcguuagcgugcucacauuuaagguccuggaucuuaagaauuacauugacaaacagcugcucccuauccugaacaagcaaucuuguuccauuccgaaucccgaaaccgugauggaguuccagcagaaaaacaaucggcugcucgaaaucacgcgcgaguuuagcgugaacgccggcgucacaaccccuguuucuacauauaugcugaccaauuccgagcuucugagccucauuaacgauaugcccaucaccaacgaccagaagaaacugauguccaauaacgugcaaaucgugagacagcagucuuacagcauuaugugcaucauuaaggaagagguccuugcuuaugugguucagcugccucucuacggggugaucgauacacccuguuggaaacugcauacguccccucugugcaccacaaauaccaaggaaggaagcaacauuugucucacacggaccgaccgcggcugguacugcgauaaugccgggucugucuccuucuuuccgcaagcggagacguguaaggugugcagcaacagaguuuucugcgacacaaugaacucucugacccuucccagcgaagugaaucuguguaaugucgauaucuuuaacccuaaauaugacugcaagaucaugaccuccaaaacagaugugucuagcuccgucauuaccagccucggagccaucgugucuuguuacggcaagacaaaaugcacggcuuccaauaagaacaaggggauuaucaaaaccuucagcaauggaugugacuauguuucuaacaagggcguggacacagucuccgugggcaauacccuguacuauguuaacaaacaggaggggcagagccuuuacgugaagggagagcccauuaucaacuuuuaugauccucuggucuuccccuccgacgaauuugaugccucuaucagccaagugaaugagaaaauuaaccagucccucgcuuucauccggaagucugacgaacugcugcacaaugugaacgccggcaagagcacaaccaauauuaugaucacgaccauuaucauuguuaucaucgucauucuccugucccuuaucgccguggggcugcuccuguacugcaaagcucgcagcacaccggugacccugucuaaggaucagcuuuccggaauuaacaauaucgcguucagcaacugaggacuaguaauaaggaaacuguaugaaugucugugggcaggaagugaagagauccuucuguaaagguuuuuggaauuaugucugcugaauaauaaacuuuuuugaaauaauaaaucugguagaaaaaugagaucuaaaaaaaaaaaaaaaaaaaaaaaaaaaaaaaaaaaaaaaaaaaaaaaaaaaaaaaaaaaaaaaaugcaucccccccccccccccccccccccccccccccaaaggcucuuuucagagccaccagaauu

SEQ ID NO: 6207 - RNA, 1961 nt, Artificial Sequence
  mRNA product Design d-2 comprising derived and/or modified sequence from HRSV(A2)__F_DSCav1_mut6 (opt6)
gggagagcggcucggccauuuugucccagucaguccggaggcugcggcugcagaaguaccgccugcggaguaacugcaaagaagcuuaccauggaacuauuaaucuuaaaagcaaaugcuauaaccacaauauuaacagcaguaacauucuguuuugccuccggacaaaacauaacagaagaauuuuaucaaucaacaugcucugcaguauccaaagguuacuuaggcgcacuacgcacuggaugguauacaucaguaauaacaauagaacuaucaaacauaaaagaaaauaaauguaacgguacugacgcaaaagugaaacuaauuaaacaagaacucgacaaauacaaaaaugcuguaacagaccuacaaaugcuaaugugcucaacacccgcaaccggaucaggaucagccauagccuccggagucgcaguaugcaaaguauuacaucuugaaggagaaguaaauaaaauaaaaucagcauuacuauccacaaauaaagccguaguaucacuaucaaacgguguauccguccuuacauucaaaguauuagaucuaaaaaacuacauagauaaacaacuacuacccaucuuaaacaaacaaucaugcucaauucccaacccagaaacagucauggaauuucaacaaaaaaacaacagacucuuagaaauaacacgagaauuuucaguaaacgcaggaguaaccacaccaguaaguacauacaugcucaccaacucagaauuauuaucacuuauuaacgacaugccaauuacaaacgaccaaaaaaaauuaaugucaaacaauguccaaauuguuagacaacaaucauacucuauaauguguauaauaaaagaagaaguacuagcuuacguaguucaauuaccacuauauggcguaauagauacaccuugcuggaaacuacauacaucuccauuauguacaacuaacacaaaagaaggaucuaacauaugccuaacacgcacagaucgaggaugguacugcgauaaugcagguuccguaucauucuuuccacaagcagaaacauguaaaguaugcucaaacagaguauucugugacacuaugaacuccuuaacccuacccucagaagucaaucuaugcaacguugacauauuuaacccaaaauacgacuguaaaaucaugacaucuaaaacagacguaucaucaucaguuauuacaucccuaggagcaauaguaucuugcuacggaaaaacaaaauguacagcauccaacaaaaacaaaggaauaaucaaaacauucucaaacggcugcgacuacguaucaaacaaagguguagacacaguaucaguaggaaauacuuuauauuacguaaauaaacaagaaggacaaucucuauacguuaaaggcgaaccuauuauaaacuucuacgacccacucguauucccuucagacgaauuugacgcaucuauaucccaaguuaacgaaaaaaucaaccaaucauuagccuuuauaagaaaauccgacgaauuauuacauaacgucaacgcuggaaaaucaacaacuaacauaaugauaaccacaauaauaauagucaucauaguuauauuacuaagucuaauagccguaggccuccuacuuuauugcaaagcaagaucaacaccaguaacauuauccaaagaccaacucagcggcauaaacaauauagcuuuuucaaacuagggacuaguaauaaggaaacuguaugaaugucugugggcaggaagugaagagauccuucuguaaagguuuuuggaauuaugucugcugaauaauaaacuuuuuugaaauaauaaaucugguagaaaaaugagaucuaaaaaaaaaaaaaaaaaaaaaaaaaaaaaaaaaaaaaaaaaaaaaaaaaaaaaaaaaaaaaaaaugcaucccccccccccccccccccccccccccccccaaaggcucuuuucagagccaccagaauu

SEQ ID NO: 6208 - RNA, 1961 nt, Artificial Sequence
  mRNA product Design d-2 comprising derived and/or modified sequence from HRSV(A2)__F_DSCav1_mut6 (opt11)
gggagagcggcucggccauuuugucccagucaguccggaggcugcggcugcagaaguaccgccugcggaguaacugcaaagaagcuuaccauggaacuccucauccucaaagccaacgcaaucacaaccauacuaacugcaguuacuuucugcuucgcauccggccaaaacaucaccgaagaguucuaccaaucaaccugcuccgcagucuccaaaggauaccucggagcccuucgcaccggcugguacaccuccgucauaaccaucgaacucucaaacauaaaagaaaacaaaugcaacggcacagacgcgaaagucaaacuuaucaaacaagaacucgacaaauacaaaaacgccgucaccgaccugcagaugcucaugugcucaacccccgccacaggaagcggcucugcuaucgcuuccggcgucgccgucugcaaaguccuccaccucgaaggcgaaguaaacaaaaucaagucagcccuccucuccaccaacaaagccgucgucucucucucaaacggcguauccguccucacauucaaaguccucgaccucaaaaacuacaucgacaaacaacuucuccccauccuaaacaaacaaucaugcuccauccccaaccccgaaacagucauggaauuucaacaaaagaacaaccgccucuuagaaaucacccgagaauuuuccgucaacgcgggagucacaacccccguuucuacguauaugcucaccaacuccgaacuccuuucccucauaaacgacaugccaaucaccaacgaccaaaagaaacucaugucaaacaacguccaaaucguccgacaacaauccuacucuauuaugugcaucaucaaagaagaaguucucgccuacgucguccaacuaccccucuacggcgugaucgacacccccugcuggaaacuacacaccucaccccucugcaccaccaacaccaaggaaggcuccaacaucugccucacccgcaccgaccgcggcugguacugcgacaacgcuggcuccgucucauucuucccgcaagccgaaacuugcaaaguaugcuccaacagaguauucugcgacaccaugaacucacuaacccucccuuccgaagucaaccuuugcaacguugacauauucaacccaaaguacgauugcaaaauuaugacauccaaaacagaugucuccuccuccgucaucacaucccucggugccauuguaucaugcuacggaaaaaccaaaugcaccgcauccaacaaaaacaaaggaaucaucaaaaccuucucaaacggcugcgauuacgucucaaacaaaggagucgacacagucuccgucggaaacacccuauacuacgucaacaaacaagaaggccaaucccuguacgucaaaggagaacccaucaucaacuucuacgacccccucgucuucccgagcgacgaguucgacgccuccaucucacaagucaaugaaaagaucaaccaaucccuugccuucauccggaaaucggacgaacuccuacacaacgugaacgcuggaaaaucaaccaccaacaucaugaucacaaccaucauuaucgucaucaucgucauacuccucucccuaaucgccgucggccuccuccuguauugcaaagcucgcuccacccccgucacccuguccaaagaccaacucuccggaaucaacaacaucgccuucucaaacuaaggacuaguaauaaggaaacuguaugaaugucugugggcaggaagugaagagauccuucuguaaagguuuuuggaauuaugucugcugaauaauaaacuuuuuugaaauaauaaaucugguagaaaaaugagaucuaaaaaaaaaaaaaaaaaaaaaaaaaaaaaaaaaaaaaaaaaaaaaaaaaaaaaaaaaaaaaaaaugcaucccccccccccccccccccccccccccccccaaaggcucuuuucagagccaccagaauu

SEQ ID NO: 6209 - RNA, 2277 nt, Artificial Sequence
  mRNA product Design d-3 comprising derived and/or modified sequence from HRSV(A2)__F_DSCav1_mut6 (opt1)
gggagagggcgcuuggcuugcaaggacccugagcugcggcauugaagcacacccaacccaacucgacugaagucagccucacugaaccggaucugagaaucuucucucucugggcuugccagggcucuccgaaccuagcuagcauccucuucaauuccaacuagaaagcuuaccauggagcugcucauccugaaggccaacgccaucaccaccauccugacggcggugaccuucugcuucgccagcggccagaacaucaccgaggaguucuaccaguccacgugcagcgccgucuccaagggguaccucggcgcccugcggaccggcugguacaccuccgugaucaccaucgagcugagcaacaucaaggagaacaagugcaacgggaccgacgccaaggugaagcucaucaagcaggagcuggacaaguacaagaacgcggucacggaccugcagaugcugaugugcuccaccccggcaaccggcuccggcuccgccaucgcgagcggcgucgccgugugcaaggugcugcaccucgagggggaggucaacaagaucaagagcgcccugcuguccaccaacaaggccguggugagccucuccaacggcgucagcgugcugaccuucaaggugcuggaccucaagaacuacaucgacaagcagcugcugcccauccugaacaagcagagcugcuccauccccaaccccgagacggugauggaguuccagcagaagaacaaccggcuccuggagaucacccgcgaguucagcgugaacgccggggucaccacccccguguccacguacaugcugaccaacagcgagcuccugucccugaucaacgacaugccgaucaccaacgaccagaagaagcucaugagcaacaacgugcagaucguccggcagcaguccuacagcaucaugugcaucaucaaggaggaggugcuggcguacgugguccagcugccccucuacggcgugaucgacacccccugcuggaagcugcacacgagcccccugugcaccaccaacaccaaggagggguccaacaucugccucacgcgcaccgaccggggcugguacugcgacaacgccggcagcgucuccuucuucccgcaggccgagaccugcaaggugugcagcaaccgcguguucugcgacaccaugaacucccugacgcugcccagcgagguaaaccucugcaacgucgacaucuucaaccccaaguacgacugcaagaucaugaccuccaagaccgacgugagcuccagcgugaucaccucccugggggccaucgucagcugcuacggcaagacgaagugcaccgccagcaacaagaacaaggggaucaucaagaccuucuccaacggcugcgacuacgugagcaacaagggcguggacaccguguccgucgggaacacccuguacuacgugaacaagcaggagggccagagccucuacgugaagggggagcccaucaucaacuucuacgacccgcuggucuuccccuccgacgaguucgacgcgagcaucucccaggugaacgagaagaucaaccagagccuggccuucauccgcaaguccgacgagcugcuccacaacgugaacgccggcaagagcacgaccaacaucaugaucaccaccaucaucaucgucaucaucgugauccugcugucccucaucgccguggggcugcugcucuacugcaaggcccggagcacgcccgucacccuguccaaggaccagcugagcggcaucaacaacaucgcguucuccaacugaggacuagugaagggaacacccaaauuuaauucagccuuaagcacaauuaauuaagagugaaacguaauuguacaagcaguuggucacccaccauagggcaugaucaacaccgcaaccuuuccuuuuucccccagugauucugaaaaaccccucuucccuucagcuugcuuagauguuccaaauuuaguaagcuuaaggcggccuacagaagaaaaagaaaaaaaaggccacaaaaguucccucucacuuucaguaaauaaaauaaaagcagcaacagaaauaaagaaauaaaugaaauucaaaaugaaauaaauauuguguugugcagcauuaaaaaaucaauaaaaauuaaaaaugagcaagaucuaaaaaaaaaaaaaaaaaaaaaaaaaaaaaaaaaaaaaaaaaaaaaaaaaaaaaaaaaaaaaaaaugcaucccccccccccccccccccccccccccccccaaaggcucuuuucagagccaccagaauu

SEQ ID NO: 6210 - RNA, 2277 nt, Artificial Sequence
  mRNA product Design d-3 comprising derived and/or modified sequence from HRSV(A2)__F_DSCav1_mut6 (opt1)
gggagagggcgcuuggcuugcaaggacccugagcugcggcauugaagcacacccaacccaacucgacugaagucagccucacugaaccggaucugagaaucuucucucucugggcuugccagggcucuccgaaccuagcuagcauccucuucaauuccaacuagaaagcuuaccauggagcugcucauccugaaggccaacgccaucaccaccauccugacggcggugaccuucugcuucgccagcggccagaacaucaccgaggaguucuaccaguccacgugcagcgccgucuccaagggguaccucggcgcccugcgcaccgggugguacaccagcgugaucaccaucgagcuguccaacaucaaggagaacaagugcaacggcaccgacgccaaggugaagcucaucaagcaggagcuggacaaguacaagaacgcggucacggaccugcagaugcucaugugcagcacccccgccaccggguccggcagcgccaucgccuccggcguggcggugugcaagguccugcaccuggagggggaggugaacaagaucaagagcgcccuccuguccaccaacaaggccguggucagccuguccaacggcgugagcgugcucacguucaagguccuggaccugaagaacuacaucgacaagcagcuccugccgauccugaacaagcaguccugcagcauccccaaccccgagaccgugauggaguuccagcagaagaacaaccggcuccuggagaucacccgcgaguucuccgugaacgccggggucaccacgcccgugagcaccuacaugcugaccaacuccgagcuccugagccugaucaacgacaugccgaucaccaacgaccagaagaagcucaugagcaacaacgugcagaucguccggcagcaguccuacagcaucaugugcaucaucaaggaggaggugcuggccuacgugguccagcugccccucuacggcgugaucgacacgcccugcuggaagcugcacaccagcccccugugcaccaccaacacgaaggaggggagcaacaucugccucacccgcaccgaccggggcugguacugcgacaacgcgggcuccgugagcuucuucccgcaggccgagaccugcaaggucugcuccaaccgcguguucugcgacacgaugaacagccugacccugcccuccgaggucaaccucugcaacguggacaucuucaaccccaaguacgacugcaagaucaugaccagcaagaccgacguguccagcuccgucaucacgagccugggggccaucguguccugcuacggcaagaccaagugcaccgccagcaacaagaacaaggggaucaucaagaccuucuccaacggcugcgacuacgugagcaacaagggcgucgacacgguguccguggggaacacccuguacuacgucaacaagcaggagggccagagccucuacgugaagggggagcccaucaucaacuucuacgacccgcugguguuccccagcgacgaguucgacgccuccaucagccaggucaacgagaagaucaaccagucccuggcguucauccggaaguccgacgagcuccugcacaacgugaacgccggcaaguccaccaccaacaucaugaucaccacgaucaucaucgugaucaucgucauccugcucagccugaucgccguggggcugcuccuguacugcaaggcccgcuccacccccgugacccugagcaaggaccagcuguccggcaucaacaacaucgccuucagcaacugaggacuagugaagggaacacccaaauuuaauucagccuuaagcacaauuaauuaagagugaaacguaauuguacaagcaguuggucacccaccauagggcaugaucaacaccgcaaccuuuccuuuuucccccagugauucugaaaaaccccucuucccuucagcuugcuuagauguuccaaauuuaguaagcuuaaggcggccuacagaagaaaaagaaaaaaaaggccacaaaaguucccucucacuuucaguaaauaaaauaaaagcagcaacagaaauaaagaaauaaaugaaauucaaaaugaaauaaauauuguguugugcagcauuaaaaaaucaauaaaaauuaaaaaugagcaagaucuaaaaaaaaaaaaaaaaaaaaaaaaaaaaaaaaaaaaaaaaaaaaaaaaaaaaaaaaaaaaaaaaugcaucccccccccccccccccccccccccccccccaaaggcucuuuucagagccaccagaauu

SEQ ID NO: 6211 - RNA, 2277 nt, Artificial Sequence
  mRNA product Design d-3 comprising derived and/or modified sequence from HRSV(A2)__F_DSCav1_mut6 (opt2)
gggagagggcgcuuggcuugcaaggacccugagcugcggcauugaagcacacccaacccaacucgacugaagucagccucacugaaccggaucugagaaucuucucucucugggcuugccagggcucuccgaaccuagcuagcauccucuucaauuccaacuagaaagcuuaccauggagcuccucauccucaaggccaacgccaucaccaccauccucaccgccgucaccuucugcuucgccuccggccagaacaucaccgaggaguucuaccaguccaccugcuccgccgucuccaagggcuaccucggcgcccuccgcaccggcugguacaccuccgucaucaccaucgagcucuccaacaucaaggagaacaagugcaacggcaccgacgccaaggucaagcucaucaagcaggagcucgacaaguacaagaacgccgucaccgaccuccagaugcucaugugcuccacccccgccaccggcuccggcuccgccaucgccuccggcgucgccgucugcaagguccuccaccucgagggcgaggucaacaagaucaaguccgcccuccucuccaccaacaaggccgucgucucccucuccaacggcgucuccguccucaccuucaagguccucgaccucaagaacuacaucgacaagcagcuccuccccauccucaacaagcaguccugcuccauccccaaccccgagaccgucauggaguuccagcagaagaacaaccgccuccucgagaucacccgcgaguucuccgucaacgccggcgucaccacccccgucuccaccuacaugcucaccaacuccgagcuccucucccucaucaacgacaugcccaucaccaacgaccagaagaagcucauguccaacaacguccagaucguccgccagcaguccuacuccaucaugugcaucaucaaggaggagguccucgccuacgucguccagcucccccucuacggcgucaucgacacccccugcuggaagcuccacaccuccccccucugcaccaccaacaccaaggagggcuccaacaucugccucacccgcaccgaccgcggcugguacugcgacaacgccggcuccgucuccuucuucccccaggccgagaccugcaaggucugcuccaaccgcgucuucugcgacaccaugaacucccucacccuccccuccgaggucaaccucugcaacgucgacaucuucaaccccaaguacgacugcaagaucaugaccuccaagaccgacgucuccuccuccgucaucaccucccucggcgccaucgucuccugcuacggcaagaccaagugcaccgccuccaacaagaacaagggcaucaucaagaccuucuccaacggcugcgacuacgucuccaacaagggcgucgacaccgucuccgucggcaacacccucuacuacgucaacaagcaggagggccagucccucuacgucaagggcgagcccaucaucaacuucuacgacccccucgucuuccccuccgacgaguucgacgccuccaucucccaggucaacgagaagaucaaccagucccucgccuucauccgcaaguccgacgagcuccuccacaacgucaacgccggcaaguccaccaccaacaucaugaucaccaccaucaucaucgucaucaucgucauccuccucucccucaucgccgucggccuccuccucuacugcaaggcccgcuccacccccgucacccucuccaaggaccagcucuccggcaucaacaacaucgccuucuccaacugaggacuagugaagggaacacccaaauuuaauucagccuuaagcacaauuaauuaagagugaaacguaauuguacaagcaguuggucacccaccauagggcaugaucaacaccgcaaccuuuccuuuuucccccagugauucugaaaaaccccucuucccuucagcuugcuuagauguuccaaauuuaguaagcuuaaggcggccuacagaagaaaaagaaaaaaaaggccacaaaaguucccucucacuuucaguaaauaaaauaaaagcagcaacagaaauaaagaaauaaaugaaauucaaaaugaaauaaauauuguguugugcagcauuaaaaaaucaauaaaaauuaaaaaugagcaagaucuaaaaaaaaaaaaaaaaaaaaaaaaaaaaaaaaaaaaaaaaaaaaaaaaaaaaaaaaaaaaaaaaugcaucccccccccccccccccccccccccccccccaaaggcucuuuucagagccaccagaauu

SEQ ID NO: 6212 - RNA, 2277 nt, Artificial Sequence
  mRNA product Design d-3 comprising derived and/or modified sequence from HRSV(A2)__F_DSCav1_mut6 (opt3)
gggagagggcgcuuggcuugcaaggacccugagcugcggcauugaagcacacccaacccaacucgacugaagucagccucacugaaccggaucugagaaucuucucucucugggcuugccagggcucuccgaaccuagcuagcauccucuucaauuccaacuagaaagcuuaccauggagcugcucauccuuaaggccaacgcuauuaccacaauacugacugcagugacguucugcuuugccagcggccagaauaucaccgaagaguucuaccaauccacauguucugcggucucaaaaggguauuugggagcuuuaagaacugguugguacaccaguguuauuacaaucgaacugagcaacauuaaggagaauaaaugcaacggcaccgacgccaaggugaaacuaaucaagcaggaacucgauaaguauaaaaaugcaguaacugaccugcagaugcuuauguguuccacacccgccaccgggucuggaucggcuauagcaucaggcguggccgucugcaaggugcugcacuuggagggugagguuaacaaaaucaagagcgcucuccugaguacgaauaaagccguggucucccugucuaacggggugagcguacucacuuuuaagguuuuagaucugaagaauuacauugacaaacagcuuuugccuauccugaacaagcaauccuguucaauuccaaauccggaaaccgugauggaguuccagcagaaaaacaauaggcuacucgaaaucacacgggaguuuagugucaacgcgggagugacuacccccgugagcacauauaugcugaccaauucugagcuucuguccuugauaaacgauaugccuauuacgaacgaccagaagaaacucaugucaaauaacguccaaaucguucgccagcagagcuacaguauuaugugcaucaucaaggaagaggugcuggcauauguagugcaguuaccacuguacggcgucauugauacucccuguuggaaacuccauacaucuccucuuugcaccacuaauacaaaggaaggcuccaacauaugucugacccgaacggaccgugggugguacugcgauaaugccggaagcgugucguucuuuccacaagcugagaccuguaagguuugcucuaacagaguguucugcgacacaaugaacuccuugacucuacccucagaagucaaucuguguaauguggauaucuuuaacccuaaauaugacugcaagauuaugaccaguaaaacagauguaagcuccucuguuaucacuagccucggugccauagugucauguuacggcaagaccaaaugcacagcaaguaauaagaacaaggggauuaucaaaaccuucuccaauggaugugacuaugucagcaacaagggcguggacacugucucuguggguaauacgcuguacuauguuaacaaacaggaggggcagucacuuuacgugaagggagagccaaucauuaacuuuuaugauccgcugguauuccccagugacgaauuugaugcuagcaucucccaagucaaugagaaaauuaaccagucuuuggccuucauaaggaagucggacgaacuccugcacaaugugaacgcgggcaagagcacaaccaauaucaugauuacuaccaucaucauuguuauaaucgugauuuuacugucccuaaucgccgucggccuccugcuuuacugcaaagcacggucaacaccugugaccuugaguaaggaucagcugucugggauuaacaauaucgcuuucagcaacugaggacuagugaagggaacacccaaauuuaauucagccuuaagcacaauuaauuaagagugaaacguaauuguacaagcaguuggucacccaccauagggcaugaucaacaccgcaaccuuuccuuuuucccccagugauucugaaaaaccccucuucccuucagcuugcuuagauguuccaaauuuaguaagcuuaaggcggccuacagaagaaaaagaaaaaaaaggccacaaaaguucccucucacuuucaguaaauaaaauaaaagcagcaacagaaauaaagaaauaaaugaaauucaaaaugaaauaaauauuguguugugcagcauuaaaaaaucaauaaaaauuaaaaaugagcaagaucuaaaaaaaaaaaaaaaaaaaaaaaaaaaaaaaaaaaaaaaaaaaaaaaaaaaaaaaaaaaaaaaaugcaucccccccccccccccccccccccccccccccaaaggcucuuuucagagccaccagaauu

SEQ ID NO: 6213 - RNA, 2277 nt, Artificial Sequence
  mRNA product Design d-3 comprising derived and/or modified sequence from HRSV(A2)__F_DSCav1_mut6 (opt4)
gggagagggcgcuuggcuugcaaggacccugagcugcggcauugaagcacacccaacccaacucgacugaagucagccucacugaaccggaucugagaaucuucucucucugggcuugccagggcucuccgaaccuagcuagcauccucuucaauuccaacuagaaagcuuaccauggagcugcugauccugaaggccaacgccaucaccaccauccugaccgccgugaccuucugcuucgccagcggccagaacaucaccgaggaguucuaccagagcaccugcagcgccgugagcaagggcuaccugggcgcccugagaaccggcugguacaccagcgugaucaccaucgagcugagcaacaucaaggagaacaagugcaacggcaccgacgccaaggugaagcugaucaagcaggagcuggacaaguacaagaacgccgugaccgaccugcagaugcugaugugcagcacccccgccaccggcagcggcagcgccaucgccagcggcguggccgugugcaaggugcugcaccuggagggcgaggugaacaagaucaagagcgcccugcugagcaccaacaaggccguggugagccugagcaacggcgugagcgugcugaccuucaaggugcuggaccugaagaacuacaucgacaagcagcugcugcccauccugaacaagcagagcugcagcauccccaaccccgagaccgugauggaguuccagcagaagaacaacagacugcuggagaucaccagagaguucagcgugaacgccggcgugaccacccccgugagcaccuacaugcugaccaacagcgagcugcugagccugaucaacgacaugcccaucaccaacgaccagaagaagcugaugagcaacaacgugcagaucgugagacagcagagcuacagcaucaugugcaucaucaaggaggaggugcuggccuacguggugcagcugccccuguacggcgugaucgacacccccugcuggaagcugcacaccagcccccugugcaccaccaacaccaaggagggcagcaacaucugccugaccagaaccgacagaggcugguacugcgacaacgccggcagcgugagcuucuucccccaggccgagaccugcaaggugugcagcaacagaguguucugcgacaccaugaacagccugacccugcccagcgaggugaaccugugcaacguggacaucuucaaccccaaguacgacugcaagaucaugaccagcaagaccgacgugagcagcagcgugaucaccagccugggcgccaucgugagcugcuacggcaagaccaagugcaccgccagcaacaagaacaagggcaucaucaagaccuucagcaacggcugcgacuacgugagcaacaagggcguggacaccgugagcgugggcaacacccuguacuacgugaacaagcaggagggccagagccuguacgugaagggcgagcccaucaucaacuucuacgacccccugguguuccccagcgacgaguucgacgccagcaucagccaggugaacgagaagaucaaccagagccuggccuucaucagaaagagcgacgagcugcugcacaacgugaacgccggcaagagcaccaccaacaucaugaucaccaccaucaucaucgugaucaucgugauccugcugagccugaucgccgugggccugcugcuguacugcaaggccagaagcacccccgugacccugagcaaggaccagcugagcggcaucaacaacaucgccuucagcaacugaggacuagugaagggaacacccaaauuuaauucagccuuaagcacaauuaauuaagagugaaacguaauuguacaagcaguuggucacccaccauagggcaugaucaacaccgcaaccuuuccuuuuucccccagugauucugaaaaaccccucuucccuucagcuugcuuagauguuccaaauuuaguaagcuuaaggcggccuacagaagaaaaagaaaaaaaaggccacaaaaguucccucucacuuucaguaaauaaaauaaaagcagcaacagaaauaaagaaauaaaugaaauucaaaaugaaauaaauauuguguugugcagcauuaaaaaaucaauaaaaauuaaaaaugagcaagaucuaaaaaaaaaaaaaaaaaaaaaaaaaaaaaaaaaaaaaaaaaaaaaaaaaaaaaaaaaaaaaaaaugcaucccccccccccccccccccccccccccccccaaaggcucuuuucagagccaccagaauu

SEQ ID NO: 6214 - RNA, 2277 nt, Artificial Sequence
  mRNA product Design d-3 comprising derived and/or modified sequence from HRSV(A2)__F_DSCav1_mut6 (opt5)
gggagagggcgcuuggcuugcaaggacccugagcugcggcauugaagcacacccaacccaacucgacugaagucagccucacugaaccggaucugagaaucuucucucucugggcuugccagggcucuccgaaccuagcuagcauccucuucaauuccaacuagaaagcuuaccauggagcugcucauccugaaggccaacgcuauuaccacaauccuuacggccgugaccuucugcuuugcgagcggccagaauauuacagaagaguucuaccaauccaccuguucugcugucagcaaaggguaucugggagcccucagaacaggcugguacaccuccguuaucacaauugaacugucuaacaucaaggagaauaaaugcaacgggaccgacgccaaggugaaacuuaucaagcaggaacuggauaaguauaaaaaugcugugacggaccuccagaugcugauguguagcacccccgccacaggauccggcucugcuauugccagcggggucgcggugugcaagguucugcaccucgagggagaggugaacaaaaucaaguccgcccugcuuagcaccaauaaagcugucgugucucuguccaacggcguuagcgugcucacauuuaagguccuggaucuuaagaauuacauugacaaacagcugcucccuauccugaacaagcaaucuuguuccauuccgaaucccgaaaccgugauggaguuccagcagaaaaacaaucggcugcucgaaaucacgcgcgaguuuagcgugaacgccggcgucacaaccccuguuucuacauauaugcugaccaauuccgagcuucugagccucauuaacgauaugcccaucaccaacgaccagaagaaacugauguccaauaacgugcaaaucgugagacagcagucuuacagcauuaugugcaucauuaaggaagagguccuugcuuaugugguucagcugccucucuacggggugaucgauacacccuguuggaaacugcauacguccccucugugcaccacaaauaccaaggaaggaagcaacauuugucucacacggaccgaccgcggcugguacugcgauaaugccgggucugucuccuucuuuccgcaagcggagacguguaaggugugcagcaacagaguuuucugcgacacaaugaacucucugacccuucccagcgaagugaaucuguguaaugucgauaucuuuaacccuaaauaugacugcaagaucaugaccuccaaaacagaugugucuagcuccgucauuaccagccucggagccaucgugucuuguuacggcaagacaaaaugcacggcuuccaauaagaacaaggggauuaucaaaaccuucagcaauggaugugacuauguuucuaacaagggcguggacacagucuccgugggcaauacccuguacuauguuaacaaacaggaggggcagagccuuuacgugaagggagagcccauuaucaacuuuuaugauccucuggucuuccccuccgacgaauuugaugccucuaucagccaagugaaugagaaaauuaaccagucccucgcuuucauccggaagucugacgaacugcugcacaaugugaacgccggcaagagcacaaccaauauuaugaucacgaccauuaucauuguuaucaucgucauucuccugucccuuaucgccguggggcugcuccuguacugcaaagcucgcagcacaccggugacccugucuaaggaucagcuuuccggaauuaacaauaucgcguucagcaacugaggacuagugaagggaacacccaaauuuaauucagccuuaagcacaauuaauuaagagugaaacguaauuguacaagcaguuggucacccaccauagggcaugaucaacaccgcaaccuuuccuuuuucccccagugauucugaaaaaccccucuucccuucagcuugcuuagauguuccaaauuuaguaagcuuaaggcggccuacagaagaaaaagaaaaaaaaggccacaaaaguucccucucacuuucaguaaauaaaauaaaagcagcaacagaaauaaagaaauaaaugaaauucaaaaugaaauaaauauuguguugugcagcauuaaaaaaucaauaaaaauuaaaaaugagcaagaucuaaaaaaaaaaaaaaaaaaaaaaaaaaaaaaaaaaaaaaaaaaaaaaaaaaaaaaaaaaaaaaaaugcaucccccccccccccccccccccccccccccccaaaggcucuuuucagagccaccagaauu

SEQ ID NO: 6215 - RNA, 2277 nt, Artificial Sequence
  mRNA product Design d-3 comprising derived and/or modified sequence from HRSV(A2)__F_DSCav1_mut6 (opt6)
gggagagggcgcuuggcuugcaaggacccugagcugcggcauugaagcacacccaacccaacucgacugaagucagccucacugaaccggaucugagaaucuucucucucugggcuugccagggcucuccgaaccuagcuagcauccucuucaauuccaacuagaaagcuuaccauggaacuauuaaucuuaaaagcaaaugcuauaaccacaauauuaacagcaguaacauucuguuuugccuccggacaaaacauaacagaagaauuuuaucaaucaacaugcucugcaguauccaaagguuacuuaggcgcacuacgcacuggaugguauacaucaguaauaacaauagaacuaucaaacauaaaagaaaauaaauguaacgguacugacgcaaaagugaaacuaauuaaacaagaacucgacaaauacaaaaaugcuguaacagaccuacaaaugcuaaugugcucaacacccgcaaccggaucaggaucagccauagccuccggagucgcaguaugcaaaguauuacaucuugaaggagaaguaaauaaaauaaaaucagcauuacuauccacaaauaaagccguaguaucacuaucaaacgguguauccguccuuacauucaaaguauuagaucuaaaaaacuacauagauaaacaacuacuacccaucuuaaacaaacaaucaugcucaauucccaacccagaaacagucauggaauuucaacaaaaaaacaacagacucuuagaaauaacacgagaauuuucaguaaacgcaggaguaaccacaccaguaaguacauacaugcucaccaacucagaauuauuaucacuuauuaacgacaugccaauuacaaacgaccaaaaaaaauuaaugucaaacaauguccaaauuguuagacaacaaucauacucuauaauguguauaauaaaagaagaaguacuagcuuacguaguucaauuaccacuauauggcguaauagauacaccuugcuggaaacuacauacaucuccauuauguacaacuaacacaaaagaaggaucuaacauaugccuaacacgcacagaucgaggaugguacugcgauaaugcagguuccguaucauucuuuccacaagcagaaacauguaaaguaugcucaaacagaguauucugugacacuaugaacuccuuaacccuacccucagaagucaaucuaugcaacguugacauauuuaacccaaaauacgacuguaaaaucaugacaucuaaaacagacguaucaucaucaguuauuacaucccuaggagcaauaguaucuugcuacggaaaaacaaaauguacagcauccaacaaaaacaaaggaauaaucaaaacauucucaaacggcugcgacuacguaucaaacaaagguguagacacaguaucaguaggaaauacuuuauauuacguaaauaaacaagaaggacaaucucuauacguuaaaggcgaaccuauuauaaacuucuacgacccacucguauucccuucagacgaauuugacgcaucuauaucccaaguuaacgaaaaaaucaaccaaucauuagccuuuauaagaaaauccgacgaauuauuacauaacgucaacgcuggaaaaucaacaacuaacauaaugauaaccacaauaauaauagucaucauaguuauauuacuaagucuaauagccguaggccuccuacuuuauugcaaagcaagaucaacaccaguaacauuauccaaagaccaacucagcggcauaaacaauauagcuuuuucaaacuagggacuagugaagggaacacccaaauuuaauucagccuuaagcacaauuaauuaagagugaaacguaauuguacaagcaguuggucacccaccauagggcaugaucaacaccgcaaccuuuccuuuuucccccagugauucugaaaaaccccucuucccuucagcuugcuuagauguuccaaauuuaguaagcuuaaggcggccuacagaagaaaaagaaaaaaaaggccacaaaaguucccucucacuuucaguaaauaaaauaaaagcagcaacagaaauaaagaaauaaaugaaauucaaaaugaaauaaauauuguguugugcagcauuaaaaaaucaauaaaaauuaaaaaugagcaagaucuaaaaaaaaaaaaaaaaaaaaaaaaaaaaaaaaaaaaaaaaaaaaaaaaaaaaaaaaaaaaaaaaugcaucccccccccccccccccccccccccccccccaaaggcucuuuucagagccaccagaauu

SEQ ID NO: 6216 - RNA, 2277 nt, Artificial Sequence
  mRNA product Design d-3 comprising derived and/or modified sequence from HRSV(A2)__F_DSCav1_mut6 (opt11)
gggagagggcgcuuggcuugcaaggacccugagcugcggcauugaagcacacccaacccaacucgacugaagucagccucacugaaccggaucugagaaucuucucucucugggcuugccagggcucuccgaaccuagcuagcauccucuucaauuccaacuagaaagcuuaccauggaacuccucauccucaaagccaacgcaaucacaaccauacuaacugcaguuacuuucugcuucgcauccggccaaaacaucaccgaagaguucuaccaaucaaccugcuccgcagucuccaaaggauaccucggagcccuucgcaccggcugguacaccuccgucauaaccaucgaacucucaaacauaaaagaaaacaaaugcaacggcacagacgcgaaagucaaacuuaucaaacaagaacucgacaaauacaaaaacgccgucaccgaccugcagaugcucaugugcucaacccccgccacaggaagcggcucugcuaucgcuuccggcgucgccgucugcaaaguccuccaccucgaaggcgaaguaaacaaaaucaagucagcccuccucuccaccaacaaagccgucgucucucucucaaacggcguauccguccucacauucaaaguccucgaccucaaaaacuacaucgacaaacaacuucuccccauccuaaacaaacaaucaugcuccauccccaaccccgaaacagucauggaauuucaacaaaagaacaaccgccucuuagaaaucacccgagaauuuuccgucaacgcgggagucacaacccccguuucuacguauaugcucaccaacuccgaacuccuuucccucauaaacgacaugccaaucaccaacgaccaaaagaaacucaugucaaacaacguccaaaucguccgacaacaauccuacucuauuaugugcaucaucaaagaagaaguucucgccuacgucguccaacuaccccucuacggcgugaucgacacccccugcuggaaacuacacaccucaccccucugcaccaccaacaccaaggaaggcuccaacaucugccucacccgcaccgaccgcggcugguacugcgacaacgcuggcuccgucucauucuucccgcaagccgaaacuugcaaaguaugcuccaacagaguauucugcgacaccaugaacucacuaacccucccuuccgaagucaaccuuugcaacguugacauauucaacccaaaguacgauugcaaaauuaugacauccaaaacagaugucuccuccuccgucaucacaucccucggugccauuguaucaugcuacggaaaaaccaaaugcaccgcauccaacaaaaacaaaggaaucaucaaaaccuucucaaacggcugcgauuacgucucaaacaaaggagucgacacagucuccgucggaaacacccuauacuacgucaacaaacaagaaggccaaucccuguacgucaaaggagaacccaucaucaacuucuacgacccccucgucuucccgagcgacgaguucgacgccuccaucucacaagucaaugaaaagaucaaccaaucccuugccuucauccggaaaucggacgaacuccuacacaacgugaacgcuggaaaaucaaccaccaacaucaugaucacaaccaucauuaucgucaucaucgucauacuccucucccuaaucgccgucggccuccuccuguauugcaaagcucgcuccacccccgucacccuguccaaagaccaacucuccggaaucaacaacaucgccuucucaaacuaaggacuagugaagggaacacccaaauuuaauucagccuuaagcacaauuaauuaagagugaaacguaauuguacaagcaguuggucacccaccauagggcaugaucaacaccgcaaccuuuccuuuuucccccagugauucugaaaaaccccucuucccuucagcuugcuuagauguuccaaauuuaguaagcuuaaggcggccuacagaagaaaaagaaaaaaaaggccacaaaaguucccucucacuuucaguaaauaaaauaaaagcagcaacagaaauaaagaaauaaaugaaauucaaaaugaaauaaauauuguguugugcagcauuaaaaaaucaauaaaaauuaaaaaugagcaagaucuaaaaaaaaaaaaaaaaaaaaaaaaaaaaaaaaaaaaaaaaaaaaaaaaaaaaaaaaaaaaaaaaugcaucccccccccccccccccccccccccccccccaaaggcucuuuucagagccaccagaauu

SEQ ID NO: 6217 - RNA, 1960 nt, Artificial Sequence
  mRNA product Design d-4 comprising derived and/or modified sequence from HRSV(A2)__F_DSCav1_mut6 (opt1)
gggagagucccgcagucggcguccagcggcucugcuuguucgugugugugucguugcaggccuuauucaagcuuaccauggagcugcucauccugaaggccaacgccaucaccaccauccugacggcggugaccuucugcuucgccagcggccagaacaucaccgaggaguucuaccaguccacgugcagcgccgucuccaagggguaccucggcgcccugcggaccggcugguacaccuccgugaucaccaucgagcugagcaacaucaaggagaacaagugcaacgggaccgacgccaaggugaagcucaucaagcaggagcuggacaaguacaagaacgcggucacggaccugcagaugcugaugugcuccaccccggcaaccggcuccggcuccgccaucgcgagcggcgucgccgugugcaaggugcugcaccucgagggggaggucaacaagaucaagagcgcccugcuguccaccaacaaggccguggugagccucuccaacggcgucagcgugcugaccuucaaggugcuggaccucaagaacuacaucgacaagcagcugcugcccauccugaacaagcagagcugcuccauccccaaccccgagacggugauggaguuccagcagaagaacaaccggcuccuggagaucacccgcgaguucagcgugaacgccggggucaccacccccguguccacguacaugcugaccaacagcgagcuccugucccugaucaacgacaugccgaucaccaacgaccagaagaagcucaugagcaacaacgugcagaucguccggcagcaguccuacagcaucaugugcaucaucaaggaggaggugcuggcguacgugguccagcugccccucuacggcgugaucgacacccccugcuggaagcugcacacgagcccccugugcaccaccaacaccaaggagggguccaacaucugccucacgcgcaccgaccggggcugguacugcgacaacgccggcagcgucuccuucuucccgcaggccgagaccugcaaggugugcagcaaccgcguguucugcgacaccaugaacucccugacgcugcccagcgagguaaaccucugcaacgucgacaucuucaaccccaaguacgacugcaagaucaugaccuccaagaccgacgugagcuccagcgugaucaccucccugggggccaucgucagcugcuacggcaagacgaagugcaccgccagcaacaagaacaaggggaucaucaagaccuucuccaacggcugcgacuacgugagcaacaagggcguggacaccguguccgucgggaacacccuguacuacgugaacaagcaggagggccagagccucuacgugaagggggagcccaucaucaacuucuacgacccgcuggucuuccccuccgacgaguucgacgcgagcaucucccaggugaacgagaagaucaaccagagccuggccuucauccgcaaguccgacgagcugcuccacaacgugaacgccggcaagagcacgaccaacaucaugaucaccaccaucaucaucgucaucaucgugauccugcugucccucaucgccguggggcugcugcucuacugcaaggcccggagcacgcccgucacccuguccaaggaccagcugagcggcaucaacaacaucgcguucuccaacugaggacuaguggaagcauuuuccuggcugauuaaaagaaauuacucagcuauggucaucuguuccuguuagaaggcuaugcagcauauuauauacuaugcgcauguuaugaaaugcauaauaaaaaauuuuaaaaaaucuaaaagaucuaaaaaaaaaaaaaaaaaaaaaaaaaaaaaaaaaaaaaaaaaaaaaaaaaaaaaaaaaaaaaaaaugcaucccccccccccccccccccccccccccccccaaaggcucuuuucagagccaccagaauu

SEQ ID NO: 6218 - RNA, 1960 nt, Artificial Sequence
  mRNA product Design d-4 comprising derived and/or modified sequence from HRSV(A2)__F_DSCav1_mut6 (opt1)
gggagagucccgcagucggcguccagcggcucugcuuguucgugugugugucguugcaggccuuauucaagcuuaccauggagcugcucauccugaaggccaacgccaucaccaccauccugacggcggugaccuucugcuucgccagcggccagaacaucaccgaggaguucuaccaguccacgugcagcgccgucuccaagggguaccucggcgcccugcgcaccgggugguacaccagcgugaucaccaucgagcuguccaacaucaaggagaacaagugcaacggcaccgacgccaaggugaagcucaucaagcaggagcuggacaaguacaagaacgcggucacggaccugcagaugcucaugugcagcacccccgccaccggguccggcagcgccaucgccuccggcguggcggugugcaagguccugcaccuggagggggaggugaacaagaucaagagcgcccuccuguccaccaacaaggccguggucagccuguccaacggcgugagcgugcucacguucaagguccuggaccugaagaacuacaucgacaagcagcuccugccgauccugaacaagcaguccugcagcauccccaaccccgagaccgugauggaguuccagcagaagaacaaccggcuccuggagaucacccgcgaguucuccgugaacgccggggucaccacgcccgugagcaccuacaugcugaccaacuccgagcuccugagccugaucaacgacaugccgaucaccaacgaccagaagaagcucaugagcaacaacgugcagaucguccggcagcaguccuacagcaucaugugcaucaucaaggaggaggugcuggccuacgugguccagcugccccucuacggcgugaucgacacgcccugcuggaagcugcacaccagcccccugugcaccaccaacacgaaggaggggagcaacaucugccucacccgcaccgaccggggcugguacugcgacaacgcgggcuccgugagcuucuucccgcaggccgagaccugcaaggucugcuccaaccgcguguucugcgacacgaugaacagccugacccugcccuccgaggucaaccucugcaacguggacaucuucaaccccaaguacgacugcaagaucaugaccagcaagaccgacguguccagcuccgucaucacgagccugggggccaucguguccugcuacggcaagaccaagugcaccgccagcaacaagaacaaggggaucaucaagaccuucuccaacggcugcgacuacgugagcaacaagggcgucgacacgguguccguggggaacacccuguacuacgucaacaagcaggagggccagagccucuacgugaagggggagcccaucaucaacuucuacgacccgcugguguuccccagcgacgaguucgacgccuccaucagccaggucaacgagaagaucaaccagucccuggcguucauccggaaguccgacgagcuccugcacaacgugaacgccggcaaguccaccaccaacaucaugaucaccacgaucaucaucgugaucaucgucauccugcucagccugaucgccguggggcugcuccuguacugcaaggcccgcuccacccccgugacccugagcaaggaccagcuguccggcaucaacaacaucgccuucagcaacugaggacuaguggaagcauuuuccuggcugauuaaaagaaauuacucagcuauggucaucuguuccuguuagaaggcuaugcagcauauuauauacuaugcgcauguuaugaaaugcauaauaaaaaauuuuaaaaaaucuaaaagaucuaaaaaaaaaaaaaaaaaaaaaaaaaaaaaaaaaaaaaaaaaaaaaaaaaaaaaaaaaaaaaaaaugcaucccccccccccccccccccccccccccccccaaaggcucuuuucagagccaccagaauu

SEQ ID NO: 6219 - RNA, 1960 nt, Artificial Sequence
  mRNA product Design d-4 comprising derived and/or modified sequence from HRSV(A2)__F_DSCav1_mut6 (opt2)
gggagagucccgcagucggcguccagcggcucugcuuguucgugugugugucguugcaggccuuauucaagcuuaccauggagcuccucauccucaaggccaacgccaucaccaccauccucaccgccgucaccuucugcuucgccuccggccagaacaucaccgaggaguucuaccaguccaccugcuccgccgucuccaagggcuaccucggcgcccuccgcaccggcugguacaccuccgucaucaccaucgagcucuccaacaucaaggagaacaagugcaacggcaccgacgccaaggucaagcucaucaagcaggagcucgacaaguacaagaacgccgucaccgaccuccagaugcucaugugcuccacccccgccaccggcuccggcuccgccaucgccuccggcgucgccgucugcaagguccuccaccucgagggcgaggucaacaagaucaaguccgcccuccucuccaccaacaaggccgucgucucccucuccaacggcgucuccguccucaccuucaagguccucgaccucaagaacuacaucgacaagcagcuccuccccauccucaacaagcaguccugcuccauccccaaccccgagaccgucauggaguuccagcagaagaacaaccgccuccucgagaucacccgcgaguucuccgucaacgccggcgucaccacccccgucuccaccuacaugcucaccaacuccgagcuccucucccucaucaacgacaugcccaucaccaacgaccagaagaagcucauguccaacaacguccagaucguccgccagcaguccuacuccaucaugugcaucaucaaggaggagguccucgccuacgucguccagcucccccucuacggcgucaucgacacccccugcuggaagcuccacaccuccccccucugcaccaccaacaccaaggagggcuccaacaucugccucacccgcaccgaccgcggcugguacugcgacaacgccggcuccgucuccuucuucccccaggccgagaccugcaaggucugcuccaaccgcgucuucugcgacaccaugaacucccucacccuccccuccgaggucaaccucugcaacgucgacaucuucaaccccaaguacgacugcaagaucaugaccuccaagaccgacgucuccuccuccgucaucaccucccucggcgccaucgucuccugcuacggcaagaccaagugcaccgccuccaacaagaacaagggcaucaucaagaccuucuccaacggcugcgacuacgucuccaacaagggcgucgacaccgucuccgucggcaacacccucuacuacgucaacaagcaggagggccagucccucuacgucaagggcgagcccaucaucaacuucuacgacccccucgucuuccccuccgacgaguucgacgccuccaucucccaggucaacgagaagaucaaccagucccucgccuucauccgcaaguccgacgagcuccuccacaacgucaacgccggcaaguccaccaccaacaucaugaucaccaccaucaucaucgucaucaucgucauccuccucucccucaucgccgucggccuccuccucuacugcaaggcccgcuccacccccgucacccucuccaaggaccagcucuccggcaucaacaacaucgccuucuccaacugaggacuaguggaagcauuuuccuggcugauuaaaagaaauuacucagcuauggucaucuguuccuguuagaaggcuaugcagcauauuauauacuaugcgcauguuaugaaaugcauaauaaaaaauuuuaaaaaaucuaaaagaucuaaaaaaaaaaaaaaaaaaaaaaaaaaaaaaaaaaaaaaaaaaaaaaaaaaaaaaaaaaaaaaaaugcaucccccccccccccccccccccccccccccccaaaggcucuuuucagagccaccagaauu

SEQ ID NO: 6220 - RNA, 1960 nt, Artificial Sequence
  mRNA product Design d-4 comprising derived and/or modified sequence from HRSV(A2)__F_DSCav1_mut6 (opt3)
gggagagucccgcagucggcguccagcggcucugcuuguucgugugugugucguugcaggccuuauucaagcuuaccauggagcugcucauccuuaaggccaacgcuauuaccacaauacugacugcagugacguucugcuuugccagcggccagaauaucaccgaagaguucuaccaauccacauguucugcggucucaaaaggguauuugggagcuuuaagaacugguugguacaccaguguuauuacaaucgaacugagcaacauuaaggagaauaaaugcaacggcaccgacgccaaggugaaacuaaucaagcaggaacucgauaaguauaaaaaugcaguaacugaccugcagaugcuuauguguuccacacccgccaccgggucuggaucggcuauagcaucaggcguggccgucugcaaggugcugcacuuggagggugagguuaacaaaaucaagagcgcucuccugaguacgaauaaagccguggucucccugucuaacggggugagcguacucacuuuuaagguuuuagaucugaagaauuacauugacaaacagcuuuugccuauccugaacaagcaauccuguucaauuccaaauccggaaaccgugauggaguuccagcagaaaaacaauaggcuacucgaaaucacacgggaguuuagugucaacgcgggagugacuacccccgugagcacauauaugcugaccaauucugagcuucuguccuugauaaacgauaugccuauuacgaacgaccagaagaaacucaugucaaauaacguccaaaucguucgccagcagagcuacaguauuaugugcaucaucaaggaagaggugcuggcauauguagugcaguuaccacuguacggcgucauugauacucccuguuggaaacuccauacaucuccucuuugcaccacuaauacaaaggaaggcuccaacauaugucugacccgaacggaccgugggugguacugcgauaaugccggaagcgugucguucuuuccacaagcugagaccuguaagguuugcucuaacagaguguucugcgacacaaugaacuccuugacucuacccucagaagucaaucuguguaauguggauaucuuuaacccuaaauaugacugcaagauuaugaccaguaaaacagauguaagcuccucuguuaucacuagccucggugccauagugucauguuacggcaagaccaaaugcacagcaaguaauaagaacaaggggauuaucaaaaccuucuccaauggaugugacuaugucagcaacaagggcguggacacugucucuguggguaauacgcuguacuauguuaacaaacaggaggggcagucacuuuacgugaagggagagccaaucauuaacuuuuaugauccgcugguauuccccagugacgaauuugaugcuagcaucucccaagucaaugagaaaauuaaccagucuuuggccuucauaaggaagucggacgaacuccugcacaaugugaacgcgggcaagagcacaaccaauaucaugauuacuaccaucaucauuguuauaaucgugauuuuacugucccuaaucgccgucggccuccugcuuuacugcaaagcacggucaacaccugugaccuugaguaaggaucagcugucugggauuaacaauaucgcuuucagcaacugaggacuaguggaagcauuuuccuggcugauuaaaagaaauuacucagcuauggucaucuguuccuguuagaaggcuaugcagcauauuauauacuaugcgcauguuaugaaaugcauaauaaaaaauuuuaaaaaaucuaaaagaucuaaaaaaaaaaaaaaaaaaaaaaaaaaaaaaaaaaaaaaaaaaaaaaaaaaaaaaaaaaaaaaaaugcaucccccccccccccccccccccccccccccccaaaggcucuuuucagagccaccagaauu

SEQ ID NO: 6221 - RNA, 1960 nt, Artificial Sequence
  mRNA product Design d-4 comprising derived and/or modified sequence from HRSV(A2)__F_DSCav1_mut6 (opt4)
gggagagucccgcagucggcguccagcggcucugcuuguucgugugugugucguugcaggccuuauucaagcuuaccauggagcugcugauccugaaggccaacgccaucaccaccauccugaccgccgugaccuucugcuucgccagcggccagaacaucaccgaggaguucuaccagagcaccugcagcgccgugagcaagggcuaccugggcgcccugagaaccggcugguacaccagcgugaucaccaucgagcugagcaacaucaaggagaacaagugcaacggcaccgacgccaaggugaagcugaucaagcaggagcuggacaaguacaagaacgccgugaccgaccugcagaugcugaugugcagcacccccgccaccggcagcggcagcgccaucgccagcggcguggccgugugcaaggugcugcaccuggagggcgaggugaacaagaucaagagcgcccugcugagcaccaacaaggccguggugagccugagcaacggcgugagcgugcugaccuucaaggugcuggaccugaagaacuacaucgacaagcagcugcugcccauccugaacaagcagagcugcagcauccccaaccccgagaccgugauggaguuccagcagaagaacaacagacugcuggagaucaccagagaguucagcgugaacgccggcgugaccacccccgugagcaccuacaugcugaccaacagcgagcugcugagccugaucaacgacaugcccaucaccaacgaccagaagaagcugaugagcaacaacgugcagaucgugagacagcagagcuacagcaucaugugcaucaucaaggaggaggugcuggccuacguggugcagcugccccuguacggcgugaucgacacccccugcuggaagcugcacaccagcccccugugcaccaccaacaccaaggagggcagcaacaucugccugaccagaaccgacagaggcugguacugcgacaacgccggcagcgugagcuucuucccccaggccgagaccugcaaggugugcagcaacagaguguucugcgacaccaugaacagccugacccugcccagcgaggugaaccugugcaacguggacaucuucaaccccaaguacgacugcaagaucaugaccagcaagaccgacgugagcagcagcgugaucaccagccugggcgccaucgugagcugcuacggcaagaccaagugcaccgccagcaacaagaacaagggcaucaucaagaccuucagcaacggcugcgacuacgugagcaacaagggcguggacaccgugagcgugggcaacacccuguacuacgugaacaagcaggagggccagagccuguacgugaagggcgagcccaucaucaacuucuacgacccccugguguuccccagcgacgaguucgacgccagcaucagccaggugaacgagaagaucaaccagagccuggccuucaucagaaagagcgacgagcugcugcacaacgugaacgccggcaagagcaccaccaacaucaugaucaccaccaucaucaucgugaucaucgugauccugcugagccugaucgccgugggccugcugcuguacugcaaggccagaagcacccccgugacccugagcaaggaccagcugagcggcaucaacaacaucgccuucagcaacugaggacuaguggaagcauuuuccuggcugauuaaaagaaauuacucagcuauggucaucuguuccuguuagaaggcuaugcagcauauuauauacuaugcgcauguuaugaaaugcauaauaaaaaauuuuaaaaaaucuaaaagaucuaaaaaaaaaaaaaaaaaaaaaaaaaaaaaaaaaaaaaaaaaaaaaaaaaaaaaaaaaaaaaaaaugcaucccccccccccccccccccccccccccccccaaaggcucuuuucagagccaccagaauu

SEQ ID NO: 6222 - RNA, 1960 nt, Artificial Sequence
  mRNA product Design d-4 comprising derived and/or modified sequence from HRSV(A2)__F_DSCav1_mut6 (opt5)
gggagagucccgcagucggcguccagcggcucugcuuguucgugugugugucguugcaggccuuauucaagcuuaccauggagcugcucauccugaaggccaacgcuauuaccacaauccuuacggccgugaccuucugcuuugcgagcggccagaauauuacagaagaguucuaccaauccaccuguucugcugucagcaaaggguaucugggagcccucagaacaggcugguacaccuccguuaucacaauugaacugucuaacaucaaggagaauaaaugcaacgggaccgacgccaaggugaaacuuaucaagcaggaacuggauaaguauaaaaaugcugugacggaccuccagaugcugauguguagcacccccgccacaggauccggcucugcuauugccagcggggucgcggugugcaagguucugcaccucgagggagaggugaacaaaaucaaguccgcccugcuuagcaccaauaaagcugucgugucucuguccaacggcguuagcgugcucacauuuaagguccuggaucuuaagaauuacauugacaaacagcugcucccuauccugaacaagcaaucuuguuccauuccgaaucccgaaaccgugauggaguuccagcagaaaaacaaucggcugcucgaaaucacgcgcgaguuuagcgugaacgccggcgucacaaccccuguuucuacauauaugcugaccaauuccgagcuucugagccucauuaacgauaugcccaucaccaacgaccagaagaaacugauguccaauaacgugcaaaucgugagacagcagucuuacagcauuaugugcaucauuaaggaagagguccuugcuuaugugguucagcugccucucuacggggugaucgauacacccuguuggaaacugcauacguccccucugugcaccacaaauaccaaggaaggaagcaacauuugucucacacggaccgaccgcggcugguacugcgauaaugccgggucugucuccuucuuuccgcaagcggagacguguaaggugugcagcaacagaguuuucugcgacacaaugaacucucugacccuucccagcgaagugaaucuguguaaugucgauaucuuuaacccuaaauaugacugcaagaucaugaccuccaaaacagaugugucuagcuccgucauuaccagccucggagccaucgugucuuguuacggcaagacaaaaugcacggcuuccaauaagaacaaggggauuaucaaaaccuucagcaauggaugugacuauguuucuaacaagggcguggacacagucuccgugggcaauacccuguacuauguuaacaaacaggaggggcagagccuuuacgugaagggagagcccauuaucaacuuuuaugauccucuggucuuccccuccgacgaauuugaugccucuaucagccaagugaaugagaaaauuaaccagucccucgcuuucauccggaagucugacgaacugcugcacaaugugaacgccggcaagagcacaaccaauauuaugaucacgaccauuaucauuguuaucaucgucauucuccugucccuuaucgccguggggcugcuccuguacugcaaagcucgcagcacaccggugacccugucuaaggaucagcuuuccggaauuaacaauaucgcguucagcaacugaggacuaguggaagcauuuuccuggcugauuaaaagaaauuacucagcuauggucaucuguuccuguuagaaggcuaugcagcauauuauauacuaugcgcauguuaugaaaugcauaauaaaaaauuuuaaaaaaucuaaaagaucuaaaaaaaaaaaaaaaaaaaaaaaaaaaaaaaaaaaaaaaaaaaaaaaaaaaaaaaaaaaaaaaaugcaucccccccccccccccccccccccccccccccaaaggcucuuuucagagccaccagaauu

SEQ ID NO: 6223 - RNA, 1960 nt, Artificial Sequence
  mRNA product Design d-4 comprising derived and/or modified sequence from HRSV(A2)__F_DSCav1_mut6 (opt6)
gggagagucccgcagucggcguccagcggcucugcuuguucgugugugugucguugcaggccuuauucaagcuuaccauggaacuauuaaucuuaaaagcaaaugcuauaaccacaauauuaacagcaguaacauucuguuuugccuccggacaaaacauaacagaagaauuuuaucaaucaacaugcucugcaguauccaaagguuacuuaggcgcacuacgcacuggaugguauacaucaguaauaacaauagaacuaucaaacauaaaagaaaauaaauguaacgguacugacgcaaaagugaaacuaauuaaacaagaacucgacaaauacaaaaaugcuguaacagaccuacaaaugcuaaugugcucaacacccgcaaccggaucaggaucagccauagccuccggagucgcaguaugcaaaguauuacaucuugaaggagaaguaaauaaaauaaaaucagcauuacuauccacaaauaaagccguaguaucacuaucaaacgguguauccguccuuacauucaaaguauuagaucuaaaaaacuacauagauaaacaacuacuacccaucuuaaacaaacaaucaugcucaauucccaacccagaaacagucauggaauuucaacaaaaaaacaacagacucuuagaaauaacacgagaauuuucaguaaacgcaggaguaaccacaccaguaaguacauacaugcucaccaacucagaauuauuaucacuuauuaacgacaugccaauuacaaacgaccaaaaaaaauuaaugucaaacaauguccaaauuguuagacaacaaucauacucuauaauguguauaauaaaagaagaaguacuagcuuacguaguucaauuaccacuauauggcguaauagauacaccuugcuggaaacuacauacaucuccauuauguacaacuaacacaaaagaaggaucuaacauaugccuaacacgcacagaucgaggaugguacugcgauaaugcagguuccguaucauucuuuccacaagcagaaacauguaaaguaugcucaaacagaguauucugugacacuaugaacuccuuaacccuacccucagaagucaaucuaugcaacguugacauauuuaacccaaaauacgacuguaaaaucaugacaucuaaaacagacguaucaucaucaguuauuacaucccuaggagcaauaguaucuugcuacggaaaaacaaaauguacagcauccaacaaaaacaaaggaauaaucaaaacauucucaaacggcugcgacuacguaucaaacaaagguguagacacaguaucaguaggaaauacuuuauauuacguaaauaaacaagaaggacaaucucuauacguuaaaggcgaaccuauuauaaacuucuacgacccacucguauucccuucagacgaauuugacgcaucuauaucccaaguuaacgaaaaaaucaaccaaucauuagccuuuauaagaaaauccgacgaauuauuacauaacgucaacgcuggaaaaucaacaacuaacauaaugauaaccacaauaauaauagucaucauaguuauauuacuaagucuaauagccguaggccuccuacuuuauugcaaagcaagaucaacaccaguaacauuauccaaagaccaacucagcggcauaaacaauauagcuuuuucaaacuagggacuaguggaagcauuuuccuggcugauuaaaagaaauuacucagcuauggucaucuguuccuguuagaaggcuaugcagcauauuauauacuaugcgcauguuaugaaaugcauaauaaaaaauuuuaaaaaaucuaaaagaucuaaaaaaaaaaaaaaaaaaaaaaaaaaaaaaaaaaaaaaaaaaaaaaaaaaaaaaaaaaaaaaaaugcaucccccccccccccccccccccccccccccccaaaggcucuuuucagagccaccagaauu

SEQ ID NO: 6224 - RNA, 1960 nt, Artificial Sequence
  mRNA product Design d-4 comprising derived and/or modified sequence from HRSV(A2)__F_DSCav1_mut6 (opt11)
gggagagucccgcagucggcguccagcggcucugcuuguucgugugugugucguugcaggccuuauucaagcuuaccauggaacuccucauccucaaagccaacgcaaucacaaccauacuaacugcaguuacuuucugcuucgcauccggccaaaacaucaccgaagaguucuaccaaucaaccugcuccgcagucuccaaaggauaccucggagcccuucgcaccggcugguacaccuccgucauaaccaucgaacucucaaacauaaaagaaaacaaaugcaacggcacagacgcgaaagucaaacuuaucaaacaagaacucgacaaauacaaaaacgccgucaccgaccugcagaugcucaugugcucaacccccgccacaggaagcggcucugcuaucgcuuccggcgucgccgucugcaaaguccuccaccucgaaggcgaaguaaacaaaaucaagucagcccuccucuccaccaacaaagccgucgucucucucucaaacggcguauccguccucacauucaaaguccucgaccucaaaaacuacaucgacaaacaacuucuccccauccuaaacaaacaaucaugcuccauccccaaccccgaaacagucauggaauuucaacaaaagaacaaccgccucuuagaaaucacccgagaauuuuccgucaacgcgggagucacaacccccguuucuacguauaugcucaccaacuccgaacuccuuucccucauaaacgacaugccaaucaccaacgaccaaaagaaacucaugucaaacaacguccaaaucguccgacaacaauccuacucuauuaugugcaucaucaaagaagaaguucucgccuacgucguccaacuaccccucuacggcgugaucgacacccccugcuggaaacuacacaccucaccccucugcaccaccaacaccaaggaaggcuccaacaucugccucacccgcaccgaccgcggcugguacugcgacaacgcuggcuccgucucauucuucccgcaagccgaaacuugcaaaguaugcuccaacagaguauucugcgacaccaugaacucacuaacccucccuuccgaagucaaccuuugcaacguugacauauucaacccaaaguacgauugcaaaauuaugacauccaaaacagaugucuccuccuccgucaucacaucccucggugccauuguaucaugcuacggaaaaaccaaaugcaccgcauccaacaaaaacaaaggaaucaucaaaaccuucucaaacggcugcgauuacgucucaaacaaaggagucgacacagucuccgucggaaacacccuauacuacgucaacaaacaagaaggccaaucccuguacgucaaaggagaacccaucaucaacuucuacgacccccucgucuucccgagcgacgaguucgacgccuccaucucacaagucaaugaaaagaucaaccaaucccuugccuucauccggaaaucggacgaacuccuacacaacgugaacgcuggaaaaucaaccaccaacaucaugaucacaaccaucauuaucgucaucaucgucauacuccucucccuaaucgccgucggccuccuccuguauugcaaagcucgcuccacccccgucacccuguccaaagaccaacucuccggaaucaacaacaucgccuucucaaacuaaggacuaguggaagcauuuuccuggcugauuaaaagaaauuacucagcuauggucaucuguuccuguuagaaggcuaugcagcauauuauauacuaugcgcauguuaugaaaugcauaauaaaaaauuuuaaaaaaucuaaaagaucuaaaaaaaaaaaaaaaaaaaaaaaaaaaaaaaaaaaaaaaaaaaaaaaaaaaaaaaaaaaaaaaaugcaucccccccccccccccccccccccccccccccaaaggcucuuuucagagccaccagaauu

SEQ ID NO: 6225 - RNA, 2057 nt, Artificial Sequence
  mRNA product Design d-5 comprising derived and/or modified sequence from HRSV(A2)__F_DSCav1_mut6 (opt1)
gggagagggcgcuuggcuugcaaggacccugagcugcggcauugaagcacacccaacccaacucgacugaagucagccucacugaaccggaucugagaaucuucucucucugggcuugccagggcucuccgaaccuagcuagcauccucuucaauuccaacuagaaagcuuaccauggagcugcucauccugaaggccaacgccaucaccaccauccugacggcggugaccuucugcuucgccagcggccagaacaucaccgaggaguucuaccaguccacgugcagcgccgucuccaagggguaccucggcgcccugcggaccggcugguacaccuccgugaucaccaucgagcugagcaacaucaaggagaacaagugcaacgggaccgacgccaaggugaagcucaucaagcaggagcuggacaaguacaagaacgcggucacggaccugcagaugcugaugugcuccaccccggcaaccggcuccggcuccgccaucgcgagcggcgucgccgugugcaaggugcugcaccucgagggggaggucaacaagaucaagagcgcccugcuguccaccaacaaggccguggugagccucuccaacggcgucagcgugcugaccuucaaggugcuggaccucaagaacuacaucgacaagcagcugcugcccauccugaacaagcagagcugcuccauccccaaccccgagacggugauggaguuccagcagaagaacaaccggcuccuggagaucacccgcgaguucagcgugaacgccggggucaccacccccguguccacguacaugcugaccaacagcgagcuccugucccugaucaacgacaugccgaucaccaacgaccagaagaagcucaugagcaacaacgugcagaucguccggcagcaguccuacagcaucaugugcaucaucaaggaggaggugcuggcguacgugguccagcugccccucuacggcgugaucgacacccccugcuggaagcugcacacgagcccccugugcaccaccaacaccaaggagggguccaacaucugccucacgcgcaccgaccggggcugguacugcgacaacgccggcagcgucuccuucuucccgcaggccgagaccugcaaggugugcagcaaccgcguguucugcgacaccaugaacucccugacgcugcccagcgagguaaaccucugcaacgucgacaucuucaaccccaaguacgacugcaagaucaugaccuccaagaccgacgugagcuccagcgugaucaccucccugggggccaucgucagcugcuacggcaagacgaagugcaccgccagcaacaagaacaaggggaucaucaagaccuucuccaacggcugcgacuacgugagcaacaagggcguggacaccguguccgucgggaacacccuguacuacgugaacaagcaggagggccagagccucuacgugaagggggagcccaucaucaacuucuacgacccgcuggucuuccccuccgacgaguucgacgcgagcaucucccaggugaacgagaagaucaaccagagccuggccuucauccgcaaguccgacgagcugcuccacaacgugaacgccggcaagagcacgaccaacaucaugaucaccaccaucaucaucgucaucaucgugauccugcugucccucaucgccguggggcugcugcucuacugcaaggcccggagcacgcccgucacccuguccaaggaccagcugagcggcaucaacaacaucgcguucuccaacugaggacuaguggaagcauuuuccuggcugauuaaaagaaauuacucagcuauggucaucuguuccuguuagaaggcuaugcagcauauuauauacuaugcgcauguuaugaaaugcauaauaaaaaauuuuaaaaaaucuaaaagaucuaaaaaaaaaaaaaaaaaaaaaaaaaaaaaaaaaaaaaaaaaaaaaaaaaaaaaaaaaaaaaaaaugcaucccccccccccccccccccccccccccccccaaaggcucuuuucagagccaccagaauu

SEQ ID NO: 6226 - RNA, 2057 nt, Artificial Sequence
  mRNA product Design d-5 comprising derived and/or modified sequence from HRSV(A2)__F_DSCav1_mut6 (opt1)
gggagagggcgcuuggcuugcaaggacccugagcugcggcauugaagcacacccaacccaacucgacugaagucagccucacugaaccggaucugagaaucuucucucucugggcuugccagggcucuccgaaccuagcuagcauccucuucaauuccaacuagaaagcuuaccauggagcugcucauccugaaggccaacgccaucaccaccauccugacggcggugaccuucugcuucgccagcggccagaacaucaccgaggaguucuaccaguccacgugcagcgccgucuccaagggguaccucggcgcccugcgcaccgggugguacaccagcgugaucaccaucgagcuguccaacaucaaggagaacaagugcaacggcaccgacgccaaggugaagcucaucaagcaggagcuggacaaguacaagaacgcggucacggaccugcagaugcucaugugcagcacccccgccaccggguccggcagcgccaucgccuccggcguggcggugugcaagguccugcaccuggagggggaggugaacaagaucaagagcgcccuccuguccaccaacaaggccguggucagccuguccaacggcgugagcgugcucacguucaagguccuggaccugaagaacuacaucgacaagcagcuccugccgauccugaacaagcaguccugcagcauccccaaccccgagaccgugauggaguuccagcagaagaacaaccggcuccuggagaucacccgcgaguucuccgugaacgccggggucaccacgcccgugagcaccuacaugcugaccaacuccgagcuccugagccugaucaacgacaugccgaucaccaacgaccagaagaagcucaugagcaacaacgugcagaucguccggcagcaguccuacagcaucaugugcaucaucaaggaggaggugcuggccuacgugguccagcugccccucuacggcgugaucgacacgcccugcuggaagcugcacaccagcccccugugcaccaccaacacgaaggaggggagcaacaucugccucacccgcaccgaccggggcugguacugcgacaacgcgggcuccgugagcuucuucccgcaggccgagaccugcaaggucugcuccaaccgcguguucugcgacacgaugaacagccugacccugcccuccgaggucaaccucugcaacguggacaucuucaaccccaaguacgacugcaagaucaugaccagcaagaccgacguguccagcuccgucaucacgagccugggggccaucguguccugcuacggcaagaccaagugcaccgccagcaacaagaacaaggggaucaucaagaccuucuccaacggcugcgacuacgugagcaacaagggcgucgacacgguguccguggggaacacccuguacuacgucaacaagcaggagggccagagccucuacgugaagggggagcccaucaucaacuucuacgacccgcugguguuccccagcgacgaguucgacgccuccaucagccaggucaacgagaagaucaaccagucccuggcguucauccggaaguccgacgagcuccugcacaacgugaacgccggcaaguccaccaccaacaucaugaucaccacgaucaucaucgugaucaucgucauccugcucagccugaucgccguggggcugcuccuguacugcaaggcccgcuccacccccgugacccugagcaaggaccagcuguccggcaucaacaacaucgccuucagcaacugaggacuaguggaagcauuuuccuggcugauuaaaagaaauuacucagcuauggucaucuguuccuguuagaaggcuaugcagcauauuauauacuaugcgcauguuaugaaaugcauaauaaaaaauuuuaaaaaaucuaaaagaucuaaaaaaaaaaaaaaaaaaaaaaaaaaaaaaaaaaaaaaaaaaaaaaaaaaaaaaaaaaaaaaaaugcaucccccccccccccccccccccccccccccccaaaggcucuuuucagagccaccagaauu

SEQ ID NO: 6227 - RNA, 2057 nt, Artificial Sequence
  mRNA product Design d-5 comprising derived and/or modified sequence from HRSV(A2)__F_DSCav1_mut6 (opt2)
gggagagggcgcuuggcuugcaaggacccugagcugcggcauugaagcacacccaacccaacucgacugaagucagccucacugaaccggaucugagaaucuucucucucugggcuugccagggcucuccgaaccuagcuagcauccucuucaauuccaacuagaaagcuuaccauggagcuccucauccucaaggccaacgccaucaccaccauccucaccgccgucaccuucugcuucgccuccggccagaacaucaccgaggaguucuaccaguccaccugcuccgccgucuccaagggcuaccucggcgcccuccgcaccggcugguacaccuccgucaucaccaucgagcucuccaacaucaaggagaacaagugcaacggcaccgacgccaaggucaagcucaucaagcaggagcucgacaaguacaagaacgccgucaccgaccuccagaugcucaugugcuccacccccgccaccggcuccggcuccgccaucgccuccggcgucgccgucugcaagguccuccaccucgagggcgaggucaacaagaucaaguccgcccuccucuccaccaacaaggccgucgucucccucuccaacggcgucuccguccucaccuucaagguccucgaccucaagaacuacaucgacaagcagcuccuccccauccucaacaagcaguccugcuccauccccaaccccgagaccgucauggaguuccagcagaagaacaaccgccuccucgagaucacccgcgaguucuccgucaacgccggcgucaccacccccgucuccaccuacaugcucaccaacuccgagcuccucucccucaucaacgacaugcccaucaccaacgaccagaagaagcucauguccaacaacguccagaucguccgccagcaguccuacuccaucaugugcaucaucaaggaggagguccucgccuacgucguccagcucccccucuacggcgucaucgacacccccugcuggaagcuccacaccuccccccucugcaccaccaacaccaaggagggcuccaacaucugccucacccgcaccgaccgcggcugguacugcgacaacgccggcuccgucuccuucuucccccaggccgagaccugcaaggucugcuccaaccgcgucuucugcgacaccaugaacucccucacccuccccuccgaggucaaccucugcaacgucgacaucuucaaccccaaguacgacugcaagaucaugaccuccaagaccgacgucuccuccuccgucaucaccucccucggcgccaucgucuccugcuacggcaagaccaagugcaccgccuccaacaagaacaagggcaucaucaagaccuucuccaacggcugcgacuacgucuccaacaagggcgucgacaccgucuccgucggcaacacccucuacuacgucaacaagcaggagggccagucccucuacgucaagggcgagcccaucaucaacuucuacgacccccucgucuuccccuccgacgaguucgacgccuccaucucccaggucaacgagaagaucaaccagucccucgccuucauccgcaaguccgacgagcuccuccacaacgucaacgccggcaaguccaccaccaacaucaugaucaccaccaucaucaucgucaucaucgucauccuccucucccucaucgccgucggccuccuccucuacugcaaggcccgcuccacccccgucacccucuccaaggaccagcucuccggcaucaacaacaucgccuucuccaacugaggacuaguggaagcauuuuccuggcugauuaaaagaaauuacucagcuauggucaucuguuccuguuagaaggcuaugcagcauauuauauacuaugcgcauguuaugaaaugcauaauaaaaaauuuuaaaaaaucuaaaagaucuaaaaaaaaaaaaaaaaaaaaaaaaaaaaaaaaaaaaaaaaaaaaaaaaaaaaaaaaaaaaaaaaugcaucccccccccccccccccccccccccccccccaaaggcucuuuucagagccaccagaauu

SEQ ID NO: 6228 - RNA, 2057 nt, Artificial Sequence
  mRNA product Design d-5 comprising derived and/or modified sequence from HRSV(A2)__F_DSCav1_mut6 (opt3)
gggagagggcgcuuggcuugcaaggacccugagcugcggcauugaagcacacccaacccaacucgacugaagucagccucacugaaccggaucugagaaucuucucucucugggcuugccagggcucuccgaaccuagcuagcauccucuucaauuccaacuagaaagcuuaccauggagcugcucauccuuaaggccaacgcuauuaccacaauacugacugcagugacguucugcuuugccagcggccagaauaucaccgaagaguucuaccaauccacauguucugcggucucaaaaggguauuugggagcuuuaagaacugguugguacaccaguguuauuacaaucgaacugagcaacauuaaggagaauaaaugcaacggcaccgacgccaaggugaaacuaaucaagcaggaacucgauaaguauaaaaaugcaguaacugaccugcagaugcuuauguguuccacacccgccaccgggucuggaucggcuauagcaucaggcguggccgucugcaaggugcugcacuuggagggugagguuaacaaaaucaagagcgcucuccugaguacgaauaaagccguggucucccugucuaacggggugagcguacucacuuuuaagguuuuagaucugaagaauuacauugacaaacagcuuuugccuauccugaacaagcaauccuguucaauuccaaauccggaaaccgugauggaguuccagcagaaaaacaauaggcuacucgaaaucacacgggaguuuagugucaacgcgggagugacuacccccgugagcacauauaugcugaccaauucugagcuucuguccuugauaaacgauaugccuauuacgaacgaccagaagaaacucaugucaaauaacguccaaaucguucgccagcagagcuacaguauuaugugcaucaucaaggaagaggugcuggcauauguagugcaguuaccacuguacggcgucauugauacucccuguuggaaacuccauacaucuccucuuugcaccacuaauacaaaggaaggcuccaacauaugucugacccgaacggaccgugggugguacugcgauaaugccggaagcgugucguucuuuccacaagcugagaccuguaagguuugcucuaacagaguguucugcgacacaaugaacuccuugacucuacccucagaagucaaucuguguaauguggauaucuuuaacccuaaauaugacugcaagauuaugaccaguaaaacagauguaagcuccucuguuaucacuagccucggugccauagugucauguuacggcaagaccaaaugcacagcaaguaauaagaacaaggggauuaucaaaaccuucuccaauggaugugacuaugucagcaacaagggcguggacacugucucuguggguaauacgcuguacuauguuaacaaacaggaggggcagucacuuuacgugaagggagagccaaucauuaacuuuuaugauccgcugguauuccccagugacgaauuugaugcuagcaucucccaagucaaugagaaaauuaaccagucuuuggccuucauaaggaagucggacgaacuccugcacaaugugaacgcgggcaagagcacaaccaauaucaugauuacuaccaucaucauuguuauaaucgugauuuuacugucccuaaucgccgucggccuccugcuuuacugcaaagcacggucaacaccugugaccuugaguaaggaucagcugucugggauuaacaauaucgcuuucagcaacugaggacuaguggaagcauuuuccuggcugauuaaaagaaauuacucagcuauggucaucuguuccuguuagaaggcuaugcagcauauuauauacuaugcgcauguuaugaaaugcauaauaaaaaauuuuaaaaaaucuaaaagaucuaaaaaaaaaaaaaaaaaaaaaaaaaaaaaaaaaaaaaaaaaaaaaaaaaaaaaaaaaaaaaaaaugcaucccccccccccccccccccccccccccccccaaaggcucuuuucagagccaccagaauu

SEQ ID NO: 6229 - RNA, 2057 nt, Artificial Sequence
  mRNA product Design d-5 comprising derived and/or modified sequence from HRSV(A2)__F_DSCav1_mut6 (opt4)
gggagagggcgcuuggcuugcaaggacccugagcugcggcauugaagcacacccaacccaacucgacugaagucagccucacugaaccggaucugagaaucuucucucucugggcuugccagggcucuccgaaccuagcuagcauccucuucaauuccaacuagaaagcuuaccauggagcugcugauccugaaggccaacgccaucaccaccauccugaccgccgugaccuucugcuucgccagcggccagaacaucaccgaggaguucuaccagagcaccugcagcgccgugagcaagggcuaccugggcgcccugagaaccggcugguacaccagcgugaucaccaucgagcugagcaacaucaaggagaacaagugcaacggcaccgacgccaaggugaagcugaucaagcaggagcuggacaaguacaagaacgccgugaccgaccugcagaugcugaugugcagcacccccgccaccggcagcggcagcgccaucgccagcggcguggccgugugcaaggugcugcaccuggagggcgaggugaacaagaucaagagcgcccugcugagcaccaacaaggccguggugagccugagcaacggcgugagcgugcugaccuucaaggugcuggaccugaagaacuacaucgacaagcagcugcugcccauccugaacaagcagagcugcagcauccccaaccccgagaccgugauggaguuccagcagaagaacaacagacugcuggagaucaccagagaguucagcgugaacgccggcgugaccacccccgugagcaccuacaugcugaccaacagcgagcugcugagccugaucaacgacaugcccaucaccaacgaccagaagaagcugaugagcaacaacgugcagaucgugagacagcagagcuacagcaucaugugcaucaucaaggaggaggugcuggccuacguggugcagcugccccuguacggcgugaucgacacccccugcuggaagcugcacaccagcccccugugcaccaccaacaccaaggagggcagcaacaucugccugaccagaaccgacagaggcugguacugcgacaacgccggcagcgugagcuucuucccccaggccgagaccugcaaggugugcagcaacagaguguucugcgacaccaugaacagccugacccugcccagcgaggugaaccugugcaacguggacaucuucaaccccaaguacgacugcaagaucaugaccagcaagaccgacgugagcagcagcgugaucaccagccugggcgccaucgugagcugcuacggcaagaccaagugcaccgccagcaacaagaacaagggcaucaucaagaccuucagcaacggcugcgacuacgugagcaacaagggcguggacaccgugagcgugggcaacacccuguacuacgugaacaagcaggagggccagagccuguacgugaagggcgagcccaucaucaacuucuacgacccccugguguuccccagcgacgaguucgacgccagcaucagccaggugaacgagaagaucaaccagagccuggccuucaucagaaagagcgacgagcugcugcacaacgugaacgccggcaagagcaccaccaacaucaugaucaccaccaucaucaucgugaucaucgugauccugcugagccugaucgccgugggccugcugcuguacugcaaggccagaagcacccccgugacccugagcaaggaccagcugagcggcaucaacaacaucgccuucagcaacugaggacuaguggaagcauuuuccuggcugauuaaaagaaauuacucagcuauggucaucuguuccuguuagaaggcuaugcagcauauuauauacuaugcgcauguuaugaaaugcauaauaaaaaauuuuaaaaaaucuaaaagaucuaaaaaaaaaaaaaaaaaaaaaaaaaaaaaaaaaaaaaaaaaaaaaaaaaaaaaaaaaaaaaaaaugcaucccccccccccccccccccccccccccccccaaaggcucuuuucagagccaccagaauu

SEQ ID NO: 6230 - RNA, 2057 nt, Artificial Sequence
  mRNA product Design d-5 comprising derived and/or modified sequence from HRSV(A2)__F_DSCav1_mut6 (opt5)
gggagagggcgcuuggcuugcaaggacccugagcugcggcauugaagcacacccaacccaacucgacugaagucagccucacugaaccggaucugagaaucuucucucucugggcuugccagggcucuccgaaccuagcuagcauccucuucaauuccaacuagaaagcuuaccauggagcugcucauccugaaggccaacgcuauuaccacaauccuuacggccgugaccuucugcuuugcgagcggccagaauauuacagaagaguucuaccaauccaccuguucugcugucagcaaaggguaucugggagcccucagaacaggcugguacaccuccguuaucacaauugaacugucuaacaucaaggagaauaaaugcaacgggaccgacgccaaggugaaacuuaucaagcaggaacuggauaaguauaaaaaugcugugacggaccuccagaugcugauguguagcacccccgccacaggauccggcucugcuauugccagcggggucgcggugugcaagguucugcaccucgagggagaggugaacaaaaucaaguccgcccugcuuagcaccaauaaagcugucgugucucuguccaacggcguuagcgugcucacauuuaagguccuggaucuuaagaauuacauugacaaacagcugcucccuauccugaacaagcaaucuuguuccauuccgaaucccgaaaccgugauggaguuccagcagaaaaacaaucggcugcucgaaaucacgcgcgaguuuagcgugaacgccggcgucacaaccccuguuucuacauauaugcugaccaauuccgagcuucugagccucauuaacgauaugcccaucaccaacgaccagaagaaacugauguccaauaacgugcaaaucgugagacagcagucuuacagcauuaugugcaucauuaaggaagagguccuugcuuaugugguucagcugccucucuacggggugaucgauacacccuguuggaaacugcauacguccccucugugcaccacaaauaccaaggaaggaagcaacauuugucucacacggaccgaccgcggcugguacugcgauaaugccgggucugucuccuucuuuccgcaagcggagacguguaaggugugcagcaacagaguuuucugcgacacaaugaacucucugacccuucccagcgaagugaaucuguguaaugucgauaucuuuaacccuaaauaugacugcaagaucaugaccuccaaaacagaugugucuagcuccgucauuaccagccucggagccaucgugucuuguuacggcaagacaaaaugcacggcuuccaauaagaacaaggggauuaucaaaaccuucagcaauggaugugacuauguuucuaacaagggcguggacacagucuccgugggcaauacccuguacuauguuaacaaacaggaggggcagagccuuuacgugaagggagagcccauuaucaacuuuuaugauccucuggucuuccccuccgacgaauuugaugccucuaucagccaagugaaugagaaaauuaaccagucccucgcuuucauccggaagucugacgaacugcugcacaaugugaacgccggcaagagcacaaccaauauuaugaucacgaccauuaucauuguuaucaucgucauucuccugucccuuaucgccguggggcugcuccuguacugcaaagcucgcagcacaccggugacccugucuaaggaucagcuuuccggaauuaacaauaucgcguucagcaacugaggacuaguggaagcauuuuccuggcugauuaaaagaaauuacucagcuauggucaucuguuccuguuagaaggcuaugcagcauauuauauacuaugcgcauguuaugaaaugcauaauaaaaaauuuuaaaaaaucuaaaagaucuaaaaaaaaaaaaaaaaaaaaaaaaaaaaaaaaaaaaaaaaaaaaaaaaaaaaaaaaaaaaaaaaugcaucccccccccccccccccccccccccccccccaaaggcucuuuucagagccaccagaauu

SEQ ID NO: 6231 - RNA, 2057 nt, Artificial Sequence
  mRNA product Design d-5 comprising derived and/or modified sequence from HRSV(A2)__F_DSCav1_mut6 (opt6)
gggagagggcgcuuggcuugcaaggacccugagcugcggcauugaagcacacccaacccaacucgacugaagucagccucacugaaccggaucugagaaucuucucucucugggcuugccagggcucuccgaaccuagcuagcauccucuucaauuccaacuagaaagcuuaccauggaacuauuaaucuuaaaagcaaaugcuauaaccacaauauuaacagcaguaacauucuguuuugccuccggacaaaacauaacagaagaauuuuaucaaucaacaugcucugcaguauccaaagguuacuuaggcgcacuacgcacuggaugguauacaucaguaauaacaauagaacuaucaaacauaaaagaaaauaaauguaacgguacugacgcaaaagugaaacuaauuaaacaagaacucgacaaauacaaaaaugcuguaacagaccuacaaaugcuaaugugcucaacacccgcaaccggaucaggaucagccauagccuccggagucgcaguaugcaaaguauuacaucuugaaggagaaguaaauaaaauaaaaucagcauuacuauccacaaauaaagccguaguaucacuaucaaacgguguauccguccuuacauucaaaguauuagaucuaaaaaacuacauagauaaacaacuacuacccaucuuaaacaaacaaucaugcucaauucccaacccagaaacagucauggaauuucaacaaaaaaacaacagacucuuagaaauaacacgagaauuuucaguaaacgcaggaguaaccacaccaguaaguacauacaugcucaccaacucagaauuauuaucacuuauuaacgacaugccaauuacaaacgaccaaaaaaaauuaaugucaaacaauguccaaauuguuagacaacaaucauacucuauaauguguauaauaaaagaagaaguacuagcuuacguaguucaauuaccacuauauggcguaauagauacaccuugcuggaaacuacauacaucuccauuauguacaacuaacacaaaagaaggaucuaacauaugccuaacacgcacagaucgaggaugguacugcgauaaugcagguuccguaucauucuuuccacaagcagaaacauguaaaguaugcucaaacagaguauucugugacacuaugaacuccuuaacccuacccucagaagucaaucuaugcaacguugacauauuuaacccaaaauacgacuguaaaaucaugacaucuaaaacagacguaucaucaucaguuauuacaucccuaggagcaauaguaucuugcuacggaaaaacaaaauguacagcauccaacaaaaacaaaggaauaaucaaaacauucucaaacggcugcgacuacguaucaaacaaagguguagacacaguaucaguaggaaauacuuuauauuacguaaauaaacaagaaggacaaucucuauacguuaaaggcgaaccuauuauaaacuucuacgacccacucguauucccuucagacgaauuugacgcaucuauaucccaaguuaacgaaaaaaucaaccaaucauuagccuuuauaagaaaauccgacgaauuauuacauaacgucaacgcuggaaaaucaacaacuaacauaaugauaaccacaauaauaauagucaucauaguuauauuacuaagucuaauagccguaggccuccuacuuuauugcaaagcaagaucaacaccaguaacauuauccaaagaccaacucagcggcauaaacaauauagcuuuuucaaacuagggacuaguggaagcauuuuccuggcugauuaaaagaaauuacucagcuauggucaucuguuccuguuagaaggcuaugcagcauauuauauacuaugcgcauguuaugaaaugcauaauaaaaaauuuuaaaaaaucuaaaagaucuaaaaaaaaaaaaaaaaaaaaaaaaaaaaaaaaaaaaaaaaaaaaaaaaaaaaaaaaaaaaaaaaugcaucccccccccccccccccccccccccccccccaaaggcucuuuucagagccaccagaauu

SEQ ID NO: 6232 - RNA, 2057 nt, Artificial Sequence
  mRNA product Design d-5 comprising derived and/or modified sequence from HRSV(A2)__F_DSCav1_mut6 (opt11)
gggagagggcgcuuggcuugcaaggacccugagcugcggcauugaagcacacccaacccaacucgacugaagucagccucacugaaccggaucugagaaucuucucucucugggcuugccagggcucuccgaaccuagcuagcauccucuucaauuccaacuagaaagcuuaccauggaacuccucauccucaaagccaacgcaaucacaaccauacuaacugcaguuacuuucugcuucgcauccggccaaaacaucaccgaagaguucuaccaaucaaccugcuccgcagucuccaaaggauaccucggagcccuucgcaccggcugguacaccuccgucauaaccaucgaacucucaaacauaaaagaaaacaaaugcaacggcacagacgcgaaagucaaacuuaucaaacaagaacucgacaaauacaaaaacgccgucaccgaccugcagaugcucaugugcucaacccccgccacaggaagcggcucugcuaucgcuuccggcgucgccgucugcaaaguccuccaccucgaaggcgaaguaaacaaaaucaagucagcccuccucuccaccaacaaagccgucgucucucucucaaacggcguauccguccucacauucaaaguccucgaccucaaaaacuacaucgacaaacaacuucuccccauccuaaacaaacaaucaugcuccauccccaaccccgaaacagucauggaauuucaacaaaagaacaaccgccucuuagaaaucacccgagaauuuuccgucaacgcgggagucacaacccccguuucuacguauaugcucaccaacuccgaacuccuuucccucauaaacgacaugccaaucaccaacgaccaaaagaaacucaugucaaacaacguccaaaucguccgacaacaauccuacucuauuaugugcaucaucaaagaagaaguucucgccuacgucguccaacuaccccucuacggcgugaucgacacccccugcuggaaacuacacaccucaccccucugcaccaccaacaccaaggaaggcuccaacaucugccucacccgcaccgaccgcggcugguacugcgacaacgcuggcuccgucucauucuucccgcaagccgaaacuugcaaaguaugcuccaacagaguauucugcgacaccaugaacucacuaacccucccuuccgaagucaaccuuugcaacguugacauauucaacccaaaguacgauugcaaaauuaugacauccaaaacagaugucuccuccuccgucaucacaucccucggugccauuguaucaugcuacggaaaaaccaaaugcaccgcauccaacaaaaacaaaggaaucaucaaaaccuucucaaacggcugcgauuacgucucaaacaaaggagucgacacagucuccgucggaaacacccuauacuacgucaacaaacaagaaggccaaucccuguacgucaaaggagaacccaucaucaacuucuacgacccccucgucuucccgagcgacgaguucgacgccuccaucucacaagucaaugaaaagaucaaccaaucccuugccuucauccggaaaucggacgaacuccuacacaacgugaacgcuggaaaaucaaccaccaacaucaugaucacaaccaucauuaucgucaucaucgucauacuccucucccuaaucgccgucggccuccuccuguauugcaaagcucgcuccacccccgucacccuguccaaagaccaacucuccggaaucaacaacaucgccuucucaaacuaaggacuaguggaagcauuuuccuggcugauuaaaagaaauuacucagcuauggucaucuguuccuguuagaaggcuaugcagcauauuauauacuaugcgcauguuaugaaaugcauaauaaaaaauuuuaaaaaaucuaaaagaucuaaaaaaaaaaaaaaaaaaaaaaaaaaaaaaaaaaaaaaaaaaaaaaaaaaaaaaaaaaaaaaaaugcaucccccccccccccccccccccccccccccccaaaggcucuuuucagagccaccagaauu

SEQ ID NO: 6233 - RNA, 1937 nt, Artificial Sequence
  mRNA product Design e-1 comprising derived and/or modified sequence from HRSV(A2)__F_DSCav1_mut6 (opt1)
gggagaauauaagcguuggcggagcgucgguuguagcacucugcgcgcccgcucuucugcugcuguuugucuacuuccuccugcuuccccgccgccgccgccgccaucaagcuuaccauggagcugcucauccugaaggccaacgccaucaccaccauccugacggcggugaccuucugcuucgccagcggccagaacaucaccgaggaguucuaccaguccacgugcagcgccgucuccaagggguaccucggcgcccugcggaccggcugguacaccuccgugaucaccaucgagcugagcaacaucaaggagaacaagugcaacgggaccgacgccaaggugaagcucaucaagcaggagcuggacaaguacaagaacgcggucacggaccugcagaugcugaugugcuccaccccggcaaccggcuccggcuccgccaucgcgagcggcgucgccgugugcaaggugcugcaccucgagggggaggucaacaagaucaagagcgcccugcuguccaccaacaaggccguggugagccucuccaacggcgucagcgugcugaccuucaaggugcuggaccucaagaacuacaucgacaagcagcugcugcccauccugaacaagcagagcugcuccauccccaaccccgagacggugauggaguuccagcagaagaacaaccggcuccuggagaucacccgcgaguucagcgugaacgccggggucaccacccccguguccacguacaugcugaccaacagcgagcuccugucccugaucaacgacaugccgaucaccaacgaccagaagaagcucaugagcaacaacgugcagaucguccggcagcaguccuacagcaucaugugcaucaucaaggaggaggugcuggcguacgugguccagcugccccucuacggcgugaucgacacccccugcuggaagcugcacacgagcccccugugcaccaccaacaccaaggagggguccaacaucugccucacgcgcaccgaccggggcugguacugcgacaacgccggcagcgucuccuucuucccgcaggccgagaccugcaaggugugcagcaaccgcguguucugcgacaccaugaacucccugacgcugcccagcgagguaaaccucugcaacgucgacaucuucaaccccaaguacgacugcaagaucaugaccuccaagaccgacgugagcuccagcgugaucaccucccugggggccaucgucagcugcuacggcaagacgaagugcaccgccagcaacaagaacaaggggaucaucaagaccuucuccaacggcugcgacuacgugagcaacaagggcguggacaccguguccgucgggaacacccuguacuacgugaacaagcaggagggccagagccucuacgugaagggggagcccaucaucaacuucuacgacccgcuggucuuccccuccgacgaguucgacgcgagcaucucccaggugaacgagaagaucaaccagagccuggccuucauccgcaaguccgacgagcugcuccacaacgugaacgccggcaagagcacgaccaacaucaugaucaccaccaucaucaucgucaucaucgugauccugcugucccucaucgccguggggcugcugcucuacugcaaggcccggagcacgcccgucacccuguccaaggaccagcugagcggcaucaacaacaucgcguucuccaacugaggacuaguguccaccugucccuccugggcugcuggauugucucguuuuccugccaaauaaacaggaucagcgcuuuacagaucuaaaaaaaaaaaaaaaaaaaaaaaaaaaaaaaaaaaaaaaaaaaaaaaaaaaaaaaaaaaaaaaaugcaucccccccccccccccccccccccccccccccaaaggcucuuuucagagccaccagaauu

SEQ ID NO: 6234 - RNA, 1937 nt, Artificial Sequence
  mRNA product Design e-1 comprising derived and/or modified sequence from HRSV(A2)__F_DSCav1_mut6 (opt1)
gggagaauauaagcguuggcggagcgucgguuguagcacucugcgcgcccgcucuucugcugcuguuugucuacuuccuccugcuuccccgccgccgccgccgccaucaagcuuaccauggagcugcucauccugaaggccaacgccaucaccaccauccugacggcggugaccuucugcuucgccagcggccagaacaucaccgaggaguucuaccaguccacgugcagcgccgucuccaagggguaccucggcgcccugcgcaccgggugguacaccagcgugaucaccaucgagcuguccaacaucaaggagaacaagugcaacggcaccgacgccaaggugaagcucaucaagcaggagcuggacaaguacaagaacgcggucacggaccugcagaugcucaugugcagcacccccgccaccggguccggcagcgccaucgccuccggcguggcggugugcaagguccugcaccuggagggggaggugaacaagaucaagagcgcccuccuguccaccaacaaggccguggucagccuguccaacggcgugagcgugcucacguucaagguccuggaccugaagaacuacaucgacaagcagcuccugccgauccugaacaagcaguccugcagcauccccaaccccgagaccgugauggaguuccagcagaagaacaaccggcuccuggagaucacccgcgaguucuccgugaacgccggggucaccacgcccgugagcaccuacaugcugaccaacuccgagcuccugagccugaucaacgacaugccgaucaccaacgaccagaagaagcucaugagcaacaacgugcagaucguccggcagcaguccuacagcaucaugugcaucaucaaggaggaggugcuggccuacgugguccagcugccccucuacggcgugaucgacacgcccugcuggaagcugcacaccagcccccugugcaccaccaacacgaaggaggggagcaacaucugccucacccgcaccgaccggggcugguacugcgacaacgcgggcuccgugagcuucuucccgcaggccgagaccugcaaggucugcuccaaccgcguguucugcgacacgaugaacagccugacccugcccuccgaggucaaccucugcaacguggacaucuucaaccccaaguacgacugcaagaucaugaccagcaagaccgacguguccagcuccgucaucacgagccugggggccaucguguccugcuacggcaagaccaagugcaccgccagcaacaagaacaaggggaucaucaagaccuucuccaacggcugcgacuacgugagcaacaagggcgucgacacgguguccguggggaacacccuguacuacgucaacaagcaggagggccagagccucuacgugaagggggagcccaucaucaacuucuacgacccgcugguguuccccagcgacgaguucgacgccuccaucagccaggucaacgagaagaucaaccagucccuggcguucauccggaaguccgacgagcuccugcacaacgugaacgccggcaaguccaccaccaacaucaugaucaccacgaucaucaucgugaucaucgucauccugcucagccugaucgccguggggcugcuccuguacugcaaggcccgcuccacccccgugacccugagcaaggaccagcuguccggcaucaacaacaucgccuucagcaacugaggacuaguguccaccugucccuccugggcugcuggauugucucguuuuccugccaaauaaacaggaucagcgcuuuacagaucuaaaaaaaaaaaaaaaaaaaaaaaaaaaaaaaaaaaaaaaaaaaaaaaaaaaaaaaaaaaaaaaaugcaucccccccccccccccccccccccccccccccaaaggcucuuuucagagccaccagaauu

SEQ ID NO: 6235 - RNA, 1937 nt, Artificial Sequence
  mRNA product Design e-1 comprising derived and/or modified sequence from HRSV(A2)__F_DSCav1_mut6 (opt2)
gggagaauauaagcguuggcggagcgucgguuguagcacucugcgcgcccgcucuucugcugcuguuugucuacuuccuccugcuuccccgccgccgccgccgccaucaagcuuaccauggagcuccucauccucaaggccaacgccaucaccaccauccucaccgccgucaccuucugcuucgccuccggccagaacaucaccgaggaguucuaccaguccaccugcuccgccgucuccaagggcuaccucggcgcccuccgcaccggcugguacaccuccgucaucaccaucgagcucuccaacaucaaggagaacaagugcaacggcaccgacgccaaggucaagcucaucaagcaggagcucgacaaguacaagaacgccgucaccgaccuccagaugcucaugugcuccacccccgccaccggcuccggcuccgccaucgccuccggcgucgccgucugcaagguccuccaccucgagggcgaggucaacaagaucaaguccgcccuccucuccaccaacaaggccgucgucucccucuccaacggcgucuccguccucaccuucaagguccucgaccucaagaacuacaucgacaagcagcuccuccccauccucaacaagcaguccugcuccauccccaaccccgagaccgucauggaguuccagcagaagaacaaccgccuccucgagaucacccgcgaguucuccgucaacgccggcgucaccacccccgucuccaccuacaugcucaccaacuccgagcuccucucccucaucaacgacaugcccaucaccaacgaccagaagaagcucauguccaacaacguccagaucguccgccagcaguccuacuccaucaugugcaucaucaaggaggagguccucgccuacgucguccagcucccccucuacggcgucaucgacacccccugcuggaagcuccacaccuccccccucugcaccaccaacaccaaggagggcuccaacaucugccucacccgcaccgaccgcggcugguacugcgacaacgccggcuccgucuccuucuucccccaggccgagaccugcaaggucugcuccaaccgcgucuucugcgacaccaugaacucccucacccuccccuccgaggucaaccucugcaacgucgacaucuucaaccccaaguacgacugcaagaucaugaccuccaagaccgacgucuccuccuccgucaucaccucccucggcgccaucgucuccugcuacggcaagaccaagugcaccgccuccaacaagaacaagggcaucaucaagaccuucuccaacggcugcgacuacgucuccaacaagggcgucgacaccgucuccgucggcaacacccucuacuacgucaacaagcaggagggccagucccucuacgucaagggcgagcccaucaucaacuucuacgacccccucgucuuccccuccgacgaguucgacgccuccaucucccaggucaacgagaagaucaaccagucccucgccuucauccgcaaguccgacgagcuccuccacaacgucaacgccggcaaguccaccaccaacaucaugaucaccaccaucaucaucgucaucaucgucauccuccucucccucaucgccgucggccuccuccucuacugcaaggcccgcuccacccccgucacccucuccaaggaccagcucuccggcaucaacaacaucgccuucuccaacugaggacuaguguccaccugucccuccugggcugcuggauugucucguuuuccugccaaauaaacaggaucagcgcuuuacagaucuaaaaaaaaaaaaaaaaaaaaaaaaaaaaaaaaaaaaaaaaaaaaaaaaaaaaaaaaaaaaaaaaugcaucccccccccccccccccccccccccccccccaaaggcucuuuucagagccaccagaauu

SEQ ID NO: 6236 - RNA, 1937 nt, Artificial Sequence
  mRNA product Design e-1 comprising derived and/or modified sequence from HRSV(A2)__F_DSCav1_mut6 (opt3)
gggagaauauaagcguuggcggagcgucgguuguagcacucugcgcgcccgcucuucugcugcuguuugucuacuuccuccugcuuccccgccgccgccgccgccaucaagcuuaccauggagcugcucauccuuaaggccaacgcuauuaccacaauacugacugcagugacguucugcuuugccagcggccagaauaucaccgaagaguucuaccaauccacauguucugcggucucaaaaggguauuugggagcuuuaagaacugguugguacaccaguguuauuacaaucgaacugagcaacauuaaggagaauaaaugcaacggcaccgacgccaaggugaaacuaaucaagcaggaacucgauaaguauaaaaaugcaguaacugaccugcagaugcuuauguguuccacacccgccaccgggucuggaucggcuauagcaucaggcguggccgucugcaaggugcugcacuuggagggugagguuaacaaaaucaagagcgcucuccugaguacgaauaaagccguggucucccugucuaacggggugagcguacucacuuuuaagguuuuagaucugaagaauuacauugacaaacagcuuuugccuauccugaacaagcaauccuguucaauuccaaauccggaaaccgugauggaguuccagcagaaaaacaauaggcuacucgaaaucacacgggaguuuagugucaacgcgggagugacuacccccgugagcacauauaugcugaccaauucugagcuucuguccuugauaaacgauaugccuauuacgaacgaccagaagaaacucaugucaaauaacguccaaaucguucgccagcagagcuacaguauuaugugcaucaucaaggaagaggugcuggcauauguagugcaguuaccacuguacggcgucauugauacucccuguuggaaacuccauacaucuccucuuugcaccacuaauacaaaggaaggcuccaacauaugucugacccgaacggaccgugggugguacugcgauaaugccggaagcgugucguucuuuccacaagcugagaccuguaagguuugcucuaacagaguguucugcgacacaaugaacuccuugacucuacccucagaagucaaucuguguaauguggauaucuuuaacccuaaauaugacugcaagauuaugaccaguaaaacagauguaagcuccucuguuaucacuagccucggugccauagugucauguuacggcaagaccaaaugcacagcaaguaauaagaacaaggggauuaucaaaaccuucuccaauggaugugacuaugucagcaacaagggcguggacacugucucuguggguaauacgcuguacuauguuaacaaacaggaggggcagucacuuuacgugaagggagagccaaucauuaacuuuuaugauccgcugguauuccccagugacgaauuugaugcuagcaucucccaagucaaugagaaaauuaaccagucuuuggccuucauaaggaagucggacgaacuccugcacaaugugaacgcgggcaagagcacaaccaauaucaugauuacuaccaucaucauuguuauaaucgugauuuuacugucccuaaucgccgucggccuccugcuuuacugcaaagcacggucaacaccugugaccuugaguaaggaucagcugucugggauuaacaauaucgcuuucagcaacugaggacuaguguccaccugucccuccugggcugcuggauugucucguuuuccugccaaauaaacaggaucagcgcuuuacagaucuaaaaaaaaaaaaaaaaaaaaaaaaaaaaaaaaaaaaaaaaaaaaaaaaaaaaaaaaaaaaaaaaugcaucccccccccccccccccccccccccccccccaaaggcucuuuucagagccaccagaauu

SEQ ID NO: 6237 - RNA, 1937 nt, Artificial Sequence
  mRNA product Design e-1 comprising derived and/or modified sequence from HRSV(A2)__F_DSCav1_mut6 (opt4)
gggagaauauaagcguuggcggagcgucgguuguagcacucugcgcgcccgcucuucugcugcuguuugucuacuuccuccugcuuccccgccgccgccgccgccaucaagcuuaccauggagcugcugauccugaaggccaacgccaucaccaccauccugaccgccgugaccuucugcuucgccagcggccagaacaucaccgaggaguucuaccagagcaccugcagcgccgugagcaagggcuaccugggcgcccugagaaccggcugguacaccagcgugaucaccaucgagcugagcaacaucaaggagaacaagugcaacggcaccgacgccaaggugaagcugaucaagcaggagcuggacaaguacaagaacgccgugaccgaccugcagaugcugaugugcagcacccccgccaccggcagcggcagcgccaucgccagcggcguggccgugugcaaggugcugcaccuggagggcgaggugaacaagaucaagagcgcccugcugagcaccaacaaggccguggugagccugagcaacggcgugagcgugcugaccuucaaggugcuggaccugaagaacuacaucgacaagcagcugcugcccauccugaacaagcagagcugcagcauccccaaccccgagaccgugauggaguuccagcagaagaacaacagacugcuggagaucaccagagaguucagcgugaacgccggcgugaccacccccgugagcaccuacaugcugaccaacagcgagcugcugagccugaucaacgacaugcccaucaccaacgaccagaagaagcugaugagcaacaacgugcagaucgugagacagcagagcuacagcaucaugugcaucaucaaggaggaggugcuggccuacguggugcagcugccccuguacggcgugaucgacacccccugcuggaagcugcacaccagcccccugugcaccaccaacaccaaggagggcagcaacaucugccugaccagaaccgacagaggcugguacugcgacaacgccggcagcgugagcuucuucccccaggccgagaccugcaaggugugcagcaacagaguguucugcgacaccaugaacagccugacccugcccagcgaggugaaccugugcaacguggacaucuucaaccccaaguacgacugcaagaucaugaccagcaagaccgacgugagcagcagcgugaucaccagccugggcgccaucgugagcugcuacggcaagaccaagugcaccgccagcaacaagaacaagggcaucaucaagaccuucagcaacggcugcgacuacgugagcaacaagggcguggacaccgugagcgugggcaacacccuguacuacgugaacaagcaggagggccagagccuguacgugaagggcgagcccaucaucaacuucuacgacccccugguguuccccagcgacgaguucgacgccagcaucagccaggugaacgagaagaucaaccagagccuggccuucaucagaaagagcgacgagcugcugcacaacgugaacgccggcaagagcaccaccaacaucaugaucaccaccaucaucaucgugaucaucgugauccugcugagccugaucgccgugggccugcugcuguacugcaaggccagaagcacccccgugacccugagcaaggaccagcugagcggcaucaacaacaucgccuucagcaacugaggacuaguguccaccugucccuccugggcugcuggauugucucguuuuccugccaaauaaacaggaucagcgcuuuacagaucuaaaaaaaaaaaaaaaaaaaaaaaaaaaaaaaaaaaaaaaaaaaaaaaaaaaaaaaaaaaaaaaaugcaucccccccccccccccccccccccccccccccaaaggcucuuuucagagccaccagaauu

SEQ ID NO: 6238 - RNA, 1937 nt, Artificial Sequence
  mRNA product Design e-1 comprising derived and/or modified sequence from HRSV(A2)__F_DSCav1_mut6 (opt5)
gggagaauauaagcguuggcggagcgucgguuguagcacucugcgcgcccgcucuucugcugcuguuugucuacuuccuccugcuuccccgccgccgccgccgccaucaagcuuaccauggagcugcucauccugaaggccaacgcuauuaccacaauccuuacggccgugaccuucugcuuugcgagcggccagaauauuacagaagaguucuaccaauccaccuguucugcugucagcaaaggguaucugggagcccucagaacaggcugguacaccuccguuaucacaauugaacugucuaacaucaaggagaauaaaugcaacgggaccgacgccaaggugaaacuuaucaagcaggaacuggauaaguauaaaaaugcugugacggaccuccagaugcugauguguagcacccccgccacaggauccggcucugcuauugccagcggggucgcggugugcaagguucugcaccucgagggagaggugaacaaaaucaaguccgcccugcuuagcaccaauaaagcugucgugucucuguccaacggcguuagcgugcucacauuuaagguccuggaucuuaagaauuacauugacaaacagcugcucccuauccugaacaagcaaucuuguuccauuccgaaucccgaaaccgugauggaguuccagcagaaaaacaaucggcugcucgaaaucacgcgcgaguuuagcgugaacgccggcgucacaaccccuguuucuacauauaugcugaccaauuccgagcuucugagccucauuaacgauaugcccaucaccaacgaccagaagaaacugauguccaauaacgugcaaaucgugagacagcagucuuacagcauuaugugcaucauuaaggaagagguccuugcuuaugugguucagcugccucucuacggggugaucgauacacccuguuggaaacugcauacguccccucugugcaccacaaauaccaaggaaggaagcaacauuugucucacacggaccgaccgcggcugguacugcgauaaugccgggucugucuccuucuuuccgcaagcggagacguguaaggugugcagcaacagaguuuucugcgacacaaugaacucucugacccuucccagcgaagugaaucuguguaaugucgauaucuuuaacccuaaauaugacugcaagaucaugaccuccaaaacagaugugucuagcuccgucauuaccagccucggagccaucgugucuuguuacggcaagacaaaaugcacggcuuccaauaagaacaaggggauuaucaaaaccuucagcaauggaugugacuauguuucuaacaagggcguggacacagucuccgugggcaauacccuguacuauguuaacaaacaggaggggcagagccuuuacgugaagggagagcccauuaucaacuuuuaugauccucuggucuuccccuccgacgaauuugaugccucuaucagccaagugaaugagaaaauuaaccagucccucgcuuucauccggaagucugacgaacugcugcacaaugugaacgccggcaagagcacaaccaauauuaugaucacgaccauuaucauuguuaucaucgucauucuccugucccuuaucgccguggggcugcuccuguacugcaaagcucgcagcacaccggugacccugucuaaggaucagcuuuccggaauuaacaauaucgcguucagcaacugaggacuaguguccaccugucccuccugggcugcuggauugucucguuuuccugccaaauaaacaggaucagcgcuuuacagaucuaaaaaaaaaaaaaaaaaaaaaaaaaaaaaaaaaaaaaaaaaaaaaaaaaaaaaaaaaaaaaaaaugcaucccccccccccccccccccccccccccccccaaaggcucuuuucagagccaccagaauu

SEQ ID NO: 6239 - RNA, 1937 nt, Artificial Sequence
  mRNA product Design e-1 comprising derived and/or modified sequence from HRSV(A2)__F_DSCav1_mut6 (opt6)
gggagaauauaagcguuggcggagcgucgguuguagcacucugcgcgcccgcucuucugcugcuguuugucuacuuccuccugcuuccccgccgccgccgccgccaucaagcuuaccauggaacuauuaaucuuaaaagcaaaugcuauaaccacaauauuaacagcaguaacauucuguuuugccuccggacaaaacauaacagaagaauuuuaucaaucaacaugcucugcaguauccaaagguuacuuaggcgcacuacgcacuggaugguauacaucaguaauaacaauagaacuaucaaacauaaaagaaaauaaauguaacgguacugacgcaaaagugaaacuaauuaaacaagaacucgacaaauacaaaaaugcuguaacagaccuacaaaugcuaaugugcucaacacccgcaaccggaucaggaucagccauagccuccggagucgcaguaugcaaaguauuacaucuugaaggagaaguaaauaaaauaaaaucagcauuacuauccacaaauaaagccguaguaucacuaucaaacgguguauccguccuuacauucaaaguauuagaucuaaaaaacuacauagauaaacaacuacuacccaucuuaaacaaacaaucaugcucaauucccaacccagaaacagucauggaauuucaacaaaaaaacaacagacucuuagaaauaacacgagaauuuucaguaaacgcaggaguaaccacaccaguaaguacauacaugcucaccaacucagaauuauuaucacuuauuaacgacaugccaauuacaaacgaccaaaaaaaauuaaugucaaacaauguccaaauuguuagacaacaaucauacucuauaauguguauaauaaaagaagaaguacuagcuuacguaguucaauuaccacuauauggcguaauagauacaccuugcuggaaacuacauacaucuccauuauguacaacuaacacaaaagaaggaucuaacauaugccuaacacgcacagaucgaggaugguacugcgauaaugcagguuccguaucauucuuuccacaagcagaaacauguaaaguaugcucaaacagaguauucugugacacuaugaacuccuuaacccuacccucagaagucaaucuaugcaacguugacauauuuaacccaaaauacgacuguaaaaucaugacaucuaaaacagacguaucaucaucaguuauuacaucccuaggagcaauaguaucuugcuacggaaaaacaaaauguacagcauccaacaaaaacaaaggaauaaucaaaacauucucaaacggcugcgacuacguaucaaacaaagguguagacacaguaucaguaggaaauacuuuauauuacguaaauaaacaagaaggacaaucucuauacguuaaaggcgaaccuauuauaaacuucuacgacccacucguauucccuucagacgaauuugacgcaucuauaucccaaguuaacgaaaaaaucaaccaaucauuagccuuuauaagaaaauccgacgaauuauuacauaacgucaacgcuggaaaaucaacaacuaacauaaugauaaccacaauaauaauagucaucauaguuauauuacuaagucuaauagccguaggccuccuacuuuauugcaaagcaagaucaacaccaguaacauuauccaaagaccaacucagcggcauaaacaauauagcuuuuucaaacuagggacuaguguccaccugucccuccugggcugcuggauugucucguuuuccugccaaauaaacaggaucagcgcuuuacagaucuaaaaaaaaaaaaaaaaaaaaaaaaaaaaaaaaaaaaaaaaaaaaaaaaaaaaaaaaaaaaaaaaugcaucccccccccccccccccccccccccccccccaaaggcucuuuucagagccaccagaauu

SEQ ID NO: 6240 - RNA, 1937 nt, Artificial Sequence
  mRNA product Design e-1 comprising derived and/or modified sequence from HRSV(A2)__F_DSCav1_mut6 (opt11)
gggagaauauaagcguuggcggagcgucgguuguagcacucugcgcgcccgcucuucugcugcuguuugucuacuuccuccugcuuccccgccgccgccgccgccaucaagcuuaccauggaacuccucauccucaaagccaacgcaaucacaaccauacuaacugcaguuacuuucugcuucgcauccggccaaaacaucaccgaagaguucuaccaaucaaccugcuccgcagucuccaaaggauaccucggagcccuucgcaccggcugguacaccuccgucauaaccaucgaacucucaaacauaaaagaaaacaaaugcaacggcacagacgcgaaagucaaacuuaucaaacaagaacucgacaaauacaaaaacgccgucaccgaccugcagaugcucaugugcucaacccccgccacaggaagcggcucugcuaucgcuuccggcgucgccgucugcaaaguccuccaccucgaaggcgaaguaaacaaaaucaagucagcccuccucuccaccaacaaagccgucgucucucucucaaacggcguauccguccucacauucaaaguccucgaccucaaaaacuacaucgacaaacaacuucuccccauccuaaacaaacaaucaugcuccauccccaaccccgaaacagucauggaauuucaacaaaagaacaaccgccucuuagaaaucacccgagaauuuuccgucaacgcgggagucacaacccccguuucuacguauaugcucaccaacuccgaacuccuuucccucauaaacgacaugccaaucaccaacgaccaaaagaaacucaugucaaacaacguccaaaucguccgacaacaauccuacucuauuaugugcaucaucaaagaagaaguucucgccuacgucguccaacuaccccucuacggcgugaucgacacccccugcuggaaacuacacaccucaccccucugcaccaccaacaccaaggaaggcuccaacaucugccucacccgcaccgaccgcggcugguacugcgacaacgcuggcuccgucucauucuucccgcaagccgaaacuugcaaaguaugcuccaacagaguauucugcgacaccaugaacucacuaacccucccuuccgaagucaaccuuugcaacguugacauauucaacccaaaguacgauugcaaaauuaugacauccaaaacagaugucuccuccuccgucaucacaucccucggugccauuguaucaugcuacggaaaaaccaaaugcaccgcauccaacaaaaacaaaggaaucaucaaaaccuucucaaacggcugcgauuacgucucaaacaaaggagucgacacagucuccgucggaaacacccuauacuacgucaacaaacaagaaggccaaucccuguacgucaaaggagaacccaucaucaacuucuacgacccccucgucuucccgagcgacgaguucgacgccuccaucucacaagucaaugaaaagaucaaccaaucccuugccuucauccggaaaucggacgaacuccuacacaacgugaacgcuggaaaaucaaccaccaacaucaugaucacaaccaucauuaucgucaucaucgucauacuccucucccuaaucgccgucggccuccuccuguauugcaaagcucgcuccacccccgucacccuguccaaagaccaacucuccggaaucaacaacaucgccuucucaaacuaaggacuaguguccaccugucccuccugggcugcuggauugucucguuuuccugccaaauaaacaggaucagcgcuuuacagaucuaaaaaaaaaaaaaaaaaaaaaaaaaaaaaaaaaaaaaaaaaaaaaaaaaaaaaaaaaaaaaaaaugcaucccccccccccccccccccccccccccccccaaaggcucuuuucagagccaccagaauu

SEQ ID NO: 6241 - RNA, 1919 nt, Artificial Sequence
  mRNA product Design e-2 comprising derived and/or modified sequence from HRSV(A2)__F_DSCav1_mut6 (opt1)
gggagacccgugacccggaaguuguacggcuacgcgacuuucccucccacaaacccucgcgcccuuccuuuccuacuugggcccggcagaaagcuuaccauggagcugcucauccugaaggccaacgccaucaccaccauccugacggcggugaccuucugcuucgccagcggccagaacaucaccgaggaguucuaccaguccacgugcagcgccgucuccaagggguaccucggcgcccugcggaccggcugguacaccuccgugaucaccaucgagcugagcaacaucaaggagaacaagugcaacgggaccgacgccaaggugaagcucaucaagcaggagcuggacaaguacaagaacgcggucacggaccugcagaugcugaugugcuccaccccggcaaccggcuccggcuccgccaucgcgagcggcgucgccgugugcaaggugcugcaccucgagggggaggucaacaagaucaagagcgcccugcuguccaccaacaaggccguggugagccucuccaacggcgucagcgugcugaccuucaaggugcuggaccucaagaacuacaucgacaagcagcugcugcccauccugaacaagcagagcugcuccauccccaaccccgagacggugauggaguuccagcagaagaacaaccggcuccuggagaucacccgcgaguucagcgugaacgccggggucaccacccccguguccacguacaugcugaccaacagcgagcuccugucccugaucaacgacaugccgaucaccaacgaccagaagaagcucaugagcaacaacgugcagaucguccggcagcaguccuacagcaucaugugcaucaucaaggaggaggugcuggcguacgugguccagcugccccucuacggcgugaucgacacccccugcuggaagcugcacacgagcccccugugcaccaccaacaccaaggagggguccaacaucugccucacgcgcaccgaccggggcugguacugcgacaacgccggcagcgucuccuucuucccgcaggccgagaccugcaaggugugcagcaaccgcguguucugcgacaccaugaacucccugacgcugcccagcgagguaaaccucugcaacgucgacaucuucaaccccaaguacgacugcaagaucaugaccuccaagaccgacgugagcuccagcgugaucaccucccugggggccaucgucagcugcuacggcaagacgaagugcaccgccagcaacaagaacaaggggaucaucaagaccuucuccaacggcugcgacuacgugagcaacaagggcguggacaccguguccgucgggaacacccuguacuacgugaacaagcaggagggccagagccucuacgugaagggggagcccaucaucaacuucuacgacccgcuggucuuccccuccgacgaguucgacgcgagcaucucccaggugaacgagaagaucaaccagagccuggccuucauccgcaaguccgacgagcugcuccacaacgugaacgccggcaagagcacgaccaacaucaugaucaccaccaucaucaucgucaucaucgugauccugcugucccucaucgccguggggcugcugcucuacugcaaggcccggagcacgcccgucacccuguccaaggaccagcugagcggcaucaacaacaucgcguucuccaacugaggacuaguguccaccugucccuccugggcugcuggauugucucguuuuccugccaaauaaacaggaucagcgcuuuacagaucuaaaaaaaaaaaaaaaaaaaaaaaaaaaaaaaaaaaaaaaaaaaaaaaaaaaaaaaaaaaaaaaaugcaucccccccccccccccccccccccccccccccaaaggcucuuuucagagccaccagaauu

SEQ ID NO: 6242 - RNA, 1919 nt, Artificial Sequence
  mRNA product Design e-2 comprising derived and/or modified sequence from HRSV(A2)__F_DSCav1_mut6 (opt1)
gggagacccgugacccggaaguuguacggcuacgcgacuuucccucccacaaacccucgcgcccuuccuuuccuacuugggcccggcagaaagcuuaccauggagcugcucauccugaaggccaacgccaucaccaccauccugacggcggugaccuucugcuucgccagcggccagaacaucaccgaggaguucuaccaguccacgugcagcgccgucuccaagggguaccucggcgcccugcgcaccgggugguacaccagcgugaucaccaucgagcuguccaacaucaaggagaacaagugcaacggcaccgacgccaaggugaagcucaucaagcaggagcuggacaaguacaagaacgcggucacggaccugcagaugcucaugugcagcacccccgccaccggguccggcagcgccaucgccuccggcguggcggugugcaagguccugcaccuggagggggaggugaacaagaucaagagcgcccuccuguccaccaacaaggccguggucagccuguccaacggcgugagcgugcucacguucaagguccuggaccugaagaacuacaucgacaagcagcuccugccgauccugaacaagcaguccugcagcauccccaaccccgagaccgugauggaguuccagcagaagaacaaccggcuccuggagaucacccgcgaguucuccgugaacgccggggucaccacgcccgugagcaccuacaugcugaccaacuccgagcuccugagccugaucaacgacaugccgaucaccaacgaccagaagaagcucaugagcaacaacgugcagaucguccggcagcaguccuacagcaucaugugcaucaucaaggaggaggugcuggccuacgugguccagcugccccucuacggcgugaucgacacgcccugcuggaagcugcacaccagcccccugugcaccaccaacacgaaggaggggagcaacaucugccucacccgcaccgaccggggcugguacugcgacaacgcgggcuccgugagcuucuucccgcaggccgagaccugcaaggucugcuccaaccgcguguucugcgacacgaugaacagccugacccugcccuccgaggucaaccucugcaacguggacaucuucaaccccaaguacgacugcaagaucaugaccagcaagaccgacguguccagcuccgucaucacgagccugggggccaucguguccugcuacggcaagaccaagugcaccgccagcaacaagaacaaggggaucaucaagaccuucuccaacggcugcgacuacgugagcaacaagggcgucgacacgguguccguggggaacacccuguacuacgucaacaagcaggagggccagagccucuacgugaagggggagcccaucaucaacuucuacgacccgcugguguuccccagcgacgaguucgacgccuccaucagccaggucaacgagaagaucaaccagucccuggcguucauccggaaguccgacgagcuccugcacaacgugaacgccggcaaguccaccaccaacaucaugaucaccacgaucaucaucgugaucaucgucauccugcucagccugaucgccguggggcugcuccuguacugcaaggcccgcuccacccccgugacccugagcaaggaccagcuguccggcaucaacaacaucgccuucagcaacugaggacuaguguccaccugucccuccugggcugcuggauugucucguuuuccugccaaauaaacaggaucagcgcuuuacagaucuaaaaaaaaaaaaaaaaaaaaaaaaaaaaaaaaaaaaaaaaaaaaaaaaaaaaaaaaaaaaaaaaugcaucccccccccccccccccccccccccccccccaaaggcucuuuucagagccaccagaauu

SEQ ID NO: 6243 - RNA, 1919 nt, Artificial Sequence
  mRNA product Design e-2 comprising derived and/or modified sequence from HRSV(A2)__F_DSCav1_mut6 (opt2)
gggagacccgugacccggaaguuguacggcuacgcgacuuucccucccacaaacccucgcgcccuuccuuuccuacuugggcccggcagaaagcuuaccauggagcuccucauccucaaggccaacgccaucaccaccauccucaccgccgucaccuucugcuucgccuccggccagaacaucaccgaggaguucuaccaguccaccugcuccgccgucuccaagggcuaccucggcgcccuccgcaccggcugguacaccuccgucaucaccaucgagcucuccaacaucaaggagaacaagugcaacggcaccgacgccaaggucaagcucaucaagcaggagcucgacaaguacaagaacgccgucaccgaccuccagaugcucaugugcuccacccccgccaccggcuccggcuccgccaucgccuccggcgucgccgucugcaagguccuccaccucgagggcgaggucaacaagaucaaguccgcccuccucuccaccaacaaggccgucgucucccucuccaacggcgucuccguccucaccuucaagguccucgaccucaagaacuacaucgacaagcagcuccuccccauccucaacaagcaguccugcuccauccccaaccccgagaccgucauggaguuccagcagaagaacaaccgccuccucgagaucacccgcgaguucuccgucaacgccggcgucaccacccccgucuccaccuacaugcucaccaacuccgagcuccucucccucaucaacgacaugcccaucaccaacgaccagaagaagcucauguccaacaacguccagaucguccgccagcaguccuacuccaucaugugcaucaucaaggaggagguccucgccuacgucguccagcucccccucuacggcgucaucgacacccccugcuggaagcuccacaccuccccccucugcaccaccaacaccaaggagggcuccaacaucugccucacccgcaccgaccgcggcugguacugcgacaacgccggcuccgucuccuucuucccccaggccgagaccugcaaggucugcuccaaccgcgucuucugcgacaccaugaacucccucacccuccccuccgaggucaaccucugcaacgucgacaucuucaaccccaaguacgacugcaagaucaugaccuccaagaccgacgucuccuccuccgucaucaccucccucggcgccaucgucuccugcuacggcaagaccaagugcaccgccuccaacaagaacaagggcaucaucaagaccuucuccaacggcugcgacuacgucuccaacaagggcgucgacaccgucuccgucggcaacacccucuacuacgucaacaagcaggagggccagucccucuacgucaagggcgagcccaucaucaacuucuacgacccccucgucuuccccuccgacgaguucgacgccuccaucucccaggucaacgagaagaucaaccagucccucgccuucauccgcaaguccgacgagcuccuccacaacgucaacgccggcaaguccaccaccaacaucaugaucaccaccaucaucaucgucaucaucgucauccuccucucccucaucgccgucggccuccuccucuacugcaaggcccgcuccacccccgucacccucuccaaggaccagcucuccggcaucaacaacaucgccuucuccaacugaggacuaguguccaccugucccuccugggcugcuggauugucucguuuuccugccaaauaaacaggaucagcgcuuuacagaucuaaaaaaaaaaaaaaaaaaaaaaaaaaaaaaaaaaaaaaaaaaaaaaaaaaaaaaaaaaaaaaaaugcaucccccccccccccccccccccccccccccccaaaggcucuuuucagagccaccagaauu

SEQ ID NO: 6244 - RNA, 1919 nt, Artificial Sequence
  mRNA product Design e-2 comprising derived and/or modified sequence from HRSV(A2)__F_DSCav1_mut6 (opt3)
gggagacccgugacccggaaguuguacggcuacgcgacuuucccucccacaaacccucgcgcccuuccuuuccuacuugggcccggcagaaagcuuaccauggagcugcucauccuuaaggccaacgcuauuaccacaauacugacugcagugacguucugcuuugccagcggccagaauaucaccgaagaguucuaccaauccacauguucugcggucucaaaaggguauuugggagcuuuaagaacugguugguacaccaguguuauuacaaucgaacugagcaacauuaaggagaauaaaugcaacggcaccgacgccaaggugaaacuaaucaagcaggaacucgauaaguauaaaaaugcaguaacugaccugcagaugcuuauguguuccacacccgccaccgggucuggaucggcuauagcaucaggcguggccgucugcaaggugcugcacuuggagggugagguuaacaaaaucaagagcgcucuccugaguacgaauaaagccguggucucccugucuaacggggugagcguacucacuuuuaagguuuuagaucugaagaauuacauugacaaacagcuuuugccuauccugaacaagcaauccuguucaauuccaaauccggaaaccgugauggaguuccagcagaaaaacaauaggcuacucgaaaucacacgggaguuuagugucaacgcgggagugacuacccccgugagcacauauaugcugaccaauucugagcuucuguccuugauaaacgauaugccuauuacgaacgaccagaagaaacucaugucaaauaacguccaaaucguucgccagcagagcuacaguauuaugugcaucaucaaggaagaggugcuggcauauguagugcaguuaccacuguacggcgucauugauacucccuguuggaaacuccauacaucuccucuuugcaccacuaauacaaaggaaggcuccaacauaugucugacccgaacggaccgugggugguacugcgauaaugccggaagcgugucguucuuuccacaagcugagaccuguaagguuugcucuaacagaguguucugcgacacaaugaacuccuugacucuacccucagaagucaaucuguguaauguggauaucuuuaacccuaaauaugacugcaagauuaugaccaguaaaacagauguaagcuccucuguuaucacuagccucggugccauagugucauguuacggcaagaccaaaugcacagcaaguaauaagaacaaggggauuaucaaaaccuucuccaauggaugugacuaugucagcaacaagggcguggacacugucucuguggguaauacgcuguacuauguuaacaaacaggaggggcagucacuuuacgugaagggagagccaaucauuaacuuuuaugauccgcugguauuccccagugacgaauuugaugcuagcaucucccaagucaaugagaaaauuaaccagucuuuggccuucauaaggaagucggacgaacuccugcacaaugugaacgcgggcaagagcacaaccaauaucaugauuacuaccaucaucauuguuauaaucgugauuuuacugucccuaaucgccgucggccuccugcuuuacugcaaagcacggucaacaccugugaccuugaguaaggaucagcugucugggauuaacaauaucgcuuucagcaacugaggacuaguguccaccugucccuccugggcugcuggauugucucguuuuccugccaaauaaacaggaucagcgcuuuacagaucuaaaaaaaaaaaaaaaaaaaaaaaaaaaaaaaaaaaaaaaaaaaaaaaaaaaaaaaaaaaaaaaaugcaucccccccccccccccccccccccccccccccaaaggcucuuuucagagccaccagaauu

SEQ ID NO: 6245 - RNA, 1919 nt, Artificial Sequence
  mRNA product Design e-2 comprising derived and/or modified sequence from HRSV(A2)__F_DSCav1_mut6 (opt4)
gggagacccgugacccggaaguuguacggcuacgcgacuuucccucccacaaacccucgcgcccuuccuuuccuacuugggcccggcagaaagcuuaccauggagcugcugauccugaaggccaacgccaucaccaccauccugaccgccgugaccuucugcuucgccagcggccagaacaucaccgaggaguucuaccagagcaccugcagcgccgugagcaagggcuaccugggcgcccugagaaccggcugguacaccagcgugaucaccaucgagcugagcaacaucaaggagaacaagugcaacggcaccgacgccaaggugaagcugaucaagcaggagcuggacaaguacaagaacgccgugaccgaccugcagaugcugaugugcagcacccccgccaccggcagcggcagcgccaucgccagcggcguggccgugugcaaggugcugcaccuggagggcgaggugaacaagaucaagagcgcccugcugagcaccaacaaggccguggugagccugagcaacggcgugagcgugcugaccuucaaggugcuggaccugaagaacuacaucgacaagcagcugcugcccauccugaacaagcagagcugcagcauccccaaccccgagaccgugauggaguuccagcagaagaacaacagacugcuggagaucaccagagaguucagcgugaacgccggcgugaccacccccgugagcaccuacaugcugaccaacagcgagcugcugagccugaucaacgacaugcccaucaccaacgaccagaagaagcugaugagcaacaacgugcagaucgugagacagcagagcuacagcaucaugugcaucaucaaggaggaggugcuggccuacguggugcagcugccccuguacggcgugaucgacacccccugcuggaagcugcacaccagcccccugugcaccaccaacaccaaggagggcagcaacaucugccugaccagaaccgacagaggcugguacugcgacaacgccggcagcgugagcuucuucccccaggccgagaccugcaaggugugcagcaacagaguguucugcgacaccaugaacagccugacccugcccagcgaggugaaccugugcaacguggacaucuucaaccccaaguacgacugcaagaucaugaccagcaagaccgacgugagcagcagcgugaucaccagccugggcgccaucgugagcugcuacggcaagaccaagugcaccgccagcaacaagaacaagggcaucaucaagaccuucagcaacggcugcgacuacgugagcaacaagggcguggacaccgugagcgugggcaacacccuguacuacgugaacaagcaggagggccagagccuguacgugaagggcgagcccaucaucaacuucuacgacccccugguguuccccagcgacgaguucgacgccagcaucagccaggugaacgagaagaucaaccagagccuggccuucaucagaaagagcgacgagcugcugcacaacgugaacgccggcaagagcaccaccaacaucaugaucaccaccaucaucaucgugaucaucgugauccugcugagccugaucgccgugggccugcugcuguacugcaaggccagaagcacccccgugacccugagcaaggaccagcugagcggcaucaacaacaucgccuucagcaacugaggacuaguguccaccugucccuccugggcugcuggauugucucguuuuccugccaaauaaacaggaucagcgcuuuacagaucuaaaaaaaaaaaaaaaaaaaaaaaaaaaaaaaaaaaaaaaaaaaaaaaaaaaaaaaaaaaaaaaaugcaucccccccccccccccccccccccccccccccaaaggcucuuuucagagccaccagaauu

SEQ ID NO: 6246 - RNA, 1919 nt, Artificial Sequence
  mRNA product Design e-2 comprising derived and/or modified sequence from HRSV(A2)__F_DSCav1_mut6 (opt5)
gggagacccgugacccggaaguuguacggcuacgcgacuuucccucccacaaacccucgcgcccuuccuuuccuacuugggcccggcagaaagcuuaccauggagcugcucauccugaaggccaacgcuauuaccacaauccuuacggccgugaccuucugcuuugcgagcggccagaauauuacagaagaguucuaccaauccaccuguucugcugucagcaaaggguaucugggagcccucagaacaggcugguacaccuccguuaucacaauugaacugucuaacaucaaggagaauaaaugcaacgggaccgacgccaaggugaaacuuaucaagcaggaacuggauaaguauaaaaaugcugugacggaccuccagaugcugauguguagcacccccgccacaggauccggcucugcuauugccagcggggucgcggugugcaagguucugcaccucgagggagaggugaacaaaaucaaguccgcccugcuuagcaccaauaaagcugucgugucucuguccaacggcguuagcgugcucacauuuaagguccuggaucuuaagaauuacauugacaaacagcugcucccuauccugaacaagcaaucuuguuccauuccgaaucccgaaaccgugauggaguuccagcagaaaaacaaucggcugcucgaaaucacgcgcgaguuuagcgugaacgccggcgucacaaccccuguuucuacauauaugcugaccaauuccgagcuucugagccucauuaacgauaugcccaucaccaacgaccagaagaaacugauguccaauaacgugcaaaucgugagacagcagucuuacagcauuaugugcaucauuaaggaagagguccuugcuuaugugguucagcugccucucuacggggugaucgauacacccuguuggaaacugcauacguccccucugugcaccacaaauaccaaggaaggaagcaacauuugucucacacggaccgaccgcggcugguacugcgauaaugccgggucugucuccuucuuuccgcaagcggagacguguaaggugugcagcaacagaguuuucugcgacacaaugaacucucugacccuucccagcgaagugaaucuguguaaugucgauaucuuuaacccuaaauaugacugcaagaucaugaccuccaaaacagaugugucuagcuccgucauuaccagccucggagccaucgugucuuguuacggcaagacaaaaugcacggcuuccaauaagaacaaggggauuaucaaaaccuucagcaauggaugugacuauguuucuaacaagggcguggacacagucuccgugggcaauacccuguacuauguuaacaaacaggaggggcagagccuuuacgugaagggagagcccauuaucaacuuuuaugauccucuggucuuccccuccgacgaauuugaugccucuaucagccaagugaaugagaaaauuaaccagucccucgcuuucauccggaagucugacgaacugcugcacaaugugaacgccggcaagagcacaaccaauauuaugaucacgaccauuaucauuguuaucaucgucauucuccugucccuuaucgccguggggcugcuccuguacugcaaagcucgcagcacaccggugacccugucuaaggaucagcuuuccggaauuaacaauaucgcguucagcaacugaggacuaguguccaccugucccuccugggcugcuggauugucucguuuuccugccaaauaaacaggaucagcgcuuuacagaucuaaaaaaaaaaaaaaaaaaaaaaaaaaaaaaaaaaaaaaaaaaaaaaaaaaaaaaaaaaaaaaaaugcaucccccccccccccccccccccccccccccccaaaggcucuuuucagagccaccagaauu

SEQ ID NO: 6247 - RNA, 1919 nt, Artificial Sequence
  mRNA product Design e-2 comprising derived and/or modified sequence from HRSV(A2)__F_DSCav1_mut6 (opt6)
gggagacccgugacccggaaguuguacggcuacgcgacuuucccucccacaaacccucgcgcccuuccuuuccuacuugggcccggcagaaagcuuaccauggaacuauuaaucuuaaaagcaaaugcuauaaccacaauauuaacagcaguaacauucuguuuugccuccggacaaaacauaacagaagaauuuuaucaaucaacaugcucugcaguauccaaagguuacuuaggcgcacuacgcacuggaugguauacaucaguaauaacaauagaacuaucaaacauaaaagaaaauaaauguaacgguacugacgcaaaagugaaacuaauuaaacaagaacucgacaaauacaaaaaugcuguaacagaccuacaaaugcuaaugugcucaacacccgcaaccggaucaggaucagccauagccuccggagucgcaguaugcaaaguauuacaucuugaaggagaaguaaauaaaauaaaaucagcauuacuauccacaaauaaagccguaguaucacuaucaaacgguguauccguccuuacauucaaaguauuagaucuaaaaaacuacauagauaaacaacuacuacccaucuuaaacaaacaaucaugcucaauucccaacccagaaacagucauggaauuucaacaaaaaaacaacagacucuuagaaauaacacgagaauuuucaguaaacgcaggaguaaccacaccaguaaguacauacaugcucaccaacucagaauuauuaucacuuauuaacgacaugccaauuacaaacgaccaaaaaaaauuaaugucaaacaauguccaaauuguuagacaacaaucauacucuauaauguguauaauaaaagaagaaguacuagcuuacguaguucaauuaccacuauauggcguaauagauacaccuugcuggaaacuacauacaucuccauuauguacaacuaacacaaaagaaggaucuaacauaugccuaacacgcacagaucgaggaugguacugcgauaaugcagguuccguaucauucuuuccacaagcagaaacauguaaaguaugcucaaacagaguauucugugacacuaugaacuccuuaacccuacccucagaagucaaucuaugcaacguugacauauuuaacccaaaauacgacuguaaaaucaugacaucuaaaacagacguaucaucaucaguuauuacaucccuaggagcaauaguaucuugcuacggaaaaacaaaauguacagcauccaacaaaaacaaaggaauaaucaaaacauucucaaacggcugcgacuacguaucaaacaaagguguagacacaguaucaguaggaaauacuuuauauuacguaaauaaacaagaaggacaaucucuauacguuaaaggcgaaccuauuauaaacuucuacgacccacucguauucccuucagacgaauuugacgcaucuauaucccaaguuaacgaaaaaaucaaccaaucauuagccuuuauaagaaaauccgacgaauuauuacauaacgucaacgcuggaaaaucaacaacuaacauaaugauaaccacaauaauaauagucaucauaguuauauuacuaagucuaauagccguaggccuccuacuuuauugcaaagcaagaucaacaccaguaacauuauccaaagaccaacucagcggcauaaacaauauagcuuuuucaaacuagggacuaguguccaccugucccuccugggcugcuggauugucucguuuuccugccaaauaaacaggaucagcgcuuuacagaucuaaaaaaaaaaaaaaaaaaaaaaaaaaaaaaaaaaaaaaaaaaaaaaaaaaaaaaaaaaaaaaaaugcaucccccccccccccccccccccccccccccccaaaggcucuuuucagagccaccagaauu

SEQ ID NO: 6248 - RNA, 1919 nt, Artificial Sequence
  mRNA product Design e-2 comprising derived and/or modified sequence from HRSV(A2)__F_DSCav1_mut6 (opt11)
gggagacccgugacccggaaguuguacggcuacgcgacuuucccucccacaaacccucgcgcccuuccuuuccuacuugggcccggcagaaagcuuaccauggaacuccucauccucaaagccaacgcaaucacaaccauacuaacugcaguuacuuucugcuucgcauccggccaaaacaucaccgaagaguucuaccaaucaaccugcuccgcagucuccaaaggauaccucggagcccuucgcaccggcugguacaccuccgucauaaccaucgaacucucaaacauaaaagaaaacaaaugcaacggcacagacgcgaaagucaaacuuaucaaacaagaacucgacaaauacaaaaacgccgucaccgaccugcagaugcucaugugcucaacccccgccacaggaagcggcucugcuaucgcuuccggcgucgccgucugcaaaguccuccaccucgaaggcgaaguaaacaaaaucaagucagcccuccucuccaccaacaaagccgucgucucucucucaaacggcguauccguccucacauucaaaguccucgaccucaaaaacuacaucgacaaacaacuucuccccauccuaaacaaacaaucaugcuccauccccaaccccgaaacagucauggaauuucaacaaaagaacaaccgccucuuagaaaucacccgagaauuuuccgucaacgcgggagucacaacccccguuucuacguauaugcucaccaacuccgaacuccuuucccucauaaacgacaugccaaucaccaacgaccaaaagaaacucaugucaaacaacguccaaaucguccgacaacaauccuacucuauuaugugcaucaucaaagaagaaguucucgccuacgucguccaacuaccccucuacggcgugaucgacacccccugcuggaaacuacacaccucaccccucugcaccaccaacaccaaggaaggcuccaacaucugccucacccgcaccgaccgcggcugguacugcgacaacgcuggcuccgucucauucuucccgcaagccgaaacuugcaaaguaugcuccaacagaguauucugcgacaccaugaacucacuaacccucccuuccgaagucaaccuuugcaacguugacauauucaacccaaaguacgauugcaaaauuaugacauccaaaacagaugucuccuccuccgucaucacaucccucggugccauuguaucaugcuacggaaaaaccaaaugcaccgcauccaacaaaaacaaaggaaucaucaaaaccuucucaaacggcugcgauuacgucucaaacaaaggagucgacacagucuccgucggaaacacccuauacuacgucaacaaacaagaaggccaaucccuguacgucaaaggagaacccaucaucaacuucuacgacccccucgucuucccgagcgacgaguucgacgccuccaucucacaagucaaugaaaagaucaaccaaucccuugccuucauccggaaaucggacgaacuccuacacaacgugaacgcuggaaaaucaaccaccaacaucaugaucacaaccaucauuaucgucaucaucgucauacuccucucccuaaucgccgucggccuccuccuguauugcaaagcucgcuccacccccgucacccuguccaaagaccaacucuccggaaucaacaacaucgccuucucaaacuaaggacuaguguccaccugucccuccugggcugcuggauugucucguuuuccugccaaauaaacaggaucagcgcuuuacagaucuaaaaaaaaaaaaaaaaaaaaaaaaaaaaaaaaaaaaaaaaaaaaaaaaaaaaaaaaaaaaaaaaugcaucccccccccccccccccccccccccccccccaaaggcucuuuucagagccaccagaauu

SEQ ID NO: 6249 - RNA, 1889 nt, Artificial Sequence
  mRNA product Design e-3 comprising derived and/or modified sequence from HRSV(A2)__F_DSCav1_mut6 (opt1)
gggagacuuucccauucuguagcagaauuugguguugccuguggucuuggucccgcggagaagcuuaccauggagcugcucauccugaaggccaacgccaucaccaccauccugacggcggugaccuucugcuucgccagcggccagaacaucaccgaggaguucuaccaguccacgugcagcgccgucuccaagggguaccucggcgcccugcggaccggcugguacaccuccgugaucaccaucgagcugagcaacaucaaggagaacaagugcaacgggaccgacgccaaggugaagcucaucaagcaggagcuggacaaguacaagaacgcggucacggaccugcagaugcugaugugcuccaccccggcaaccggcuccggcuccgccaucgcgagcggcgucgccgugugcaaggugcugcaccucgagggggaggucaacaagaucaagagcgcccugcuguccaccaacaaggccguggugagccucuccaacggcgucagcgugcugaccuucaaggugcuggaccucaagaacuacaucgacaagcagcugcugcccauccugaacaagcagagcugcuccauccccaaccccgagacggugauggaguuccagcagaagaacaaccggcuccuggagaucacccgcgaguucagcgugaacgccggggucaccacccccguguccacguacaugcugaccaacagcgagcuccugucccugaucaacgacaugccgaucaccaacgaccagaagaagcucaugagcaacaacgugcagaucguccggcagcaguccuacagcaucaugugcaucaucaaggaggaggugcuggcguacgugguccagcugccccucuacggcgugaucgacacccccugcuggaagcugcacacgagcccccugugcaccaccaacaccaaggagggguccaacaucugccucacgcgcaccgaccggggcugguacugcgacaacgccggcagcgucuccuucuucccgcaggccgagaccugcaaggugugcagcaaccgcguguucugcgacaccaugaacucccugacgcugcccagcgagguaaaccucugcaacgucgacaucuucaaccccaaguacgacugcaagaucaugaccuccaagaccgacgugagcuccagcgugaucaccucccugggggccaucgucagcugcuacggcaagacgaagugcaccgccagcaacaagaacaaggggaucaucaagaccuucuccaacggcugcgacuacgugagcaacaagggcguggacaccguguccgucgggaacacccuguacuacgugaacaagcaggagggccagagccucuacgugaagggggagcccaucaucaacuucuacgacccgcuggucuuccccuccgacgaguucgacgcgagcaucucccaggugaacgagaagaucaaccagagccuggccuucauccgcaaguccgacgagcugcuccacaacgugaacgccggcaagagcacgaccaacaucaugaucaccaccaucaucaucgucaucaucgugauccugcugucccucaucgccguggggcugcugcucuacugcaaggcccggagcacgcccgucacccuguccaaggaccagcugagcggcaucaacaacaucgcguucuccaacugaggacuaguguccaccugucccuccugggcugcuggauugucucguuuuccugccaaauaaacaggaucagcgcuuuacagaucuaaaaaaaaaaaaaaaaaaaaaaaaaaaaaaaaaaaaaaaaaaaaaaaaaaaaaaaaaaaaaaaaugcaucccccccccccccccccccccccccccccccaaaggcucuuuucagagccaccagaauu

SEQ ID NO: 6250 - RNA, 1889 nt, Artificial Sequence
  mRNA product Design e-3 comprising derived and/or modified sequence from HRSV(A2)__F_DSCav1_mut6 (opt1)
gggagacuuucccauucuguagcagaauuugguguugccuguggucuuggucccgcggagaagcuuaccauggagcugcucauccugaaggccaacgccaucaccaccauccugacggcggugaccuucugcuucgccagcggccagaacaucaccgaggaguucuaccaguccacgugcagcgccgucuccaagggguaccucggcgcccugcgcaccgggugguacaccagcgugaucaccaucgagcuguccaacaucaaggagaacaagugcaacggcaccgacgccaaggugaagcucaucaagcaggagcuggacaaguacaagaacgcggucacggaccugcagaugcucaugugcagcacccccgccaccggguccggcagcgccaucgccuccggcguggcggugugcaagguccugcaccuggagggggaggugaacaagaucaagagcgcccuccuguccaccaacaaggccguggucagccuguccaacggcgugagcgugcucacguucaagguccuggaccugaagaacuacaucgacaagcagcuccugccgauccugaacaagcaguccugcagcauccccaaccccgagaccgugauggaguuccagcagaagaacaaccggcuccuggagaucacccgcgaguucuccgugaacgccggggucaccacgcccgugagcaccuacaugcugaccaacuccgagcuccugagccugaucaacgacaugccgaucaccaacgaccagaagaagcucaugagcaacaacgugcagaucguccggcagcaguccuacagcaucaugugcaucaucaaggaggaggugcuggccuacgugguccagcugccccucuacggcgugaucgacacgcccugcuggaagcugcacaccagcccccugugcaccaccaacacgaaggaggggagcaacaucugccucacccgcaccgaccggggcugguacugcgacaacgcgggcuccgugagcuucuucccgcaggccgagaccugcaaggucugcuccaaccgcguguucugcgacacgaugaacagccugacccugcccuccgaggucaaccucugcaacguggacaucuucaaccccaaguacgacugcaagaucaugaccagcaagaccgacguguccagcuccgucaucacgagccugggggccaucguguccugcuacggcaagaccaagugcaccgccagcaacaagaacaaggggaucaucaagaccuucuccaacggcugcgacuacgugagcaacaagggcgucgacacgguguccguggggaacacccuguacuacgucaacaagcaggagggccagagccucuacgugaagggggagcccaucaucaacuucuacgacccgcugguguuccccagcgacgaguucgacgccuccaucagccaggucaacgagaagaucaaccagucccuggcguucauccggaaguccgacgagcuccugcacaacgugaacgccggcaaguccaccaccaacaucaugaucaccacgaucaucaucgugaucaucgucauccugcucagccugaucgccguggggcugcuccuguacugcaaggcccgcuccacccccgugacccugagcaaggaccagcuguccggcaucaacaacaucgccuucagcaacugaggacuaguguccaccugucccuccugggcugcuggauugucucguuuuccugccaaauaaacaggaucagcgcuuuacagaucuaaaaaaaaaaaaaaaaaaaaaaaaaaaaaaaaaaaaaaaaaaaaaaaaaaaaaaaaaaaaaaaaugcaucccccccccccccccccccccccccccccccaaaggcucuuuucagagccaccagaauu

SEQ ID NO: 6251 - RNA, 1889 nt, Artificial Sequence
  mRNA product Design e-3 comprising derived and/or modified sequence from HRSV(A2)__F_DSCav1_mut6 (opt2)
gggagacuuucccauucuguagcagaauuugguguugccuguggucuuggucccgcggagaagcuuaccauggagcuccucauccucaaggccaacgccaucaccaccauccucaccgccgucaccuucugcuucgccuccggccagaacaucaccgaggaguucuaccaguccaccugcuccgccgucuccaagggcuaccucggcgcccuccgcaccggcugguacaccuccgucaucaccaucgagcucuccaacaucaaggagaacaagugcaacggcaccgacgccaaggucaagcucaucaagcaggagcucgacaaguacaagaacgccgucaccgaccuccagaugcucaugugcuccacccccgccaccggcuccggcuccgccaucgccuccggcgucgccgucugcaagguccuccaccucgagggcgaggucaacaagaucaaguccgcccuccucuccaccaacaaggccgucgucucccucuccaacggcgucuccguccucaccuucaagguccucgaccucaagaacuacaucgacaagcagcuccuccccauccucaacaagcaguccugcuccauccccaaccccgagaccgucauggaguuccagcagaagaacaaccgccuccucgagaucacccgcgaguucuccgucaacgccggcgucaccacccccgucuccaccuacaugcucaccaacuccgagcuccucucccucaucaacgacaugcccaucaccaacgaccagaagaagcucauguccaacaacguccagaucguccgccagcaguccuacuccaucaugugcaucaucaaggaggagguccucgccuacgucguccagcucccccucuacggcgucaucgacacccccugcuggaagcuccacaccuccccccucugcaccaccaacaccaaggagggcuccaacaucugccucacccgcaccgaccgcggcugguacugcgacaacgccggcuccgucuccuucuucccccaggccgagaccugcaaggucugcuccaaccgcgucuucugcgacaccaugaacucccucacccuccccuccgaggucaaccucugcaacgucgacaucuucaaccccaaguacgacugcaagaucaugaccuccaagaccgacgucuccuccuccgucaucaccucccucggcgccaucgucuccugcuacggcaagaccaagugcaccgccuccaacaagaacaagggcaucaucaagaccuucuccaacggcugcgacuacgucuccaacaagggcgucgacaccgucuccgucggcaacacccucuacuacgucaacaagcaggagggccagucccucuacgucaagggcgagcccaucaucaacuucuacgacccccucgucuuccccuccgacgaguucgacgccuccaucucccaggucaacgagaagaucaaccagucccucgccuucauccgcaaguccgacgagcuccuccacaacgucaacgccggcaaguccaccaccaacaucaugaucaccaccaucaucaucgucaucaucgucauccuccucucccucaucgccgucggccuccuccucuacugcaaggcccgcuccacccccgucacccucuccaaggaccagcucuccggcaucaacaacaucgccuucuccaacugaggacuaguguccaccugucccuccugggcugcuggauugucucguuuuccugccaaauaaacaggaucagcgcuuuacagaucuaaaaaaaaaaaaaaaaaaaaaaaaaaaaaaaaaaaaaaaaaaaaaaaaaaaaaaaaaaaaaaaaugcaucccccccccccccccccccccccccccccccaaaggcucuuuucagagccaccagaauu

SEQ ID NO: 6252 - RNA, 1889 nt, Artificial Sequence
  mRNA product Design e-3 comprising derived and/or modified sequence from HRSV(A2)__F_DSCav1_mut6 (opt3)
gggagacuuucccauucuguagcagaauuugguguugccuguggucuuggucccgcggagaagcuuaccauggagcugcucauccuuaaggccaacgcuauuaccacaauacugacugcagugacguucugcuuugccagcggccagaauaucaccgaagaguucuaccaauccacauguucugcggucucaaaaggguauuugggagcuuuaagaacugguugguacaccaguguuauuacaaucgaacugagcaacauuaaggagaauaaaugcaacggcaccgacgccaaggugaaacuaaucaagcaggaacucgauaaguauaaaaaugcaguaacugaccugcagaugcuuauguguuccacacccgccaccgggucuggaucggcuauagcaucaggcguggccgucugcaaggugcugcacuuggagggugagguuaacaaaaucaagagcgcucuccugaguacgaauaaagccguggucucccugucuaacggggugagcguacucacuuuuaagguuuuagaucugaagaauuacauugacaaacagcuuuugccuauccugaacaagcaauccuguucaauuccaaauccggaaaccgugauggaguuccagcagaaaaacaauaggcuacucgaaaucacacgggaguuuagugucaacgcgggagugacuacccccgugagcacauauaugcugaccaauucugagcuucuguccuugauaaacgauaugccuauuacgaacgaccagaagaaacucaugucaaauaacguccaaaucguucgccagcagagcuacaguauuaugugcaucaucaaggaagaggugcuggcauauguagugcaguuaccacuguacggcgucauugauacucccuguuggaaacuccauacaucuccucuuugcaccacuaauacaaaggaaggcuccaacauaugucugacccgaacggaccgugggugguacugcgauaaugccggaagcgugucguucuuuccacaagcugagaccuguaagguuugcucuaacagaguguucugcgacacaaugaacuccuugacucuacccucagaagucaaucuguguaauguggauaucuuuaacccuaaauaugacugcaagauuaugaccaguaaaacagauguaagcuccucuguuaucacuagccucggugccauagugucauguuacggcaagaccaaaugcacagcaaguaauaagaacaaggggauuaucaaaaccuucuccaauggaugugacuaugucagcaacaagggcguggacacugucucuguggguaauacgcuguacuauguuaacaaacaggaggggcagucacuuuacgugaagggagagccaaucauuaacuuuuaugauccgcugguauuccccagugacgaauuugaugcuagcaucucccaagucaaugagaaaauuaaccagucuuuggccuucauaaggaagucggacgaacuccugcacaaugugaacgcgggcaagagcacaaccaauaucaugauuacuaccaucaucauuguuauaaucgugauuuuacugucccuaaucgccgucggccuccugcuuuacugcaaagcacggucaacaccugugaccuugaguaaggaucagcugucugggauuaacaauaucgcuuucagcaacugaggacuaguguccaccugucccuccugggcugcuggauugucucguuuuccugccaaauaaacaggaucagcgcuuuacagaucuaaaaaaaaaaaaaaaaaaaaaaaaaaaaaaaaaaaaaaaaaaaaaaaaaaaaaaaaaaaaaaaaugcaucccccccccccccccccccccccccccccccaaaggcucuuuucagagccaccagaauu

SEQ ID NO: 6253 - RNA, 1889 nt, Artificial Sequence
  mRNA product Design e-3 comprising derived and/or modified sequence from HRSV(A2)__F_DSCav1_mut6 (opt4)
gggagacuuucccauucuguagcagaauuugguguugccuguggucuuggucccgcggagaagcuuaccauggagcugcugauccugaaggccaacgccaucaccaccauccugaccgccgugaccuucugcuucgccagcggccagaacaucaccgaggaguucuaccagagcaccugcagcgccgugagcaagggcuaccugggcgcccugagaaccggcugguacaccagcgugaucaccaucgagcugagcaacaucaaggagaacaagugcaacggcaccgacgccaaggugaagcugaucaagcaggagcuggacaaguacaagaacgccgugaccgaccugcagaugcugaugugcagcacccccgccaccggcagcggcagcgccaucgccagcggcguggccgugugcaaggugcugcaccuggagggcgaggugaacaagaucaagagcgcccugcugagcaccaacaaggccguggugagccugagcaacggcgugagcgugcugaccuucaaggugcuggaccugaagaacuacaucgacaagcagcugcugcccauccugaacaagcagagcugcagcauccccaaccccgagaccgugauggaguuccagcagaagaacaacagacugcuggagaucaccagagaguucagcgugaacgccggcgugaccacccccgugagcaccuacaugcugaccaacagcgagcugcugagccugaucaacgacaugcccaucaccaacgaccagaagaagcugaugagcaacaacgugcagaucgugagacagcagagcuacagcaucaugugcaucaucaaggaggaggugcuggccuacguggugcagcugccccuguacggcgugaucgacacccccugcuggaagcugcacaccagcccccugugcaccaccaacaccaaggagggcagcaacaucugccugaccagaaccgacagaggcugguacugcgacaacgccggcagcgugagcuucuucccccaggccgagaccugcaaggugugcagcaacagaguguucugcgacaccaugaacagccugacccugcccagcgaggugaaccugugcaacguggacaucuucaaccccaaguacgacugcaagaucaugaccagcaagaccgacgugagcagcagcgugaucaccagccugggcgccaucgugagcugcuacggcaagaccaagugcaccgccagcaacaagaacaagggcaucaucaagaccuucagcaacggcugcgacuacgugagcaacaagggcguggacaccgugagcgugggcaacacccuguacuacgugaacaagcaggagggccagagccuguacgugaagggcgagcccaucaucaacuucuacgacccccugguguuccccagcgacgaguucgacgccagcaucagccaggugaacgagaagaucaaccagagccuggccuucaucagaaagagcgacgagcugcugcacaacgugaacgccggcaagagcaccaccaacaucaugaucaccaccaucaucaucgugaucaucgugauccugcugagccugaucgccgugggccugcugcuguacugcaaggccagaagcacccccgugacccugagcaaggaccagcugagcggcaucaacaacaucgccuucagcaacugaggacuaguguccaccugucccuccugggcugcuggauugucucguuuuccugccaaauaaacaggaucagcgcuuuacagaucuaaaaaaaaaaaaaaaaaaaaaaaaaaaaaaaaaaaaaaaaaaaaaaaaaaaaaaaaaaaaaaaaugcaucccccccccccccccccccccccccccccccaaaggcucuuuucagagccaccagaauu

SEQ ID NO: 6254 - RNA, 1889 nt, Artificial Sequence
  mRNA product Design e-3 comprising derived and/or modified sequence from HRSV(A2)__F_DSCav1_mut6 (opt5)
gggagacuuucccauucuguagcagaauuugguguugccuguggucuuggucccgcggagaagcuuaccauggagcugcucauccugaaggccaacgcuauuaccacaauccuuacggccgugaccuucugcuuugcgagcggccagaauauuacagaagaguucuaccaauccaccuguucugcugucagcaaaggguaucugggagcccucagaacaggcugguacaccuccguuaucacaauugaacugucuaacaucaaggagaauaaaugcaacgggaccgacgccaaggugaaacuuaucaagcaggaacuggauaaguauaaaaaugcugugacggaccuccagaugcugauguguagcacccccgccacaggauccggcucugcuauugccagcggggucgcggugugcaagguucugcaccucgagggagaggugaacaaaaucaaguccgcccugcuuagcaccaauaaagcugucgugucucuguccaacggcguuagcgugcucacauuuaagguccuggaucuuaagaauuacauugacaaacagcugcucccuauccugaacaagcaaucuuguuccauuccgaaucccgaaaccgugauggaguuccagcagaaaaacaaucggcugcucgaaaucacgcgcgaguuuagcgugaacgccggcgucacaaccccuguuucuacauauaugcugaccaauuccgagcuucugagccucauuaacgauaugcccaucaccaacgaccagaagaaacugauguccaauaacgugcaaaucgugagacagcagucuuacagcauuaugugcaucauuaaggaagagguccuugcuuaugugguucagcugccucucuacggggugaucgauacacccuguuggaaacugcauacguccccucugugcaccacaaauaccaaggaaggaagcaacauuugucucacacggaccgaccgcggcugguacugcgauaaugccgggucugucuccuucuuuccgcaagcggagacguguaaggugugcagcaacagaguuuucugcgacacaaugaacucucugacccuucccagcgaagugaaucuguguaaugucgauaucuuuaacccuaaauaugacugcaagaucaugaccuccaaaacagaugugucuagcuccgucauuaccagccucggagccaucgugucuuguuacggcaagacaaaaugcacggcuuccaauaagaacaaggggauuaucaaaaccuucagcaauggaugugacuauguuucuaacaagggcguggacacagucuccgugggcaauacccuguacuauguuaacaaacaggaggggcagagccuuuacgugaagggagagcccauuaucaacuuuuaugauccucuggucuuccccuccgacgaauuugaugccucuaucagccaagugaaugagaaaauuaaccagucccucgcuuucauccggaagucugacgaacugcugcacaaugugaacgccggcaagagcacaaccaauauuaugaucacgaccauuaucauuguuaucaucgucauucuccugucccuuaucgccguggggcugcuccuguacugcaaagcucgcagcacaccggugacccugucuaaggaucagcuuuccggaauuaacaauaucgcguucagcaacugaggacuaguguccaccugucccuccugggcugcuggauugucucguuuuccugccaaauaaacaggaucagcgcuuuacagaucuaaaaaaaaaaaaaaaaaaaaaaaaaaaaaaaaaaaaaaaaaaaaaaaaaaaaaaaaaaaaaaaaugcaucccccccccccccccccccccccccccccccaaaggcucuuuucagagccaccagaauu

SEQ ID NO: 6255 - RNA, 1889 nt, Artificial Sequence
  mRNA product Design e-3 comprising derived and/or modified sequence from HRSV(A2)__F_DSCav1_mut6 (opt6)
gggagacuuucccauucuguagcagaauuugguguugccuguggucuuggucccgcggagaagcuuaccauggaacuauuaaucuuaaaagcaaaugcuauaaccacaauauuaacagcaguaacauucuguuuugccuccggacaaaacauaacagaagaauuuuaucaaucaacaugcucugcaguauccaaagguuacuuaggcgcacuacgcacuggaugguauacaucaguaauaacaauagaacuaucaaacauaaaagaaaauaaauguaacgguacugacgcaaaagugaaacuaauuaaacaagaacucgacaaauacaaaaaugcuguaacagaccuacaaaugcuaaugugcucaacacccgcaaccggaucaggaucagccauagccuccggagucgcaguaugcaaaguauuacaucuugaaggagaaguaaauaaaauaaaaucagcauuacuauccacaaauaaagccguaguaucacuaucaaacgguguauccguccuuacauucaaaguauuagaucuaaaaaacuacauagauaaacaacuacuacccaucuuaaacaaacaaucaugcucaauucccaacccagaaacagucauggaauuucaacaaaaaaacaacagacucuuagaaauaacacgagaauuuucaguaaacgcaggaguaaccacaccaguaaguacauacaugcucaccaacucagaauuauuaucacuuauuaacgacaugccaauuacaaacgaccaaaaaaaauuaaugucaaacaauguccaaauuguuagacaacaaucauacucuauaauguguauaauaaaagaagaaguacuagcuuacguaguucaauuaccacuauauggcguaauagauacaccuugcuggaaacuacauacaucuccauuauguacaacuaacacaaaagaaggaucuaacauaugccuaacacgcacagaucgaggaugguacugcgauaaugcagguuccguaucauucuuuccacaagcagaaacauguaaaguaugcucaaacagaguauucugugacacuaugaacuccuuaacccuacccucagaagucaaucuaugcaacguugacauauuuaacccaaaauacgacuguaaaaucaugacaucuaaaacagacguaucaucaucaguuauuacaucccuaggagcaauaguaucuugcuacggaaaaacaaaauguacagcauccaacaaaaacaaaggaauaaucaaaacauucucaaacggcugcgacuacguaucaaacaaagguguagacacaguaucaguaggaaauacuuuauauuacguaaauaaacaagaaggacaaucucuauacguuaaaggcgaaccuauuauaaacuucuacgacccacucguauucccuucagacgaauuugacgcaucuauaucccaaguuaacgaaaaaaucaaccaaucauuagccuuuauaagaaaauccgacgaauuauuacauaacgucaacgcuggaaaaucaacaacuaacauaaugauaaccacaauaauaauagucaucauaguuauauuacuaagucuaauagccguaggccuccuacuuuauugcaaagcaagaucaacaccaguaacauuauccaaagaccaacucagcggcauaaacaauauagcuuuuucaaacuagggacuaguguccaccugucccuccugggcugcuggauugucucguuuuccugccaaauaaacaggaucagcgcuuuacagaucuaaaaaaaaaaaaaaaaaaaaaaaaaaaaaaaaaaaaaaaaaaaaaaaaaaaaaaaaaaaaaaaaugcaucccccccccccccccccccccccccccccccaaaggcucuuuucagagccaccagaauu

SEQ ID NO: 6256 - RNA, 1889 nt, Artificial Sequence
  mRNA product Design e-3 comprising derived and/or modified sequence from HRSV(A2)__F_DSCav1_mut6 (opt11)
gggagacuuucccauucuguagcagaauuugguguugccuguggucuuggucccgcggagaagcuuaccauggaacuccucauccucaaagccaacgcaaucacaaccauacuaacugcaguuacuuucugcuucgcauccggccaaaacaucaccgaagaguucuaccaaucaaccugcuccgcagucuccaaaggauaccucggagcccuucgcaccggcugguacaccuccgucauaaccaucgaacucucaaacauaaaagaaaacaaaugcaacggcacagacgcgaaagucaaacuuaucaaacaagaacucgacaaauacaaaaacgccgucaccgaccugcagaugcucaugugcucaacccccgccacaggaagcggcucugcuaucgcuuccggcgucgccgucugcaaaguccuccaccucgaaggcgaaguaaacaaaaucaagucagcccuccucuccaccaacaaagccgucgucucucucucaaacggcguauccguccucacauucaaaguccucgaccucaaaaacuacaucgacaaacaacuucuccccauccuaaacaaacaaucaugcuccauccccaaccccgaaacagucauggaauuucaacaaaagaacaaccgccucuuagaaaucacccgagaauuuuccgucaacgcgggagucacaacccccguuucuacguauaugcucaccaacuccgaacuccuuucccucauaaacgacaugccaaucaccaacgaccaaaagaaacucaugucaaacaacguccaaaucguccgacaacaauccuacucuauuaugugcaucaucaaagaagaaguucucgccuacgucguccaacuaccccucuacggcgugaucgacacccccugcuggaaacuacacaccucaccccucugcaccaccaacaccaaggaaggcuccaacaucugccucacccgcaccgaccgcggcugguacugcgacaacgcuggcuccgucucauucuucccgcaagccgaaacuugcaaaguaugcuccaacagaguauucugcgacaccaugaacucacuaacccucccuuccgaagucaaccuuugcaacguugacauauucaacccaaaguacgauugcaaaauuaugacauccaaaacagaugucuccuccuccgucaucacaucccucggugccauuguaucaugcuacggaaaaaccaaaugcaccgcauccaacaaaaacaaaggaaucaucaaaaccuucucaaacggcugcgauuacgucucaaacaaaggagucgacacagucuccgucggaaacacccuauacuacgucaacaaacaagaaggccaaucccuguacgucaaaggagaacccaucaucaacuucuacgacccccucgucuucccgagcgacgaguucgacgccuccaucucacaagucaaugaaaagaucaaccaaucccuugccuucauccggaaaucggacgaacuccuacacaacgugaacgcuggaaaaucaaccaccaacaucaugaucacaaccaucauuaucgucaucaucgucauacuccucucccuaaucgccgucggccuccuccuguauugcaaagcucgcuccacccccgucacccuguccaaagaccaacucuccggaaucaacaacaucgccuucucaaacuaaggacuaguguccaccugucccuccugggcugcuggauugucucguuuuccugccaaauaaacaggaucagcgcuuuacagaucuaaaaaaaaaaaaaaaaaaaaaaaaaaaaaaaaaaaaaaaaaaaaaaaaaaaaaaaaaaaaaaaaugcaucccccccccccccccccccccccccccccccaaaggcucuuuucagagccaccagaauu

SEQ ID NO: 6257 - RNA, 1943 nt, Artificial Sequence
  mRNA product Design e-4 comprising derived and/or modified sequence from HRSV(A2)__F_DSCav1_mut6 (opt1)
gggagacuccugucgggcggaaguaggaggaguagaguuuaaaaacaguacucuuuuuccgguucgggacguaguugaagcaacgacaagccggauaaccgcucuugagacaggaagcuuaccauggagcugcucauccugaaggccaacgccaucaccaccauccugacggcggugaccuucugcuucgccagcggccagaacaucaccgaggaguucuaccaguccacgugcagcgccgucuccaagggguaccucggcgcccugcggaccggcugguacaccuccgugaucaccaucgagcugagcaacaucaaggagaacaagugcaacgggaccgacgccaaggugaagcucaucaagcaggagcuggacaaguacaagaacgcggucacggaccugcagaugcugaugugcuccaccccggcaaccggcuccggcuccgccaucgcgagcggcgucgccgugugcaaggugcugcaccucgagggggaggucaacaagaucaagagcgcccugcuguccaccaacaaggccguggugagccucuccaacggcgucagcgugcugaccuucaaggugcuggaccucaagaacuacaucgacaagcagcugcugcccauccugaacaagcagagcugcuccauccccaaccccgagacggugauggaguuccagcagaagaacaaccggcuccuggagaucacccgcgaguucagcgugaacgccggggucaccacccccguguccacguacaugcugaccaacagcgagcuccugucccugaucaacgacaugccgaucaccaacgaccagaagaagcucaugagcaacaacgugcagaucguccggcagcaguccuacagcaucaugugcaucaucaaggaggaggugcuggcguacgugguccagcugccccucuacggcgugaucgacacccccugcuggaagcugcacacgagcccccugugcaccaccaacaccaaggagggguccaacaucugccucacgcgcaccgaccggggcugguacugcgacaacgccggcagcgucuccuucuucccgcaggccgagaccugcaaggugugcagcaaccgcguguucugcgacaccaugaacucccugacgcugcccagcgagguaaaccucugcaacgucgacaucuucaaccccaaguacgacugcaagaucaugaccuccaagaccgacgugagcuccagcgugaucaccucccugggggccaucgucagcugcuacggcaagacgaagugcaccgccagcaacaagaacaaggggaucaucaagaccuucuccaacggcugcgacuacgugagcaacaagggcguggacaccguguccgucgggaacacccuguacuacgugaacaagcaggagggccagagccucuacgugaagggggagcccaucaucaacuucuacgacccgcuggucuuccccuccgacgaguucgacgcgagcaucucccaggugaacgagaagaucaaccagagccuggccuucauccgcaaguccgacgagcugcuccacaacgugaacgccggcaagagcacgaccaacaucaugaucaccaccaucaucaucgucaucaucgugauccugcugucccucaucgccguggggcugcugcucuacugcaaggcccggagcacgcccgucacccuguccaaggaccagcugagcggcaucaacaacaucgcguucuccaacugaggacuaguguccaccugucccuccugggcugcuggauugucucguuuuccugccaaauaaacaggaucagcgcuuuacagaucuaaaaaaaaaaaaaaaaaaaaaaaaaaaaaaaaaaaaaaaaaaaaaaaaaaaaaaaaaaaaaaaaugcaucccccccccccccccccccccccccccccccaaaggcucuuuucagagccaccagaauu

SEQ ID NO: 6258 - RNA, 1943 nt, Artificial Sequence
  mRNA product Design e-4 comprising derived and/or modified sequence from HRSV(A2)__F_DSCav1_mut6 (opt1)
gggagacuccugucgggcggaaguaggaggaguagaguuuaaaaacaguacucuuuuuccgguucgggacguaguugaagcaacgacaagccggauaaccgcucuugagacaggaagcuuaccauggagcugcucauccugaaggccaacgccaucaccaccauccugacggcggugaccuucugcuucgccagcggccagaacaucaccgaggaguucuaccaguccacgugcagcgccgucuccaagggguaccucggcgcccugcgcaccgggugguacaccagcgugaucaccaucgagcuguccaacaucaaggagaacaagugcaacggcaccgacgccaaggugaagcucaucaagcaggagcuggacaaguacaagaacgcggucacggaccugcagaugcucaugugcagcacccccgccaccggguccggcagcgccaucgccuccggcguggcggugugcaagguccugcaccuggagggggaggugaacaagaucaagagcgcccuccuguccaccaacaaggccguggucagccuguccaacggcgugagcgugcucacguucaagguccuggaccugaagaacuacaucgacaagcagcuccugccgauccugaacaagcaguccugcagcauccccaaccccgagaccgugauggaguuccagcagaagaacaaccggcuccuggagaucacccgcgaguucuccgugaacgccggggucaccacgcccgugagcaccuacaugcugaccaacuccgagcuccugagccugaucaacgacaugccgaucaccaacgaccagaagaagcucaugagcaacaacgugcagaucguccggcagcaguccuacagcaucaugugcaucaucaaggaggaggugcuggccuacgugguccagcugccccucuacggcgugaucgacacgcccugcuggaagcugcacaccagcccccugugcaccaccaacacgaaggaggggagcaacaucugccucacccgcaccgaccggggcugguacugcgacaacgcgggcuccgugagcuucuucccgcaggccgagaccugcaaggucugcuccaaccgcguguucugcgacacgaugaacagccugacccugcccuccgaggucaaccucugcaacguggacaucuucaaccccaaguacgacugcaagaucaugaccagcaagaccgacguguccagcuccgucaucacgagccugggggccaucguguccugcuacggcaagaccaagugcaccgccagcaacaagaacaaggggaucaucaagaccuucuccaacggcugcgacuacgugagcaacaagggcgucgacacgguguccguggggaacacccuguacuacgucaacaagcaggagggccagagccucuacgugaagggggagcccaucaucaacuucuacgacccgcugguguuccccagcgacgaguucgacgccuccaucagccaggucaacgagaagaucaaccagucccuggcguucauccggaaguccgacgagcuccugcacaacgugaacgccggcaaguccaccaccaacaucaugaucaccacgaucaucaucgugaucaucgucauccugcucagccugaucgccguggggcugcuccuguacugcaaggcccgcuccacccccgugacccugagcaaggaccagcuguccggcaucaacaacaucgccuucagcaacugaggacuaguguccaccugucccuccugggcugcuggauugucucguuuuccugccaaauaaacaggaucagcgcuuuacagaucuaaaaaaaaaaaaaaaaaaaaaaaaaaaaaaaaaaaaaaaaaaaaaaaaaaaaaaaaaaaaaaaaugcaucccccccccccccccccccccccccccccccaaaggcucuuuucagagccaccagaauu

SEQ ID NO: 6259 - RNA, 1943 nt, Artificial Sequence
  mRNA product Design e-4 comprising derived and/or modified sequence from HRSV(A2)__F_DSCav1_mut6 (opt2)
gggagacuccugucgggcggaaguaggaggaguagaguuuaaaaacaguacucuuuuuccgguucgggacguaguugaagcaacgacaagccggauaaccgcucuugagacaggaagcuuaccauggagcuccucauccucaaggccaacgccaucaccaccauccucaccgccgucaccuucugcuucgccuccggccagaacaucaccgaggaguucuaccaguccaccugcuccgccgucuccaagggcuaccucggcgcccuccgcaccggcugguacaccuccgucaucaccaucgagcucuccaacaucaaggagaacaagugcaacggcaccgacgccaaggucaagcucaucaagcaggagcucgacaaguacaagaacgccgucaccgaccuccagaugcucaugugcuccacccccgccaccggcuccggcuccgccaucgccuccggcgucgccgucugcaagguccuccaccucgagggcgaggucaacaagaucaaguccgcccuccucuccaccaacaaggccgucgucucccucuccaacggcgucuccguccucaccuucaagguccucgaccucaagaacuacaucgacaagcagcuccuccccauccucaacaagcaguccugcuccauccccaaccccgagaccgucauggaguuccagcagaagaacaaccgccuccucgagaucacccgcgaguucuccgucaacgccggcgucaccacccccgucuccaccuacaugcucaccaacuccgagcuccucucccucaucaacgacaugcccaucaccaacgaccagaagaagcucauguccaacaacguccagaucguccgccagcaguccuacuccaucaugugcaucaucaaggaggagguccucgccuacgucguccagcucccccucuacggcgucaucgacacccccugcuggaagcuccacaccuccccccucugcaccaccaacaccaaggagggcuccaacaucugccucacccgcaccgaccgcggcugguacugcgacaacgccggcuccgucuccuucuucccccaggccgagaccugcaaggucugcuccaaccgcgucuucugcgacaccaugaacucccucacccuccccuccgaggucaaccucugcaacgucgacaucuucaaccccaaguacgacugcaagaucaugaccuccaagaccgacgucuccuccuccgucaucaccucccucggcgccaucgucuccugcuacggcaagaccaagugcaccgccuccaacaagaacaagggcaucaucaagaccuucuccaacggcugcgacuacgucuccaacaagggcgucgacaccgucuccgucggcaacacccucuacuacgucaacaagcaggagggccagucccucuacgucaagggcgagcccaucaucaacuucuacgacccccucgucuuccccuccgacgaguucgacgccuccaucucccaggucaacgagaagaucaaccagucccucgccuucauccgcaaguccgacgagcuccuccacaacgucaacgccggcaaguccaccaccaacaucaugaucaccaccaucaucaucgucaucaucgucauccuccucucccucaucgccgucggccuccuccucuacugcaaggcccgcuccacccccgucacccucuccaaggaccagcucuccggcaucaacaacaucgccuucuccaacugaggacuaguguccaccugucccuccugggcugcuggauugucucguuuuccugccaaauaaacaggaucagcgcuuuacagaucuaaaaaaaaaaaaaaaaaaaaaaaaaaaaaaaaaaaaaaaaaaaaaaaaaaaaaaaaaaaaaaaaugcaucccccccccccccccccccccccccccccccaaaggcucuuuucagagccaccagaauu

SEQ ID NO: 6260 - RNA, 1943 nt, Artificial Sequence
  mRNA product Design e-4 comprising derived and/or modified sequence from HRSV(A2)__F_DSCav1_mut6 (opt3)
gggagacuccugucgggcggaaguaggaggaguagaguuuaaaaacaguacucuuuuuccgguucgggacguaguugaagcaacgacaagccggauaaccgcucuugagacaggaagcuuaccauggagcugcucauccuuaaggccaacgcuauuaccacaauacugacugcagugacguucugcuuugccagcggccagaauaucaccgaagaguucuaccaauccacauguucugcggucucaaaaggguauuugggagcuuuaagaacugguugguacaccaguguuauuacaaucgaacugagcaacauuaaggagaauaaaugcaacggcaccgacgccaaggugaaacuaaucaagcaggaacucgauaaguauaaaaaugcaguaacugaccugcagaugcuuauguguuccacacccgccaccgggucuggaucggcuauagcaucaggcguggccgucugcaaggugcugcacuuggagggugagguuaacaaaaucaagagcgcucuccugaguacgaauaaagccguggucucccugucuaacggggugagcguacucacuuuuaagguuuuagaucugaagaauuacauugacaaacagcuuuugccuauccugaacaagcaauccuguucaauuccaaauccggaaaccgugauggaguuccagcagaaaaacaauaggcuacucgaaaucacacgggaguuuagugucaacgcgggagugacuacccccgugagcacauauaugcugaccaauucugagcuucuguccuugauaaacgauaugccuauuacgaacgaccagaagaaacucaugucaaauaacguccaaaucguucgccagcagagcuacaguauuaugugcaucaucaaggaagaggugcuggcauauguagugcaguuaccacuguacggcgucauugauacucccuguuggaaacuccauacaucuccucuuugcaccacuaauacaaaggaaggcuccaacauaugucugacccgaacggaccgugggugguacugcgauaaugccggaagcgugucguucuuuccacaagcugagaccuguaagguuugcucuaacagaguguucugcgacacaaugaacuccuugacucuacccucagaagucaaucuguguaauguggauaucuuuaacccuaaauaugacugcaagauuaugaccaguaaaacagauguaagcuccucuguuaucacuagccucggugccauagugucauguuacggcaagaccaaaugcacagcaaguaauaagaacaaggggauuaucaaaaccuucuccaauggaugugacuaugucagcaacaagggcguggacacugucucuguggguaauacgcuguacuauguuaacaaacaggaggggcagucacuuuacgugaagggagagccaaucauuaacuuuuaugauccgcugguauuccccagugacgaauuugaugcuagcaucucccaagucaaugagaaaauuaaccagucuuuggccuucauaaggaagucggacgaacuccugcacaaugugaacgcgggcaagagcacaaccaauaucaugauuacuaccaucaucauuguuauaaucgugauuuuacugucccuaaucgccgucggccuccugcuuuacugcaaagcacggucaacaccugugaccuugaguaaggaucagcugucugggauuaacaauaucgcuuucagcaacugaggacuaguguccaccugucccuccugggcugcuggauugucucguuuuccugccaaauaaacaggaucagcgcuuuacagaucuaaaaaaaaaaaaaaaaaaaaaaaaaaaaaaaaaaaaaaaaaaaaaaaaaaaaaaaaaaaaaaaaugcaucccccccccccccccccccccccccccccccaaaggcucuuuucagagccaccagaauu

SEQ ID NO: 6261 - RNA, 1943 nt, Artificial Sequence
  mRNA product Design e-4 comprising derived and/or modified sequence from HRSV(A2)__F_DSCav1_mut6 (opt4)
gggagacuccugucgggcggaaguaggaggaguagaguuuaaaaacaguacucuuuuuccgguucgggacguaguugaagcaacgacaagccggauaaccgcucuugagacaggaagcuuaccauggagcugcugauccugaaggccaacgccaucaccaccauccugaccgccgugaccuucugcuucgccagcggccagaacaucaccgaggaguucuaccagagcaccugcagcgccgugagcaagggcuaccugggcgcccugagaaccggcugguacaccagcgugaucaccaucgagcugagcaacaucaaggagaacaagugcaacggcaccgacgccaaggugaagcugaucaagcaggagcuggacaaguacaagaacgccgugaccgaccugcagaugcugaugugcagcacccccgccaccggcagcggcagcgccaucgccagcggcguggccgugugcaaggugcugcaccuggagggcgaggugaacaagaucaagagcgcccugcugagcaccaacaaggccguggugagccugagcaacggcgugagcgugcugaccuucaaggugcuggaccugaagaacuacaucgacaagcagcugcugcccauccugaacaagcagagcugcagcauccccaaccccgagaccgugauggaguuccagcagaagaacaacagacugcuggagaucaccagagaguucagcgugaacgccggcgugaccacccccgugagcaccuacaugcugaccaacagcgagcugcugagccugaucaacgacaugcccaucaccaacgaccagaagaagcugaugagcaacaacgugcagaucgugagacagcagagcuacagcaucaugugcaucaucaaggaggaggugcuggccuacguggugcagcugccccuguacggcgugaucgacacccccugcuggaagcugcacaccagcccccugugcaccaccaacaccaaggagggcagcaacaucugccugaccagaaccgacagaggcugguacugcgacaacgccggcagcgugagcuucuucccccaggccgagaccugcaaggugugcagcaacagaguguucugcgacaccaugaacagccugacccugcccagcgaggugaaccugugcaacguggacaucuucaaccccaaguacgacugcaagaucaugaccagcaagaccgacgugagcagcagcgugaucaccagccugggcgccaucgugagcugcuacggcaagaccaagugcaccgccagcaacaagaacaagggcaucaucaagaccuucagcaacggcugcgacuacgugagcaacaagggcguggacaccgugagcgugggcaacacccuguacuacgugaacaagcaggagggccagagccuguacgugaagggcgagcccaucaucaacuucuacgacccccugguguuccccagcgacgaguucgacgccagcaucagccaggugaacgagaagaucaaccagagccuggccuucaucagaaagagcgacgagcugcugcacaacgugaacgccggcaagagcaccaccaacaucaugaucaccaccaucaucaucgugaucaucgugauccugcugagccugaucgccgugggccugcugcuguacugcaaggccagaagcacccccgugacccugagcaaggaccagcugagcggcaucaacaacaucgccuucagcaacugaggacuaguguccaccugucccuccugggcugcuggauugucucguuuuccugccaaauaaacaggaucagcgcuuuacagaucuaaaaaaaaaaaaaaaaaaaaaaaaaaaaaaaaaaaaaaaaaaaaaaaaaaaaaaaaaaaaaaaaugcaucccccccccccccccccccccccccccccccaaaggcucuuuucagagccaccagaauu

SEQ ID NO: 6262 - RNA, 1943 nt, Artificial Sequence
  mRNA product Design e-4 comprising derived and/or modified sequence from HRSV(A2)__F_DSCav1_mut6 (opt5)
gggagacuccugucgggcggaaguaggaggaguagaguuuaaaaacaguacucuuuuuccgguucgggacguaguugaagcaacgacaagccggauaaccgcucuugagacaggaagcuuaccauggagcugcucauccugaaggccaacgcuauuaccacaauccuuacggccgugaccuucugcuuugcgagcggccagaauauuacagaagaguucuaccaauccaccuguucugcugucagcaaaggguaucugggagcccucagaacaggcugguacaccuccguuaucacaauugaacugucuaacaucaaggagaauaaaugcaacgggaccgacgccaaggugaaacuuaucaagcaggaacuggauaaguauaaaaaugcugugacggaccuccagaugcugauguguagcacccccgccacaggauccggcucugcuauugccagcggggucgcggugugcaagguucugcaccucgagggagaggugaacaaaaucaaguccgcccugcuuagcaccaauaaagcugucgugucucuguccaacggcguuagcgugcucacauuuaagguccuggaucuuaagaauuacauugacaaacagcugcucccuauccugaacaagcaaucuuguuccauuccgaaucccgaaaccgugauggaguuccagcagaaaaacaaucggcugcucgaaaucacgcgcgaguuuagcgugaacgccggcgucacaaccccuguuucuacauauaugcugaccaauuccgagcuucugagccucauuaacgauaugcccaucaccaacgaccagaagaaacugauguccaauaacgugcaaaucgugagacagcagucuuacagcauuaugugcaucauuaaggaagagguccuugcuuaugugguucagcugccucucuacggggugaucgauacacccuguuggaaacugcauacguccccucugugcaccacaaauaccaaggaaggaagcaacauuugucucacacggaccgaccgcggcugguacugcgauaaugccgggucugucuccuucuuuccgcaagcggagacguguaaggugugcagcaacagaguuuucugcgacacaaugaacucucugacccuucccagcgaagugaaucuguguaaugucgauaucuuuaacccuaaauaugacugcaagaucaugaccuccaaaacagaugugucuagcuccgucauuaccagccucggagccaucgugucuuguuacggcaagacaaaaugcacggcuuccaauaagaacaaggggauuaucaaaaccuucagcaauggaugugacuauguuucuaacaagggcguggacacagucuccgugggcaauacccuguacuauguuaacaaacaggaggggcagagccuuuacgugaagggagagcccauuaucaacuuuuaugauccucuggucuuccccuccgacgaauuugaugccucuaucagccaagugaaugagaaaauuaaccagucccucgcuuucauccggaagucugacgaacugcugcacaaugugaacgccggcaagagcacaaccaauauuaugaucacgaccauuaucauuguuaucaucgucauucuccugucccuuaucgccguggggcugcuccuguacugcaaagcucgcagcacaccggugacccugucuaaggaucagcuuuccggaauuaacaauaucgcguucagcaacugaggacuaguguccaccugucccuccugggcugcuggauugucucguuuuccugccaaauaaacaggaucagcgcuuuacagaucuaaaaaaaaaaaaaaaaaaaaaaaaaaaaaaaaaaaaaaaaaaaaaaaaaaaaaaaaaaaaaaaaugcaucccccccccccccccccccccccccccccccaaaggcucuuuucagagccaccagaauu

SEQ ID NO: 6263 - RNA, 1943 nt, Artificial Sequence
  mRNA product Design e-4 comprising derived and/or modified sequence from HRSV(A2)__F_DSCav1_mut6 (opt6)
gggagacuccugucgggcggaaguaggaggaguagaguuuaaaaacaguacucuuuuuccgguucgggacguaguugaagcaacgacaagccggauaaccgcucuugagacaggaagcuuaccauggaacuauuaaucuuaaaagcaaaugcuauaaccacaauauuaacagcaguaacauucuguuuugccuccggacaaaacauaacagaagaauuuuaucaaucaacaugcucugcaguauccaaagguuacuuaggcgcacuacgcacuggaugguauacaucaguaauaacaauagaacuaucaaacauaaaagaaaauaaauguaacgguacugacgcaaaagugaaacuaauuaaacaagaacucgacaaauacaaaaaugcuguaacagaccuacaaaugcuaaugugcucaacacccgcaaccggaucaggaucagccauagccuccggagucgcaguaugcaaaguauuacaucuugaaggagaaguaaauaaaauaaaaucagcauuacuauccacaaauaaagccguaguaucacuaucaaacgguguauccguccuuacauucaaaguauuagaucuaaaaaacuacauagauaaacaacuacuacccaucuuaaacaaacaaucaugcucaauucccaacccagaaacagucauggaauuucaacaaaaaaacaacagacucuuagaaauaacacgagaauuuucaguaaacgcaggaguaaccacaccaguaaguacauacaugcucaccaacucagaauuauuaucacuuauuaacgacaugccaauuacaaacgaccaaaaaaaauuaaugucaaacaauguccaaauuguuagacaacaaucauacucuauaauguguauaauaaaagaagaaguacuagcuuacguaguucaauuaccacuauauggcguaauagauacaccuugcuggaaacuacauacaucuccauuauguacaacuaacacaaaagaaggaucuaacauaugccuaacacgcacagaucgaggaugguacugcgauaaugcagguuccguaucauucuuuccacaagcagaaacauguaaaguaugcucaaacagaguauucugugacacuaugaacuccuuaacccuacccucagaagucaaucuaugcaacguugacauauuuaacccaaaauacgacuguaaaaucaugacaucuaaaacagacguaucaucaucaguuauuacaucccuaggagcaauaguaucuugcuacggaaaaacaaaauguacagcauccaacaaaaacaaaggaauaaucaaaacauucucaaacggcugcgacuacguaucaaacaaagguguagacacaguaucaguaggaaauacuuuauauuacguaaauaaacaagaaggacaaucucuauacguuaaaggcgaaccuauuauaaacuucuacgacccacucguauucccuucagacgaauuugacgcaucuauaucccaaguuaacgaaaaaaucaaccaaucauuagccuuuauaagaaaauccgacgaauuauuacauaacgucaacgcuggaaaaucaacaacuaacauaaugauaaccacaauaauaauagucaucauaguuauauuacuaagucuaauagccguaggccuccuacuuuauugcaaagcaagaucaacaccaguaacauuauccaaagaccaacucagcggcauaaacaauauagcuuuuucaaacuagggacuaguguccaccugucccuccugggcugcuggauugucucguuuuccugccaaauaaacaggaucagcgcuuuacagaucuaaaaaaaaaaaaaaaaaaaaaaaaaaaaaaaaaaaaaaaaaaaaaaaaaaaaaaaaaaaaaaaaugcaucccccccccccccccccccccccccccccccaaaggcucuuuucagagccaccagaauu

SEQ ID NO: 6264 - RNA, 1943 nt, Artificial Sequence
  mRNA product Design e-4 comprising derived and/or modified sequence from HRSV(A2)__F_DSCav1_mut6 (opt11)
gggagacuccugucgggcggaaguaggaggaguagaguuuaaaaacaguacucuuuuuccgguucgggacguaguugaagcaacgacaagccggauaaccgcucuugagacaggaagcuuaccauggaacuccucauccucaaagccaacgcaaucacaaccauacuaacugcaguuacuuucugcuucgcauccggccaaaacaucaccgaagaguucuaccaaucaaccugcuccgcagucuccaaaggauaccucggagcccuucgcaccggcugguacaccuccgucauaaccaucgaacucucaaacauaaaagaaaacaaaugcaacggcacagacgcgaaagucaaacuuaucaaacaagaacucgacaaauacaaaaacgccgucaccgaccugcagaugcucaugugcucaacccccgccacaggaagcggcucugcuaucgcuuccggcgucgccgucugcaaaguccuccaccucgaaggcgaaguaaacaaaaucaagucagcccuccucuccaccaacaaagccgucgucucucucucaaacggcguauccguccucacauucaaaguccucgaccucaaaaacuacaucgacaaacaacuucuccccauccuaaacaaacaaucaugcuccauccccaaccccgaaacagucauggaauuucaacaaaagaacaaccgccucuuagaaaucacccgagaauuuuccgucaacgcgggagucacaacccccguuucuacguauaugcucaccaacuccgaacuccuuucccucauaaacgacaugccaaucaccaacgaccaaaagaaacucaugucaaacaacguccaaaucguccgacaacaauccuacucuauuaugugcaucaucaaagaagaaguucucgccuacgucguccaacuaccccucuacggcgugaucgacacccccugcuggaaacuacacaccucaccccucugcaccaccaacaccaaggaaggcuccaacaucugccucacccgcaccgaccgcggcugguacugcgacaacgcuggcuccgucucauucuucccgcaagccgaaacuugcaaaguaugcuccaacagaguauucugcgacaccaugaacucacuaacccucccuuccgaagucaaccuuugcaacguugacauauucaacccaaaguacgauugcaaaauuaugacauccaaaacagaugucuccuccuccgucaucacaucccucggugccauuguaucaugcuacggaaaaaccaaaugcaccgcauccaacaaaaacaaaggaaucaucaaaaccuucucaaacggcugcgauuacgucucaaacaaaggagucgacacagucuccgucggaaacacccuauacuacgucaacaaacaagaaggccaaucccuguacgucaaaggagaacccaucaucaacuucuacgacccccucgucuucccgagcgacgaguucgacgccuccaucucacaagucaaugaaaagaucaaccaaucccuugccuucauccggaaaucggacgaacuccuacacaacgugaacgcuggaaaaucaaccaccaacaucaugaucacaaccaucauuaucgucaucaucgucauacuccucucccuaaucgccgucggccuccuccuguauugcaaagcucgcuccacccccgucacccuguccaaagaccaacucuccggaaucaacaacaucgccuucucaaacuaaggacuaguguccaccugucccuccugggcugcuggauugucucguuuuccugccaaauaaacaggaucagcgcuuuacagaucuaaaaaaaaaaaaaaaaaaaaaaaaaaaaaaaaaaaaaaaaaaaaaaaaaaaaaaaaaaaaaaaaugcaucccccccccccccccccccccccccccccccaaaggcucuuuucagagccaccagaauu

SEQ ID NO: 6265 - RNA, 1910 nt, Artificial Sequence
  mRNA product Design e-5 comprising derived and/or modified sequence from HRSV(A2)__F_DSCav1_mut6 (opt1)
gggagagcggcucggccauuuugucccagucaguccggaggcugcggcugcagaaguaccgccugcggaguaacugcaaagaagcuuaccauggagcugcucauccugaaggccaacgccaucaccaccauccugacggcggugaccuucugcuucgccagcggccagaacaucaccgaggaguucuaccaguccacgugcagcgccgucuccaagggguaccucggcgcccugcggaccggcugguacaccuccgugaucaccaucgagcugagcaacaucaaggagaacaagugcaacgggaccgacgccaaggugaagcucaucaagcaggagcuggacaaguacaagaacgcggucacggaccugcagaugcugaugugcuccaccccggcaaccggcuccggcuccgccaucgcgagcggcgucgccgugugcaaggugcugcaccucgagggggaggucaacaagaucaagagcgcccugcuguccaccaacaaggccguggugagccucuccaacggcgucagcgugcugaccuucaaggugcuggaccucaagaacuacaucgacaagcagcugcugcccauccugaacaagcagagcugcuccauccccaaccccgagacggugauggaguuccagcagaagaacaaccggcuccuggagaucacccgcgaguucagcgugaacgccggggucaccacccccguguccacguacaugcugaccaacagcgagcuccugucccugaucaacgacaugccgaucaccaacgaccagaagaagcucaugagcaacaacgugcagaucguccggcagcaguccuacagcaucaugugcaucaucaaggaggaggugcuggcguacgugguccagcugccccucuacggcgugaucgacacccccugcuggaagcugcacacgagcccccugugcaccaccaacaccaaggagggguccaacaucugccucacgcgcaccgaccggggcugguacugcgacaacgccggcagcgucuccuucuucccgcaggccgagaccugcaaggugugcagcaaccgcguguucugcgacaccaugaacucccugacgcugcccagcgagguaaaccucugcaacgucgacaucuucaaccccaaguacgacugcaagaucaugaccuccaagaccgacgugagcuccagcgugaucaccucccugggggccaucgucagcugcuacggcaagacgaagugcaccgccagcaacaagaacaaggggaucaucaagaccuucuccaacggcugcgacuacgugagcaacaagggcguggacaccguguccgucgggaacacccuguacuacgugaacaagcaggagggccagagccucuacgugaagggggagcccaucaucaacuucuacgacccgcuggucuuccccuccgacgaguucgacgcgagcaucucccaggugaacgagaagaucaaccagagccuggccuucauccgcaaguccgacgagcugcuccacaacgugaacgccggcaagagcacgaccaacaucaugaucaccaccaucaucaucgucaucaucgugauccugcugucccucaucgccguggggcugcugcucuacugcaaggcccggagcacgcccgucacccuguccaaggaccagcugagcggcaucaacaacaucgcguucuccaacugaggacuaguguccaccugucccuccugggcugcuggauugucucguuuuccugccaaauaaacaggaucagcgcuuuacagaucuaaaaaaaaaaaaaaaaaaaaaaaaaaaaaaaaaaaaaaaaaaaaaaaaaaaaaaaaaaaaaaaaugcaucccccccccccccccccccccccccccccccaaaggcucuuuucagagccaccagaauu

SEQ ID NO: 6266 - RNA, 1910 nt, Artificial Sequence
  mRNA product Design e-5 comprising derived and/or modified sequence from HRSV(A2)__F_DSCav1_mut6 (opt1)
gggagagcggcucggccauuuugucccagucaguccggaggcugcggcugcagaaguaccgccugcggaguaacugcaaagaagcuuaccauggagcugcucauccugaaggccaacgccaucaccaccauccugacggcggugaccuucugcuucgccagcggccagaacaucaccgaggaguucuaccaguccacgugcagcgccgucuccaagggguaccucggcgcccugcgcaccgggugguacaccagcgugaucaccaucgagcuguccaacaucaaggagaacaagugcaacggcaccgacgccaaggugaagcucaucaagcaggagcuggacaaguacaagaacgcggucacggaccugcagaugcucaugugcagcacccccgccaccggguccggcagcgccaucgccuccggcguggcggugugcaagguccugcaccuggagggggaggugaacaagaucaagagcgcccuccuguccaccaacaaggccguggucagccuguccaacggcgugagcgugcucacguucaagguccuggaccugaagaacuacaucgacaagcagcuccugccgauccugaacaagcaguccugcagcauccccaaccccgagaccgugauggaguuccagcagaagaacaaccggcuccuggagaucacccgcgaguucuccgugaacgccggggucaccacgcccgugagcaccuacaugcugaccaacuccgagcuccugagccugaucaacgacaugccgaucaccaacgaccagaagaagcucaugagcaacaacgugcagaucguccggcagcaguccuacagcaucaugugcaucaucaaggaggaggugcuggccuacgugguccagcugccccucuacggcgugaucgacacgcccugcuggaagcugcacaccagcccccugugcaccaccaacacgaaggaggggagcaacaucugccucacccgcaccgaccggggcugguacugcgacaacgcgggcuccgugagcuucuucccgcaggccgagaccugcaaggucugcuccaaccgcguguucugcgacacgaugaacagccugacccugcccuccgaggucaaccucugcaacguggacaucuucaaccccaaguacgacugcaagaucaugaccagcaagaccgacguguccagcuccgucaucacgagccugggggccaucguguccugcuacggcaagaccaagugcaccgccagcaacaagaacaaggggaucaucaagaccuucuccaacggcugcgacuacgugagcaacaagggcgucgacacgguguccguggggaacacccuguacuacgucaacaagcaggagggccagagccucuacgugaagggggagcccaucaucaacuucuacgacccgcugguguuccccagcgacgaguucgacgccuccaucagccaggucaacgagaagaucaaccagucccuggcguucauccggaaguccgacgagcuccugcacaacgugaacgccggcaaguccaccaccaacaucaugaucaccacgaucaucaucgugaucaucgucauccugcucagccugaucgccguggggcugcuccuguacugcaaggcccgcuccacccccgugacccugagcaaggaccagcuguccggcaucaacaacaucgccuucagcaacugaggacuaguguccaccugucccuccugggcugcuggauugucucguuuuccugccaaauaaacaggaucagcgcuuuacagaucuaaaaaaaaaaaaaaaaaaaaaaaaaaaaaaaaaaaaaaaaaaaaaaaaaaaaaaaaaaaaaaaaugcaucccccccccccccccccccccccccccccccaaaggcucuuuucagagccaccagaauu

SEQ ID NO: 6267 - RNA, 1910 nt, Artificial Sequence
  mRNA product Design e-5 comprising derived and/or modified sequence from HRSV(A2)__F_DSCav1_mut6 (opt2)
gggagagcggcucggccauuuugucccagucaguccggaggcugcggcugcagaaguaccgccugcggaguaacugcaaagaagcuuaccauggagcuccucauccucaaggccaacgccaucaccaccauccucaccgccgucaccuucugcuucgccuccggccagaacaucaccgaggaguucuaccaguccaccugcuccgccgucuccaagggcuaccucggcgcccuccgcaccggcugguacaccuccgucaucaccaucgagcucuccaacaucaaggagaacaagugcaacggcaccgacgccaaggucaagcucaucaagcaggagcucgacaaguacaagaacgccgucaccgaccuccagaugcucaugugcuccacccccgccaccggcuccggcuccgccaucgccuccggcgucgccgucugcaagguccuccaccucgagggcgaggucaacaagaucaaguccgcccuccucuccaccaacaaggccgucgucucccucuccaacggcgucuccguccucaccuucaagguccucgaccucaagaacuacaucgacaagcagcuccuccccauccucaacaagcaguccugcuccauccccaaccccgagaccgucauggaguuccagcagaagaacaaccgccuccucgagaucacccgcgaguucuccgucaacgccggcgucaccacccccgucuccaccuacaugcucaccaacuccgagcuccucucccucaucaacgacaugcccaucaccaacgaccagaagaagcucauguccaacaacguccagaucguccgccagcaguccuacuccaucaugugcaucaucaaggaggagguccucgccuacgucguccagcucccccucuacggcgucaucgacacccccugcuggaagcuccacaccuccccccucugcaccaccaacaccaaggagggcuccaacaucugccucacccgcaccgaccgcggcugguacugcgacaacgccggcuccgucuccuucuucccccaggccgagaccugcaaggucugcuccaaccgcgucuucugcgacaccaugaacucccucacccuccccuccgaggucaaccucugcaacgucgacaucuucaaccccaaguacgacugcaagaucaugaccuccaagaccgacgucuccuccuccgucaucaccucccucggcgccaucgucuccugcuacggcaagaccaagugcaccgccuccaacaagaacaagggcaucaucaagaccuucuccaacggcugcgacuacgucuccaacaagggcgucgacaccgucuccgucggcaacacccucuacuacgucaacaagcaggagggccagucccucuacgucaagggcgagcccaucaucaacuucuacgacccccucgucuuccccuccgacgaguucgacgccuccaucucccaggucaacgagaagaucaaccagucccucgccuucauccgcaaguccgacgagcuccuccacaacgucaacgccggcaaguccaccaccaacaucaugaucaccaccaucaucaucgucaucaucgucauccuccucucccucaucgccgucggccuccuccucuacugcaaggcccgcuccacccccgucacccucuccaaggaccagcucuccggcaucaacaacaucgccuucuccaacugaggacuaguguccaccugucccuccugggcugcuggauugucucguuuuccugccaaauaaacaggaucagcgcuuuacagaucuaaaaaaaaaaaaaaaaaaaaaaaaaaaaaaaaaaaaaaaaaaaaaaaaaaaaaaaaaaaaaaaaugcaucccccccccccccccccccccccccccccccaaaggcucuuuucagagccaccagaauu

SEQ ID NO: 6268 - RNA, 1910 nt, Artificial Sequence
  mRNA product Design e-5 comprising derived and/or modified sequence from HRSV(A2)__F_DSCav1_mut6 (opt3)
gggagagcggcucggccauuuugucccagucaguccggaggcugcggcugcagaaguaccgccugcggaguaacugcaaagaagcuuaccauggagcugcucauccuuaaggccaacgcuauuaccacaauacugacugcagugacguucugcuuugccagcggccagaauaucaccgaagaguucuaccaauccacauguucugcggucucaaaaggguauuugggagcuuuaagaacugguugguacaccaguguuauuacaaucgaacugagcaacauuaaggagaauaaaugcaacggcaccgacgccaaggugaaacuaaucaagcaggaacucgauaaguauaaaaaugcaguaacugaccugcagaugcuuauguguuccacacccgccaccgggucuggaucggcuauagcaucaggcguggccgucugcaaggugcugcacuuggagggugagguuaacaaaaucaagagcgcucuccugaguacgaauaaagccguggucucccugucuaacggggugagcguacucacuuuuaagguuuuagaucugaagaauuacauugacaaacagcuuuugccuauccugaacaagcaauccuguucaauuccaaauccggaaaccgugauggaguuccagcagaaaaacaauaggcuacucgaaaucacacgggaguuuagugucaacgcgggagugacuacccccgugagcacauauaugcugaccaauucugagcuucuguccuugauaaacgauaugccuauuacgaacgaccagaagaaacucaugucaaauaacguccaaaucguucgccagcagagcuacaguauuaugugcaucaucaaggaagaggugcuggcauauguagugcaguuaccacuguacggcgucauugauacucccuguuggaaacuccauacaucuccucuuugcaccacuaauacaaaggaaggcuccaacauaugucugacccgaacggaccgugggugguacugcgauaaugccggaagcgugucguucuuuccacaagcugagaccuguaagguuugcucuaacagaguguucugcgacacaaugaacuccuugacucuacccucagaagucaaucuguguaauguggauaucuuuaacccuaaauaugacugcaagauuaugaccaguaaaacagauguaagcuccucuguuaucacuagccucggugccauagugucauguuacggcaagaccaaaugcacagcaaguaauaagaacaaggggauuaucaaaaccuucuccaauggaugugacuaugucagcaacaagggcguggacacugucucuguggguaauacgcuguacuauguuaacaaacaggaggggcagucacuuuacgugaagggagagccaaucauuaacuuuuaugauccgcugguauuccccagugacgaauuugaugcuagcaucucccaagucaaugagaaaauuaaccagucuuuggccuucauaaggaagucggacgaacuccugcacaaugugaacgcgggcaagagcacaaccaauaucaugauuacuaccaucaucauuguuauaaucgugauuuuacugucccuaaucgccgucggccuccugcuuuacugcaaagcacggucaacaccugugaccuugaguaaggaucagcugucugggauuaacaauaucgcuuucagcaacugaggacuaguguccaccugucccuccugggcugcuggauugucucguuuuccugccaaauaaacaggaucagcgcuuuacagaucuaaaaaaaaaaaaaaaaaaaaaaaaaaaaaaaaaaaaaaaaaaaaaaaaaaaaaaaaaaaaaaaaugcaucccccccccccccccccccccccccccccccaaaggcucuuuucagagccaccagaauu

SEQ ID NO: 6269 - RNA, 1910 nt, Artificial Sequence
  mRNA product Design e-5 comprising derived and/or modified sequence from HRSV(A2)__F_DSCav1_mut6 (opt4)
gggagagcggcucggccauuuugucccagucaguccggaggcugcggcugcagaaguaccgccugcggaguaacugcaaagaagcuuaccauggagcugcugauccugaaggccaacgccaucaccaccauccugaccgccgugaccuucugcuucgccagcggccagaacaucaccgaggaguucuaccagagcaccugcagcgccgugagcaagggcuaccugggcgcccugagaaccggcugguacaccagcgugaucaccaucgagcugagcaacaucaaggagaacaagugcaacggcaccgacgccaaggugaagcugaucaagcaggagcuggacaaguacaagaacgccgugaccgaccugcagaugcugaugugcagcacccccgccaccggcagcggcagcgccaucgccagcggcguggccgugugcaaggugcugcaccuggagggcgaggugaacaagaucaagagcgcccugcugagcaccaacaaggccguggugagccugagcaacggcgugagcgugcugaccuucaaggugcuggaccugaagaacuacaucgacaagcagcugcugcccauccugaacaagcagagcugcagcauccccaaccccgagaccgugauggaguuccagcagaagaacaacagacugcuggagaucaccagagaguucagcgugaacgccggcgugaccacccccgugagcaccuacaugcugaccaacagcgagcugcugagccugaucaacgacaugcccaucaccaacgaccagaagaagcugaugagcaacaacgugcagaucgugagacagcagagcuacagcaucaugugcaucaucaaggaggaggugcuggccuacguggugcagcugccccuguacggcgugaucgacacccccugcuggaagcugcacaccagcccccugugcaccaccaacaccaaggagggcagcaacaucugccugaccagaaccgacagaggcugguacugcgacaacgccggcagcgugagcuucuucccccaggccgagaccugcaaggugugcagcaacagaguguucugcgacaccaugaacagccugacccugcccagcgaggugaaccugugcaacguggacaucuucaaccccaaguacgacugcaagaucaugaccagcaagaccgacgugagcagcagcgugaucaccagccugggcgccaucgugagcugcuacggcaagaccaagugcaccgccagcaacaagaacaagggcaucaucaagaccuucagcaacggcugcgacuacgugagcaacaagggcguggacaccgugagcgugggcaacacccuguacuacgugaacaagcaggagggccagagccuguacgugaagggcgagcccaucaucaacuucuacgacccccugguguuccccagcgacgaguucgacgccagcaucagccaggugaacgagaagaucaaccagagccuggccuucaucagaaagagcgacgagcugcugcacaacgugaacgccggcaagagcaccaccaacaucaugaucaccaccaucaucaucgugaucaucgugauccugcugagccugaucgccgugggccugcugcuguacugcaaggccagaagcacccccgugacccugagcaaggaccagcugagcggcaucaacaacaucgccuucagcaacugaggacuaguguccaccugucccuccugggcugcuggauugucucguuuuccugccaaauaaacaggaucagcgcuuuacagaucuaaaaaaaaaaaaaaaaaaaaaaaaaaaaaaaaaaaaaaaaaaaaaaaaaaaaaaaaaaaaaaaaugcaucccccccccccccccccccccccccccccccaaaggcucuuuucagagccaccagaauu

SEQ ID NO: 6270 - RNA, 1910 nt, Artificial Sequence
  mRNA product Design e-5 comprising derived and/or modified sequence from HRSV(A2)__F_DSCav1_mut6 (opt5)
gggagagcggcucggccauuuugucccagucaguccggaggcugcggcugcagaaguaccgccugcggaguaacugcaaagaagcuuaccauggagcugcucauccugaaggccaacgcuauuaccacaauccuuacggccgugaccuucugcuuugcgagcggccagaauauuacagaagaguucuaccaauccaccuguucugcugucagcaaaggguaucugggagcccucagaacaggcugguacaccuccguuaucacaauugaacugucuaacaucaaggagaauaaaugcaacgggaccgacgccaaggugaaacuuaucaagcaggaacuggauaaguauaaaaaugcugugacggaccuccagaugcugauguguagcacccccgccacaggauccggcucugcuauugccagcggggucgcggugugcaagguucugcaccucgagggagaggugaacaaaaucaaguccgcccugcuuagcaccaauaaagcugucgugucucuguccaacggcguuagcgugcucacauuuaagguccuggaucuuaagaauuacauugacaaacagcugcucccuauccugaacaagcaaucuuguuccauuccgaaucccgaaaccgugauggaguuccagcagaaaaacaaucggcugcucgaaaucacgcgcgaguuuagcgugaacgccggcgucacaaccccuguuucuacauauaugcugaccaauuccgagcuucugagccucauuaacgauaugcccaucaccaacgaccagaagaaacugauguccaauaacgugcaaaucgugagacagcagucuuacagcauuaugugcaucauuaaggaagagguccuugcuuaugugguucagcugccucucuacggggugaucgauacacccuguuggaaacugcauacguccccucugugcaccacaaauaccaaggaaggaagcaacauuugucucacacggaccgaccgcggcugguacugcgauaaugccgggucugucuccuucuuuccgcaagcggagacguguaaggugugcagcaacagaguuuucugcgacacaaugaacucucugacccuucccagcgaagugaaucuguguaaugucgauaucuuuaacccuaaauaugacugcaagaucaugaccuccaaaacagaugugucuagcuccgucauuaccagccucggagccaucgugucuuguuacggcaagacaaaaugcacggcuuccaauaagaacaaggggauuaucaaaaccuucagcaauggaugugacuauguuucuaacaagggcguggacacagucuccgugggcaauacccuguacuauguuaacaaacaggaggggcagagccuuuacgugaagggagagcccauuaucaacuuuuaugauccucuggucuuccccuccgacgaauuugaugccucuaucagccaagugaaugagaaaauuaaccagucccucgcuuucauccggaagucugacgaacugcugcacaaugugaacgccggcaagagcacaaccaauauuaugaucacgaccauuaucauuguuaucaucgucauucuccugucccuuaucgccguggggcugcuccuguacugcaaagcucgcagcacaccggugacccugucuaaggaucagcuuuccggaauuaacaauaucgcguucagcaacugaggacuaguguccaccugucccuccugggcugcuggauugucucguuuuccugccaaauaaacaggaucagcgcuuuacagaucuaaaaaaaaaaaaaaaaaaaaaaaaaaaaaaaaaaaaaaaaaaaaaaaaaaaaaaaaaaaaaaaaugcaucccccccccccccccccccccccccccccccaaaggcucuuuucagagccaccagaauu

SEQ ID NO: 6271 - RNA, 1910 nt, Artificial Sequence
  mRNA product Design e-5 comprising derived and/or modified sequence from HRSV(A2)__F_DSCav1_mut6 (opt6)
gggagagcggcucggccauuuugucccagucaguccggaggcugcggcugcagaaguaccgccugcggaguaacugcaaagaagcuuaccauggaacuauuaaucuuaaaagcaaaugcuauaaccacaauauuaacagcaguaacauucuguuuugccuccggacaaaacauaacagaagaauuuuaucaaucaacaugcucugcaguauccaaagguuacuuaggcgcacuacgcacuggaugguauacaucaguaauaacaauagaacuaucaaacauaaaagaaaauaaauguaacgguacugacgcaaaagugaaacuaauuaaacaagaacucgacaaauacaaaaaugcuguaacagaccuacaaaugcuaaugugcucaacacccgcaaccggaucaggaucagccauagccuccggagucgcaguaugcaaaguauuacaucuugaaggagaaguaaauaaaauaaaaucagcauuacuauccacaaauaaagccguaguaucacuaucaaacgguguauccguccuuacauucaaaguauuagaucuaaaaaacuacauagauaaacaacuacuacccaucuuaaacaaacaaucaugcucaauucccaacccagaaacagucauggaauuucaacaaaaaaacaacagacucuuagaaauaacacgagaauuuucaguaaacgcaggaguaaccacaccaguaaguacauacaugcucaccaacucagaauuauuaucacuuauuaacgacaugccaauuacaaacgaccaaaaaaaauuaaugucaaacaauguccaaauuguuagacaacaaucauacucuauaauguguauaauaaaagaagaaguacuagcuuacguaguucaauuaccacuauauggcguaauagauacaccuugcuggaaacuacauacaucuccauuauguacaacuaacacaaaagaaggaucuaacauaugccuaacacgcacagaucgaggaugguacugcgauaaugcagguuccguaucauucuuuccacaagcagaaacauguaaaguaugcucaaacagaguauucugugacacuaugaacuccuuaacccuacccucagaagucaaucuaugcaacguugacauauuuaacccaaaauacgacuguaaaaucaugacaucuaaaacagacguaucaucaucaguuauuacaucccuaggagcaauaguaucuugcuacggaaaaacaaaauguacagcauccaacaaaaacaaaggaauaaucaaaacauucucaaacggcugcgacuacguaucaaacaaagguguagacacaguaucaguaggaaauacuuuauauuacguaaauaaacaagaaggacaaucucuauacguuaaaggcgaaccuauuauaaacuucuacgacccacucguauucccuucagacgaauuugacgcaucuauaucccaaguuaacgaaaaaaucaaccaaucauuagccuuuauaagaaaauccgacgaauuauuacauaacgucaacgcuggaaaaucaacaacuaacauaaugauaaccacaauaauaauagucaucauaguuauauuacuaagucuaauagccguaggccuccuacuuuauugcaaagcaagaucaacaccaguaacauuauccaaagaccaacucagcggcauaaacaauauagcuuuuucaaacuagggacuaguguccaccugucccuccugggcugcuggauugucucguuuuccugccaaauaaacaggaucagcgcuuuacagaucuaaaaaaaaaaaaaaaaaaaaaaaaaaaaaaaaaaaaaaaaaaaaaaaaaaaaaaaaaaaaaaaaugcaucccccccccccccccccccccccccccccccaaaggcucuuuucagagccaccagaauu

SEQ ID NO: 6272 - RNA, 1910 nt, Artificial Sequence
  mRNA product Design e-5 comprising derived and/or modified sequence from HRSV(A2)__F_DSCav1_mut6 (opt11)
gggagagcggcucggccauuuugucccagucaguccggaggcugcggcugcagaaguaccgccugcggaguaacugcaaagaagcuuaccauggaacuccucauccucaaagccaacgcaaucacaaccauacuaacugcaguuacuuucugcuucgcauccggccaaaacaucaccgaagaguucuaccaaucaaccugcuccgcagucuccaaaggauaccucggagcccuucgcaccggcugguacaccuccgucauaaccaucgaacucucaaacauaaaagaaaacaaaugcaacggcacagacgcgaaagucaaacuuaucaaacaagaacucgacaaauacaaaaacgccgucaccgaccugcagaugcucaugugcucaacccccgccacaggaagcggcucugcuaucgcuuccggcgucgccgucugcaaaguccuccaccucgaaggcgaaguaaacaaaaucaagucagcccuccucuccaccaacaaagccgucgucucucucucaaacggcguauccguccucacauucaaaguccucgaccucaaaaacuacaucgacaaacaacuucuccccauccuaaacaaacaaucaugcuccauccccaaccccgaaacagucauggaauuucaacaaaagaacaaccgccucuuagaaaucacccgagaauuuuccgucaacgcgggagucacaacccccguuucuacguauaugcucaccaacuccgaacuccuuucccucauaaacgacaugccaaucaccaacgaccaaaagaaacucaugucaaacaacguccaaaucguccgacaacaauccuacucuauuaugugcaucaucaaagaagaaguucucgccuacgucguccaacuaccccucuacggcgugaucgacacccccugcuggaaacuacacaccucaccccucugcaccaccaacaccaaggaaggcuccaacaucugccucacccgcaccgaccgcggcugguacugcgacaacgcuggcuccgucucauucuucccgcaagccgaaacuugcaaaguaugcuccaacagaguauucugcgacaccaugaacucacuaacccucccuuccgaagucaaccuuugcaacguugacauauucaacccaaaguacgauugcaaaauuaugacauccaaaacagaugucuccuccuccgucaucacaucccucggugccauuguaucaugcuacggaaaaaccaaaugcaccgcauccaacaaaaacaaaggaaucaucaaaaccuucucaaacggcugcgauuacgucucaaacaaaggagucgacacagucuccgucggaaacacccuauacuacgucaacaaacaagaaggccaaucccuguacgucaaaggagaacccaucaucaacuucuacgacccccucgucuucccgagcgacgaguucgacgccuccaucucacaagucaaugaaaagaucaaccaaucccuugccuucauccggaaaucggacgaacuccuacacaacgugaacgcuggaaaaucaaccaccaacaucaugaucacaaccaucauuaucgucaucaucgucauacuccucucccuaaucgccgucggccuccuccuguauugcaaagcucgcuccacccccgucacccuguccaaagaccaacucuccggaaucaacaacaucgccuucucaaacuaaggacuaguguccaccugucccuccugggcugcuggauugucucguuuuccugccaaauaaacaggaucagcgcuuuacagaucuaaaaaaaaaaaaaaaaaaaaaaaaaaaaaaaaaaaaaaaaaaaaaaaaaaaaaaaaaaaaaaaaugcaucccccccccccccccccccccccccccccccaaaggcucuuuucagagccaccagaauu

SEQ ID NO: 6273 - RNA, 1977 nt, Artificial Sequence
  mRNA product Design e-6 comprising derived and/or modified sequence from HRSV(A2)__F_DSCav1_mut6 (opt1)
gggagagcggcucggccauuuugucccagucaguccggaggcugcggcugcagaaguaccgccugcggaguaacugcaaagaagcuuaccauggagcugcucauccugaaggccaacgccaucaccaccauccugacggcggugaccuucugcuucgccagcggccagaacaucaccgaggaguucuaccaguccacgugcagcgccgucuccaagggguaccucggcgcccugcggaccggcugguacaccuccgugaucaccaucgagcugagcaacaucaaggagaacaagugcaacgggaccgacgccaaggugaagcucaucaagcaggagcuggacaaguacaagaacgcggucacggaccugcagaugcugaugugcuccaccccggcaaccggcuccggcuccgccaucgcgagcggcgucgccgugugcaaggugcugcaccucgagggggaggucaacaagaucaagagcgcccugcuguccaccaacaaggccguggugagccucuccaacggcgucagcgugcugaccuucaaggugcuggaccucaagaacuacaucgacaagcagcugcugcccauccugaacaagcagagcugcuccauccccaaccccgagacggugauggaguuccagcagaagaacaaccggcuccuggagaucacccgcgaguucagcgugaacgccggggucaccacccccguguccacguacaugcugaccaacagcgagcuccugucccugaucaacgacaugccgaucaccaacgaccagaagaagcucaugagcaacaacgugcagaucguccggcagcaguccuacagcaucaugugcaucaucaaggaggaggugcuggcguacgugguccagcugccccucuacggcgugaucgacacccccugcuggaagcugcacacgagcccccugugcaccaccaacaccaaggagggguccaacaucugccucacgcgcaccgaccggggcugguacugcgacaacgccggcagcgucuccuucuucccgcaggccgagaccugcaaggugugcagcaaccgcguguucugcgacaccaugaacucccugacgcugcccagcgagguaaaccucugcaacgucgacaucuucaaccccaaguacgacugcaagaucaugaccuccaagaccgacgugagcuccagcgugaucaccucccugggggccaucgucagcugcuacggcaagacgaagugcaccgccagcaacaagaacaaggggaucaucaagaccuucuccaacggcugcgacuacgugagcaacaagggcguggacaccguguccgucgggaacacccuguacuacgugaacaagcaggagggccagagccucuacgugaagggggagcccaucaucaacuucuacgacccgcuggucuuccccuccgacgaguucgacgcgagcaucucccaggugaacgagaagaucaaccagagccuggccuucauccgcaaguccgacgagcugcuccacaacgugaacgccggcaagagcacgaccaacaucaugaucaccaccaucaucaucgucaucaucgugauccugcugucccucaucgccguggggcugcugcucuacugcaaggcccggagcacgcccgucacccuguccaaggaccagcugagcggcaucaacaacaucgcguucuccaacugaggacuaguacuggcugcaucucccuuuccucuguccuccauccuucucccaggauggugaagggggaccugguacccagugauccccaccccaggauccuaaaucaugacuuaccugcuaauaaaaacucauuggaaaagugagaagaucuaaaaaaaaaaaaaaaaaaaaaaaaaaaaaaaaaaaaaaaaaaaaaaaaaaaaaaaaaaaaaaaaugcaucccccccccccccccccccccccccccccccaaaggcucuuuucagagccaccagaauu

SEQ ID NO: 6274 - RNA, 1977 nt, Artificial Sequence
  mRNA product Design e-6 comprising derived and/or modified sequence from HRSV(A2)__F_DSCav1_mut6 (opt1)
gggagagcggcucggccauuuugucccagucaguccggaggcugcggcugcagaaguaccgccugcggaguaacugcaaagaagcuuaccauggagcugcucauccugaaggccaacgccaucaccaccauccugacggcggugaccuucugcuucgccagcggccagaacaucaccgaggaguucuaccaguccacgugcagcgccgucuccaagggguaccucggcgcccugcgcaccgggugguacaccagcgugaucaccaucgagcuguccaacaucaaggagaacaagugcaacggcaccgacgccaaggugaagcucaucaagcaggagcuggacaaguacaagaacgcggucacggaccugcagaugcucaugugcagcacccccgccaccggguccggcagcgccaucgccuccggcguggcggugugcaagguccugcaccuggagggggaggugaacaagaucaagagcgcccuccuguccaccaacaaggccguggucagccuguccaacggcgugagcgugcucacguucaagguccuggaccugaagaacuacaucgacaagcagcuccugccgauccugaacaagcaguccugcagcauccccaaccccgagaccgugauggaguuccagcagaagaacaaccggcuccuggagaucacccgcgaguucuccgugaacgccggggucaccacgcccgugagcaccuacaugcugaccaacuccgagcuccugagccugaucaacgacaugccgaucaccaacgaccagaagaagcucaugagcaacaacgugcagaucguccggcagcaguccuacagcaucaugugcaucaucaaggaggaggugcuggccuacgugguccagcugccccucuacggcgugaucgacacgcccugcuggaagcugcacaccagcccccugugcaccaccaacacgaaggaggggagcaacaucugccucacccgcaccgaccggggcugguacugcgacaacgcgggcuccgugagcuucuucccgcaggccgagaccugcaaggucugcuccaaccgcguguucugcgacacgaugaacagccugacccugcccuccgaggucaaccucugcaacguggacaucuucaaccccaaguacgacugcaagaucaugaccagcaagaccgacguguccagcuccgucaucacgagccugggggccaucguguccugcuacggcaagaccaagugcaccgccagcaacaagaacaaggggaucaucaagaccuucuccaacggcugcgacuacgugagcaacaagggcgucgacacgguguccguggggaacacccuguacuacgucaacaagcaggagggccagagccucuacgugaagggggagcccaucaucaacuucuacgacccgcugguguuccccagcgacgaguucgacgccuccaucagccaggucaacgagaagaucaaccagucccuggcguucauccggaaguccgacgagcuccugcacaacgugaacgccggcaaguccaccaccaacaucaugaucaccacgaucaucaucgugaucaucgucauccugcucagccugaucgccguggggcugcuccuguacugcaaggcccgcuccacccccgugacccugagcaaggaccagcuguccggcaucaacaacaucgccuucagcaacugaggacuaguacuggcugcaucucccuuuccucuguccuccauccuucucccaggauggugaagggggaccugguacccagugauccccaccccaggauccuaaaucaugacuuaccugcuaauaaaaacucauuggaaaagugagaagaucuaaaaaaaaaaaaaaaaaaaaaaaaaaaaaaaaaaaaaaaaaaaaaaaaaaaaaaaaaaaaaaaaugcaucccccccccccccccccccccccccccccccaaaggcucuuuucagagccaccagaauu

SEQ ID NO: 6275 - RNA, 1977 nt, Artificial Sequence
  mRNA product Design e-6 comprising derived and/or modified sequence from HRSV(A2)__F_DSCav1_mut6 (opt2)
gggagagcggcucggccauuuugucccagucaguccggaggcugcggcugcagaaguaccgccugcggaguaacugcaaagaagcuuaccauggagcuccucauccucaaggccaacgccaucaccaccauccucaccgccgucaccuucugcuucgccuccggccagaacaucaccgaggaguucuaccaguccaccugcuccgccgucuccaagggcuaccucggcgcccuccgcaccggcugguacaccuccgucaucaccaucgagcucuccaacaucaaggagaacaagugcaacggcaccgacgccaaggucaagcucaucaagcaggagcucgacaaguacaagaacgccgucaccgaccuccagaugcucaugugcuccacccccgccaccggcuccggcuccgccaucgccuccggcgucgccgucugcaagguccuccaccucgagggcgaggucaacaagaucaaguccgcccuccucuccaccaacaaggccgucgucucccucuccaacggcgucuccguccucaccuucaagguccucgaccucaagaacuacaucgacaagcagcuccuccccauccucaacaagcaguccugcuccauccccaaccccgagaccgucauggaguuccagcagaagaacaaccgccuccucgagaucacccgcgaguucuccgucaacgccggcgucaccacccccgucuccaccuacaugcucaccaacuccgagcuccucucccucaucaacgacaugcccaucaccaacgaccagaagaagcucauguccaacaacguccagaucguccgccagcaguccuacuccaucaugugcaucaucaaggaggagguccucgccuacgucguccagcucccccucuacggcgucaucgacacccccugcuggaagcuccacaccuccccccucugcaccaccaacaccaaggagggcuccaacaucugccucacccgcaccgaccgcggcugguacugcgacaacgccggcuccgucuccuucuucccccaggccgagaccugcaaggucugcuccaaccgcgucuucugcgacaccaugaacucccucacccuccccuccgaggucaaccucugcaacgucgacaucuucaaccccaaguacgacugcaagaucaugaccuccaagaccgacgucuccuccuccgucaucaccucccucggcgccaucgucuccugcuacggcaagaccaagugcaccgccuccaacaagaacaagggcaucaucaagaccuucuccaacggcugcgacuacgucuccaacaagggcgucgacaccgucuccgucggcaacacccucuacuacgucaacaagcaggagggccagucccucuacgucaagggcgagcccaucaucaacuucuacgacccccucgucuuccccuccgacgaguucgacgccuccaucucccaggucaacgagaagaucaaccagucccucgccuucauccgcaaguccgacgagcuccuccacaacgucaacgccggcaaguccaccaccaacaucaugaucaccaccaucaucaucgucaucaucgucauccuccucucccucaucgccgucggccuccuccucuacugcaaggcccgcuccacccccgucacccucuccaaggaccagcucuccggcaucaacaacaucgccuucuccaacugaggacuaguacuggcugcaucucccuuuccucuguccuccauccuucucccaggauggugaagggggaccugguacccagugauccccaccccaggauccuaaaucaugacuuaccugcuaauaaaaacucauuggaaaagugagaagaucuaaaaaaaaaaaaaaaaaaaaaaaaaaaaaaaaaaaaaaaaaaaaaaaaaaaaaaaaaaaaaaaaugcaucccccccccccccccccccccccccccccccaaaggcucuuuucagagccaccagaauu

SEQ ID NO: 6276 - RNA, 1977 nt, Artificial Sequence
  mRNA product Design e-6 comprising derived and/or modified sequence from HRSV(A2)__F_DSCav1_mut6 (opt3)
gggagagcggcucggccauuuugucccagucaguccggaggcugcggcugcagaaguaccgccugcggaguaacugcaaagaagcuuaccauggagcugcucauccuuaaggccaacgcuauuaccacaauacugacugcagugacguucugcuuugccagcggccagaauaucaccgaagaguucuaccaauccacauguucugcggucucaaaaggguauuugggagcuuuaagaacugguugguacaccaguguuauuacaaucgaacugagcaacauuaaggagaauaaaugcaacggcaccgacgccaaggugaaacuaaucaagcaggaacucgauaaguauaaaaaugcaguaacugaccugcagaugcuuauguguuccacacccgccaccgggucuggaucggcuauagcaucaggcguggccgucugcaaggugcugcacuuggagggugagguuaacaaaaucaagagcgcucuccugaguacgaauaaagccguggucucccugucuaacggggugagcguacucacuuuuaagguuuuagaucugaagaauuacauugacaaacagcuuuugccuauccugaacaagcaauccuguucaauuccaaauccggaaaccgugauggaguuccagcagaaaaacaauaggcuacucgaaaucacacgggaguuuagugucaacgcgggagugacuacccccgugagcacauauaugcugaccaauucugagcuucuguccuugauaaacgauaugccuauuacgaacgaccagaagaaacucaugucaaauaacguccaaaucguucgccagcagagcuacaguauuaugugcaucaucaaggaagaggugcuggcauauguagugcaguuaccacuguacggcgucauugauacucccuguuggaaacuccauacaucuccucuuugcaccacuaauacaaaggaaggcuccaacauaugucugacccgaacggaccgugggugguacugcgauaaugccggaagcgugucguucuuuccacaagcugagaccuguaagguuugcucuaacagaguguucugcgacacaaugaacuccuugacucuacccucagaagucaaucuguguaauguggauaucuuuaacccuaaauaugacugcaagauuaugaccaguaaaacagauguaagcuccucuguuaucacuagccucggugccauagugucauguuacggcaagaccaaaugcacagcaaguaauaagaacaaggggauuaucaaaaccuucuccaauggaugugacuaugucagcaacaagggcguggacacugucucuguggguaauacgcuguacuauguuaacaaacaggaggggcagucacuuuacgugaagggagagccaaucauuaacuuuuaugauccgcugguauuccccagugacgaauuugaugcuagcaucucccaagucaaugagaaaauuaaccagucuuuggccuucauaaggaagucggacgaacuccugcacaaugugaacgcgggcaagagcacaaccaauaucaugauuacuaccaucaucauuguuauaaucgugauuuuacugucccuaaucgccgucggccuccugcuuuacugcaaagcacggucaacaccugugaccuugaguaaggaucagcugucugggauuaacaauaucgcuuucagcaacugaggacuaguacuggcugcaucucccuuuccucuguccuccauccuucucccaggauggugaagggggaccugguacccagugauccccaccccaggauccuaaaucaugacuuaccugcuaauaaaaacucauuggaaaagugagaagaucuaaaaaaaaaaaaaaaaaaaaaaaaaaaaaaaaaaaaaaaaaaaaaaaaaaaaaaaaaaaaaaaaugcaucccccccccccccccccccccccccccccccaaaggcucuuuucagagccaccagaauu

SEQ ID NO: 6277 - RNA, 1977 nt, Artificial Sequence
  mRNA product Design e-6 comprising derived and/or modified sequence from HRSV(A2)__F_DSCav1_mut6 (opt4)
gggagagcggcucggccauuuugucccagucaguccggaggcugcggcugcagaaguaccgccugcggaguaacugcaaagaagcuuaccauggagcugcugauccugaaggccaacgccaucaccaccauccugaccgccgugaccuucugcuucgccagcggccagaacaucaccgaggaguucuaccagagcaccugcagcgccgugagcaagggcuaccugggcgcccugagaaccggcugguacaccagcgugaucaccaucgagcugagcaacaucaaggagaacaagugcaacggcaccgacgccaaggugaagcugaucaagcaggagcuggacaaguacaagaacgccgugaccgaccugcagaugcugaugugcagcacccccgccaccggcagcggcagcgccaucgccagcggcguggccgugugcaaggugcugcaccuggagggcgaggugaacaagaucaagagcgcccugcugagcaccaacaaggccguggugagccugagcaacggcgugagcgugcugaccuucaaggugcuggaccugaagaacuacaucgacaagcagcugcugcccauccugaacaagcagagcugcagcauccccaaccccgagaccgugauggaguuccagcagaagaacaacagacugcuggagaucaccagagaguucagcgugaacgccggcgugaccacccccgugagcaccuacaugcugaccaacagcgagcugcugagccugaucaacgacaugcccaucaccaacgaccagaagaagcugaugagcaacaacgugcagaucgugagacagcagagcuacagcaucaugugcaucaucaaggaggaggugcuggccuacguggugcagcugccccuguacggcgugaucgacacccccugcuggaagcugcacaccagcccccugugcaccaccaacaccaaggagggcagcaacaucugccugaccagaaccgacagaggcugguacugcgacaacgccggcagcgugagcuucuucccccaggccgagaccugcaaggugugcagcaacagaguguucugcgacaccaugaacagccugacccugcccagcgaggugaaccugugcaacguggacaucuucaaccccaaguacgacugcaagaucaugaccagcaagaccgacgugagcagcagcgugaucaccagccugggcgccaucgugagcugcuacggcaagaccaagugcaccgccagcaacaagaacaagggcaucaucaagaccuucagcaacggcugcgacuacgugagcaacaagggcguggacaccgugagcgugggcaacacccuguacuacgugaacaagcaggagggccagagccuguacgugaagggcgagcccaucaucaacuucuacgacccccugguguuccccagcgacgaguucgacgccagcaucagccaggugaacgagaagaucaaccagagccuggccuucaucagaaagagcgacgagcugcugcacaacgugaacgccggcaagagcaccaccaacaucaugaucaccaccaucaucaucgugaucaucgugauccugcugagccugaucgccgugggccugcugcuguacugcaaggccagaagcacccccgugacccugagcaaggaccagcugagcggcaucaacaacaucgccuucagcaacugaggacuaguacuggcugcaucucccuuuccucuguccuccauccuucucccaggauggugaagggggaccugguacccagugauccccaccccaggauccuaaaucaugacuuaccugcuaauaaaaacucauuggaaaagugagaagaucuaaaaaaaaaaaaaaaaaaaaaaaaaaaaaaaaaaaaaaaaaaaaaaaaaaaaaaaaaaaaaaaaugcaucccccccccccccccccccccccccccccccaaaggcucuuuucagagccaccagaauu

SEQ ID NO: 6278 - RNA, 1977 nt, Artificial Sequence
  mRNA product Design e-6 comprising derived and/or modified sequence from HRSV(A2)__F_DSCav1_mut6 (opt5)
gggagagcggcucggccauuuugucccagucaguccggaggcugcggcugcagaaguaccgccugcggaguaacugcaaagaagcuuaccauggagcugcucauccugaaggccaacgcuauuaccacaauccuuacggccgugaccuucugcuuugcgagcggccagaauauuacagaagaguucuaccaauccaccuguucugcugucagcaaaggguaucugggagcccucagaacaggcugguacaccuccguuaucacaauugaacugucuaacaucaaggagaauaaaugcaacgggaccgacgccaaggugaaacuuaucaagcaggaacuggauaaguauaaaaaugcugugacggaccuccagaugcugauguguagcacccccgccacaggauccggcucugcuauugccagcggggucgcggugugcaagguucugcaccucgagggagaggugaacaaaaucaaguccgcccugcuuagcaccaauaaagcugucgugucucuguccaacggcguuagcgugcucacauuuaagguccuggaucuuaagaauuacauugacaaacagcugcucccuauccugaacaagcaaucuuguuccauuccgaaucccgaaaccgugauggaguuccagcagaaaaacaaucggcugcucgaaaucacgcgcgaguuuagcgugaacgccggcgucacaaccccuguuucuacauauaugcugaccaauuccgagcuucugagccucauuaacgauaugcccaucaccaacgaccagaagaaacugauguccaauaacgugcaaaucgugagacagcagucuuacagcauuaugugcaucauuaaggaagagguccuugcuuaugugguucagcugccucucuacggggugaucgauacacccuguuggaaacugcauacguccccucugugcaccacaaauaccaaggaaggaagcaacauuugucucacacggaccgaccgcggcugguacugcgauaaugccgggucugucuccuucuuuccgcaagcggagacguguaaggugugcagcaacagaguuuucugcgacacaaugaacucucugacccuucccagcgaagugaaucuguguaaugucgauaucuuuaacccuaaauaugacugcaagaucaugaccuccaaaacagaugugucuagcuccgucauuaccagccucggagccaucgugucuuguuacggcaagacaaaaugcacggcuuccaauaagaacaaggggauuaucaaaaccuucagcaauggaugugacuauguuucuaacaagggcguggacacagucuccgugggcaauacccuguacuauguuaacaaacaggaggggcagagccuuuacgugaagggagagcccauuaucaacuuuuaugauccucuggucuuccccuccgacgaauuugaugccucuaucagccaagugaaugagaaaauuaaccagucccucgcuuucauccggaagucugacgaacugcugcacaaugugaacgccggcaagagcacaaccaauauuaugaucacgaccauuaucauuguuaucaucgucauucuccugucccuuaucgccguggggcugcuccuguacugcaaagcucgcagcacaccggugacccugucuaaggaucagcuuuccggaauuaacaauaucgcguucagcaacugaggacuaguacuggcugcaucucccuuuccucuguccuccauccuucucccaggauggugaagggggaccugguacccagugauccccaccccaggauccuaaaucaugacuuaccugcuaauaaaaacucauuggaaaagugagaagaucuaaaaaaaaaaaaaaaaaaaaaaaaaaaaaaaaaaaaaaaaaaaaaaaaaaaaaaaaaaaaaaaaugcaucccccccccccccccccccccccccccccccaaaggcucuuuucagagccaccagaauu

SEQ ID NO: 6279 - RNA, 1977 nt, Artificial Sequence
  mRNA product Design e-6 comprising derived and/or modified sequence from HRSV(A2)__F_DSCav1_mut6 (opt6)
gggagagcggcucggccauuuugucccagucaguccggaggcugcggcugcagaaguaccgccugcggaguaacugcaaagaagcuuaccauggaacuauuaaucuuaaaagcaaaugcuauaaccacaauauuaacagcaguaacauucuguuuugccuccggacaaaacauaacagaagaauuuuaucaaucaacaugcucugcaguauccaaagguuacuuaggcgcacuacgcacuggaugguauacaucaguaauaacaauagaacuaucaaacauaaaagaaaauaaauguaacgguacugacgcaaaagugaaacuaauuaaacaagaacucgacaaauacaaaaaugcuguaacagaccuacaaaugcuaaugugcucaacacccgcaaccggaucaggaucagccauagccuccggagucgcaguaugcaaaguauuacaucuugaaggagaaguaaauaaaauaaaaucagcauuacuauccacaaauaaagccguaguaucacuaucaaacgguguauccguccuuacauucaaaguauuagaucuaaaaaacuacauagauaaacaacuacuacccaucuuaaacaaacaaucaugcucaauucccaacccagaaacagucauggaauuucaacaaaaaaacaacagacucuuagaaauaacacgagaauuuucaguaaacgcaggaguaaccacaccaguaaguacauacaugcucaccaacucagaauuauuaucacuuauuaacgacaugccaauuacaaacgaccaaaaaaaauuaaugucaaacaauguccaaauuguuagacaacaaucauacucuauaauguguauaauaaaagaagaaguacuagcuuacguaguucaauuaccacuauauggcguaauagauacaccuugcuggaaacuacauacaucuccauuauguacaacuaacacaaaagaaggaucuaacauaugccuaacacgcacagaucgaggaugguacugcgauaaugcagguuccguaucauucuuuccacaagcagaaacauguaaaguaugcucaaacagaguauucugugacacuaugaacuccuuaacccuacccucagaagucaaucuaugcaacguugacauauuuaacccaaaauacgacuguaaaaucaugacaucuaaaacagacguaucaucaucaguuauuacaucccuaggagcaauaguaucuugcuacggaaaaacaaaauguacagcauccaacaaaaacaaaggaauaaucaaaacauucucaaacggcugcgacuacguaucaaacaaagguguagacacaguaucaguaggaaauacuuuauauuacguaaauaaacaagaaggacaaucucuauacguuaaaggcgaaccuauuauaaacuucuacgacccacucguauucccuucagacgaauuugacgcaucuauaucccaaguuaacgaaaaaaucaaccaaucauuagccuuuauaagaaaauccgacgaauuauuacauaacgucaacgcuggaaaaucaacaacuaacauaaugauaaccacaauaauaauagucaucauaguuauauuacuaagucuaauagccguaggccuccuacuuuauugcaaagcaagaucaacaccaguaacauuauccaaagaccaacucagcggcauaaacaauauagcuuuuucaaacuagggacuaguacuggcugcaucucccuuuccucuguccuccauccuucucccaggauggugaagggggaccugguacccagugauccccaccccaggauccuaaaucaugacuuaccugcuaauaaaaacucauuggaaaagugagaagaucuaaaaaaaaaaaaaaaaaaaaaaaaaaaaaaaaaaaaaaaaaaaaaaaaaaaaaaaaaaaaaaaaugcaucccccccccccccccccccccccccccccccaaaggcucuuuucagagccaccagaauu

SEQ ID NO: 6280 - RNA, 1977 nt, Artificial Sequence
  mRNA product Design e-6 comprising derived and/or modified sequence from HRSV(A2)__F_DSCav1_mut6 (opt11)
gggagagcggcucggccauuuugucccagucaguccggaggcugcggcugcagaaguaccgccugcggaguaacugcaaagaagcuuaccauggaacuccucauccucaaagccaacgcaaucacaaccauacuaacugcaguuacuuucugcuucgcauccggccaaaacaucaccgaagaguucuaccaaucaaccugcuccgcagucuccaaaggauaccucggagcccuucgcaccggcugguacaccuccgucauaaccaucgaacucucaaacauaaaagaaaacaaaugcaacggcacagacgcgaaagucaaacuuaucaaacaagaacucgacaaauacaaaaacgccgucaccgaccugcagaugcucaugugcucaacccccgccacaggaagcggcucugcuaucgcuuccggcgucgccgucugcaaaguccuccaccucgaaggcgaaguaaacaaaaucaagucagcccuccucuccaccaacaaagccgucgucucucucucaaacggcguauccguccucacauucaaaguccucgaccucaaaaacuacaucgacaaacaacuucuccccauccuaaacaaacaaucaugcuccauccccaaccccgaaacagucauggaauuucaacaaaagaacaaccgccucuuagaaaucacccgagaauuuuccgucaacgcgggagucacaacccccguuucuacguauaugcucaccaacuccgaacuccuuucccucauaaacgacaugccaaucaccaacgaccaaaagaaacucaugucaaacaacguccaaaucguccgacaacaauccuacucuauuaugugcaucaucaaagaagaaguucucgccuacgucguccaacuaccccucuacggcgugaucgacacccccugcuggaaacuacacaccucaccccucugcaccaccaacaccaaggaaggcuccaacaucugccucacccgcaccgaccgcggcugguacugcgacaacgcuggcuccgucucauucuucccgcaagccgaaacuugcaaaguaugcuccaacagaguauucugcgacaccaugaacucacuaacccucccuuccgaagucaaccuuugcaacguugacauauucaacccaaaguacgauugcaaaauuaugacauccaaaacagaugucuccuccuccgucaucacaucccucggugccauuguaucaugcuacggaaaaaccaaaugcaccgcauccaacaaaaacaaaggaaucaucaaaaccuucucaaacggcugcgauuacgucucaaacaaaggagucgacacagucuccgucggaaacacccuauacuacgucaacaaacaagaaggccaaucccuguacgucaaaggagaacccaucaucaacuucuacgacccccucgucuucccgagcgacgaguucgacgccuccaucucacaagucaaugaaaagaucaaccaaucccuugccuucauccggaaaucggacgaacuccuacacaacgugaacgcuggaaaaucaaccaccaacaucaugaucacaaccaucauuaucgucaucaucgucauacuccucucccuaaucgccgucggccuccuccuguauugcaaagcucgcuccacccccgucacccuguccaaagaccaacucuccggaaucaacaacaucgccuucucaaacuaaggacuaguacuggcugcaucucccuuuccucuguccuccauccuucucccaggauggugaagggggaccugguacccagugauccccaccccaggauccuaaaucaugacuuaccugcuaauaaaaacucauuggaaaagugagaagaucuaaaaaaaaaaaaaaaaaaaaaaaaaaaaaaaaaaaaaaaaaaaaaaaaaaaaaaaaaaaaaaaaugcaucccccccccccccccccccccccccccccccaaaggcucuuuucagagccaccagaauu

SEQ ID NO: 6281 - RNA, 2193 nt, Artificial Sequence
  mRNA product Design f-1 comprising derived and/or modified sequence from HRSV(A2)__F_DSCav1_mut6 (opt1)
gggagagcggcucggccauuuugucccagucaguccggaggcugcggcugcagaaguaccgccugcggaguaacugcaaagaagcuuaccauggagcugcucauccugaaggccaacgccaucaccaccauccugacggcggugaccuucugcuucgccagcggccagaacaucaccgaggaguucuaccaguccacgugcagcgccgucuccaagggguaccucggcgcccugcggaccggcugguacaccuccgugaucaccaucgagcugagcaacaucaaggagaacaagugcaacgggaccgacgccaaggugaagcucaucaagcaggagcuggacaaguacaagaacgcggucacggaccugcagaugcugaugugcuccaccccggcaaccggcuccggcuccgccaucgcgagcggcgucgccgugugcaaggugcugcaccucgagggggaggucaacaagaucaagagcgcccugcuguccaccaacaaggccguggugagccucuccaacggcgucagcgugcugaccuucaaggugcuggaccucaagaacuacaucgacaagcagcugcugcccauccugaacaagcagagcugcuccauccccaaccccgagacggugauggaguuccagcagaagaacaaccggcuccuggagaucacccgcgaguucagcgugaacgccggggucaccacccccguguccacguacaugcugaccaacagcgagcuccugucccugaucaacgacaugccgaucaccaacgaccagaagaagcucaugagcaacaacgugcagaucguccggcagcaguccuacagcaucaugugcaucaucaaggaggaggugcuggcguacgugguccagcugccccucuacggcgugaucgacacccccugcuggaagcugcacacgagcccccugugcaccaccaacaccaaggagggguccaacaucugccucacgcgcaccgaccggggcugguacugcgacaacgccggcagcgucuccuucuucccgcaggccgagaccugcaaggugugcagcaaccgcguguucugcgacaccaugaacucccugacgcugcccagcgagguaaaccucugcaacgucgacaucuucaaccccaaguacgacugcaagaucaugaccuccaagaccgacgugagcuccagcgugaucaccucccugggggccaucgucagcugcuacggcaagacgaagugcaccgccagcaacaagaacaaggggaucaucaagaccuucuccaacggcugcgacuacgugagcaacaagggcguggacaccguguccgucgggaacacccuguacuacgugaacaagcaggagggccagagccucuacgugaagggggagcccaucaucaacuucuacgacccgcuggucuuccccuccgacgaguucgacgcgagcaucucccaggugaacgagaagaucaaccagagccuggccuucauccgcaaguccgacgagcugcuccacaacgugaacgccggcaagagcacgaccaacaucaugaucaccaccaucaucaucgucaucaucgugauccugcugucccucaucgccguggggcugcugcucuacugcaaggcccggagcacgcccgucacccuguccaaggaccagcugagcggcaucaacaacaucgcguucuccaacugaggacuagugaagggaacacccaaauuuaauucagccuuaagcacaauuaauuaagagugaaacguaauuguacaagcaguuggucacccaccauagggcaugaucaacaccgcaaccuuuccuuuuucccccagugauucugaaaaaccccucuucccuucagcuugcuuagauguuccaaauuuaguaagcuuaaggcggccuacagaagaaaaagaaaaaaaaggccacaaaaguucccucucacuuucaguaaauaaaauaaaagcagcaacagaaauaaagaaauaaaugaaauucaaaaugaaauaaauauuguguugugcagcauuaaaaaaucaauaaaaauuaaaaaugagcaagaucuaaaaaaaaaaaaaaaaaaaaaaaaaaaaaaaaaaaaaaaaaaaaaaaaaaaaaaaaaaaaaaaaugcaucccccccccccccccccccccccccccccccaaaggcucuuuucagagccaccagaauu

SEQ ID NO: 6282 - RNA, 2193 nt, Artificial Sequence
  mRNA product Design f-1 comprising derived and/or modified sequence from HRSV(A2)__F_DSCav1_mut6 (opt1)
gggagagcggcucggccauuuugucccagucaguccggaggcugcggcugcagaaguaccgccugcggaguaacugcaaagaagcuuaccauggagcugcucauccugaaggccaacgccaucaccaccauccugacggcggugaccuucugcuucgccagcggccagaacaucaccgaggaguucuaccaguccacgugcagcgccgucuccaagggguaccucggcgcccugcgcaccgggugguacaccagcgugaucaccaucgagcuguccaacaucaaggagaacaagugcaacggcaccgacgccaaggugaagcucaucaagcaggagcuggacaaguacaagaacgcggucacggaccugcagaugcucaugugcagcacccccgccaccggguccggcagcgccaucgccuccggcguggcggugugcaagguccugcaccuggagggggaggugaacaagaucaagagcgcccuccuguccaccaacaaggccguggucagccuguccaacggcgugagcgugcucacguucaagguccuggaccugaagaacuacaucgacaagcagcuccugccgauccugaacaagcaguccugcagcauccccaaccccgagaccgugauggaguuccagcagaagaacaaccggcuccuggagaucacccgcgaguucuccgugaacgccggggucaccacgcccgugagcaccuacaugcugaccaacuccgagcuccugagccugaucaacgacaugccgaucaccaacgaccagaagaagcucaugagcaacaacgugcagaucguccggcagcaguccuacagcaucaugugcaucaucaaggaggaggugcuggccuacgugguccagcugccccucuacggcgugaucgacacgcccugcuggaagcugcacaccagcccccugugcaccaccaacacgaaggaggggagcaacaucugccucacccgcaccgaccggggcugguacugcgacaacgcgggcuccgugagcuucuucccgcaggccgagaccugcaaggucugcuccaaccgcguguucugcgacacgaugaacagccugacccugcccuccgaggucaaccucugcaacguggacaucuucaaccccaaguacgacugcaagaucaugaccagcaagaccgacguguccagcuccgucaucacgagccugggggccaucguguccugcuacggcaagaccaagugcaccgccagcaacaagaacaaggggaucaucaagaccuucuccaacggcugcgacuacgugagcaacaagggcgucgacacgguguccguggggaacacccuguacuacgucaacaagcaggagggccagagccucuacgugaagggggagcccaucaucaacuucuacgacccgcugguguuccccagcgacgaguucgacgccuccaucagccaggucaacgagaagaucaaccagucccuggcguucauccggaaguccgacgagcuccugcacaacgugaacgccggcaaguccaccaccaacaucaugaucaccacgaucaucaucgugaucaucgucauccugcucagccugaucgccguggggcugcuccuguacugcaaggcccgcuccacccccgugacccugagcaaggaccagcuguccggcaucaacaacaucgccuucagcaacugaggacuagugaagggaacacccaaauuuaauucagccuuaagcacaauuaauuaagagugaaacguaauuguacaagcaguuggucacccaccauagggcaugaucaacaccgcaaccuuuccuuuuucccccagugauucugaaaaaccccucuucccuucagcuugcuuagauguuccaaauuuaguaagcuuaaggcggccuacagaagaaaaagaaaaaaaaggccacaaaaguucccucucacuuucaguaaauaaaauaaaagcagcaacagaaauaaagaaauaaaugaaauucaaaaugaaauaaauauuguguugugcagcauuaaaaaaucaauaaaaauuaaaaaugagcaagaucuaaaaaaaaaaaaaaaaaaaaaaaaaaaaaaaaaaaaaaaaaaaaaaaaaaaaaaaaaaaaaaaaugcaucccccccccccccccccccccccccccccccaaaggcucuuuucagagccaccagaauu

SEQ ID NO: 6283 - RNA, 2193 nt, Artificial Sequence
  mRNA product Design f-1 comprising derived and/or modified sequence from HRSV(A2)__F_DSCav1_mut6 (opt2)
gggagagcggcucggccauuuugucccagucaguccggaggcugcggcugcagaaguaccgccugcggaguaacugcaaagaagcuuaccauggagcuccucauccucaaggccaacgccaucaccaccauccucaccgccgucaccuucugcuucgccuccggccagaacaucaccgaggaguucuaccaguccaccugcuccgccgucuccaagggcuaccucggcgcccuccgcaccggcugguacaccuccgucaucaccaucgagcucuccaacaucaaggagaacaagugcaacggcaccgacgccaaggucaagcucaucaagcaggagcucgacaaguacaagaacgccgucaccgaccuccagaugcucaugugcuccacccccgccaccggcuccggcuccgccaucgccuccggcgucgccgucugcaagguccuccaccucgagggcgaggucaacaagaucaaguccgcccuccucuccaccaacaaggccgucgucucccucuccaacggcgucuccguccucaccuucaagguccucgaccucaagaacuacaucgacaagcagcuccuccccauccucaacaagcaguccugcuccauccccaaccccgagaccgucauggaguuccagcagaagaacaaccgccuccucgagaucacccgcgaguucuccgucaacgccggcgucaccacccccgucuccaccuacaugcucaccaacuccgagcuccucucccucaucaacgacaugcccaucaccaacgaccagaagaagcucauguccaacaacguccagaucguccgccagcaguccuacuccaucaugugcaucaucaaggaggagguccucgccuacgucguccagcucccccucuacggcgucaucgacacccccugcuggaagcuccacaccuccccccucugcaccaccaacaccaaggagggcuccaacaucugccucacccgcaccgaccgcggcugguacugcgacaacgccggcuccgucuccuucuucccccaggccgagaccugcaaggucugcuccaaccgcgucuucugcgacaccaugaacucccucacccuccccuccgaggucaaccucugcaacgucgacaucuucaaccccaaguacgacugcaagaucaugaccuccaagaccgacgucuccuccuccgucaucaccucccucggcgccaucgucuccugcuacggcaagaccaagugcaccgccuccaacaagaacaagggcaucaucaagaccuucuccaacggcugcgacuacgucuccaacaagggcgucgacaccgucuccgucggcaacacccucuacuacgucaacaagcaggagggccagucccucuacgucaagggcgagcccaucaucaacuucuacgacccccucgucuuccccuccgacgaguucgacgccuccaucucccaggucaacgagaagaucaaccagucccucgccuucauccgcaaguccgacgagcuccuccacaacgucaacgccggcaaguccaccaccaacaucaugaucaccaccaucaucaucgucaucaucgucauccuccucucccucaucgccgucggccuccuccucuacugcaaggcccgcuccacccccgucacccucuccaaggaccagcucuccggcaucaacaacaucgccuucuccaacugaggacuagugaagggaacacccaaauuuaauucagccuuaagcacaauuaauuaagagugaaacguaauuguacaagcaguuggucacccaccauagggcaugaucaacaccgcaaccuuuccuuuuucccccagugauucugaaaaaccccucuucccuucagcuugcuuagauguuccaaauuuaguaagcuuaaggcggccuacagaagaaaaagaaaaaaaaggccacaaaaguucccucucacuuucaguaaauaaaauaaaagcagcaacagaaauaaagaaauaaaugaaauucaaaaugaaauaaauauuguguugugcagcauuaaaaaaucaauaaaaauuaaaaaugagcaagaucuaaaaaaaaaaaaaaaaaaaaaaaaaaaaaaaaaaaaaaaaaaaaaaaaaaaaaaaaaaaaaaaaugcaucccccccccccccccccccccccccccccccaaaggcucuuuucagagccaccagaauu

SEQ ID NO: 6284 - RNA, 2193 nt, Artificial Sequence
  mRNA product Design f-1 comprising derived and/or modified sequence from HRSV(A2)__F_DSCav1_mut6 (opt3)
gggagagcggcucggccauuuugucccagucaguccggaggcugcggcugcagaaguaccgccugcggaguaacugcaaagaagcuuaccauggagcugcucauccuuaaggccaacgcuauuaccacaauacugacugcagugacguucugcuuugccagcggccagaauaucaccgaagaguucuaccaauccacauguucugcggucucaaaaggguauuugggagcuuuaagaacugguugguacaccaguguuauuacaaucgaacugagcaacauuaaggagaauaaaugcaacggcaccgacgccaaggugaaacuaaucaagcaggaacucgauaaguauaaaaaugcaguaacugaccugcagaugcuuauguguuccacacccgccaccgggucuggaucggcuauagcaucaggcguggccgucugcaaggugcugcacuuggagggugagguuaacaaaaucaagagcgcucuccugaguacgaauaaagccguggucucccugucuaacggggugagcguacucacuuuuaagguuuuagaucugaagaauuacauugacaaacagcuuuugccuauccugaacaagcaauccuguucaauuccaaauccggaaaccgugauggaguuccagcagaaaaacaauaggcuacucgaaaucacacgggaguuuagugucaacgcgggagugacuacccccgugagcacauauaugcugaccaauucugagcuucuguccuugauaaacgauaugccuauuacgaacgaccagaagaaacucaugucaaauaacguccaaaucguucgccagcagagcuacaguauuaugugcaucaucaaggaagaggugcuggcauauguagugcaguuaccacuguacggcgucauugauacucccuguuggaaacuccauacaucuccucuuugcaccacuaauacaaaggaaggcuccaacauaugucugacccgaacggaccgugggugguacugcgauaaugccggaagcgugucguucuuuccacaagcugagaccuguaagguuugcucuaacagaguguucugcgacacaaugaacuccuugacucuacccucagaagucaaucuguguaauguggauaucuuuaacccuaaauaugacugcaagauuaugaccaguaaaacagauguaagcuccucuguuaucacuagccucggugccauagugucauguuacggcaagaccaaaugcacagcaaguaauaagaacaaggggauuaucaaaaccuucuccaauggaugugacuaugucagcaacaagggcguggacacugucucuguggguaauacgcuguacuauguuaacaaacaggaggggcagucacuuuacgugaagggagagccaaucauuaacuuuuaugauccgcugguauuccccagugacgaauuugaugcuagcaucucccaagucaaugagaaaauuaaccagucuuuggccuucauaaggaagucggacgaacuccugcacaaugugaacgcgggcaagagcacaaccaauaucaugauuacuaccaucaucauuguuauaaucgugauuuuacugucccuaaucgccgucggccuccugcuuuacugcaaagcacggucaacaccugugaccuugaguaaggaucagcugucugggauuaacaauaucgcuuucagcaacugaggacuagugaagggaacacccaaauuuaauucagccuuaagcacaauuaauuaagagugaaacguaauuguacaagcaguuggucacccaccauagggcaugaucaacaccgcaaccuuuccuuuuucccccagugauucugaaaaaccccucuucccuucagcuugcuuagauguuccaaauuuaguaagcuuaaggcggccuacagaagaaaaagaaaaaaaaggccacaaaaguucccucucacuuucaguaaauaaaauaaaagcagcaacagaaauaaagaaauaaaugaaauucaaaaugaaauaaauauuguguugugcagcauuaaaaaaucaauaaaaauuaaaaaugagcaagaucuaaaaaaaaaaaaaaaaaaaaaaaaaaaaaaaaaaaaaaaaaaaaaaaaaaaaaaaaaaaaaaaaugcaucccccccccccccccccccccccccccccccaaaggcucuuuucagagccaccagaauu

SEQ ID NO: 6285 - RNA, 2193 nt, Artificial Sequence
  mRNA product Design f-1 comprising derived and/or modified sequence from HRSV(A2)__F_DSCav1_mut6 (opt4)
gggagagcggcucggccauuuugucccagucaguccggaggcugcggcugcagaaguaccgccugcggaguaacugcaaagaagcuuaccauggagcugcugauccugaaggccaacgccaucaccaccauccugaccgccgugaccuucugcuucgccagcggccagaacaucaccgaggaguucuaccagagcaccugcagcgccgugagcaagggcuaccugggcgcccugagaaccggcugguacaccagcgugaucaccaucgagcugagcaacaucaaggagaacaagugcaacggcaccgacgccaaggugaagcugaucaagcaggagcuggacaaguacaagaacgccgugaccgaccugcagaugcugaugugcagcacccccgccaccggcagcggcagcgccaucgccagcggcguggccgugugcaaggugcugcaccuggagggcgaggugaacaagaucaagagcgcccugcugagcaccaacaaggccguggugagccugagcaacggcgugagcgugcugaccuucaaggugcuggaccugaagaacuacaucgacaagcagcugcugcccauccugaacaagcagagcugcagcauccccaaccccgagaccgugauggaguuccagcagaagaacaacagacugcuggagaucaccagagaguucagcgugaacgccggcgugaccacccccgugagcaccuacaugcugaccaacagcgagcugcugagccugaucaacgacaugcccaucaccaacgaccagaagaagcugaugagcaacaacgugcagaucgugagacagcagagcuacagcaucaugugcaucaucaaggaggaggugcuggccuacguggugcagcugccccuguacggcgugaucgacacccccugcuggaagcugcacaccagcccccugugcaccaccaacaccaaggagggcagcaacaucugccugaccagaaccgacagaggcugguacugcgacaacgccggcagcgugagcuucuucccccaggccgagaccugcaaggugugcagcaacagaguguucugcgacaccaugaacagccugacccugcccagcgaggugaaccugugcaacguggacaucuucaaccccaaguacgacugcaagaucaugaccagcaagaccgacgugagcagcagcgugaucaccagccugggcgccaucgugagcugcuacggcaagaccaagugcaccgccagcaacaagaacaagggcaucaucaagaccuucagcaacggcugcgacuacgugagcaacaagggcguggacaccgugagcgugggcaacacccuguacuacgugaacaagcaggagggccagagccuguacgugaagggcgagcccaucaucaacuucuacgacccccugguguuccccagcgacgaguucgacgccagcaucagccaggugaacgagaagaucaaccagagccuggccuucaucagaaagagcgacgagcugcugcacaacgugaacgccggcaagagcaccaccaacaucaugaucaccaccaucaucaucgugaucaucgugauccugcugagccugaucgccgugggccugcugcuguacugcaaggccagaagcacccccgugacccugagcaaggaccagcugagcggcaucaacaacaucgccuucagcaacugaggacuagugaagggaacacccaaauuuaauucagccuuaagcacaauuaauuaagagugaaacguaauuguacaagcaguuggucacccaccauagggcaugaucaacaccgcaaccuuuccuuuuucccccagugauucugaaaaaccccucuucccuucagcuugcuuagauguuccaaauuuaguaagcuuaaggcggccuacagaagaaaaagaaaaaaaaggccacaaaaguucccucucacuuucaguaaauaaaauaaaagcagcaacagaaauaaagaaauaaaugaaauucaaaaugaaauaaauauuguguugugcagcauuaaaaaaucaauaaaaauuaaaaaugagcaagaucuaaaaaaaaaaaaaaaaaaaaaaaaaaaaaaaaaaaaaaaaaaaaaaaaaaaaaaaaaaaaaaaaugcaucccccccccccccccccccccccccccccccaaaggcucuuuucagagccaccagaauu

SEQ ID NO: 6286 - RNA, 2193 nt, Artificial Sequence
  mRNA product Design f-1 comprising derived and/or modified sequence from HRSV(A2)__F_DSCav1_mut6 (opt5)
gggagagcggcucggccauuuugucccagucaguccggaggcugcggcugcagaaguaccgccugcggaguaacugcaaagaagcuuaccauggagcugcucauccugaaggccaacgcuauuaccacaauccuuacggccgugaccuucugcuuugcgagcggccagaauauuacagaagaguucuaccaauccaccuguucugcugucagcaaaggguaucugggagcccucagaacaggcugguacaccuccguuaucacaauugaacugucuaacaucaaggagaauaaaugcaacgggaccgacgccaaggugaaacuuaucaagcaggaacuggauaaguauaaaaaugcugugacggaccuccagaugcugauguguagcacccccgccacaggauccggcucugcuauugccagcggggucgcggugugcaagguucugcaccucgagggagaggugaacaaaaucaaguccgcccugcuuagcaccaauaaagcugucgugucucuguccaacggcguuagcgugcucacauuuaagguccuggaucuuaagaauuacauugacaaacagcugcucccuauccugaacaagcaaucuuguuccauuccgaaucccgaaaccgugauggaguuccagcagaaaaacaaucggcugcucgaaaucacgcgcgaguuuagcgugaacgccggcgucacaaccccuguuucuacauauaugcugaccaauuccgagcuucugagccucauuaacgauaugcccaucaccaacgaccagaagaaacugauguccaauaacgugcaaaucgugagacagcagucuuacagcauuaugugcaucauuaaggaagagguccuugcuuaugugguucagcugccucucuacggggugaucgauacacccuguuggaaacugcauacguccccucugugcaccacaaauaccaaggaaggaagcaacauuugucucacacggaccgaccgcggcugguacugcgauaaugccgggucugucuccuucuuuccgcaagcggagacguguaaggugugcagcaacagaguuuucugcgacacaaugaacucucugacccuucccagcgaagugaaucuguguaaugucgauaucuuuaacccuaaauaugacugcaagaucaugaccuccaaaacagaugugucuagcuccgucauuaccagccucggagccaucgugucuuguuacggcaagacaaaaugcacggcuuccaauaagaacaaggggauuaucaaaaccuucagcaauggaugugacuauguuucuaacaagggcguggacacagucuccgugggcaauacccuguacuauguuaacaaacaggaggggcagagccuuuacgugaagggagagcccauuaucaacuuuuaugauccucuggucuuccccuccgacgaauuugaugccucuaucagccaagugaaugagaaaauuaaccagucccucgcuuucauccggaagucugacgaacugcugcacaaugugaacgccggcaagagcacaaccaauauuaugaucacgaccauuaucauuguuaucaucgucauucuccugucccuuaucgccguggggcugcuccuguacugcaaagcucgcagcacaccggugacccugucuaaggaucagcuuuccggaauuaacaauaucgcguucagcaacugaggacuagugaagggaacacccaaauuuaauucagccuuaagcacaauuaauuaagagugaaacguaauuguacaagcaguuggucacccaccauagggcaugaucaacaccgcaaccuuuccuuuuucccccagugauucugaaaaaccccucuucccuucagcuugcuuagauguuccaaauuuaguaagcuuaaggcggccuacagaagaaaaagaaaaaaaaggccacaaaaguucccucucacuuucaguaaauaaaauaaaagcagcaacagaaauaaagaaauaaaugaaauucaaaaugaaauaaauauuguguugugcagcauuaaaaaaucaauaaaaauuaaaaaugagcaagaucuaaaaaaaaaaaaaaaaaaaaaaaaaaaaaaaaaaaaaaaaaaaaaaaaaaaaaaaaaaaaaaaaugcaucccccccccccccccccccccccccccccccaaaggcucuuuucagagccaccagaauu

SEQ ID NO: 6287 - RNA, 2193 nt, Artificial Sequence
  mRNA product Design f-1 comprising derived and/or modified sequence from HRSV(A2)__F_DSCav1_mut6 (opt6)
gggagagcggcucggccauuuugucccagucaguccggaggcugcggcugcagaaguaccgccugcggaguaacugcaaagaagcuuaccauggaacuauuaaucuuaaaagcaaaugcuauaaccacaauauuaacagcaguaacauucuguuuugccuccggacaaaacauaacagaagaauuuuaucaaucaacaugcucugcaguauccaaagguuacuuaggcgcacuacgcacuggaugguauacaucaguaauaacaauagaacuaucaaacauaaaagaaaauaaauguaacgguacugacgcaaaagugaaacuaauuaaacaagaacucgacaaauacaaaaaugcuguaacagaccuacaaaugcuaaugugcucaacacccgcaaccggaucaggaucagccauagccuccggagucgcaguaugcaaaguauuacaucuugaaggagaaguaaauaaaauaaaaucagcauuacuauccacaaauaaagccguaguaucacuaucaaacgguguauccguccuuacauucaaaguauuagaucuaaaaaacuacauagauaaacaacuacuacccaucuuaaacaaacaaucaugcucaauucccaacccagaaacagucauggaauuucaacaaaaaaacaacagacucuuagaaauaacacgagaauuuucaguaaacgcaggaguaaccacaccaguaaguacauacaugcucaccaacucagaauuauuaucacuuauuaacgacaugccaauuacaaacgaccaaaaaaaauuaaugucaaacaauguccaaauuguuagacaacaaucauacucuauaauguguauaauaaaagaagaaguacuagcuuacguaguucaauuaccacuauauggcguaauagauacaccuugcuggaaacuacauacaucuccauuauguacaacuaacacaaaagaaggaucuaacauaugccuaacacgcacagaucgaggaugguacugcgauaaugcagguuccguaucauucuuuccacaagcagaaacauguaaaguaugcucaaacagaguauucugugacacuaugaacuccuuaacccuacccucagaagucaaucuaugcaacguugacauauuuaacccaaaauacgacuguaaaaucaugacaucuaaaacagacguaucaucaucaguuauuacaucccuaggagcaauaguaucuugcuacggaaaaacaaaauguacagcauccaacaaaaacaaaggaauaaucaaaacauucucaaacggcugcgacuacguaucaaacaaagguguagacacaguaucaguaggaaauacuuuauauuacguaaauaaacaagaaggacaaucucuauacguuaaaggcgaaccuauuauaaacuucuacgacccacucguauucccuucagacgaauuugacgcaucuauaucccaaguuaacgaaaaaaucaaccaaucauuagccuuuauaagaaaauccgacgaauuauuacauaacgucaacgcuggaaaaucaacaacuaacauaaugauaaccacaauaauaauagucaucauaguuauauuacuaagucuaauagccguaggccuccuacuuuauugcaaagcaagaucaacaccaguaacauuauccaaagaccaacucagcggcauaaacaauauagcuuuuucaaacuagggacuagugaagggaacacccaaauuuaauucagccuuaagcacaauuaauuaagagugaaacguaauuguacaagcaguuggucacccaccauagggcaugaucaacaccgcaaccuuuccuuuuucccccagugauucugaaaaaccccucuucccuucagcuugcuuagauguuccaaauuuaguaagcuuaaggcggccuacagaagaaaaagaaaaaaaaggccacaaaaguucccucucacuuucaguaaauaaaauaaaagcagcaacagaaauaaagaaauaaaugaaauucaaaaugaaauaaauauuguguugugcagcauuaaaaaaucaauaaaaauuaaaaaugagcaagaucuaaaaaaaaaaaaaaaaaaaaaaaaaaaaaaaaaaaaaaaaaaaaaaaaaaaaaaaaaaaaaaaaugcaucccccccccccccccccccccccccccccccaaaggcucuuuucagagccaccagaauu

SEQ ID NO: 6288 - RNA, 2193 nt, Artificial Sequence
  mRNA product Design f-1 comprising derived and/or modified sequence from HRSV(A2)__F_DSCav1_mut6 (opt11)
gggagagcggcucggccauuuugucccagucaguccggaggcugcggcugcagaaguaccgccugcggaguaacugcaaagaagcuuaccauggaacuccucauccucaaagccaacgcaaucacaaccauacuaacugcaguuacuuucugcuucgcauccggccaaaacaucaccgaagaguucuaccaaucaaccugcuccgcagucuccaaaggauaccucggagcccuucgcaccggcugguacaccuccgucauaaccaucgaacucucaaacauaaaagaaaacaaaugcaacggcacagacgcgaaagucaaacuuaucaaacaagaacucgacaaauacaaaaacgccgucaccgaccugcagaugcucaugugcucaacccccgccacaggaagcggcucugcuaucgcuuccggcgucgccgucugcaaaguccuccaccucgaaggcgaaguaaacaaaaucaagucagcccuccucuccaccaacaaagccgucgucucucucucaaacggcguauccguccucacauucaaaguccucgaccucaaaaacuacaucgacaaacaacuucuccccauccuaaacaaacaaucaugcuccauccccaaccccgaaacagucauggaauuucaacaaaagaacaaccgccucuuagaaaucacccgagaauuuuccgucaacgcgggagucacaacccccguuucuacguauaugcucaccaacuccgaacuccuuucccucauaaacgacaugccaaucaccaacgaccaaaagaaacucaugucaaacaacguccaaaucguccgacaacaauccuacucuauuaugugcaucaucaaagaagaaguucucgccuacgucguccaacuaccccucuacggcgugaucgacacccccugcuggaaacuacacaccucaccccucugcaccaccaacaccaaggaaggcuccaacaucugccucacccgcaccgaccgcggcugguacugcgacaacgcuggcuccgucucauucuucccgcaagccgaaacuugcaaaguaugcuccaacagaguauucugcgacaccaugaacucacuaacccucccuuccgaagucaaccuuugcaacguugacauauucaacccaaaguacgauugcaaaauuaugacauccaaaacagaugucuccuccuccgucaucacaucccucggugccauuguaucaugcuacggaaaaaccaaaugcaccgcauccaacaaaaacaaaggaaucaucaaaaccuucucaaacggcugcgauuacgucucaaacaaaggagucgacacagucuccgucggaaacacccuauacuacgucaacaaacaagaaggccaaucccuguacgucaaaggagaacccaucaucaacuucuacgacccccucgucuucccgagcgacgaguucgacgccuccaucucacaagucaaugaaaagaucaaccaaucccuugccuucauccggaaaucggacgaacuccuacacaacgugaacgcuggaaaaucaaccaccaacaucaugaucacaaccaucauuaucgucaucaucgucauacuccucucccuaaucgccgucggccuccuccuguauugcaaagcucgcuccacccccgucacccuguccaaagaccaacucuccggaaucaacaacaucgccuucucaaacuaaggacuagugaagggaacacccaaauuuaauucagccuuaagcacaauuaauuaagagugaaacguaauuguacaagcaguuggucacccaccauagggcaugaucaacaccgcaaccuuuccuuuuucccccagugauucugaaaaaccccucuucccuucagcuugcuuagauguuccaaauuuaguaagcuuaaggcggccuacagaagaaaaagaaaaaaaaggccacaaaaguucccucucacuuucaguaaauaaaauaaaagcagcaacagaaauaaagaaauaaaugaaauucaaaaugaaauaaauauuguguugugcagcauuaaaaaaucaauaaaaauuaaaaaugagcaagaucuaaaaaaaaaaaaaaaaaaaaaaaaaaaaaaaaaaaaaaaaaaaaaaaaaaaaaaaaaaaaaaaaugcaucccccccccccccccccccccccccccccccaaaggcucuuuucagagccaccagaauu

SEQ ID NO: 6289 - RNA, 1973 nt, Artificial Sequence
  mRNA product Design f-2 comprising derived and/or modified sequence from HRSV(A2)__F_DSCav1_mut6 (opt1)
gggagagcggcucggccauuuugucccagucaguccggaggcugcggcugcagaaguaccgccugcggaguaacugcaaagaagcuuaccauggagcugcucauccugaaggccaacgccaucaccaccauccugacggcggugaccuucugcuucgccagcggccagaacaucaccgaggaguucuaccaguccacgugcagcgccgucuccaagggguaccucggcgcccugcggaccggcugguacaccuccgugaucaccaucgagcugagcaacaucaaggagaacaagugcaacgggaccgacgccaaggugaagcucaucaagcaggagcuggacaaguacaagaacgcggucacggaccugcagaugcugaugugcuccaccccggcaaccggcuccggcuccgccaucgcgagcggcgucgccgugugcaaggugcugcaccucgagggggaggucaacaagaucaagagcgcccugcuguccaccaacaaggccguggugagccucuccaacggcgucagcgugcugaccuucaaggugcuggaccucaagaacuacaucgacaagcagcugcugcccauccugaacaagcagagcugcuccauccccaaccccgagacggugauggaguuccagcagaagaacaaccggcuccuggagaucacccgcgaguucagcgugaacgccggggucaccacccccguguccacguacaugcugaccaacagcgagcuccugucccugaucaacgacaugccgaucaccaacgaccagaagaagcucaugagcaacaacgugcagaucguccggcagcaguccuacagcaucaugugcaucaucaaggaggaggugcuggcguacgugguccagcugccccucuacggcgugaucgacacccccugcuggaagcugcacacgagcccccugugcaccaccaacaccaaggagggguccaacaucugccucacgcgcaccgaccggggcugguacugcgacaacgccggcagcgucuccuucuucccgcaggccgagaccugcaaggugugcagcaaccgcguguucugcgacaccaugaacucccugacgcugcccagcgagguaaaccucugcaacgucgacaucuucaaccccaaguacgacugcaagaucaugaccuccaagaccgacgugagcuccagcgugaucaccucccugggggccaucgucagcugcuacggcaagacgaagugcaccgccagcaacaagaacaaggggaucaucaagaccuucuccaacggcugcgacuacgugagcaacaagggcguggacaccguguccgucgggaacacccuguacuacgugaacaagcaggagggccagagccucuacgugaagggggagcccaucaucaacuucuacgacccgcuggucuuccccuccgacgaguucgacgcgagcaucucccaggugaacgagaagaucaaccagagccuggccuucauccgcaaguccgacgagcugcuccacaacgugaacgccggcaagagcacgaccaacaucaugaucaccaccaucaucaucgucaucaucgugauccugcugucccucaucgccguggggcugcugcucuacugcaaggcccggagcacgcccgucacccuguccaaggaccagcugagcggcaucaacaacaucgcguucuccaacugaggacuaguggaagcauuuuccuggcugauuaaaagaaauuacucagcuauggucaucuguuccuguuagaaggcuaugcagcauauuauauacuaugcgcauguuaugaaaugcauaauaaaaaauuuuaaaaaaucuaaaagaucuaaaaaaaaaaaaaaaaaaaaaaaaaaaaaaaaaaaaaaaaaaaaaaaaaaaaaaaaaaaaaaaaugcaucccccccccccccccccccccccccccccccaaaggcucuuuucagagccaccagaauu

SEQ ID NO: 6290 - RNA, 1973 nt, Artificial Sequence
  mRNA product Design f-2 comprising derived and/or modified sequence from HRSV(A2)__F_DSCav1_mut6 (opt1)
gggagagcggcucggccauuuugucccagucaguccggaggcugcggcugcagaaguaccgccugcggaguaacugcaaagaagcuuaccauggagcugcucauccugaaggccaacgccaucaccaccauccugacggcggugaccuucugcuucgccagcggccagaacaucaccgaggaguucuaccaguccacgugcagcgccgucuccaagggguaccucggcgcccugcgcaccgggugguacaccagcgugaucaccaucgagcuguccaacaucaaggagaacaagugcaacggcaccgacgccaaggugaagcucaucaagcaggagcuggacaaguacaagaacgcggucacggaccugcagaugcucaugugcagcacccccgccaccggguccggcagcgccaucgccuccggcguggcggugugcaagguccugcaccuggagggggaggugaacaagaucaagagcgcccuccuguccaccaacaaggccguggucagccuguccaacggcgugagcgugcucacguucaagguccuggaccugaagaacuacaucgacaagcagcuccugccgauccugaacaagcaguccugcagcauccccaaccccgagaccgugauggaguuccagcagaagaacaaccggcuccuggagaucacccgcgaguucuccgugaacgccggggucaccacgcccgugagcaccuacaugcugaccaacuccgagcuccugagccugaucaacgacaugccgaucaccaacgaccagaagaagcucaugagcaacaacgugcagaucguccggcagcaguccuacagcaucaugugcaucaucaaggaggaggugcuggccuacgugguccagcugccccucuacggcgugaucgacacgcccugcuggaagcugcacaccagcccccugugcaccaccaacacgaaggaggggagcaacaucugccucacccgcaccgaccggggcugguacugcgacaacgcgggcuccgugagcuucuucccgcaggccgagaccugcaaggucugcuccaaccgcguguucugcgacacgaugaacagccugacccugcccuccgaggucaaccucugcaacguggacaucuucaaccccaaguacgacugcaagaucaugaccagcaagaccgacguguccagcuccgucaucacgagccugggggccaucguguccugcuacggcaagaccaagugcaccgccagcaacaagaacaaggggaucaucaagaccuucuccaacggcugcgacuacgugagcaacaagggcgucgacacgguguccguggggaacacccuguacuacgucaacaagcaggagggccagagccucuacgugaagggggagcccaucaucaacuucuacgacccgcugguguuccccagcgacgaguucgacgccuccaucagccaggucaacgagaagaucaaccagucccuggcguucauccggaaguccgacgagcuccugcacaacgugaacgccggcaaguccaccaccaacaucaugaucaccacgaucaucaucgugaucaucgucauccugcucagccugaucgccguggggcugcuccuguacugcaaggcccgcuccacccccgugacccugagcaaggaccagcuguccggcaucaacaacaucgccuucagcaacugaggacuaguggaagcauuuuccuggcugauuaaaagaaauuacucagcuauggucaucuguuccuguuagaaggcuaugcagcauauuauauacuaugcgcauguuaugaaaugcauaauaaaaaauuuuaaaaaaucuaaaagaucuaaaaaaaaaaaaaaaaaaaaaaaaaaaaaaaaaaaaaaaaaaaaaaaaaaaaaaaaaaaaaaaaugcaucccccccccccccccccccccccccccccccaaaggcucuuuucagagccaccagaauu

SEQ ID NO: 6291 - RNA, 1973 nt, Artificial Sequence
  mRNA product Design f-2 comprising derived and/or modified sequence from HRSV(A2)__F_DSCav1_mut6 (opt2)
gggagagcggcucggccauuuugucccagucaguccggaggcugcggcugcagaaguaccgccugcggaguaacugcaaagaagcuuaccauggagcuccucauccucaaggccaacgccaucaccaccauccucaccgccgucaccuucugcuucgccuccggccagaacaucaccgaggaguucuaccaguccaccugcuccgccgucuccaagggcuaccucggcgcccuccgcaccggcugguacaccuccgucaucaccaucgagcucuccaacaucaaggagaacaagugcaacggcaccgacgccaaggucaagcucaucaagcaggagcucgacaaguacaagaacgccgucaccgaccuccagaugcucaugugcuccacccccgccaccggcuccggcuccgccaucgccuccggcgucgccgucugcaagguccuccaccucgagggcgaggucaacaagaucaaguccgcccuccucuccaccaacaaggccgucgucucccucuccaacggcgucuccguccucaccuucaagguccucgaccucaagaacuacaucgacaagcagcuccuccccauccucaacaagcaguccugcuccauccccaaccccgagaccgucauggaguuccagcagaagaacaaccgccuccucgagaucacccgcgaguucuccgucaacgccggcgucaccacccccgucuccaccuacaugcucaccaacuccgagcuccucucccucaucaacgacaugcccaucaccaacgaccagaagaagcucauguccaacaacguccagaucguccgccagcaguccuacuccaucaugugcaucaucaaggaggagguccucgccuacgucguccagcucccccucuacggcgucaucgacacccccugcuggaagcuccacaccuccccccucugcaccaccaacaccaaggagggcuccaacaucugccucacccgcaccgaccgcggcugguacugcgacaacgccggcuccgucuccuucuucccccaggccgagaccugcaaggucugcuccaaccgcgucuucugcgacaccaugaacucccucacccuccccuccgaggucaaccucugcaacgucgacaucuucaaccccaaguacgacugcaagaucaugaccuccaagaccgacgucuccuccuccgucaucaccucccucggcgccaucgucuccugcuacggcaagaccaagugcaccgccuccaacaagaacaagggcaucaucaagaccuucuccaacggcugcgacuacgucuccaacaagggcgucgacaccgucuccgucggcaacacccucuacuacgucaacaagcaggagggccagucccucuacgucaagggcgagcccaucaucaacuucuacgacccccucgucuuccccuccgacgaguucgacgccuccaucucccaggucaacgagaagaucaaccagucccucgccuucauccgcaaguccgacgagcuccuccacaacgucaacgccggcaaguccaccaccaacaucaugaucaccaccaucaucaucgucaucaucgucauccuccucucccucaucgccgucggccuccuccucuacugcaaggcccgcuccacccccgucacccucuccaaggaccagcucuccggcaucaacaacaucgccuucuccaacugaggacuaguggaagcauuuuccuggcugauuaaaagaaauuacucagcuauggucaucuguuccuguuagaaggcuaugcagcauauuauauacuaugcgcauguuaugaaaugcauaauaaaaaauuuuaaaaaaucuaaaagaucuaaaaaaaaaaaaaaaaaaaaaaaaaaaaaaaaaaaaaaaaaaaaaaaaaaaaaaaaaaaaaaaaugcaucccccccccccccccccccccccccccccccaaaggcucuuuucagagccaccagaauu

SEQ ID NO: 6292 - RNA, 1973 nt, Artificial Sequence
  mRNA product Design f-2 comprising derived and/or modified sequence from HRSV(A2)__F_DSCav1_mut6 (opt3)
gggagagcggcucggccauuuugucccagucaguccggaggcugcggcugcagaaguaccgccugcggaguaacugcaaagaagcuuaccauggagcugcucauccuuaaggccaacgcuauuaccacaauacugacugcagugacguucugcuuugccagcggccagaauaucaccgaagaguucuaccaauccacauguucugcggucucaaaaggguauuugggagcuuuaagaacugguugguacaccaguguuauuacaaucgaacugagcaacauuaaggagaauaaaugcaacggcaccgacgccaaggugaaacuaaucaagcaggaacucgauaaguauaaaaaugcaguaacugaccugcagaugcuuauguguuccacacccgccaccgggucuggaucggcuauagcaucaggcguggccgucugcaaggugcugcacuuggagggugagguuaacaaaaucaagagcgcucuccugaguacgaauaaagccguggucucccugucuaacggggugagcguacucacuuuuaagguuuuagaucugaagaauuacauugacaaacagcuuuugccuauccugaacaagcaauccuguucaauuccaaauccggaaaccgugauggaguuccagcagaaaaacaauaggcuacucgaaaucacacgggaguuuagugucaacgcgggagugacuacccccgugagcacauauaugcugaccaauucugagcuucuguccuugauaaacgauaugccuauuacgaacgaccagaagaaacucaugucaaauaacguccaaaucguucgccagcagagcuacaguauuaugugcaucaucaaggaagaggugcuggcauauguagugcaguuaccacuguacggcgucauugauacucccuguuggaaacuccauacaucuccucuuugcaccacuaauacaaaggaaggcuccaacauaugucugacccgaacggaccgugggugguacugcgauaaugccggaagcgugucguucuuuccacaagcugagaccuguaagguuugcucuaacagaguguucugcgacacaaugaacuccuugacucuacccucagaagucaaucuguguaauguggauaucuuuaacccuaaauaugacugcaagauuaugaccaguaaaacagauguaagcuccucuguuaucacuagccucggugccauagugucauguuacggcaagaccaaaugcacagcaaguaauaagaacaaggggauuaucaaaaccuucuccaauggaugugacuaugucagcaacaagggcguggacacugucucuguggguaauacgcuguacuauguuaacaaacaggaggggcagucacuuuacgugaagggagagccaaucauuaacuuuuaugauccgcugguauuccccagugacgaauuugaugcuagcaucucccaagucaaugagaaaauuaaccagucuuuggccuucauaaggaagucggacgaacuccugcacaaugugaacgcgggcaagagcacaaccaauaucaugauuacuaccaucaucauuguuauaaucgugauuuuacugucccuaaucgccgucggccuccugcuuuacugcaaagcacggucaacaccugugaccuugaguaaggaucagcugucugggauuaacaauaucgcuuucagcaacugaggacuaguggaagcauuuuccuggcugauuaaaagaaauuacucagcuauggucaucuguuccuguuagaaggcuaugcagcauauuauauacuaugcgcauguuaugaaaugcauaauaaaaaauuuuaaaaaaucuaaaagaucuaaaaaaaaaaaaaaaaaaaaaaaaaaaaaaaaaaaaaaaaaaaaaaaaaaaaaaaaaaaaaaaaugcaucccccccccccccccccccccccccccccccaaaggcucuuuucagagccaccagaauu

SEQ ID NO: 6293 - RNA, 1973 nt, Artificial Sequence
  mRNA product Design f-2 comprising derived and/or modified sequence from HRSV(A2)__F_DSCav1_mut6 (opt4)
gggagagcggcucggccauuuugucccagucaguccggaggcugcggcugcagaaguaccgccugcggaguaacugcaaagaagcuuaccauggagcugcugauccugaaggccaacgccaucaccaccauccugaccgccgugaccuucugcuucgccagcggccagaacaucaccgaggaguucuaccagagcaccugcagcgccgugagcaagggcuaccugggcgcccugagaaccggcugguacaccagcgugaucaccaucgagcugagcaacaucaaggagaacaagugcaacggcaccgacgccaaggugaagcugaucaagcaggagcuggacaaguacaagaacgccgugaccgaccugcagaugcugaugugcagcacccccgccaccggcagcggcagcgccaucgccagcggcguggccgugugcaaggugcugcaccuggagggcgaggugaacaagaucaagagcgcccugcugagcaccaacaaggccguggugagccugagcaacggcgugagcgugcugaccuucaaggugcuggaccugaagaacuacaucgacaagcagcugcugcccauccugaacaagcagagcugcagcauccccaaccccgagaccgugauggaguuccagcagaagaacaacagacugcuggagaucaccagagaguucagcgugaacgccggcgugaccacccccgugagcaccuacaugcugaccaacagcgagcugcugagccugaucaacgacaugcccaucaccaacgaccagaagaagcugaugagcaacaacgugcagaucgugagacagcagagcuacagcaucaugugcaucaucaaggaggaggugcuggccuacguggugcagcugccccuguacggcgugaucgacacccccugcuggaagcugcacaccagcccccugugcaccaccaacaccaaggagggcagcaacaucugccugaccagaaccgacagaggcugguacugcgacaacgccggcagcgugagcuucuucccccaggccgagaccugcaaggugugcagcaacagaguguucugcgacaccaugaacagccugacccugcccagcgaggugaaccugugcaacguggacaucuucaaccccaaguacgacugcaagaucaugaccagcaagaccgacgugagcagcagcgugaucaccagccugggcgccaucgugagcugcuacggcaagaccaagugcaccgccagcaacaagaacaagggcaucaucaagaccuucagcaacggcugcgacuacgugagcaacaagggcguggacaccgugagcgugggcaacacccuguacuacgugaacaagcaggagggccagagccuguacgugaagggcgagcccaucaucaacuucuacgacccccugguguuccccagcgacgaguucgacgccagcaucagccaggugaacgagaagaucaaccagagccuggccuucaucagaaagagcgacgagcugcugcacaacgugaacgccggcaagagcaccaccaacaucaugaucaccaccaucaucaucgugaucaucgugauccugcugagccugaucgccgugggccugcugcuguacugcaaggccagaagcacccccgugacccugagcaaggaccagcugagcggcaucaacaacaucgccuucagcaacugaggacuaguggaagcauuuuccuggcugauuaaaagaaauuacucagcuauggucaucuguuccuguuagaaggcuaugcagcauauuauauacuaugcgcauguuaugaaaugcauaauaaaaaauuuuaaaaaaucuaaaagaucuaaaaaaaaaaaaaaaaaaaaaaaaaaaaaaaaaaaaaaaaaaaaaaaaaaaaaaaaaaaaaaaaugcaucccccccccccccccccccccccccccccccaaaggcucuuuucagagccaccagaauu

SEQ ID NO: 6294 - RNA, 1973 nt, Artificial Sequence
  mRNA product Design f-2 comprising derived and/or modified sequence from HRSV(A2)__F_DSCav1_mut6 (opt5)
gggagagcggcucggccauuuugucccagucaguccggaggcugcggcugcagaaguaccgccugcggaguaacugcaaagaagcuuaccauggagcugcucauccugaaggccaacgcuauuaccacaauccuuacggccgugaccuucugcuuugcgagcggccagaauauuacagaagaguucuaccaauccaccuguucugcugucagcaaaggguaucugggagcccucagaacaggcugguacaccuccguuaucacaauugaacugucuaacaucaaggagaauaaaugcaacgggaccgacgccaaggugaaacuuaucaagcaggaacuggauaaguauaaaaaugcugugacggaccuccagaugcugauguguagcacccccgccacaggauccggcucugcuauugccagcggggucgcggugugcaagguucugcaccucgagggagaggugaacaaaaucaaguccgcccugcuuagcaccaauaaagcugucgugucucuguccaacggcguuagcgugcucacauuuaagguccuggaucuuaagaauuacauugacaaacagcugcucccuauccugaacaagcaaucuuguuccauuccgaaucccgaaaccgugauggaguuccagcagaaaaacaaucggcugcucgaaaucacgcgcgaguuuagcgugaacgccggcgucacaaccccuguuucuacauauaugcugaccaauuccgagcuucugagccucauuaacgauaugcccaucaccaacgaccagaagaaacugauguccaauaacgugcaaaucgugagacagcagucuuacagcauuaugugcaucauuaaggaagagguccuugcuuaugugguucagcugccucucuacggggugaucgauacacccuguuggaaacugcauacguccccucugugcaccacaaauaccaaggaaggaagcaacauuugucucacacggaccgaccgcggcugguacugcgauaaugccgggucugucuccuucuuuccgcaagcggagacguguaaggugugcagcaacagaguuuucugcgacacaaugaacucucugacccuucccagcgaagugaaucuguguaaugucgauaucuuuaacccuaaauaugacugcaagaucaugaccuccaaaacagaugugucuagcuccgucauuaccagccucggagccaucgugucuuguuacggcaagacaaaaugcacggcuuccaauaagaacaaggggauuaucaaaaccuucagcaauggaugugacuauguuucuaacaagggcguggacacagucuccgugggcaauacccuguacuauguuaacaaacaggaggggcagagccuuuacgugaagggagagcccauuaucaacuuuuaugauccucuggucuuccccuccgacgaauuugaugccucuaucagccaagugaaugagaaaauuaaccagucccucgcuuucauccggaagucugacgaacugcugcacaaugugaacgccggcaagagcacaaccaauauuaugaucacgaccauuaucauuguuaucaucgucauucuccugucccuuaucgccguggggcugcuccuguacugcaaagcucgcagcacaccggugacccugucuaaggaucagcuuuccggaauuaacaauaucgcguucagcaacugaggacuaguggaagcauuuuccuggcugauuaaaagaaauuacucagcuauggucaucuguuccuguuagaaggcuaugcagcauauuauauacuaugcgcauguuaugaaaugcauaauaaaaaauuuuaaaaaaucuaaaagaucuaaaaaaaaaaaaaaaaaaaaaaaaaaaaaaaaaaaaaaaaaaaaaaaaaaaaaaaaaaaaaaaaugcaucccccccccccccccccccccccccccccccaaaggcucuuuucagagccaccagaauu

SEQ ID NO: 6295 - RNA, 1973 nt, Artificial Sequence
  mRNA product Design f-2 comprising derived and/or modified sequence from HRSV(A2)__F_DSCav1_mut6 (opt6)
gggagagcggcucggccauuuugucccagucaguccggaggcugcggcugcagaaguaccgccugcggaguaacugcaaagaagcuuaccauggaacuauuaaucuuaaaagcaaaugcuauaaccacaauauuaacagcaguaacauucuguuuugccuccggacaaaacauaacagaagaauuuuaucaaucaacaugcucugcaguauccaaagguuacuuaggcgcacuacgcacuggaugguauacaucaguaauaacaauagaacuaucaaacauaaaagaaaauaaauguaacgguacugacgcaaaagugaaacuaauuaaacaagaacucgacaaauacaaaaaugcuguaacagaccuacaaaugcuaaugugcucaacacccgcaaccggaucaggaucagccauagccuccggagucgcaguaugcaaaguauuacaucuugaaggagaaguaaauaaaauaaaaucagcauuacuauccacaaauaaagccguaguaucacuaucaaacgguguauccguccuuacauucaaaguauuagaucuaaaaaacuacauagauaaacaacuacuacccaucuuaaacaaacaaucaugcucaauucccaacccagaaacagucauggaauuucaacaaaaaaacaacagacucuuagaaauaacacgagaauuuucaguaaacgcaggaguaaccacaccaguaaguacauacaugcucaccaacucagaauuauuaucacuuauuaacgacaugccaauuacaaacgaccaaaaaaaauuaaugucaaacaauguccaaauuguuagacaacaaucauacucuauaauguguauaauaaaagaagaaguacuagcuuacguaguucaauuaccacuauauggcguaauagauacaccuugcuggaaacuacauacaucuccauuauguacaacuaacacaaaagaaggaucuaacauaugccuaacacgcacagaucgaggaugguacugcgauaaugcagguuccguaucauucuuuccacaagcagaaacauguaaaguaugcucaaacagaguauucugugacacuaugaacuccuuaacccuacccucagaagucaaucuaugcaacguugacauauuuaacccaaaauacgacuguaaaaucaugacaucuaaaacagacguaucaucaucaguuauuacaucccuaggagcaauaguaucuugcuacggaaaaacaaaauguacagcauccaacaaaaacaaaggaauaaucaaaacauucucaaacggcugcgacuacguaucaaacaaagguguagacacaguaucaguaggaaauacuuuauauuacguaaauaaacaagaaggacaaucucuauacguuaaaggcgaaccuauuauaaacuucuacgacccacucguauucccuucagacgaauuugacgcaucuauaucccaaguuaacgaaaaaaucaaccaaucauuagccuuuauaagaaaauccgacgaauuauuacauaacgucaacgcuggaaaaucaacaacuaacauaaugauaaccacaauaauaauagucaucauaguuauauuacuaagucuaauagccguaggccuccuacuuuauugcaaagcaagaucaacaccaguaacauuauccaaagaccaacucagcggcauaaacaauauagcuuuuucaaacuagggacuaguggaagcauuuuccuggcugauuaaaagaaauuacucagcuauggucaucuguuccuguuagaaggcuaugcagcauauuauauacuaugcgcauguuaugaaaugcauaauaaaaaauuuuaaaaaaucuaaaagaucuaaaaaaaaaaaaaaaaaaaaaaaaaaaaaaaaaaaaaaaaaaaaaaaaaaaaaaaaaaaaaaaaugcaucccccccccccccccccccccccccccccccaaaggcucuuuucagagccaccagaauu

SEQ ID NO: 6296 - RNA, 1973 nt, Artificial Sequence
  mRNA product Design f-2 comprising derived and/or modified sequence from HRSV(A2)__F_DSCav1_mut6 (opt11)
gggagagcggcucggccauuuugucccagucaguccggaggcugcggcugcagaaguaccgccugcggaguaacugcaaagaagcuuaccauggaacuccucauccucaaagccaacgcaaucacaaccauacuaacugcaguuacuuucugcuucgcauccggccaaaacaucaccgaagaguucuaccaaucaaccugcuccgcagucuccaaaggauaccucggagcccuucgcaccggcugguacaccuccgucauaaccaucgaacucucaaacauaaaagaaaacaaaugcaacggcacagacgcgaaagucaaacuuaucaaacaagaacucgacaaauacaaaaacgccgucaccgaccugcagaugcucaugugcucaacccccgccacaggaagcggcucugcuaucgcuuccggcgucgccgucugcaaaguccuccaccucgaaggcgaaguaaacaaaaucaagucagcccuccucuccaccaacaaagccgucgucucucucucaaacggcguauccguccucacauucaaaguccucgaccucaaaaacuacaucgacaaacaacuucuccccauccuaaacaaacaaucaugcuccauccccaaccccgaaacagucauggaauuucaacaaaagaacaaccgccucuuagaaaucacccgagaauuuuccgucaacgcgggagucacaacccccguuucuacguauaugcucaccaacuccgaacuccuuucccucauaaacgacaugccaaucaccaacgaccaaaagaaacucaugucaaacaacguccaaaucguccgacaacaauccuacucuauuaugugcaucaucaaagaagaaguucucgccuacgucguccaacuaccccucuacggcgugaucgacacccccugcuggaaacuacacaccucaccccucugcaccaccaacaccaaggaaggcuccaacaucugccucacccgcaccgaccgcggcugguacugcgacaacgcuggcuccgucucauucuucccgcaagccgaaacuugcaaaguaugcuccaacagaguauucugcgacaccaugaacucacuaacccucccuuccgaagucaaccuuugcaacguugacauauucaacccaaaguacgauugcaaaauuaugacauccaaaacagaugucuccuccuccgucaucacaucccucggugccauuguaucaugcuacggaaaaaccaaaugcaccgcauccaacaaaaacaaaggaaucaucaaaaccuucucaaacggcugcgauuacgucucaaacaaaggagucgacacagucuccgucggaaacacccuauacuacgucaacaaacaagaaggccaaucccuguacgucaaaggagaacccaucaucaacuucuacgacccccucgucuucccgagcgacgaguucgacgccuccaucucacaagucaaugaaaagaucaaccaaucccuugccuucauccggaaaucggacgaacuccuacacaacgugaacgcuggaaaaucaaccaccaacaucaugaucacaaccaucauuaucgucaucaucgucauacuccucucccuaaucgccgucggccuccuccuguauugcaaagcucgcuccacccccgucacccuguccaaagaccaacucuccggaaucaacaacaucgccuucucaaacuaaggacuaguggaagcauuuuccuggcugauuaaaagaaauuacucagcuauggucaucuguuccuguuagaaggcuaugcagcauauuauauacuaugcgcauguuaugaaaugcauaauaaaaaauuuuaaaaaaucuaaaagaucuaaaaaaaaaaaaaaaaaaaaaaaaaaaaaaaaaaaaaaaaaaaaaaaaaaaaaaaaaaaaaaaaugcaucccccccccccccccccccccccccccccccaaaggcucuuuucagagccaccagaauu

SEQ ID NO: 6297 - RNA, 1964 nt, Artificial Sequence
  mRNA product Design f-3 comprising derived and/or modified sequence from HRSV(A2)__F_DSCav1_mut6 (opt1)
gggagagucccgcagucggcguccagcggcucugcuuguucgugugugugucguugcaggccuuauucaagcuuaccauggagcugcucauccugaaggccaacgccaucaccaccauccugacggcggugaccuucugcuucgccagcggccagaacaucaccgaggaguucuaccaguccacgugcagcgccgucuccaagggguaccucggcgcccugcggaccggcugguacaccuccgugaucaccaucgagcugagcaacaucaaggagaacaagugcaacgggaccgacgccaaggugaagcucaucaagcaggagcuggacaaguacaagaacgcggucacggaccugcagaugcugaugugcuccaccccggcaaccggcuccggcuccgccaucgcgagcggcgucgccgugugcaaggugcugcaccucgagggggaggucaacaagaucaagagcgcccugcuguccaccaacaaggccguggugagccucuccaacggcgucagcgugcugaccuucaaggugcuggaccucaagaacuacaucgacaagcagcugcugcccauccugaacaagcagagcugcuccauccccaaccccgagacggugauggaguuccagcagaagaacaaccggcuccuggagaucacccgcgaguucagcgugaacgccggggucaccacccccguguccacguacaugcugaccaacagcgagcuccugucccugaucaacgacaugccgaucaccaacgaccagaagaagcucaugagcaacaacgugcagaucguccggcagcaguccuacagcaucaugugcaucaucaaggaggaggugcuggcguacgugguccagcugccccucuacggcgugaucgacacccccugcuggaagcugcacacgagcccccugugcaccaccaacaccaaggagggguccaacaucugccucacgcgcaccgaccggggcugguacugcgacaacgccggcagcgucuccuucuucccgcaggccgagaccugcaaggugugcagcaaccgcguguucugcgacaccaugaacucccugacgcugcccagcgagguaaaccucugcaacgucgacaucuucaaccccaaguacgacugcaagaucaugaccuccaagaccgacgugagcuccagcgugaucaccucccugggggccaucgucagcugcuacggcaagacgaagugcaccgccagcaacaagaacaaggggaucaucaagaccuucuccaacggcugcgacuacgugagcaacaagggcguggacaccguguccgucgggaacacccuguacuacgugaacaagcaggagggccagagccucuacgugaagggggagcccaucaucaacuucuacgacccgcuggucuuccccuccgacgaguucgacgcgagcaucucccaggugaacgagaagaucaaccagagccuggccuucauccgcaaguccgacgagcugcuccacaacgugaacgccggcaagagcacgaccaacaucaugaucaccaccaucaucaucgucaucaucgugauccugcugucccucaucgccguggggcugcugcucuacugcaaggcccggagcacgcccgucacccuguccaaggaccagcugagcggcaucaacaacaucgcguucuccaacugaggacuaguacuggcugcaucucccuuuccucuguccuccauccuucucccaggauggugaagggggaccugguacccagugauccccaccccaggauccuaaaucaugacuuaccugcuaauaaaaacucauuggaaaagugagaagaucuaaaaaaaaaaaaaaaaaaaaaaaaaaaaaaaaaaaaaaaaaaaaaaaaaaaaaaaaaaaaaaaaugcaucccccccccccccccccccccccccccccccaaaggcucuuuucagagccaccagaauu

SEQ ID NO: 6298 - RNA, 1964 nt, Artificial Sequence
  mRNA product Design f-3 comprising derived and/or modified sequence from HRSV(A2)__F_DSCav1_mut6 (opt1)
gggagagucccgcagucggcguccagcggcucugcuuguucgugugugugucguugcaggccuuauucaagcuuaccauggagcugcucauccugaaggccaacgccaucaccaccauccugacggcggugaccuucugcuucgccagcggccagaacaucaccgaggaguucuaccaguccacgugcagcgccgucuccaagggguaccucggcgcccugcgcaccgggugguacaccagcgugaucaccaucgagcuguccaacaucaaggagaacaagugcaacggcaccgacgccaaggugaagcucaucaagcaggagcuggacaaguacaagaacgcggucacggaccugcagaugcucaugugcagcacccccgccaccggguccggcagcgccaucgccuccggcguggcggugugcaagguccugcaccuggagggggaggugaacaagaucaagagcgcccuccuguccaccaacaaggccguggucagccuguccaacggcgugagcgugcucacguucaagguccuggaccugaagaacuacaucgacaagcagcuccugccgauccugaacaagcaguccugcagcauccccaaccccgagaccgugauggaguuccagcagaagaacaaccggcuccuggagaucacccgcgaguucuccgugaacgccggggucaccacgcccgugagcaccuacaugcugaccaacuccgagcuccugagccugaucaacgacaugccgaucaccaacgaccagaagaagcucaugagcaacaacgugcagaucguccggcagcaguccuacagcaucaugugcaucaucaaggaggaggugcuggccuacgugguccagcugccccucuacggcgugaucgacacgcccugcuggaagcugcacaccagcccccugugcaccaccaacacgaaggaggggagcaacaucugccucacccgcaccgaccggggcugguacugcgacaacgcgggcuccgugagcuucuucccgcaggccgagaccugcaaggucugcuccaaccgcguguucugcgacacgaugaacagccugacccugcccuccgaggucaaccucugcaacguggacaucuucaaccccaaguacgacugcaagaucaugaccagcaagaccgacguguccagcuccgucaucacgagccugggggccaucguguccugcuacggcaagaccaagugcaccgccagcaacaagaacaaggggaucaucaagaccuucuccaacggcugcgacuacgugagcaacaagggcgucgacacgguguccguggggaacacccuguacuacgucaacaagcaggagggccagagccucuacgugaagggggagcccaucaucaacuucuacgacccgcugguguuccccagcgacgaguucgacgccuccaucagccaggucaacgagaagaucaaccagucccuggcguucauccggaaguccgacgagcuccugcacaacgugaacgccggcaaguccaccaccaacaucaugaucaccacgaucaucaucgugaucaucgucauccugcucagccugaucgccguggggcugcuccuguacugcaaggcccgcuccacccccgugacccugagcaaggaccagcuguccggcaucaacaacaucgccuucagcaacugaggacuaguacuggcugcaucucccuuuccucuguccuccauccuucucccaggauggugaagggggaccugguacccagugauccccaccccaggauccuaaaucaugacuuaccugcuaauaaaaacucauuggaaaagugagaagaucuaaaaaaaaaaaaaaaaaaaaaaaaaaaaaaaaaaaaaaaaaaaaaaaaaaaaaaaaaaaaaaaaugcaucccccccccccccccccccccccccccccccaaaggcucuuuucagagccaccagaauu

SEQ ID NO: 6299 - RNA, 1964 nt, Artificial Sequence
  mRNA product Design f-3 comprising derived and/or modified sequence from HRSV(A2)__F_DSCav1_mut6 (opt2)
gggagagucccgcagucggcguccagcggcucugcuuguucgugugugugucguugcaggccuuauucaagcuuaccauggagcuccucauccucaaggccaacgccaucaccaccauccucaccgccgucaccuucugcuucgccuccggccagaacaucaccgaggaguucuaccaguccaccugcuccgccgucuccaagggcuaccucggcgcccuccgcaccggcugguacaccuccgucaucaccaucgagcucuccaacaucaaggagaacaagugcaacggcaccgacgccaaggucaagcucaucaagcaggagcucgacaaguacaagaacgccgucaccgaccuccagaugcucaugugcuccacccccgccaccggcuccggcuccgccaucgccuccggcgucgccgucugcaagguccuccaccucgagggcgaggucaacaagaucaaguccgcccuccucuccaccaacaaggccgucgucucccucuccaacggcgucuccguccucaccuucaagguccucgaccucaagaacuacaucgacaagcagcuccuccccauccucaacaagcaguccugcuccauccccaaccccgagaccgucauggaguuccagcagaagaacaaccgccuccucgagaucacccgcgaguucuccgucaacgccggcgucaccacccccgucuccaccuacaugcucaccaacuccgagcuccucucccucaucaacgacaugcccaucaccaacgaccagaagaagcucauguccaacaacguccagaucguccgccagcaguccuacuccaucaugugcaucaucaaggaggagguccucgccuacgucguccagcucccccucuacggcgucaucgacacccccugcuggaagcuccacaccuccccccucugcaccaccaacaccaaggagggcuccaacaucugccucacccgcaccgaccgcggcugguacugcgacaacgccggcuccgucuccuucuucccccaggccgagaccugcaaggucugcuccaaccgcgucuucugcgacaccaugaacucccucacccuccccuccgaggucaaccucugcaacgucgacaucuucaaccccaaguacgacugcaagaucaugaccuccaagaccgacgucuccuccuccgucaucaccucccucggcgccaucgucuccugcuacggcaagaccaagugcaccgccuccaacaagaacaagggcaucaucaagaccuucuccaacggcugcgacuacgucuccaacaagggcgucgacaccgucuccgucggcaacacccucuacuacgucaacaagcaggagggccagucccucuacgucaagggcgagcccaucaucaacuucuacgacccccucgucuuccccuccgacgaguucgacgccuccaucucccaggucaacgagaagaucaaccagucccucgccuucauccgcaaguccgacgagcuccuccacaacgucaacgccggcaaguccaccaccaacaucaugaucaccaccaucaucaucgucaucaucgucauccuccucucccucaucgccgucggccuccuccucuacugcaaggcccgcuccacccccgucacccucuccaaggaccagcucuccggcaucaacaacaucgccuucuccaacugaggacuaguacuggcugcaucucccuuuccucuguccuccauccuucucccaggauggugaagggggaccugguacccagugauccccaccccaggauccuaaaucaugacuuaccugcuaauaaaaacucauuggaaaagugagaagaucuaaaaaaaaaaaaaaaaaaaaaaaaaaaaaaaaaaaaaaaaaaaaaaaaaaaaaaaaaaaaaaaaugcaucccccccccccccccccccccccccccccccaaaggcucuuuucagagccaccagaauu

SEQ ID NO: 6300 - RNA, 1964 nt, Artificial Sequence
  mRNA product Design f-3 comprising derived and/or modified sequence from HRSV(A2)__F_DSCav1_mut6 (opt3)
gggagagucccgcagucggcguccagcggcucugcuuguucgugugugugucguugcaggccuuauucaagcuuaccauggagcugcucauccuuaaggccaacgcuauuaccacaauacugacugcagugacguucugcuuugccagcggccagaauaucaccgaagaguucuaccaauccacauguucugcggucucaaaaggguauuugggagcuuuaagaacugguugguacaccaguguuauuacaaucgaacugagcaacauuaaggagaauaaaugcaacggcaccgacgccaaggugaaacuaaucaagcaggaacucgauaaguauaaaaaugcaguaacugaccugcagaugcuuauguguuccacacccgccaccgggucuggaucggcuauagcaucaggcguggccgucugcaaggugcugcacuuggagggugagguuaacaaaaucaagagcgcucuccugaguacgaauaaagccguggucucccugucuaacggggugagcguacucacuuuuaagguuuuagaucugaagaauuacauugacaaacagcuuuugccuauccugaacaagcaauccuguucaauuccaaauccggaaaccgugauggaguuccagcagaaaaacaauaggcuacucgaaaucacacgggaguuuagugucaacgcgggagugacuacccccgugagcacauauaugcugaccaauucugagcuucuguccuugauaaacgauaugccuauuacgaacgaccagaagaaacucaugucaaauaacguccaaaucguucgccagcagagcuacaguauuaugugcaucaucaaggaagaggugcuggcauauguagugcaguuaccacuguacggcgucauugauacucccuguuggaaacuccauacaucuccucuuugcaccacuaauacaaaggaaggcuccaacauaugucugacccgaacggaccgugggugguacugcgauaaugccggaagcgugucguucuuuccacaagcugagaccuguaagguuugcucuaacagaguguucugcgacacaaugaacuccuugacucuacccucagaagucaaucuguguaauguggauaucuuuaacccuaaauaugacugcaagauuaugaccaguaaaacagauguaagcuccucuguuaucacuagccucggugccauagugucauguuacggcaagaccaaaugcacagcaaguaauaagaacaaggggauuaucaaaaccuucuccaauggaugugacuaugucagcaacaagggcguggacacugucucuguggguaauacgcuguacuauguuaacaaacaggaggggcagucacuuuacgugaagggagagccaaucauuaacuuuuaugauccgcugguauuccccagugacgaauuugaugcuagcaucucccaagucaaugagaaaauuaaccagucuuuggccuucauaaggaagucggacgaacuccugcacaaugugaacgcgggcaagagcacaaccaauaucaugauuacuaccaucaucauuguuauaaucgugauuuuacugucccuaaucgccgucggccuccugcuuuacugcaaagcacggucaacaccugugaccuugaguaaggaucagcugucugggauuaacaauaucgcuuucagcaacugaggacuaguacuggcugcaucucccuuuccucuguccuccauccuucucccaggauggugaagggggaccugguacccagugauccccaccccaggauccuaaaucaugacuuaccugcuaauaaaaacucauuggaaaagugagaagaucuaaaaaaaaaaaaaaaaaaaaaaaaaaaaaaaaaaaaaaaaaaaaaaaaaaaaaaaaaaaaaaaaugcaucccccccccccccccccccccccccccccccaaaggcucuuuucagagccaccagaauu

SEQ ID NO: 6301 - RNA, 1964 nt, Artificial Sequence
  mRNA product Design f-3 comprising derived and/or modified sequence from HRSV(A2)__F_DSCav1_mut6 (opt4)
gggagagucccgcagucggcguccagcggcucugcuuguucgugugugugucguugcaggccuuauucaagcuuaccauggagcugcugauccugaaggccaacgccaucaccaccauccugaccgccgugaccuucugcuucgccagcggccagaacaucaccgaggaguucuaccagagcaccugcagcgccgugagcaagggcuaccugggcgcccugagaaccggcugguacaccagcgugaucaccaucgagcugagcaacaucaaggagaacaagugcaacggcaccgacgccaaggugaagcugaucaagcaggagcuggacaaguacaagaacgccgugaccgaccugcagaugcugaugugcagcacccccgccaccggcagcggcagcgccaucgccagcggcguggccgugugcaaggugcugcaccuggagggcgaggugaacaagaucaagagcgcccugcugagcaccaacaaggccguggugagccugagcaacggcgugagcgugcugaccuucaaggugcuggaccugaagaacuacaucgacaagcagcugcugcccauccugaacaagcagagcugcagcauccccaaccccgagaccgugauggaguuccagcagaagaacaacagacugcuggagaucaccagagaguucagcgugaacgccggcgugaccacccccgugagcaccuacaugcugaccaacagcgagcugcugagccugaucaacgacaugcccaucaccaacgaccagaagaagcugaugagcaacaacgugcagaucgugagacagcagagcuacagcaucaugugcaucaucaaggaggaggugcuggccuacguggugcagcugccccuguacggcgugaucgacacccccugcuggaagcugcacaccagcccccugugcaccaccaacaccaaggagggcagcaacaucugccugaccagaaccgacagaggcugguacugcgacaacgccggcagcgugagcuucuucccccaggccgagaccugcaaggugugcagcaacagaguguucugcgacaccaugaacagccugacccugcccagcgaggugaaccugugcaacguggacaucuucaaccccaaguacgacugcaagaucaugaccagcaagaccgacgugagcagcagcgugaucaccagccugggcgccaucgugagcugcuacggcaagaccaagugcaccgccagcaacaagaacaagggcaucaucaagaccuucagcaacggcugcgacuacgugagcaacaagggcguggacaccgugagcgugggcaacacccuguacuacgugaacaagcaggagggccagagccuguacgugaagggcgagcccaucaucaacuucuacgacccccugguguuccccagcgacgaguucgacgccagcaucagccaggugaacgagaagaucaaccagagccuggccuucaucagaaagagcgacgagcugcugcacaacgugaacgccggcaagagcaccaccaacaucaugaucaccaccaucaucaucgugaucaucgugauccugcugagccugaucgccgugggccugcugcuguacugcaaggccagaagcacccccgugacccugagcaaggaccagcugagcggcaucaacaacaucgccuucagcaacugaggacuaguacuggcugcaucucccuuuccucuguccuccauccuucucccaggauggugaagggggaccugguacccagugauccccaccccaggauccuaaaucaugacuuaccugcuaauaaaaacucauuggaaaagugagaagaucuaaaaaaaaaaaaaaaaaaaaaaaaaaaaaaaaaaaaaaaaaaaaaaaaaaaaaaaaaaaaaaaaugcaucccccccccccccccccccccccccccccccaaaggcucuuuucagagccaccagaauu

SEQ ID NO: 6302 - RNA, 1964 nt, Artificial Sequence
  mRNA product Design f-3 comprising derived and/or modified sequence from HRSV(A2)__F_DSCav1_mut6 (opt5)
gggagagucccgcagucggcguccagcggcucugcuuguucgugugugugucguugcaggccuuauucaagcuuaccauggagcugcucauccugaaggccaacgcuauuaccacaauccuuacggccgugaccuucugcuuugcgagcggccagaauauuacagaagaguucuaccaauccaccuguucugcugucagcaaaggguaucugggagcccucagaacaggcugguacaccuccguuaucacaauugaacugucuaacaucaaggagaauaaaugcaacgggaccgacgccaaggugaaacuuaucaagcaggaacuggauaaguauaaaaaugcugugacggaccuccagaugcugauguguagcacccccgccacaggauccggcucugcuauugccagcggggucgcggugugcaagguucugcaccucgagggagaggugaacaaaaucaaguccgcccugcuuagcaccaauaaagcugucgugucucuguccaacggcguuagcgugcucacauuuaagguccuggaucuuaagaauuacauugacaaacagcugcucccuauccugaacaagcaaucuuguuccauuccgaaucccgaaaccgugauggaguuccagcagaaaaacaaucggcugcucgaaaucacgcgcgaguuuagcgugaacgccggcgucacaaccccuguuucuacauauaugcugaccaauuccgagcuucugagccucauuaacgauaugcccaucaccaacgaccagaagaaacugauguccaauaacgugcaaaucgugagacagcagucuuacagcauuaugugcaucauuaaggaagagguccuugcuuaugugguucagcugccucucuacggggugaucgauacacccuguuggaaacugcauacguccccucugugcaccacaaauaccaaggaaggaagcaacauuugucucacacggaccgaccgcggcugguacugcgauaaugccgggucugucuccuucuuuccgcaagcggagacguguaaggugugcagcaacagaguuuucugcgacacaaugaacucucugacccuucccagcgaagugaaucuguguaaugucgauaucuuuaacccuaaauaugacugcaagaucaugaccuccaaaacagaugugucuagcuccgucauuaccagccucggagccaucgugucuuguuacggcaagacaaaaugcacggcuuccaauaagaacaaggggauuaucaaaaccuucagcaauggaugugacuauguuucuaacaagggcguggacacagucuccgugggcaauacccuguacuauguuaacaaacaggaggggcagagccuuuacgugaagggagagcccauuaucaacuuuuaugauccucuggucuuccccuccgacgaauuugaugccucuaucagccaagugaaugagaaaauuaaccagucccucgcuuucauccggaagucugacgaacugcugcacaaugugaacgccggcaagagcacaaccaauauuaugaucacgaccauuaucauuguuaucaucgucauucuccugucccuuaucgccguggggcugcuccuguacugcaaagcucgcagcacaccggugacccugucuaaggaucagcuuuccggaauuaacaauaucgcguucagcaacugaggacuaguacuggcugcaucucccuuuccucuguccuccauccuucucccaggauggugaagggggaccugguacccagugauccccaccccaggauccuaaaucaugacuuaccugcuaauaaaaacucauuggaaaagugagaagaucuaaaaaaaaaaaaaaaaaaaaaaaaaaaaaaaaaaaaaaaaaaaaaaaaaaaaaaaaaaaaaaaaugcaucccccccccccccccccccccccccccccccaaaggcucuuuucagagccaccagaauu

SEQ ID NO: 6303 - RNA, 1964 nt, Artificial Sequence
  mRNA product Design f-3 comprising derived and/or modified sequence from HRSV(A2)__F_DSCav1_mut6 (opt6)
gggagagucccgcagucggcguccagcggcucugcuuguucgugugugugucguugcaggccuuauucaagcuuaccauggaacuauuaaucuuaaaagcaaaugcuauaaccacaauauuaacagcaguaacauucuguuuugccuccggacaaaacauaacagaagaauuuuaucaaucaacaugcucugcaguauccaaagguuacuuaggcgcacuacgcacuggaugguauacaucaguaauaacaauagaacuaucaaacauaaaagaaaauaaauguaacgguacugacgcaaaagugaaacuaauuaaacaagaacucgacaaauacaaaaaugcuguaacagaccuacaaaugcuaaugugcucaacacccgcaaccggaucaggaucagccauagccuccggagucgcaguaugcaaaguauuacaucuugaaggagaaguaaauaaaauaaaaucagcauuacuauccacaaauaaagccguaguaucacuaucaaacgguguauccguccuuacauucaaaguauuagaucuaaaaaacuacauagauaaacaacuacuacccaucuuaaacaaacaaucaugcucaauucccaacccagaaacagucauggaauuucaacaaaaaaacaacagacucuuagaaauaacacgagaauuuucaguaaacgcaggaguaaccacaccaguaaguacauacaugcucaccaacucagaauuauuaucacuuauuaacgacaugccaauuacaaacgaccaaaaaaaauuaaugucaaacaauguccaaauuguuagacaacaaucauacucuauaauguguauaauaaaagaagaaguacuagcuuacguaguucaauuaccacuauauggcguaauagauacaccuugcuggaaacuacauacaucuccauuauguacaacuaacacaaaagaaggaucuaacauaugccuaacacgcacagaucgaggaugguacugcgauaaugcagguuccguaucauucuuuccacaagcagaaacauguaaaguaugcucaaacagaguauucugugacacuaugaacuccuuaacccuacccucagaagucaaucuaugcaacguugacauauuuaacccaaaauacgacuguaaaaucaugacaucuaaaacagacguaucaucaucaguuauuacaucccuaggagcaauaguaucuugcuacggaaaaacaaaauguacagcauccaacaaaaacaaaggaauaaucaaaacauucucaaacggcugcgacuacguaucaaacaaagguguagacacaguaucaguaggaaauacuuuauauuacguaaauaaacaagaaggacaaucucuauacguuaaaggcgaaccuauuauaaacuucuacgacccacucguauucccuucagacgaauuugacgcaucuauaucccaaguuaacgaaaaaaucaaccaaucauuagccuuuauaagaaaauccgacgaauuauuacauaacgucaacgcuggaaaaucaacaacuaacauaaugauaaccacaauaauaauagucaucauaguuauauuacuaagucuaauagccguaggccuccuacuuuauugcaaagcaagaucaacaccaguaacauuauccaaagaccaacucagcggcauaaacaauauagcuuuuucaaacuagggacuaguacuggcugcaucucccuuuccucuguccuccauccuucucccaggauggugaagggggaccugguacccagugauccccaccccaggauccuaaaucaugacuuaccugcuaauaaaaacucauuggaaaagugagaagaucuaaaaaaaaaaaaaaaaaaaaaaaaaaaaaaaaaaaaaaaaaaaaaaaaaaaaaaaaaaaaaaaaugcaucccccccccccccccccccccccccccccccaaaggcucuuuucagagccaccagaauu

SEQ ID NO: 6304 - RNA, 1964 nt, Artificial Sequence
  mRNA product Design f-3 comprising derived and/or modified sequence from HRSV(A2)__F_DSCav1_mut6 (opt11)
gggagagucccgcagucggcguccagcggcucugcuuguucgugugugugucguugcaggccuuauucaagcuuaccauggaacuccucauccucaaagccaacgcaaucacaaccauacuaacugcaguuacuuucugcuucgcauccggccaaaacaucaccgaagaguucuaccaaucaaccugcuccgcagucuccaaaggauaccucggagcccuucgcaccggcugguacaccuccgucauaaccaucgaacucucaaacauaaaagaaaacaaaugcaacggcacagacgcgaaagucaaacuuaucaaacaagaacucgacaaauacaaaaacgccgucaccgaccugcagaugcucaugugcucaacccccgccacaggaagcggcucugcuaucgcuuccggcgucgccgucugcaaaguccuccaccucgaaggcgaaguaaacaaaaucaagucagcccuccucuccaccaacaaagccgucgucucucucucaaacggcguauccguccucacauucaaaguccucgaccucaaaaacuacaucgacaaacaacuucuccccauccuaaacaaacaaucaugcuccauccccaaccccgaaacagucauggaauuucaacaaaagaacaaccgccucuuagaaaucacccgagaauuuuccgucaacgcgggagucacaacccccguuucuacguauaugcucaccaacuccgaacuccuuucccucauaaacgacaugccaaucaccaacgaccaaaagaaacucaugucaaacaacguccaaaucguccgacaacaauccuacucuauuaugugcaucaucaaagaagaaguucucgccuacgucguccaacuaccccucuacggcgugaucgacacccccugcuggaaacuacacaccucaccccucugcaccaccaacaccaaggaaggcuccaacaucugccucacccgcaccgaccgcggcugguacugcgacaacgcuggcuccgucucauucuucccgcaagccgaaacuugcaaaguaugcuccaacagaguauucugcgacaccaugaacucacuaacccucccuuccgaagucaaccuuugcaacguugacauauucaacccaaaguacgauugcaaaauuaugacauccaaaacagaugucuccuccuccgucaucacaucccucggugccauuguaucaugcuacggaaaaaccaaaugcaccgcauccaacaaaaacaaaggaaucaucaaaaccuucucaaacggcugcgauuacgucucaaacaaaggagucgacacagucuccgucggaaacacccuauacuacgucaacaaacaagaaggccaaucccuguacgucaaaggagaacccaucaucaacuucuacgacccccucgucuucccgagcgacgaguucgacgccuccaucucacaagucaaugaaaagaucaaccaaucccuugccuucauccggaaaucggacgaacuccuacacaacgugaacgcuggaaaaucaaccaccaacaucaugaucacaaccaucauuaucgucaucaucgucauacuccucucccuaaucgccgucggccuccuccuguauugcaaagcucgcuccacccccgucacccuguccaaagaccaacucuccggaaucaacaacaucgccuucucaaacuaaggacuaguacuggcugcaucucccuuuccucuguccuccauccuucucccaggauggugaagggggaccugguacccagugauccccaccccaggauccuaaaucaugacuuaccugcuaauaaaaacucauuggaaaagugagaagaucuaaaaaaaaaaaaaaaaaaaaaaaaaaaaaaaaaaaaaaaaaaaaaaaaaaaaaaaaaaaaaaaaugcaucccccccccccccccccccccccccccccccaaaggcucuuuucagagccaccagaauu

SEQ ID NO: 6305 - RNA, 2180 nt, Artificial Sequence
  mRNA product Design f-4 comprising derived and/or modified sequence from HRSV(A2)__F_DSCav1_mut6 (opt1)
gggagagucccgcagucggcguccagcggcucugcuuguucgugugugugucguugcaggccuuauucaagcuuaccauggagcugcucauccugaaggccaacgccaucaccaccauccugacggcggugaccuucugcuucgccagcggccagaacaucaccgaggaguucuaccaguccacgugcagcgccgucuccaagggguaccucggcgcccugcggaccggcugguacaccuccgugaucaccaucgagcugagcaacaucaaggagaacaagugcaacgggaccgacgccaaggugaagcucaucaagcaggagcuggacaaguacaagaacgcggucacggaccugcagaugcugaugugcuccaccccggcaaccggcuccggcuccgccaucgcgagcggcgucgccgugugcaaggugcugcaccucgagggggaggucaacaagaucaagagcgcccugcuguccaccaacaaggccguggugagccucuccaacggcgucagcgugcugaccuucaaggugcuggaccucaagaacuacaucgacaagcagcugcugcccauccugaacaagcagagcugcuccauccccaaccccgagacggugauggaguuccagcagaagaacaaccggcuccuggagaucacccgcgaguucagcgugaacgccggggucaccacccccguguccacguacaugcugaccaacagcgagcuccugucccugaucaacgacaugccgaucaccaacgaccagaagaagcucaugagcaacaacgugcagaucguccggcagcaguccuacagcaucaugugcaucaucaaggaggaggugcuggcguacgugguccagcugccccucuacggcgugaucgacacccccugcuggaagcugcacacgagcccccugugcaccaccaacaccaaggagggguccaacaucugccucacgcgcaccgaccggggcugguacugcgacaacgccggcagcgucuccuucuucccgcaggccgagaccugcaaggugugcagcaaccgcguguucugcgacaccaugaacucccugacgcugcccagcgagguaaaccucugcaacgucgacaucuucaaccccaaguacgacugcaagaucaugaccuccaagaccgacgugagcuccagcgugaucaccucccugggggccaucgucagcugcuacggcaagacgaagugcaccgccagcaacaagaacaaggggaucaucaagaccuucuccaacggcugcgacuacgugagcaacaagggcguggacaccguguccgucgggaacacccuguacuacgugaacaagcaggagggccagagccucuacgugaagggggagcccaucaucaacuucuacgacccgcuggucuuccccuccgacgaguucgacgcgagcaucucccaggugaacgagaagaucaaccagagccuggccuucauccgcaaguccgacgagcugcuccacaacgugaacgccggcaagagcacgaccaacaucaugaucaccaccaucaucaucgucaucaucgugauccugcugucccucaucgccguggggcugcugcucuacugcaaggcccggagcacgcccgucacccuguccaaggaccagcugagcggcaucaacaacaucgcguucuccaacugaggacuagugaagggaacacccaaauuuaauucagccuuaagcacaauuaauuaagagugaaacguaauuguacaagcaguuggucacccaccauagggcaugaucaacaccgcaaccuuuccuuuuucccccagugauucugaaaaaccccucuucccuucagcuugcuuagauguuccaaauuuaguaagcuuaaggcggccuacagaagaaaaagaaaaaaaaggccacaaaaguucccucucacuuucaguaaauaaaauaaaagcagcaacagaaauaaagaaauaaaugaaauucaaaaugaaauaaauauuguguugugcagcauuaaaaaaucaauaaaaauuaaaaaugagcaagaucuaaaaaaaaaaaaaaaaaaaaaaaaaaaaaaaaaaaaaaaaaaaaaaaaaaaaaaaaaaaaaaaaugcaucccccccccccccccccccccccccccccccaaaggcucuuuucagagccaccagaauu

SEQ ID NO: 6306 - RNA, 2180 nt, Artificial Sequence
  mRNA product Design f-4 comprising derived and/or modified sequence from HRSV(A2)__F_DSCav1_mut6 (opt1)
gggagagucccgcagucggcguccagcggcucugcuuguucgugugugugucguugcaggccuuauucaagcuuaccauggagcugcucauccugaaggccaacgccaucaccaccauccugacggcggugaccuucugcuucgccagcggccagaacaucaccgaggaguucuaccaguccacgugcagcgccgucuccaagggguaccucggcgcccugcgcaccgggugguacaccagcgugaucaccaucgagcuguccaacaucaaggagaacaagugcaacggcaccgacgccaaggugaagcucaucaagcaggagcuggacaaguacaagaacgcggucacggaccugcagaugcucaugugcagcacccccgccaccggguccggcagcgccaucgccuccggcguggcggugugcaagguccugcaccuggagggggaggugaacaagaucaagagcgcccuccuguccaccaacaaggccguggucagccuguccaacggcgugagcgugcucacguucaagguccuggaccugaagaacuacaucgacaagcagcuccugccgauccugaacaagcaguccugcagcauccccaaccccgagaccgugauggaguuccagcagaagaacaaccggcuccuggagaucacccgcgaguucuccgugaacgccggggucaccacgcccgugagcaccuacaugcugaccaacuccgagcuccugagccugaucaacgacaugccgaucaccaacgaccagaagaagcucaugagcaacaacgugcagaucguccggcagcaguccuacagcaucaugugcaucaucaaggaggaggugcuggccuacgugguccagcugccccucuacggcgugaucgacacgcccugcuggaagcugcacaccagcccccugugcaccaccaacacgaaggaggggagcaacaucugccucacccgcaccgaccggggcugguacugcgacaacgcgggcuccgugagcuucuucccgcaggccgagaccugcaaggucugcuccaaccgcguguucugcgacacgaugaacagccugacccugcccuccgaggucaaccucugcaacguggacaucuucaaccccaaguacgacugcaagaucaugaccagcaagaccgacguguccagcuccgucaucacgagccugggggccaucguguccugcuacggcaagaccaagugcaccgccagcaacaagaacaaggggaucaucaagaccuucuccaacggcugcgacuacgugagcaacaagggcgucgacacgguguccguggggaacacccuguacuacgucaacaagcaggagggccagagccucuacgugaagggggagcccaucaucaacuucuacgacccgcugguguuccccagcgacgaguucgacgccuccaucagccaggucaacgagaagaucaaccagucccuggcguucauccggaaguccgacgagcuccugcacaacgugaacgccggcaaguccaccaccaacaucaugaucaccacgaucaucaucgugaucaucgucauccugcucagccugaucgccguggggcugcuccuguacugcaaggcccgcuccacccccgugacccugagcaaggaccagcuguccggcaucaacaacaucgccuucagcaacugaggacuagugaagggaacacccaaauuuaauucagccuuaagcacaauuaauuaagagugaaacguaauuguacaagcaguuggucacccaccauagggcaugaucaacaccgcaaccuuuccuuuuucccccagugauucugaaaaaccccucuucccuucagcuugcuuagauguuccaaauuuaguaagcuuaaggcggccuacagaagaaaaagaaaaaaaaggccacaaaaguucccucucacuuucaguaaauaaaauaaaagcagcaacagaaauaaagaaauaaaugaaauucaaaaugaaauaaauauuguguugugcagcauuaaaaaaucaauaaaaauuaaaaaugagcaagaucuaaaaaaaaaaaaaaaaaaaaaaaaaaaaaaaaaaaaaaaaaaaaaaaaaaaaaaaaaaaaaaaaugcaucccccccccccccccccccccccccccccccaaaggcucuuuucagagccaccagaauu

SEQ ID NO: 6307 - RNA, 2180 nt, Artificial Sequence
  mRNA product Design f-4 comprising derived and/or modified sequence from HRSV(A2)__F_DSCav1_mut6 (opt2)
gggagagucccgcagucggcguccagcggcucugcuuguucgugugugugucguugcaggccuuauucaagcuuaccauggagcuccucauccucaaggccaacgccaucaccaccauccucaccgccgucaccuucugcuucgccuccggccagaacaucaccgaggaguucuaccaguccaccugcuccgccgucuccaagggcuaccucggcgcccuccgcaccggcugguacaccuccgucaucaccaucgagcucuccaacaucaaggagaacaagugcaacggcaccgacgccaaggucaagcucaucaagcaggagcucgacaaguacaagaacgccgucaccgaccuccagaugcucaugugcuccacccccgccaccggcuccggcuccgccaucgccuccggcgucgccgucugcaagguccuccaccucgagggcgaggucaacaagaucaaguccgcccuccucuccaccaacaaggccgucgucucccucuccaacggcgucuccguccucaccuucaagguccucgaccucaagaacuacaucgacaagcagcuccuccccauccucaacaagcaguccugcuccauccccaaccccgagaccgucauggaguuccagcagaagaacaaccgccuccucgagaucacccgcgaguucuccgucaacgccggcgucaccacccccgucuccaccuacaugcucaccaacuccgagcuccucucccucaucaacgacaugcccaucaccaacgaccagaagaagcucauguccaacaacguccagaucguccgccagcaguccuacuccaucaugugcaucaucaaggaggagguccucgccuacgucguccagcucccccucuacggcgucaucgacacccccugcuggaagcuccacaccuccccccucugcaccaccaacaccaaggagggcuccaacaucugccucacccgcaccgaccgcggcugguacugcgacaacgccggcuccgucuccuucuucccccaggccgagaccugcaaggucugcuccaaccgcgucuucugcgacaccaugaacucccucacccuccccuccgaggucaaccucugcaacgucgacaucuucaaccccaaguacgacugcaagaucaugaccuccaagaccgacgucuccuccuccgucaucaccucccucggcgccaucgucuccugcuacggcaagaccaagugcaccgccuccaacaagaacaagggcaucaucaagaccuucuccaacggcugcgacuacgucuccaacaagggcgucgacaccgucuccgucggcaacacccucuacuacgucaacaagcaggagggccagucccucuacgucaagggcgagcccaucaucaacuucuacgacccccucgucuuccccuccgacgaguucgacgccuccaucucccaggucaacgagaagaucaaccagucccucgccuucauccgcaaguccgacgagcuccuccacaacgucaacgccggcaaguccaccaccaacaucaugaucaccaccaucaucaucgucaucaucgucauccuccucucccucaucgccgucggccuccuccucuacugcaaggcccgcuccacccccgucacccucuccaaggaccagcucuccggcaucaacaacaucgccuucuccaacugaggacuagugaagggaacacccaaauuuaauucagccuuaagcacaauuaauuaagagugaaacguaauuguacaagcaguuggucacccaccauagggcaugaucaacaccgcaaccuuuccuuuuucccccagugauucugaaaaaccccucuucccuucagcuugcuuagauguuccaaauuuaguaagcuuaaggcggccuacagaagaaaaagaaaaaaaaggccacaaaaguucccucucacuuucaguaaauaaaauaaaagcagcaacagaaauaaagaaauaaaugaaauucaaaaugaaauaaauauuguguugugcagcauuaaaaaaucaauaaaaauuaaaaaugagcaagaucuaaaaaaaaaaaaaaaaaaaaaaaaaaaaaaaaaaaaaaaaaaaaaaaaaaaaaaaaaaaaaaaaugcaucccccccccccccccccccccccccccccccaaaggcucuuuucagagccaccagaauu

SEQ ID NO: 6308 - RNA, 2180 nt, Artificial Sequence
  mRNA product Design f-4 comprising derived and/or modified sequence from HRSV(A2)__F_DSCav1_mut6 (opt3)
gggagagucccgcagucggcguccagcggcucugcuuguucgugugugugucguugcaggccuuauucaagcuuaccauggagcugcucauccuuaaggccaacgcuauuaccacaauacugacugcagugacguucugcuuugccagcggccagaauaucaccgaagaguucuaccaauccacauguucugcggucucaaaaggguauuugggagcuuuaagaacugguugguacaccaguguuauuacaaucgaacugagcaacauuaaggagaauaaaugcaacggcaccgacgccaaggugaaacuaaucaagcaggaacucgauaaguauaaaaaugcaguaacugaccugcagaugcuuauguguuccacacccgccaccgggucuggaucggcuauagcaucaggcguggccgucugcaaggugcugcacuuggagggugagguuaacaaaaucaagagcgcucuccugaguacgaauaaagccguggucucccugucuaacggggugagcguacucacuuuuaagguuuuagaucugaagaauuacauugacaaacagcuuuugccuauccugaacaagcaauccuguucaauuccaaauccggaaaccgugauggaguuccagcagaaaaacaauaggcuacucgaaaucacacgggaguuuagugucaacgcgggagugacuacccccgugagcacauauaugcugaccaauucugagcuucuguccuugauaaacgauaugccuauuacgaacgaccagaagaaacucaugucaaauaacguccaaaucguucgccagcagagcuacaguauuaugugcaucaucaaggaagaggugcuggcauauguagugcaguuaccacuguacggcgucauugauacucccuguuggaaacuccauacaucuccucuuugcaccacuaauacaaaggaaggcuccaacauaugucugacccgaacggaccgugggugguacugcgauaaugccggaagcgugucguucuuuccacaagcugagaccuguaagguuugcucuaacagaguguucugcgacacaaugaacuccuugacucuacccucagaagucaaucuguguaauguggauaucuuuaacccuaaauaugacugcaagauuaugaccaguaaaacagauguaagcuccucuguuaucacuagccucggugccauagugucauguuacggcaagaccaaaugcacagcaaguaauaagaacaaggggauuaucaaaaccuucuccaauggaugugacuaugucagcaacaagggcguggacacugucucuguggguaauacgcuguacuauguuaacaaacaggaggggcagucacuuuacgugaagggagagccaaucauuaacuuuuaugauccgcugguauuccccagugacgaauuugaugcuagcaucucccaagucaaugagaaaauuaaccagucuuuggccuucauaaggaagucggacgaacuccugcacaaugugaacgcgggcaagagcacaaccaauaucaugauuacuaccaucaucauuguuauaaucgugauuuuacugucccuaaucgccgucggccuccugcuuuacugcaaagcacggucaacaccugugaccuugaguaaggaucagcugucugggauuaacaauaucgcuuucagcaacugaggacuagugaagggaacacccaaauuuaauucagccuuaagcacaauuaauuaagagugaaacguaauuguacaagcaguuggucacccaccauagggcaugaucaacaccgcaaccuuuccuuuuucccccagugauucugaaaaaccccucuucccuucagcuugcuuagauguuccaaauuuaguaagcuuaaggcggccuacagaagaaaaagaaaaaaaaggccacaaaaguucccucucacuuucaguaaauaaaauaaaagcagcaacagaaauaaagaaauaaaugaaauucaaaaugaaauaaauauuguguugugcagcauuaaaaaaucaauaaaaauuaaaaaugagcaagaucuaaaaaaaaaaaaaaaaaaaaaaaaaaaaaaaaaaaaaaaaaaaaaaaaaaaaaaaaaaaaaaaaugcaucccccccccccccccccccccccccccccccaaaggcucuuuucagagccaccagaauu

SEQ ID NO: 6309 - RNA, 2180 nt, Artificial Sequence
  mRNA product Design f-4 comprising derived and/or modified sequence from HRSV(A2)__F_DSCav1_mut6 (opt4)
gggagagucccgcagucggcguccagcggcucugcuuguucgugugugugucguugcaggccuuauucaagcuuaccauggagcugcugauccugaaggccaacgccaucaccaccauccugaccgccgugaccuucugcuucgccagcggccagaacaucaccgaggaguucuaccagagcaccugcagcgccgugagcaagggcuaccugggcgcccugagaaccggcugguacaccagcgugaucaccaucgagcugagcaacaucaaggagaacaagugcaacggcaccgacgccaaggugaagcugaucaagcaggagcuggacaaguacaagaacgccgugaccgaccugcagaugcugaugugcagcacccccgccaccggcagcggcagcgccaucgccagcggcguggccgugugcaaggugcugcaccuggagggcgaggugaacaagaucaagagcgcccugcugagcaccaacaaggccguggugagccugagcaacggcgugagcgugcugaccuucaaggugcuggaccugaagaacuacaucgacaagcagcugcugcccauccugaacaagcagagcugcagcauccccaaccccgagaccgugauggaguuccagcagaagaacaacagacugcuggagaucaccagagaguucagcgugaacgccggcgugaccacccccgugagcaccuacaugcugaccaacagcgagcugcugagccugaucaacgacaugcccaucaccaacgaccagaagaagcugaugagcaacaacgugcagaucgugagacagcagagcuacagcaucaugugcaucaucaaggaggaggugcuggccuacguggugcagcugccccuguacggcgugaucgacacccccugcuggaagcugcacaccagcccccugugcaccaccaacaccaaggagggcagcaacaucugccugaccagaaccgacagaggcugguacugcgacaacgccggcagcgugagcuucuucccccaggccgagaccugcaaggugugcagcaacagaguguucugcgacaccaugaacagccugacccugcccagcgaggugaaccugugcaacguggacaucuucaaccccaaguacgacugcaagaucaugaccagcaagaccgacgugagcagcagcgugaucaccagccugggcgccaucgugagcugcuacggcaagaccaagugcaccgccagcaacaagaacaagggcaucaucaagaccuucagcaacggcugcgacuacgugagcaacaagggcguggacaccgugagcgugggcaacacccuguacuacgugaacaagcaggagggccagagccuguacgugaagggcgagcccaucaucaacuucuacgacccccugguguuccccagcgacgaguucgacgccagcaucagccaggugaacgagaagaucaaccagagccuggccuucaucagaaagagcgacgagcugcugcacaacgugaacgccggcaagagcaccaccaacaucaugaucaccaccaucaucaucgugaucaucgugauccugcugagccugaucgccgugggccugcugcuguacugcaaggccagaagcacccccgugacccugagcaaggaccagcugagcggcaucaacaacaucgccuucagcaacugaggacuagugaagggaacacccaaauuuaauucagccuuaagcacaauuaauuaagagugaaacguaauuguacaagcaguuggucacccaccauagggcaugaucaacaccgcaaccuuuccuuuuucccccagugauucugaaaaaccccucuucccuucagcuugcuuagauguuccaaauuuaguaagcuuaaggcggccuacagaagaaaaagaaaaaaaaggccacaaaaguucccucucacuuucaguaaauaaaauaaaagcagcaacagaaauaaagaaauaaaugaaauucaaaaugaaauaaauauuguguugugcagcauuaaaaaaucaauaaaaauuaaaaaugagcaagaucuaaaaaaaaaaaaaaaaaaaaaaaaaaaaaaaaaaaaaaaaaaaaaaaaaaaaaaaaaaaaaaaaugcaucccccccccccccccccccccccccccccccaaaggcucuuuucagagccaccagaauu

SEQ ID NO: 6310 - RNA, 2180 nt, Artificial Sequence
  mRNA product Design f-4 comprising derived and/or modified sequence from HRSV(A2)__F_DSCav1_mut6 (opt5)
gggagagucccgcagucggcguccagcggcucugcuuguucgugugugugucguugcaggccuuauucaagcuuaccauggagcugcucauccugaaggccaacgcuauuaccacaauccuuacggccgugaccuucugcuuugcgagcggccagaauauuacagaagaguucuaccaauccaccuguucugcugucagcaaaggguaucugggagcccucagaacaggcugguacaccuccguuaucacaauugaacugucuaacaucaaggagaauaaaugcaacgggaccgacgccaaggugaaacuuaucaagcaggaacuggauaaguauaaaaaugcugugacggaccuccagaugcugauguguagcacccccgccacaggauccggcucugcuauugccagcggggucgcggugugcaagguucugcaccucgagggagaggugaacaaaaucaaguccgcccugcuuagcaccaauaaagcugucgugucucuguccaacggcguuagcgugcucacauuuaagguccuggaucuuaagaauuacauugacaaacagcugcucccuauccugaacaagcaaucuuguuccauuccgaaucccgaaaccgugauggaguuccagcagaaaaacaaucggcugcucgaaaucacgcgcgaguuuagcgugaacgccggcgucacaaccccuguuucuacauauaugcugaccaauuccgagcuucugagccucauuaacgauaugcccaucaccaacgaccagaagaaacugauguccaauaacgugcaaaucgugagacagcagucuuacagcauuaugugcaucauuaaggaagagguccuugcuuaugugguucagcugccucucuacggggugaucgauacacccuguuggaaacugcauacguccccucugugcaccacaaauaccaaggaaggaagcaacauuugucucacacggaccgaccgcggcugguacugcgauaaugccgggucugucuccuucuuuccgcaagcggagacguguaaggugugcagcaacagaguuuucugcgacacaaugaacucucugacccuucccagcgaagugaaucuguguaaugucgauaucuuuaacccuaaauaugacugcaagaucaugaccuccaaaacagaugugucuagcuccgucauuaccagccucggagccaucgugucuuguuacggcaagacaaaaugcacggcuuccaauaagaacaaggggauuaucaaaaccuucagcaauggaugugacuauguuucuaacaagggcguggacacagucuccgugggcaauacccuguacuauguuaacaaacaggaggggcagagccuuuacgugaagggagagcccauuaucaacuuuuaugauccucuggucuuccccuccgacgaauuugaugccucuaucagccaagugaaugagaaaauuaaccagucccucgcuuucauccggaagucugacgaacugcugcacaaugugaacgccggcaagagcacaaccaauauuaugaucacgaccauuaucauuguuaucaucgucauucuccugucccuuaucgccguggggcugcuccuguacugcaaagcucgcagcacaccggugacccugucuaaggaucagcuuuccggaauuaacaauaucgcguucagcaacugaggacuagugaagggaacacccaaauuuaauucagccuuaagcacaauuaauuaagagugaaacguaauuguacaagcaguuggucacccaccauagggcaugaucaacaccgcaaccuuuccuuuuucccccagugauucugaaaaaccccucuucccuucagcuugcuuagauguuccaaauuuaguaagcuuaaggcggccuacagaagaaaaagaaaaaaaaggccacaaaaguucccucucacuuucaguaaauaaaauaaaagcagcaacagaaauaaagaaauaaaugaaauucaaaaugaaauaaauauuguguugugcagcauuaaaaaaucaauaaaaauuaaaaaugagcaagaucuaaaaaaaaaaaaaaaaaaaaaaaaaaaaaaaaaaaaaaaaaaaaaaaaaaaaaaaaaaaaaaaaugcaucccccccccccccccccccccccccccccccaaaggcucuuuucagagccaccagaauu

SEQ ID NO: 6311 - RNA, 2180 nt, Artificial Sequence
  mRNA product Design f-4 comprising derived and/or modified sequence from HRSV(A2)__F_DSCav1_mut6 (opt6)
gggagagucccgcagucggcguccagcggcucugcuuguucgugugugugucguugcaggccuuauucaagcuuaccauggaacuauuaaucuuaaaagcaaaugcuauaaccacaauauuaacagcaguaacauucuguuuugccuccggacaaaacauaacagaagaauuuuaucaaucaacaugcucugcaguauccaaagguuacuuaggcgcacuacgcacuggaugguauacaucaguaauaacaauagaacuaucaaacauaaaagaaaauaaauguaacgguacugacgcaaaagugaaacuaauuaaacaagaacucgacaaauacaaaaaugcuguaacagaccuacaaaugcuaaugugcucaacacccgcaaccggaucaggaucagccauagccuccggagucgcaguaugcaaaguauuacaucuugaaggagaaguaaauaaaauaaaaucagcauuacuauccacaaauaaagccguaguaucacuaucaaacgguguauccguccuuacauucaaaguauuagaucuaaaaaacuacauagauaaacaacuacuacccaucuuaaacaaacaaucaugcucaauucccaacccagaaacagucauggaauuucaacaaaaaaacaacagacucuuagaaauaacacgagaauuuucaguaaacgcaggaguaaccacaccaguaaguacauacaugcucaccaacucagaauuauuaucacuuauuaacgacaugccaauuacaaacgaccaaaaaaaauuaaugucaaacaauguccaaauuguuagacaacaaucauacucuauaauguguauaauaaaagaagaaguacuagcuuacguaguucaauuaccacuauauggcguaauagauacaccuugcuggaaacuacauacaucuccauuauguacaacuaacacaaaagaaggaucuaacauaugccuaacacgcacagaucgaggaugguacugcgauaaugcagguuccguaucauucuuuccacaagcagaaacauguaaaguaugcucaaacagaguauucugugacacuaugaacuccuuaacccuacccucagaagucaaucuaugcaacguugacauauuuaacccaaaauacgacuguaaaaucaugacaucuaaaacagacguaucaucaucaguuauuacaucccuaggagcaauaguaucuugcuacggaaaaacaaaauguacagcauccaacaaaaacaaaggaauaaucaaaacauucucaaacggcugcgacuacguaucaaacaaagguguagacacaguaucaguaggaaauacuuuauauuacguaaauaaacaagaaggacaaucucuauacguuaaaggcgaaccuauuauaaacuucuacgacccacucguauucccuucagacgaauuugacgcaucuauaucccaaguuaacgaaaaaaucaaccaaucauuagccuuuauaagaaaauccgacgaauuauuacauaacgucaacgcuggaaaaucaacaacuaacauaaugauaaccacaauaauaauagucaucauaguuauauuacuaagucuaauagccguaggccuccuacuuuauugcaaagcaagaucaacaccaguaacauuauccaaagaccaacucagcggcauaaacaauauagcuuuuucaaacuagggacuagugaagggaacacccaaauuuaauucagccuuaagcacaauuaauuaagagugaaacguaauuguacaagcaguuggucacccaccauagggcaugaucaacaccgcaaccuuuccuuuuucccccagugauucugaaaaaccccucuucccuucagcuugcuuagauguuccaaauuuaguaagcuuaaggcggccuacagaagaaaaagaaaaaaaaggccacaaaaguucccucucacuuucaguaaauaaaauaaaagcagcaacagaaauaaagaaauaaaugaaauucaaaaugaaauaaauauuguguugugcagcauuaaaaaaucaauaaaaauuaaaaaugagcaagaucuaaaaaaaaaaaaaaaaaaaaaaaaaaaaaaaaaaaaaaaaaaaaaaaaaaaaaaaaaaaaaaaaugcaucccccccccccccccccccccccccccccccaaaggcucuuuucagagccaccagaauu

SEQ ID NO: 6312 - RNA, 2180 nt, Artificial Sequence
  mRNA product Design f-4 comprising derived and/or modified sequence from HRSV(A2)__F_DSCav1_mut6 (opt11)
gggagagucccgcagucggcguccagcggcucugcuuguucgugugugugucguugcaggccuuauucaagcuuaccauggaacuccucauccucaaagccaacgcaaucacaaccauacuaacugcaguuacuuucugcuucgcauccggccaaaacaucaccgaagaguucuaccaaucaaccugcuccgcagucuccaaaggauaccucggagcccuucgcaccggcugguacaccuccgucauaaccaucgaacucucaaacauaaaagaaaacaaaugcaacggcacagacgcgaaagucaaacuuaucaaacaagaacucgacaaauacaaaaacgccgucaccgaccugcagaugcucaugugcucaacccccgccacaggaagcggcucugcuaucgcuuccggcgucgccgucugcaaaguccuccaccucgaaggcgaaguaaacaaaaucaagucagcccuccucuccaccaacaaagccgucgucucucucucaaacggcguauccguccucacauucaaaguccucgaccucaaaaacuacaucgacaaacaacuucuccccauccuaaacaaacaaucaugcuccauccccaaccccgaaacagucauggaauuucaacaaaagaacaaccgccucuuagaaaucacccgagaauuuuccgucaacgcgggagucacaacccccguuucuacguauaugcucaccaacuccgaacuccuuucccucauaaacgacaugccaaucaccaacgaccaaaagaaacucaugucaaacaacguccaaaucguccgacaacaauccuacucuauuaugugcaucaucaaagaagaaguucucgccuacgucguccaacuaccccucuacggcgugaucgacacccccugcuggaaacuacacaccucaccccucugcaccaccaacaccaaggaaggcuccaacaucugccucacccgcaccgaccgcggcugguacugcgacaacgcuggcuccgucucauucuucccgcaagccgaaacuugcaaaguaugcuccaacagaguauucugcgacaccaugaacucacuaacccucccuuccgaagucaaccuuugcaacguugacauauucaacccaaaguacgauugcaaaauuaugacauccaaaacagaugucuccuccuccgucaucacaucccucggugccauuguaucaugcuacggaaaaaccaaaugcaccgcauccaacaaaaacaaaggaaucaucaaaaccuucucaaacggcugcgauuacgucucaaacaaaggagucgacacagucuccgucggaaacacccuauacuacgucaacaaacaagaaggccaaucccuguacgucaaaggagaacccaucaucaacuucuacgacccccucgucuucccgagcgacgaguucgacgccuccaucucacaagucaaugaaaagaucaaccaaucccuugccuucauccggaaaucggacgaacuccuacacaacgugaacgcuggaaaaucaaccaccaacaucaugaucacaaccaucauuaucgucaucaucgucauacuccucucccuaaucgccgucggccuccuccuguauugcaaagcucgcuccacccccgucacccuguccaaagaccaacucuccggaaucaacaacaucgccuucucaaacuaaggacuagugaagggaacacccaaauuuaauucagccuuaagcacaauuaauuaagagugaaacguaauuguacaagcaguuggucacccaccauagggcaugaucaacaccgcaaccuuuccuuuuucccccagugauucugaaaaaccccucuucccuucagcuugcuuagauguuccaaauuuaguaagcuuaaggcggccuacagaagaaaaagaaaaaaaaggccacaaaaguucccucucacuuucaguaaauaaaauaaaagcagcaacagaaauaaagaaauaaaugaaauucaaaaugaaauaaauauuguguugugcagcauuaaaaaaucaauaaaaauuaaaaaugagcaagaucuaaaaaaaaaaaaaaaaaaaaaaaaaaaaaaaaaaaaaaaaaaaaaaaaaaaaaaaaaaaaaaaaugcaucccccccccccccccccccccccccccccccaaaggcucuuuucagagccaccagaauu

SEQ ID NO: 6313 - RNA, 1956 nt, Artificial Sequence
  mRNA product Design f-5 comprising derived and/or modified sequence from HRSV(A2)__F_DSCav1_mut6 (opt1)
gggagacuuucccauucuguagcagaauuugguguugccuguggucuuggucccgcggagaagcuuaccauggagcugcucauccugaaggccaacgccaucaccaccauccugacggcggugaccuucugcuucgccagcggccagaacaucaccgaggaguucuaccaguccacgugcagcgccgucuccaagggguaccucggcgcccugcggaccggcugguacaccuccgugaucaccaucgagcugagcaacaucaaggagaacaagugcaacgggaccgacgccaaggugaagcucaucaagcaggagcuggacaaguacaagaacgcggucacggaccugcagaugcugaugugcuccaccccggcaaccggcuccggcuccgccaucgcgagcggcgucgccgugugcaaggugcugcaccucgagggggaggucaacaagaucaagagcgcccugcuguccaccaacaaggccguggugagccucuccaacggcgucagcgugcugaccuucaaggugcuggaccucaagaacuacaucgacaagcagcugcugcccauccugaacaagcagagcugcuccauccccaaccccgagacggugauggaguuccagcagaagaacaaccggcuccuggagaucacccgcgaguucagcgugaacgccggggucaccacccccguguccacguacaugcugaccaacagcgagcuccugucccugaucaacgacaugccgaucaccaacgaccagaagaagcucaugagcaacaacgugcagaucguccggcagcaguccuacagcaucaugugcaucaucaaggaggaggugcuggcguacgugguccagcugccccucuacggcgugaucgacacccccugcuggaagcugcacacgagcccccugugcaccaccaacaccaaggagggguccaacaucugccucacgcgcaccgaccggggcugguacugcgacaacgccggcagcgucuccuucuucccgcaggccgagaccugcaaggugugcagcaaccgcguguucugcgacaccaugaacucccugacgcugcccagcgagguaaaccucugcaacgucgacaucuucaaccccaaguacgacugcaagaucaugaccuccaagaccgacgugagcuccagcgugaucaccucccugggggccaucgucagcugcuacggcaagacgaagugcaccgccagcaacaagaacaaggggaucaucaagaccuucuccaacggcugcgacuacgugagcaacaagggcguggacaccguguccgucgggaacacccuguacuacgugaacaagcaggagggccagagccucuacgugaagggggagcccaucaucaacuucuacgacccgcuggucuuccccuccgacgaguucgacgcgagcaucucccaggugaacgagaagaucaaccagagccuggccuucauccgcaaguccgacgagcugcuccacaacgugaacgccggcaagagcacgaccaacaucaugaucaccaccaucaucaucgucaucaucgugauccugcugucccucaucgccguggggcugcugcucuacugcaaggcccggagcacgcccgucacccuguccaaggaccagcugagcggcaucaacaacaucgcguucuccaacugaggacuaguacuggcugcaucucccuuuccucuguccuccauccuucucccaggauggugaagggggaccugguacccagugauccccaccccaggauccuaaaucaugacuuaccugcuaauaaaaacucauuggaaaagugagaagaucuaaaaaaaaaaaaaaaaaaaaaaaaaaaaaaaaaaaaaaaaaaaaaaaaaaaaaaaaaaaaaaaaugcaucccccccccccccccccccccccccccccccaaaggcucuuuucagagccaccagaauu

SEQ ID NO: 6314 - RNA, 1956 nt, Artificial Sequence
  mRNA product Design f-5 comprising derived and/or modified sequence from HRSV(A2)__F_DSCav1_mut6 (opt1)
gggagacuuucccauucuguagcagaauuugguguugccuguggucuuggucccgcggagaagcuuaccauggagcugcucauccugaaggccaacgccaucaccaccauccugacggcggugaccuucugcuucgccagcggccagaacaucaccgaggaguucuaccaguccacgugcagcgccgucuccaagggguaccucggcgcccugcgcaccgggugguacaccagcgugaucaccaucgagcuguccaacaucaaggagaacaagugcaacggcaccgacgccaaggugaagcucaucaagcaggagcuggacaaguacaagaacgcggucacggaccugcagaugcucaugugcagcacccccgccaccggguccggcagcgccaucgccuccggcguggcggugugcaagguccugcaccuggagggggaggugaacaagaucaagagcgcccuccuguccaccaacaaggccguggucagccuguccaacggcgugagcgugcucacguucaagguccuggaccugaagaacuacaucgacaagcagcuccugccgauccugaacaagcaguccugcagcauccccaaccccgagaccgugauggaguuccagcagaagaacaaccggcuccuggagaucacccgcgaguucuccgugaacgccggggucaccacgcccgugagcaccuacaugcugaccaacuccgagcuccugagccugaucaacgacaugccgaucaccaacgaccagaagaagcucaugagcaacaacgugcagaucguccggcagcaguccuacagcaucaugugcaucaucaaggaggaggugcuggccuacgugguccagcugccccucuacggcgugaucgacacgcccugcuggaagcugcacaccagcccccugugcaccaccaacacgaaggaggggagcaacaucugccucacccgcaccgaccggggcugguacugcgacaacgcgggcuccgugagcuucuucccgcaggccgagaccugcaaggucugcuccaaccgcguguucugcgacacgaugaacagccugacccugcccuccgaggucaaccucugcaacguggacaucuucaaccccaaguacgacugcaagaucaugaccagcaagaccgacguguccagcuccgucaucacgagccugggggccaucguguccugcuacggcaagaccaagugcaccgccagcaacaagaacaaggggaucaucaagaccuucuccaacggcugcgacuacgugagcaacaagggcgucgacacgguguccguggggaacacccuguacuacgucaacaagcaggagggccagagccucuacgugaagggggagcccaucaucaacuucuacgacccgcugguguuccccagcgacgaguucgacgccuccaucagccaggucaacgagaagaucaaccagucccuggcguucauccggaaguccgacgagcuccugcacaacgugaacgccggcaaguccaccaccaacaucaugaucaccacgaucaucaucgugaucaucgucauccugcucagccugaucgccguggggcugcuccuguacugcaaggcccgcuccacccccgugacccugagcaaggaccagcuguccggcaucaacaacaucgccuucagcaacugaggacuaguacuggcugcaucucccuuuccucuguccuccauccuucucccaggauggugaagggggaccugguacccagugauccccaccccaggauccuaaaucaugacuuaccugcuaauaaaaacucauuggaaaagugagaagaucuaaaaaaaaaaaaaaaaaaaaaaaaaaaaaaaaaaaaaaaaaaaaaaaaaaaaaaaaaaaaaaaaugcaucccccccccccccccccccccccccccccccaaaggcucuuuucagagccaccagaauu

SEQ ID NO: 6315 - RNA, 1956 nt, Artificial Sequence
  mRNA product Design f-5 comprising derived and/or modified sequence from HRSV(A2)__F_DSCav1_mut6 (opt2)
gggagacuuucccauucuguagcagaauuugguguugccuguggucuuggucccgcggagaagcuuaccauggagcuccucauccucaaggccaacgccaucaccaccauccucaccgccgucaccuucugcuucgccuccggccagaacaucaccgaggaguucuaccaguccaccugcuccgccgucuccaagggcuaccucggcgcccuccgcaccggcugguacaccuccgucaucaccaucgagcucuccaacaucaaggagaacaagugcaacggcaccgacgccaaggucaagcucaucaagcaggagcucgacaaguacaagaacgccgucaccgaccuccagaugcucaugugcuccacccccgccaccggcuccggcuccgccaucgccuccggcgucgccgucugcaagguccuccaccucgagggcgaggucaacaagaucaaguccgcccuccucuccaccaacaaggccgucgucucccucuccaacggcgucuccguccucaccuucaagguccucgaccucaagaacuacaucgacaagcagcuccuccccauccucaacaagcaguccugcuccauccccaaccccgagaccgucauggaguuccagcagaagaacaaccgccuccucgagaucacccgcgaguucuccgucaacgccggcgucaccacccccgucuccaccuacaugcucaccaacuccgagcuccucucccucaucaacgacaugcccaucaccaacgaccagaagaagcucauguccaacaacguccagaucguccgccagcaguccuacuccaucaugugcaucaucaaggaggagguccucgccuacgucguccagcucccccucuacggcgucaucgacacccccugcuggaagcuccacaccuccccccucugcaccaccaacaccaaggagggcuccaacaucugccucacccgcaccgaccgcggcugguacugcgacaacgccggcuccgucuccuucuucccccaggccgagaccugcaaggucugcuccaaccgcgucuucugcgacaccaugaacucccucacccuccccuccgaggucaaccucugcaacgucgacaucuucaaccccaaguacgacugcaagaucaugaccuccaagaccgacgucuccuccuccgucaucaccucccucggcgccaucgucuccugcuacggcaagaccaagugcaccgccuccaacaagaacaagggcaucaucaagaccuucuccaacggcugcgacuacgucuccaacaagggcgucgacaccgucuccgucggcaacacccucuacuacgucaacaagcaggagggccagucccucuacgucaagggcgagcccaucaucaacuucuacgacccccucgucuuccccuccgacgaguucgacgccuccaucucccaggucaacgagaagaucaaccagucccucgccuucauccgcaaguccgacgagcuccuccacaacgucaacgccggcaaguccaccaccaacaucaugaucaccaccaucaucaucgucaucaucgucauccuccucucccucaucgccgucggccuccuccucuacugcaaggcccgcuccacccccgucacccucuccaaggaccagcucuccggcaucaacaacaucgccuucuccaacugaggacuaguacuggcugcaucucccuuuccucuguccuccauccuucucccaggauggugaagggggaccugguacccagugauccccaccccaggauccuaaaucaugacuuaccugcuaauaaaaacucauuggaaaagugagaagaucuaaaaaaaaaaaaaaaaaaaaaaaaaaaaaaaaaaaaaaaaaaaaaaaaaaaaaaaaaaaaaaaaugcaucccccccccccccccccccccccccccccccaaaggcucuuuucagagccaccagaauu

SEQ ID NO: 6316 - RNA, 1956 nt, Artificial Sequence
  mRNA product Design f-5 comprising derived and/or modified sequence from HRSV(A2)__F_DSCav1_mut6 (opt3)
gggagacuuucccauucuguagcagaauuugguguugccuguggucuuggucccgcggagaagcuuaccauggagcugcucauccuuaaggccaacgcuauuaccacaauacugacugcagugacguucugcuuugccagcggccagaauaucaccgaagaguucuaccaauccacauguucugcggucucaaaaggguauuugggagcuuuaagaacugguugguacaccaguguuauuacaaucgaacugagcaacauuaaggagaauaaaugcaacggcaccgacgccaaggugaaacuaaucaagcaggaacucgauaaguauaaaaaugcaguaacugaccugcagaugcuuauguguuccacacccgccaccgggucuggaucggcuauagcaucaggcguggccgucugcaaggugcugcacuuggagggugagguuaacaaaaucaagagcgcucuccugaguacgaauaaagccguggucucccugucuaacggggugagcguacucacuuuuaagguuuuagaucugaagaauuacauugacaaacagcuuuugccuauccugaacaagcaauccuguucaauuccaaauccggaaaccgugauggaguuccagcagaaaaacaauaggcuacucgaaaucacacgggaguuuagugucaacgcgggagugacuacccccgugagcacauauaugcugaccaauucugagcuucuguccuugauaaacgauaugccuauuacgaacgaccagaagaaacucaugucaaauaacguccaaaucguucgccagcagagcuacaguauuaugugcaucaucaaggaagaggugcuggcauauguagugcaguuaccacuguacggcgucauugauacucccuguuggaaacuccauacaucuccucuuugcaccacuaauacaaaggaaggcuccaacauaugucugacccgaacggaccgugggugguacugcgauaaugccggaagcgugucguucuuuccacaagcugagaccuguaagguuugcucuaacagaguguucugcgacacaaugaacuccuugacucuacccucagaagucaaucuguguaauguggauaucuuuaacccuaaauaugacugcaagauuaugaccaguaaaacagauguaagcuccucuguuaucacuagccucggugccauagugucauguuacggcaagaccaaaugcacagcaaguaauaagaacaaggggauuaucaaaaccuucuccaauggaugugacuaugucagcaacaagggcguggacacugucucuguggguaauacgcuguacuauguuaacaaacaggaggggcagucacuuuacgugaagggagagccaaucauuaacuuuuaugauccgcugguauuccccagugacgaauuugaugcuagcaucucccaagucaaugagaaaauuaaccagucuuuggccuucauaaggaagucggacgaacuccugcacaaugugaacgcgggcaagagcacaaccaauaucaugauuacuaccaucaucauuguuauaaucgugauuuuacugucccuaaucgccgucggccuccugcuuuacugcaaagcacggucaacaccugugaccuugaguaaggaucagcugucugggauuaacaauaucgcuuucagcaacugaggacuaguacuggcugcaucucccuuuccucuguccuccauccuucucccaggauggugaagggggaccugguacccagugauccccaccccaggauccuaaaucaugacuuaccugcuaauaaaaacucauuggaaaagugagaagaucuaaaaaaaaaaaaaaaaaaaaaaaaaaaaaaaaaaaaaaaaaaaaaaaaaaaaaaaaaaaaaaaaugcaucccccccccccccccccccccccccccccccaaaggcucuuuucagagccaccagaauu

SEQ ID NO: 6317 - RNA, 1956 nt, Artificial Sequence
  mRNA product Design f-5 comprising derived and/or modified sequence from HRSV(A2)__F_DSCav1_mut6 (opt4)
gggagacuuucccauucuguagcagaauuugguguugccuguggucuuggucccgcggagaagcuuaccauggagcugcugauccugaaggccaacgccaucaccaccauccugaccgccgugaccuucugcuucgccagcggccagaacaucaccgaggaguucuaccagagcaccugcagcgccgugagcaagggcuaccugggcgcccugagaaccggcugguacaccagcgugaucaccaucgagcugagcaacaucaaggagaacaagugcaacggcaccgacgccaaggugaagcugaucaagcaggagcuggacaaguacaagaacgccgugaccgaccugcagaugcugaugugcagcacccccgccaccggcagcggcagcgccaucgccagcggcguggccgugugcaaggugcugcaccuggagggcgaggugaacaagaucaagagcgcccugcugagcaccaacaaggccguggugagccugagcaacggcgugagcgugcugaccuucaaggugcuggaccugaagaacuacaucgacaagcagcugcugcccauccugaacaagcagagcugcagcauccccaaccccgagaccgugauggaguuccagcagaagaacaacagacugcuggagaucaccagagaguucagcgugaacgccggcgugaccacccccgugagcaccuacaugcugaccaacagcgagcugcugagccugaucaacgacaugcccaucaccaacgaccagaagaagcugaugagcaacaacgugcagaucgugagacagcagagcuacagcaucaugugcaucaucaaggaggaggugcuggccuacguggugcagcugccccuguacggcgugaucgacacccccugcuggaagcugcacaccagcccccugugcaccaccaacaccaaggagggcagcaacaucugccugaccagaaccgacagaggcugguacugcgacaacgccggcagcgugagcuucuucccccaggccgagaccugcaaggugugcagcaacagaguguucugcgacaccaugaacagccugacccugcccagcgaggugaaccugugcaacguggacaucuucaaccccaaguacgacugcaagaucaugaccagcaagaccgacgugagcagcagcgugaucaccagccugggcgccaucgugagcugcuacggcaagaccaagugcaccgccagcaacaagaacaagggcaucaucaagaccuucagcaacggcugcgacuacgugagcaacaagggcguggacaccgugagcgugggcaacacccuguacuacgugaacaagcaggagggccagagccuguacgugaagggcgagcccaucaucaacuucuacgacccccugguguuccccagcgacgaguucgacgccagcaucagccaggugaacgagaagaucaaccagagccuggccuucaucagaaagagcgacgagcugcugcacaacgugaacgccggcaagagcaccaccaacaucaugaucaccaccaucaucaucgugaucaucgugauccugcugagccugaucgccgugggccugcugcuguacugcaaggccagaagcacccccgugacccugagcaaggaccagcugagcggcaucaacaacaucgccuucagcaacugaggacuaguacuggcugcaucucccuuuccucuguccuccauccuucucccaggauggugaagggggaccugguacccagugauccccaccccaggauccuaaaucaugacuuaccugcuaauaaaaacucauuggaaaagugagaagaucuaaaaaaaaaaaaaaaaaaaaaaaaaaaaaaaaaaaaaaaaaaaaaaaaaaaaaaaaaaaaaaaaugcaucccccccccccccccccccccccccccccccaaaggcucuuuucagagccaccagaauu

SEQ ID NO: 6318 - RNA, 1956 nt, Artificial Sequence
  mRNA product Design f-5 comprising derived and/or modified sequence from HRSV(A2)__F_DSCav1_mut6 (opt5)
gggagacuuucccauucuguagcagaauuugguguugccuguggucuuggucccgcggagaagcuuaccauggagcugcucauccugaaggccaacgcuauuaccacaauccuuacggccgugaccuucugcuuugcgagcggccagaauauuacagaagaguucuaccaauccaccuguucugcugucagcaaaggguaucugggagcccucagaacaggcugguacaccuccguuaucacaauugaacugucuaacaucaaggagaauaaaugcaacgggaccgacgccaaggugaaacuuaucaagcaggaacuggauaaguauaaaaaugcugugacggaccuccagaugcugauguguagcacccccgccacaggauccggcucugcuauugccagcggggucgcggugugcaagguucugcaccucgagggagaggugaacaaaaucaaguccgcccugcuuagcaccaauaaagcugucgugucucuguccaacggcguuagcgugcucacauuuaagguccuggaucuuaagaauuacauugacaaacagcugcucccuauccugaacaagcaaucuuguuccauuccgaaucccgaaaccgugauggaguuccagcagaaaaacaaucggcugcucgaaaucacgcgcgaguuuagcgugaacgccggcgucacaaccccuguuucuacauauaugcugaccaauuccgagcuucugagccucauuaacgauaugcccaucaccaacgaccagaagaaacugauguccaauaacgugcaaaucgugagacagcagucuuacagcauuaugugcaucauuaaggaagagguccuugcuuaugugguucagcugccucucuacggggugaucgauacacccuguuggaaacugcauacguccccucugugcaccacaaauaccaaggaaggaagcaacauuugucucacacggaccgaccgcggcugguacugcgauaaugccgggucugucuccuucuuuccgcaagcggagacguguaaggugugcagcaacagaguuuucugcgacacaaugaacucucugacccuucccagcgaagugaaucuguguaaugucgauaucuuuaacccuaaauaugacugcaagaucaugaccuccaaaacagaugugucuagcuccgucauuaccagccucggagccaucgugucuuguuacggcaagacaaaaugcacggcuuccaauaagaacaaggggauuaucaaaaccuucagcaauggaugugacuauguuucuaacaagggcguggacacagucuccgugggcaauacccuguacuauguuaacaaacaggaggggcagagccuuuacgugaagggagagcccauuaucaacuuuuaugauccucuggucuuccccuccgacgaauuugaugccucuaucagccaagugaaugagaaaauuaaccagucccucgcuuucauccggaagucugacgaacugcugcacaaugugaacgccggcaagagcacaaccaauauuaugaucacgaccauuaucauuguuaucaucgucauucuccugucccuuaucgccguggggcugcuccuguacugcaaagcucgcagcacaccggugacccugucuaaggaucagcuuuccggaauuaacaauaucgcguucagcaacugaggacuaguacuggcugcaucucccuuuccucuguccuccauccuucucccaggauggugaagggggaccugguacccagugauccccaccccaggauccuaaaucaugacuuaccugcuaauaaaaacucauuggaaaagugagaagaucuaaaaaaaaaaaaaaaaaaaaaaaaaaaaaaaaaaaaaaaaaaaaaaaaaaaaaaaaaaaaaaaaugcaucccccccccccccccccccccccccccccccaaaggcucuuuucagagccaccagaauu

SEQ ID NO: 6319 - RNA, 1956 nt, Artificial Sequence
  mRNA product Design f-5 comprising derived and/or modified sequence from HRSV(A2)__F_DSCav1_mut6 (opt6)
gggagacuuucccauucuguagcagaauuugguguugccuguggucuuggucccgcggagaagcuuaccauggaacuauuaaucuuaaaagcaaaugcuauaaccacaauauuaacagcaguaacauucuguuuugccuccggacaaaacauaacagaagaauuuuaucaaucaacaugcucugcaguauccaaagguuacuuaggcgcacuacgcacuggaugguauacaucaguaauaacaauagaacuaucaaacauaaaagaaaauaaauguaacgguacugacgcaaaagugaaacuaauuaaacaagaacucgacaaauacaaaaaugcuguaacagaccuacaaaugcuaaugugcucaacacccgcaaccggaucaggaucagccauagccuccggagucgcaguaugcaaaguauuacaucuugaaggagaaguaaauaaaauaaaaucagcauuacuauccacaaauaaagccguaguaucacuaucaaacgguguauccguccuuacauucaaaguauuagaucuaaaaaacuacauagauaaacaacuacuacccaucuuaaacaaacaaucaugcucaauucccaacccagaaacagucauggaauuucaacaaaaaaacaacagacucuuagaaauaacacgagaauuuucaguaaacgcaggaguaaccacaccaguaaguacauacaugcucaccaacucagaauuauuaucacuuauuaacgacaugccaauuacaaacgaccaaaaaaaauuaaugucaaacaauguccaaauuguuagacaacaaucauacucuauaauguguauaauaaaagaagaaguacuagcuuacguaguucaauuaccacuauauggcguaauagauacaccuugcuggaaacuacauacaucuccauuauguacaacuaacacaaaagaaggaucuaacauaugccuaacacgcacagaucgaggaugguacugcgauaaugcagguuccguaucauucuuuccacaagcagaaacauguaaaguaugcucaaacagaguauucugugacacuaugaacuccuuaacccuacccucagaagucaaucuaugcaacguugacauauuuaacccaaaauacgacuguaaaaucaugacaucuaaaacagacguaucaucaucaguuauuacaucccuaggagcaauaguaucuugcuacggaaaaacaaaauguacagcauccaacaaaaacaaaggaauaaucaaaacauucucaaacggcugcgacuacguaucaaacaaagguguagacacaguaucaguaggaaauacuuuauauuacguaaauaaacaagaaggacaaucucuauacguuaaaggcgaaccuauuauaaacuucuacgacccacucguauucccuucagacgaauuugacgcaucuauaucccaaguuaacgaaaaaaucaaccaaucauuagccuuuauaagaaaauccgacgaauuauuacauaacgucaacgcuggaaaaucaacaacuaacauaaugauaaccacaauaauaauagucaucauaguuauauuacuaagucuaauagccguaggccuccuacuuuauugcaaagcaagaucaacaccaguaacauuauccaaagaccaacucagcggcauaaacaauauagcuuuuucaaacuagggacuaguacuggcugcaucucccuuuccucuguccuccauccuucucccaggauggugaagggggaccugguacccagugauccccaccccaggauccuaaaucaugacuuaccugcuaauaaaaacucauuggaaaagugagaagaucuaaaaaaaaaaaaaaaaaaaaaaaaaaaaaaaaaaaaaaaaaaaaaaaaaaaaaaaaaaaaaaaaugcaucccccccccccccccccccccccccccccccaaaggcucuuuucagagccaccagaauu

SEQ ID NO: 6320 - RNA, 1956 nt, Artificial Sequence
  mRNA product Design f-5 comprising derived and/or modified sequence from HRSV(A2)__F_DSCav1_mut6 (opt11)
gggagacuuucccauucuguagcagaauuugguguugccuguggucuuggucccgcggagaagcuuaccauggaacuccucauccucaaagccaacgcaaucacaaccauacuaacugcaguuacuuucugcuucgcauccggccaaaacaucaccgaagaguucuaccaaucaaccugcuccgcagucuccaaaggauaccucggagcccuucgcaccggcugguacaccuccgucauaaccaucgaacucucaaacauaaaagaaaacaaaugcaacggcacagacgcgaaagucaaacuuaucaaacaagaacucgacaaauacaaaaacgccgucaccgaccugcagaugcucaugugcucaacccccgccacaggaagcggcucugcuaucgcuuccggcgucgccgucugcaaaguccuccaccucgaaggcgaaguaaacaaaaucaagucagcccuccucuccaccaacaaagccgucgucucucucucaaacggcguauccguccucacauucaaaguccucgaccucaaaaacuacaucgacaaacaacuucuccccauccuaaacaaacaaucaugcuccauccccaaccccgaaacagucauggaauuucaacaaaagaacaaccgccucuuagaaaucacccgagaauuuuccgucaacgcgggagucacaacccccguuucuacguauaugcucaccaacuccgaacuccuuucccucauaaacgacaugccaaucaccaacgaccaaaagaaacucaugucaaacaacguccaaaucguccgacaacaauccuacucuauuaugugcaucaucaaagaagaaguucucgccuacgucguccaacuaccccucuacggcgugaucgacacccccugcuggaaacuacacaccucaccccucugcaccaccaacaccaaggaaggcuccaacaucugccucacccgcaccgaccgcggcugguacugcgacaacgcuggcuccgucucauucuucccgcaagccgaaacuugcaaaguaugcuccaacagaguauucugcgacaccaugaacucacuaacccucccuuccgaagucaaccuuugcaacguugacauauucaacccaaaguacgauugcaaaauuaugacauccaaaacagaugucuccuccuccgucaucacaucccucggugccauuguaucaugcuacggaaaaaccaaaugcaccgcauccaacaaaaacaaaggaaucaucaaaaccuucucaaacggcugcgauuacgucucaaacaaaggagucgacacagucuccgucggaaacacccuauacuacgucaacaaacaagaaggccaaucccuguacgucaaaggagaacccaucaucaacuucuacgacccccucgucuucccgagcgacgaguucgacgccuccaucucacaagucaaugaaaagaucaaccaaucccuugccuucauccggaaaucggacgaacuccuacacaacgugaacgcuggaaaaucaaccaccaacaucaugaucacaaccaucauuaucgucaucaucgucauacuccucucccuaaucgccgucggccuccuccuguauugcaaagcucgcuccacccccgucacccuguccaaagaccaacucuccggaaucaacaacaucgccuucucaaacuaaggacuaguacuggcugcaucucccuuuccucuguccuccauccuucucccaggauggugaagggggaccugguacccagugauccccaccccaggauccuaaaucaugacuuaccugcuaauaaaaacucauuggaaaagugagaagaucuaaaaaaaaaaaaaaaaaaaaaaaaaaaaaaaaaaaaaaaaaaaaaaaaaaaaaaaaaaaaaaaaugcaucccccccccccccccccccccccccccccccaaaggcucuuuucagagccaccagaauu

SEQ ID NO: 6321 - RNA, 1952 nt, Artificial Sequence
  mRNA product Design g-1 comprising derived and/or modified sequence from HRSV(A2)__F_DSCav1_mut6 (opt1)
gggagacuuucccauucuguagcagaauuugguguugccuguggucuuggucccgcggagaagcuuaccauggagcugcucauccugaaggccaacgccaucaccaccauccugacggcggugaccuucugcuucgccagcggccagaacaucaccgaggaguucuaccaguccacgugcagcgccgucuccaagggguaccucggcgcccugcggaccggcugguacaccuccgugaucaccaucgagcugagcaacaucaaggagaacaagugcaacgggaccgacgccaaggugaagcucaucaagcaggagcuggacaaguacaagaacgcggucacggaccugcagaugcugaugugcuccaccccggcaaccggcuccggcuccgccaucgcgagcggcgucgccgugugcaaggugcugcaccucgagggggaggucaacaagaucaagagcgcccugcuguccaccaacaaggccguggugagccucuccaacggcgucagcgugcugaccuucaaggugcuggaccucaagaacuacaucgacaagcagcugcugcccauccugaacaagcagagcugcuccauccccaaccccgagacggugauggaguuccagcagaagaacaaccggcuccuggagaucacccgcgaguucagcgugaacgccggggucaccacccccguguccacguacaugcugaccaacagcgagcuccugucccugaucaacgacaugccgaucaccaacgaccagaagaagcucaugagcaacaacgugcagaucguccggcagcaguccuacagcaucaugugcaucaucaaggaggaggugcuggcguacgugguccagcugccccucuacggcgugaucgacacccccugcuggaagcugcacacgagcccccugugcaccaccaacaccaaggagggguccaacaucugccucacgcgcaccgaccggggcugguacugcgacaacgccggcagcgucuccuucuucccgcaggccgagaccugcaaggugugcagcaaccgcguguucugcgacaccaugaacucccugacgcugcccagcgagguaaaccucugcaacgucgacaucuucaaccccaaguacgacugcaagaucaugaccuccaagaccgacgugagcuccagcgugaucaccucccugggggccaucgucagcugcuacggcaagacgaagugcaccgccagcaacaagaacaaggggaucaucaagaccuucuccaacggcugcgacuacgugagcaacaagggcguggacaccguguccgucgggaacacccuguacuacgugaacaagcaggagggccagagccucuacgugaagggggagcccaucaucaacuucuacgacccgcuggucuuccccuccgacgaguucgacgcgagcaucucccaggugaacgagaagaucaaccagagccuggccuucauccgcaaguccgacgagcugcuccacaacgugaacgccggcaagagcacgaccaacaucaugaucaccaccaucaucaucgucaucaucgugauccugcugucccucaucgccguggggcugcugcucuacugcaaggcccggagcacgcccgucacccuguccaaggaccagcugagcggcaucaacaacaucgcguucuccaacugaggacuaguggaagcauuuuccuggcugauuaaaagaaauuacucagcuauggucaucuguuccuguuagaaggcuaugcagcauauuauauacuaugcgcauguuaugaaaugcauaauaaaaaauuuuaaaaaaucuaaaagaucuaaaaaaaaaaaaaaaaaaaaaaaaaaaaaaaaaaaaaaaaaaaaaaaaaaaaaaaaaaaaaaaaugcaucccccccccccccccccccccccccccccccaaaggcucuuuucagagccaccagaauu

SEQ ID NO: 6322 - RNA, 1952 nt, Artificial Sequence
  mRNA product Design g-1 comprising derived and/or modified sequence from HRSV(A2)__F_DSCav1_mut6 (opt1)
gggagacuuucccauucuguagcagaauuugguguugccuguggucuuggucccgcggagaagcuuaccauggagcugcucauccugaaggccaacgccaucaccaccauccugacggcggugaccuucugcuucgccagcggccagaacaucaccgaggaguucuaccaguccacgugcagcgccgucuccaagggguaccucggcgcccugcgcaccgggugguacaccagcgugaucaccaucgagcuguccaacaucaaggagaacaagugcaacggcaccgacgccaaggugaagcucaucaagcaggagcuggacaaguacaagaacgcggucacggaccugcagaugcucaugugcagcacccccgccaccggguccggcagcgccaucgccuccggcguggcggugugcaagguccugcaccuggagggggaggugaacaagaucaagagcgcccuccuguccaccaacaaggccguggucagccuguccaacggcgugagcgugcucacguucaagguccuggaccugaagaacuacaucgacaagcagcuccugccgauccugaacaagcaguccugcagcauccccaaccccgagaccgugauggaguuccagcagaagaacaaccggcuccuggagaucacccgcgaguucuccgugaacgccggggucaccacgcccgugagcaccuacaugcugaccaacuccgagcuccugagccugaucaacgacaugccgaucaccaacgaccagaagaagcucaugagcaacaacgugcagaucguccggcagcaguccuacagcaucaugugcaucaucaaggaggaggugcuggccuacgugguccagcugccccucuacggcgugaucgacacgcccugcuggaagcugcacaccagcccccugugcaccaccaacacgaaggaggggagcaacaucugccucacccgcaccgaccggggcugguacugcgacaacgcgggcuccgugagcuucuucccgcaggccgagaccugcaaggucugcuccaaccgcguguucugcgacacgaugaacagccugacccugcccuccgaggucaaccucugcaacguggacaucuucaaccccaaguacgacugcaagaucaugaccagcaagaccgacguguccagcuccgucaucacgagccugggggccaucguguccugcuacggcaagaccaagugcaccgccagcaacaagaacaaggggaucaucaagaccuucuccaacggcugcgacuacgugagcaacaagggcgucgacacgguguccguggggaacacccuguacuacgucaacaagcaggagggccagagccucuacgugaagggggagcccaucaucaacuucuacgacccgcugguguuccccagcgacgaguucgacgccuccaucagccaggucaacgagaagaucaaccagucccuggcguucauccggaaguccgacgagcuccugcacaacgugaacgccggcaaguccaccaccaacaucaugaucaccacgaucaucaucgugaucaucgucauccugcucagccugaucgccguggggcugcuccuguacugcaaggcccgcuccacccccgugacccugagcaaggaccagcuguccggcaucaacaacaucgccuucagcaacugaggacuaguggaagcauuuuccuggcugauuaaaagaaauuacucagcuauggucaucuguuccuguuagaaggcuaugcagcauauuauauacuaugcgcauguuaugaaaugcauaauaaaaaauuuuaaaaaaucuaaaagaucuaaaaaaaaaaaaaaaaaaaaaaaaaaaaaaaaaaaaaaaaaaaaaaaaaaaaaaaaaaaaaaaaugcaucccccccccccccccccccccccccccccccaaaggcucuuuucagagccaccagaauu

SEQ ID NO: 6323 - RNA, 1952 nt, Artificial Sequence
  mRNA product Design g-1 comprising derived and/or modified sequence from HRSV(A2)__F_DSCav1_mut6 (opt2)
gggagacuuucccauucuguagcagaauuugguguugccuguggucuuggucccgcggagaagcuuaccauggagcuccucauccucaaggccaacgccaucaccaccauccucaccgccgucaccuucugcuucgccuccggccagaacaucaccgaggaguucuaccaguccaccugcuccgccgucuccaagggcuaccucggcgcccuccgcaccggcugguacaccuccgucaucaccaucgagcucuccaacaucaaggagaacaagugcaacggcaccgacgccaaggucaagcucaucaagcaggagcucgacaaguacaagaacgccgucaccgaccuccagaugcucaugugcuccacccccgccaccggcuccggcuccgccaucgccuccggcgucgccgucugcaagguccuccaccucgagggcgaggucaacaagaucaaguccgcccuccucuccaccaacaaggccgucgucucccucuccaacggcgucuccguccucaccuucaagguccucgaccucaagaacuacaucgacaagcagcuccuccccauccucaacaagcaguccugcuccauccccaaccccgagaccgucauggaguuccagcagaagaacaaccgccuccucgagaucacccgcgaguucuccgucaacgccggcgucaccacccccgucuccaccuacaugcucaccaacuccgagcuccucucccucaucaacgacaugcccaucaccaacgaccagaagaagcucauguccaacaacguccagaucguccgccagcaguccuacuccaucaugugcaucaucaaggaggagguccucgccuacgucguccagcucccccucuacggcgucaucgacacccccugcuggaagcuccacaccuccccccucugcaccaccaacaccaaggagggcuccaacaucugccucacccgcaccgaccgcggcugguacugcgacaacgccggcuccgucuccuucuucccccaggccgagaccugcaaggucugcuccaaccgcgucuucugcgacaccaugaacucccucacccuccccuccgaggucaaccucugcaacgucgacaucuucaaccccaaguacgacugcaagaucaugaccuccaagaccgacgucuccuccuccgucaucaccucccucggcgccaucgucuccugcuacggcaagaccaagugcaccgccuccaacaagaacaagggcaucaucaagaccuucuccaacggcugcgacuacgucuccaacaagggcgucgacaccgucuccgucggcaacacccucuacuacgucaacaagcaggagggccagucccucuacgucaagggcgagcccaucaucaacuucuacgacccccucgucuuccccuccgacgaguucgacgccuccaucucccaggucaacgagaagaucaaccagucccucgccuucauccgcaaguccgacgagcuccuccacaacgucaacgccggcaaguccaccaccaacaucaugaucaccaccaucaucaucgucaucaucgucauccuccucucccucaucgccgucggccuccuccucuacugcaaggcccgcuccacccccgucacccucuccaaggaccagcucuccggcaucaacaacaucgccuucuccaacugaggacuaguggaagcauuuuccuggcugauuaaaagaaauuacucagcuauggucaucuguuccuguuagaaggcuaugcagcauauuauauacuaugcgcauguuaugaaaugcauaauaaaaaauuuuaaaaaaucuaaaagaucuaaaaaaaaaaaaaaaaaaaaaaaaaaaaaaaaaaaaaaaaaaaaaaaaaaaaaaaaaaaaaaaaugcaucccccccccccccccccccccccccccccccaaaggcucuuuucagagccaccagaauu

SEQ ID NO: 6324 - RNA, 1952 nt, Artificial Sequence
  mRNA product Design g-1 comprising derived and/or modified sequence from HRSV(A2)__F_DSCav1_mut6 (opt3)
gggagacuuucccauucuguagcagaauuugguguugccuguggucuuggucccgcggagaagcuuaccauggagcugcucauccuuaaggccaacgcuauuaccacaauacugacugcagugacguucugcuuugccagcggccagaauaucaccgaagaguucuaccaauccacauguucugcggucucaaaaggguauuugggagcuuuaagaacugguugguacaccaguguuauuacaaucgaacugagcaacauuaaggagaauaaaugcaacggcaccgacgccaaggugaaacuaaucaagcaggaacucgauaaguauaaaaaugcaguaacugaccugcagaugcuuauguguuccacacccgccaccgggucuggaucggcuauagcaucaggcguggccgucugcaaggugcugcacuuggagggugagguuaacaaaaucaagagcgcucuccugaguacgaauaaagccguggucucccugucuaacggggugagcguacucacuuuuaagguuuuagaucugaagaauuacauugacaaacagcuuuugccuauccugaacaagcaauccuguucaauuccaaauccggaaaccgugauggaguuccagcagaaaaacaauaggcuacucgaaaucacacgggaguuuagugucaacgcgggagugacuacccccgugagcacauauaugcugaccaauucugagcuucuguccuugauaaacgauaugccuauuacgaacgaccagaagaaacucaugucaaauaacguccaaaucguucgccagcagagcuacaguauuaugugcaucaucaaggaagaggugcuggcauauguagugcaguuaccacuguacggcgucauugauacucccuguuggaaacuccauacaucuccucuuugcaccacuaauacaaaggaaggcuccaacauaugucugacccgaacggaccgugggugguacugcgauaaugccggaagcgugucguucuuuccacaagcugagaccuguaagguuugcucuaacagaguguucugcgacacaaugaacuccuugacucuacccucagaagucaaucuguguaauguggauaucuuuaacccuaaauaugacugcaagauuaugaccaguaaaacagauguaagcuccucuguuaucacuagccucggugccauagugucauguuacggcaagaccaaaugcacagcaaguaauaagaacaaggggauuaucaaaaccuucuccaauggaugugacuaugucagcaacaagggcguggacacugucucuguggguaauacgcuguacuauguuaacaaacaggaggggcagucacuuuacgugaagggagagccaaucauuaacuuuuaugauccgcugguauuccccagugacgaauuugaugcuagcaucucccaagucaaugagaaaauuaaccagucuuuggccuucauaaggaagucggacgaacuccugcacaaugugaacgcgggcaagagcacaaccaauaucaugauuacuaccaucaucauuguuauaaucgugauuuuacugucccuaaucgccgucggccuccugcuuuacugcaaagcacggucaacaccugugaccuugaguaaggaucagcugucugggauuaacaauaucgcuuucagcaacugaggacuaguggaagcauuuuccuggcugauuaaaagaaauuacucagcuauggucaucuguuccuguuagaaggcuaugcagcauauuauauacuaugcgcauguuaugaaaugcauaauaaaaaauuuuaaaaaaucuaaaagaucuaaaaaaaaaaaaaaaaaaaaaaaaaaaaaaaaaaaaaaaaaaaaaaaaaaaaaaaaaaaaaaaaugcaucccccccccccccccccccccccccccccccaaaggcucuuuucagagccaccagaauu

SEQ ID NO: 6325 - RNA, 1952 nt, Artificial Sequence
  mRNA product Design g-1 comprising derived and/or modified sequence from HRSV(A2)__F_DSCav1_mut6 (opt4)
gggagacuuucccauucuguagcagaauuugguguugccuguggucuuggucccgcggagaagcuuaccauggagcugcugauccugaaggccaacgccaucaccaccauccugaccgccgugaccuucugcuucgccagcggccagaacaucaccgaggaguucuaccagagcaccugcagcgccgugagcaagggcuaccugggcgcccugagaaccggcugguacaccagcgugaucaccaucgagcugagcaacaucaaggagaacaagugcaacggcaccgacgccaaggugaagcugaucaagcaggagcuggacaaguacaagaacgccgugaccgaccugcagaugcugaugugcagcacccccgccaccggcagcggcagcgccaucgccagcggcguggccgugugcaaggugcugcaccuggagggcgaggugaacaagaucaagagcgcccugcugagcaccaacaaggccguggugagccugagcaacggcgugagcgugcugaccuucaaggugcuggaccugaagaacuacaucgacaagcagcugcugcccauccugaacaagcagagcugcagcauccccaaccccgagaccgugauggaguuccagcagaagaacaacagacugcuggagaucaccagagaguucagcgugaacgccggcgugaccacccccgugagcaccuacaugcugaccaacagcgagcugcugagccugaucaacgacaugcccaucaccaacgaccagaagaagcugaugagcaacaacgugcagaucgugagacagcagagcuacagcaucaugugcaucaucaaggaggaggugcuggccuacguggugcagcugccccuguacggcgugaucgacacccccugcuggaagcugcacaccagcccccugugcaccaccaacaccaaggagggcagcaacaucugccugaccagaaccgacagaggcugguacugcgacaacgccggcagcgugagcuucuucccccaggccgagaccugcaaggugugcagcaacagaguguucugcgacaccaugaacagccugacccugcccagcgaggugaaccugugcaacguggacaucuucaaccccaaguacgacugcaagaucaugaccagcaagaccgacgugagcagcagcgugaucaccagccugggcgccaucgugagcugcuacggcaagaccaagugcaccgccagcaacaagaacaagggcaucaucaagaccuucagcaacggcugcgacuacgugagcaacaagggcguggacaccgugagcgugggcaacacccuguacuacgugaacaagcaggagggccagagccuguacgugaagggcgagcccaucaucaacuucuacgacccccugguguuccccagcgacgaguucgacgccagcaucagccaggugaacgagaagaucaaccagagccuggccuucaucagaaagagcgacgagcugcugcacaacgugaacgccggcaagagcaccaccaacaucaugaucaccaccaucaucaucgugaucaucgugauccugcugagccugaucgccgugggccugcugcuguacugcaaggccagaagcacccccgugacccugagcaaggaccagcugagcggcaucaacaacaucgccuucagcaacugaggacuaguggaagcauuuuccuggcugauuaaaagaaauuacucagcuauggucaucuguuccuguuagaaggcuaugcagcauauuauauacuaugcgcauguuaugaaaugcauaauaaaaaauuuuaaaaaaucuaaaagaucuaaaaaaaaaaaaaaaaaaaaaaaaaaaaaaaaaaaaaaaaaaaaaaaaaaaaaaaaaaaaaaaaugcaucccccccccccccccccccccccccccccccaaaggcucuuuucagagccaccagaauu

SEQ ID NO: 6326 - RNA, 1952 nt, Artificial Sequence
  mRNA product Design g-1 comprising derived and/or modified sequence from HRSV(A2)__F_DSCav1_mut6 (opt5)
gggagacuuucccauucuguagcagaauuugguguugccuguggucuuggucccgcggagaagcuuaccauggagcugcucauccugaaggccaacgcuauuaccacaauccuuacggccgugaccuucugcuuugcgagcggccagaauauuacagaagaguucuaccaauccaccuguucugcugucagcaaaggguaucugggagcccucagaacaggcugguacaccuccguuaucacaauugaacugucuaacaucaaggagaauaaaugcaacgggaccgacgccaaggugaaacuuaucaagcaggaacuggauaaguauaaaaaugcugugacggaccuccagaugcugauguguagcacccccgccacaggauccggcucugcuauugccagcggggucgcggugugcaagguucugcaccucgagggagaggugaacaaaaucaaguccgcccugcuuagcaccaauaaagcugucgugucucuguccaacggcguuagcgugcucacauuuaagguccuggaucuuaagaauuacauugacaaacagcugcucccuauccugaacaagcaaucuuguuccauuccgaaucccgaaaccgugauggaguuccagcagaaaaacaaucggcugcucgaaaucacgcgcgaguuuagcgugaacgccggcgucacaaccccuguuucuacauauaugcugaccaauuccgagcuucugagccucauuaacgauaugcccaucaccaacgaccagaagaaacugauguccaauaacgugcaaaucgugagacagcagucuuacagcauuaugugcaucauuaaggaagagguccuugcuuaugugguucagcugccucucuacggggugaucgauacacccuguuggaaacugcauacguccccucugugcaccacaaauaccaaggaaggaagcaacauuugucucacacggaccgaccgcggcugguacugcgauaaugccgggucugucuccuucuuuccgcaagcggagacguguaaggugugcagcaacagaguuuucugcgacacaaugaacucucugacccuucccagcgaagugaaucuguguaaugucgauaucuuuaacccuaaauaugacugcaagaucaugaccuccaaaacagaugugucuagcuccgucauuaccagccucggagccaucgugucuuguuacggcaagacaaaaugcacggcuuccaauaagaacaaggggauuaucaaaaccuucagcaauggaugugacuauguuucuaacaagggcguggacacagucuccgugggcaauacccuguacuauguuaacaaacaggaggggcagagccuuuacgugaagggagagcccauuaucaacuuuuaugauccucuggucuuccccuccgacgaauuugaugccucuaucagccaagugaaugagaaaauuaaccagucccucgcuuucauccggaagucugacgaacugcugcacaaugugaacgccggcaagagcacaaccaauauuaugaucacgaccauuaucauuguuaucaucgucauucuccugucccuuaucgccguggggcugcuccuguacugcaaagcucgcagcacaccggugacccugucuaaggaucagcuuuccggaauuaacaauaucgcguucagcaacugaggacuaguggaagcauuuuccuggcugauuaaaagaaauuacucagcuauggucaucuguuccuguuagaaggcuaugcagcauauuauauacuaugcgcauguuaugaaaugcauaauaaaaaauuuuaaaaaaucuaaaagaucuaaaaaaaaaaaaaaaaaaaaaaaaaaaaaaaaaaaaaaaaaaaaaaaaaaaaaaaaaaaaaaaaugcaucccccccccccccccccccccccccccccccaaaggcucuuuucagagccaccagaauu

SEQ ID NO: 6327 - RNA, 1952 nt, Artificial Sequence
  mRNA product Design g-1 comprising derived and/or modified sequence from HRSV(A2)__F_DSCav1_mut6 (opt6)
gggagacuuucccauucuguagcagaauuugguguugccuguggucuuggucccgcggagaagcuuaccauggaacuauuaaucuuaaaagcaaaugcuauaaccacaauauuaacagcaguaacauucuguuuugccuccggacaaaacauaacagaagaauuuuaucaaucaacaugcucugcaguauccaaagguuacuuaggcgcacuacgcacuggaugguauacaucaguaauaacaauagaacuaucaaacauaaaagaaaauaaauguaacgguacugacgcaaaagugaaacuaauuaaacaagaacucgacaaauacaaaaaugcuguaacagaccuacaaaugcuaaugugcucaacacccgcaaccggaucaggaucagccauagccuccggagucgcaguaugcaaaguauuacaucuugaaggagaaguaaauaaaauaaaaucagcauuacuauccacaaauaaagccguaguaucacuaucaaacgguguauccguccuuacauucaaaguauuagaucuaaaaaacuacauagauaaacaacuacuacccaucuuaaacaaacaaucaugcucaauucccaacccagaaacagucauggaauuucaacaaaaaaacaacagacucuuagaaauaacacgagaauuuucaguaaacgcaggaguaaccacaccaguaaguacauacaugcucaccaacucagaauuauuaucacuuauuaacgacaugccaauuacaaacgaccaaaaaaaauuaaugucaaacaauguccaaauuguuagacaacaaucauacucuauaauguguauaauaaaagaagaaguacuagcuuacguaguucaauuaccacuauauggcguaauagauacaccuugcuggaaacuacauacaucuccauuauguacaacuaacacaaaagaaggaucuaacauaugccuaacacgcacagaucgaggaugguacugcgauaaugcagguuccguaucauucuuuccacaagcagaaacauguaaaguaugcucaaacagaguauucugugacacuaugaacuccuuaacccuacccucagaagucaaucuaugcaacguugacauauuuaacccaaaauacgacuguaaaaucaugacaucuaaaacagacguaucaucaucaguuauuacaucccuaggagcaauaguaucuugcuacggaaaaacaaaauguacagcauccaacaaaaacaaaggaauaaucaaaacauucucaaacggcugcgacuacguaucaaacaaagguguagacacaguaucaguaggaaauacuuuauauuacguaaauaaacaagaaggacaaucucuauacguuaaaggcgaaccuauuauaaacuucuacgacccacucguauucccuucagacgaauuugacgcaucuauaucccaaguuaacgaaaaaaucaaccaaucauuagccuuuauaagaaaauccgacgaauuauuacauaacgucaacgcuggaaaaucaacaacuaacauaaugauaaccacaauaauaauagucaucauaguuauauuacuaagucuaauagccguaggccuccuacuuuauugcaaagcaagaucaacaccaguaacauuauccaaagaccaacucagcggcauaaacaauauagcuuuuucaaacuagggacuaguggaagcauuuuccuggcugauuaaaagaaauuacucagcuauggucaucuguuccuguuagaaggcuaugcagcauauuauauacuaugcgcauguuaugaaaugcauaauaaaaaauuuuaaaaaaucuaaaagaucuaaaaaaaaaaaaaaaaaaaaaaaaaaaaaaaaaaaaaaaaaaaaaaaaaaaaaaaaaaaaaaaaugcaucccccccccccccccccccccccccccccccaaaggcucuuuucagagccaccagaauu

SEQ ID NO: 6328 - RNA, 1952 nt, Artificial Sequence
  mRNA product Design g-1 comprising derived and/or modified sequence from HRSV(A2)__F_DSCav1_mut6 (opt11)
gggagacuuucccauucuguagcagaauuugguguugccuguggucuuggucccgcggagaagcuuaccauggaacuccucauccucaaagccaacgcaaucacaaccauacuaacugcaguuacuuucugcuucgcauccggccaaaacaucaccgaagaguucuaccaaucaaccugcuccgcagucuccaaaggauaccucggagcccuucgcaccggcugguacaccuccgucauaaccaucgaacucucaaacauaaaagaaaacaaaugcaacggcacagacgcgaaagucaaacuuaucaaacaagaacucgacaaauacaaaaacgccgucaccgaccugcagaugcucaugugcucaacccccgccacaggaagcggcucugcuaucgcuuccggcgucgccgucugcaaaguccuccaccucgaaggcgaaguaaacaaaaucaagucagcccuccucuccaccaacaaagccgucgucucucucucaaacggcguauccguccucacauucaaaguccucgaccucaaaaacuacaucgacaaacaacuucuccccauccuaaacaaacaaucaugcuccauccccaaccccgaaacagucauggaauuucaacaaaagaacaaccgccucuuagaaaucacccgagaauuuuccgucaacgcgggagucacaacccccguuucuacguauaugcucaccaacuccgaacuccuuucccucauaaacgacaugccaaucaccaacgaccaaaagaaacucaugucaaacaacguccaaaucguccgacaacaauccuacucuauuaugugcaucaucaaagaagaaguucucgccuacgucguccaacuaccccucuacggcgugaucgacacccccugcuggaaacuacacaccucaccccucugcaccaccaacaccaaggaaggcuccaacaucugccucacccgcaccgaccgcggcugguacugcgacaacgcuggcuccgucucauucuucccgcaagccgaaacuugcaaaguaugcuccaacagaguauucugcgacaccaugaacucacuaacccucccuuccgaagucaaccuuugcaacguugacauauucaacccaaaguacgauugcaaaauuaugacauccaaaacagaugucuccuccuccgucaucacaucccucggugccauuguaucaugcuacggaaaaaccaaaugcaccgcauccaacaaaaacaaaggaaucaucaaaaccuucucaaacggcugcgauuacgucucaaacaaaggagucgacacagucuccgucggaaacacccuauacuacgucaacaaacaagaaggccaaucccuguacgucaaaggagaacccaucaucaacuucuacgacccccucgucuucccgagcgacgaguucgacgccuccaucucacaagucaaugaaaagaucaaccaaucccuugccuucauccggaaaucggacgaacuccuacacaacgugaacgcuggaaaaucaaccaccaacaucaugaucacaaccaucauuaucgucaucaucgucauacuccucucccuaaucgccgucggccuccuccuguauugcaaagcucgcuccacccccgucacccuguccaaagaccaacucuccggaaucaacaacaucgccuucucaaacuaaggacuaguggaagcauuuuccuggcugauuaaaagaaauuacucagcuauggucaucuguuccuguuagaaggcuaugcagcauauuauauacuaugcgcauguuaugaaaugcauaauaaaaaauuuuaaaaaaucuaaaagaucuaaaaaaaaaaaaaaaaaaaaaaaaaaaaaaaaaaaaaaaaaaaaaaaaaaaaaaaaaaaaaaaaugcaucccccccccccccccccccccccccccccccaaaggcucuuuucagagccaccagaauu

SEQ ID NO: 6329 - RNA, 1967 nt, Artificial Sequence
  mRNA product Design g-2 comprising derived and/or modified sequence from HRSV(A2)__F_DSCav1_mut6 (opt1)
gggagaguccgcucagccagguugcagaagcggcuuagcguguguccuaaucuucucucugcguguagguaggccugugccgcaaacaagcuuaccauggagcugcucauccugaaggccaacgccaucaccaccauccugacggcggugaccuucugcuucgccagcggccagaacaucaccgaggaguucuaccaguccacgugcagcgccgucuccaagggguaccucggcgcccugcggaccggcugguacaccuccgugaucaccaucgagcugagcaacaucaaggagaacaagugcaacgggaccgacgccaaggugaagcucaucaagcaggagcuggacaaguacaagaacgcggucacggaccugcagaugcugaugugcuccaccccggcaaccggcuccggcuccgccaucgcgagcggcgucgccgugugcaaggugcugcaccucgagggggaggucaacaagaucaagagcgcccugcuguccaccaacaaggccguggugagccucuccaacggcgucagcgugcugaccuucaaggugcuggaccucaagaacuacaucgacaagcagcugcugcccauccugaacaagcagagcugcuccauccccaaccccgagacggugauggaguuccagcagaagaacaaccggcuccuggagaucacccgcgaguucagcgugaacgccggggucaccacccccguguccacguacaugcugaccaacagcgagcuccugucccugaucaacgacaugccgaucaccaacgaccagaagaagcucaugagcaacaacgugcagaucguccggcagcaguccuacagcaucaugugcaucaucaaggaggaggugcuggcguacgugguccagcugccccucuacggcgugaucgacacccccugcuggaagcugcacacgagcccccugugcaccaccaacaccaaggagggguccaacaucugccucacgcgcaccgaccggggcugguacugcgacaacgccggcagcgucuccuucuucccgcaggccgagaccugcaaggugugcagcaaccgcguguucugcgacaccaugaacucccugacgcugcccagcgagguaaaccucugcaacgucgacaucuucaaccccaaguacgacugcaagaucaugaccuccaagaccgacgugagcuccagcgugaucaccucccugggggccaucgucagcugcuacggcaagacgaagugcaccgccagcaacaagaacaaggggaucaucaagaccuucuccaacggcugcgacuacgugagcaacaagggcguggacaccguguccgucgggaacacccuguacuacgugaacaagcaggagggccagagccucuacgugaagggggagcccaucaucaacuucuacgacccgcuggucuuccccuccgacgaguucgacgcgagcaucucccaggugaacgagaagaucaaccagagccuggccuucauccgcaaguccgacgagcugcuccacaacgugaacgccggcaagagcacgaccaacaucaugaucaccaccaucaucaucgucaucaucgugauccugcugucccucaucgccguggggcugcugcucuacugcaaggcccggagcacgcccgucacccuguccaaggaccagcugagcggcaucaacaacaucgcguucuccaacugaggacuaguaauaaggaaacuguaugaaugucugugggcaggaagugaagagauccuucuguaaagguuuuuggaauuaugucugcugaauaauaaacuuuuuugaaauaauaaaucugguagaaaaaugagaucuaaaaaaaaaaaaaaaaaaaaaaaaaaaaaaaaaaaaaaaaaaaaaaaaaaaaaaaaaaaaaaaaugcaucccccccccccccccccccccccccccccccaaaggcucuuuucagagccaccagaauu

SEQ ID NO: 6330 - RNA, 1967 nt, Artificial Sequence
  mRNA product Design g-2 comprising derived and/or modified sequence from HRSV(A2)__F_DSCav1_mut6 (opt1)
gggagaguccgcucagccagguugcagaagcggcuuagcguguguccuaaucuucucucugcguguagguaggccugugccgcaaacaagcuuaccauggagcugcucauccugaaggccaacgccaucaccaccauccugacggcggugaccuucugcuucgccagcggccagaacaucaccgaggaguucuaccaguccacgugcagcgccgucuccaagggguaccucggcgcccugcgcaccgggugguacaccagcgugaucaccaucgagcuguccaacaucaaggagaacaagugcaacggcaccgacgccaaggugaagcucaucaagcaggagcuggacaaguacaagaacgcggucacggaccugcagaugcucaugugcagcacccccgccaccggguccggcagcgccaucgccuccggcguggcggugugcaagguccugcaccuggagggggaggugaacaagaucaagagcgcccuccuguccaccaacaaggccguggucagccuguccaacggcgugagcgugcucacguucaagguccuggaccugaagaacuacaucgacaagcagcuccugccgauccugaacaagcaguccugcagcauccccaaccccgagaccgugauggaguuccagcagaagaacaaccggcuccuggagaucacccgcgaguucuccgugaacgccggggucaccacgcccgugagcaccuacaugcugaccaacuccgagcuccugagccugaucaacgacaugccgaucaccaacgaccagaagaagcucaugagcaacaacgugcagaucguccggcagcaguccuacagcaucaugugcaucaucaaggaggaggugcuggccuacgugguccagcugccccucuacggcgugaucgacacgcccugcuggaagcugcacaccagcccccugugcaccaccaacacgaaggaggggagcaacaucugccucacccgcaccgaccggggcugguacugcgacaacgcgggcuccgugagcuucuucccgcaggccgagaccugcaaggucugcuccaaccgcguguucugcgacacgaugaacagccugacccugcccuccgaggucaaccucugcaacguggacaucuucaaccccaaguacgacugcaagaucaugaccagcaagaccgacguguccagcuccgucaucacgagccugggggccaucguguccugcuacggcaagaccaagugcaccgccagcaacaagaacaaggggaucaucaagaccuucuccaacggcugcgacuacgugagcaacaagggcgucgacacgguguccguggggaacacccuguacuacgucaacaagcaggagggccagagccucuacgugaagggggagcccaucaucaacuucuacgacccgcugguguuccccagcgacgaguucgacgccuccaucagccaggucaacgagaagaucaaccagucccuggcguucauccggaaguccgacgagcuccugcacaacgugaacgccggcaaguccaccaccaacaucaugaucaccacgaucaucaucgugaucaucgucauccugcucagccugaucgccguggggcugcuccuguacugcaaggcccgcuccacccccgugacccugagcaaggaccagcuguccggcaucaacaacaucgccuucagcaacugaggacuaguaauaaggaaacuguaugaaugucugugggcaggaagugaagagauccuucuguaaagguuuuuggaauuaugucugcugaauaauaaacuuuuuugaaauaauaaaucugguagaaaaaugagaucuaaaaaaaaaaaaaaaaaaaaaaaaaaaaaaaaaaaaaaaaaaaaaaaaaaaaaaaaaaaaaaaaugcaucccccccccccccccccccccccccccccccaaaggcucuuuucagagccaccagaauu

SEQ ID NO: 6331 - RNA, 1967 nt, Artificial Sequence
  mRNA product Design g-2 comprising derived and/or modified sequence from HRSV(A2)__F_DSCav1_mut6 (opt2)
gggagaguccgcucagccagguugcagaagcggcuuagcguguguccuaaucuucucucugcguguagguaggccugugccgcaaacaagcuuaccauggagcuccucauccucaaggccaacgccaucaccaccauccucaccgccgucaccuucugcuucgccuccggccagaacaucaccgaggaguucuaccaguccaccugcuccgccgucuccaagggcuaccucggcgcccuccgcaccggcugguacaccuccgucaucaccaucgagcucuccaacaucaaggagaacaagugcaacggcaccgacgccaaggucaagcucaucaagcaggagcucgacaaguacaagaacgccgucaccgaccuccagaugcucaugugcuccacccccgccaccggcuccggcuccgccaucgccuccggcgucgccgucugcaagguccuccaccucgagggcgaggucaacaagaucaaguccgcccuccucuccaccaacaaggccgucgucucccucuccaacggcgucuccguccucaccuucaagguccucgaccucaagaacuacaucgacaagcagcuccuccccauccucaacaagcaguccugcuccauccccaaccccgagaccgucauggaguuccagcagaagaacaaccgccuccucgagaucacccgcgaguucuccgucaacgccggcgucaccacccccgucuccaccuacaugcucaccaacuccgagcuccucucccucaucaacgacaugcccaucaccaacgaccagaagaagcucauguccaacaacguccagaucguccgccagcaguccuacuccaucaugugcaucaucaaggaggagguccucgccuacgucguccagcucccccucuacggcgucaucgacacccccugcuggaagcuccacaccuccccccucugcaccaccaacaccaaggagggcuccaacaucugccucacccgcaccgaccgcggcugguacugcgacaacgccggcuccgucuccuucuucccccaggccgagaccugcaaggucugcuccaaccgcgucuucugcgacaccaugaacucccucacccuccccuccgaggucaaccucugcaacgucgacaucuucaaccccaaguacgacugcaagaucaugaccuccaagaccgacgucuccuccuccgucaucaccucccucggcgccaucgucuccugcuacggcaagaccaagugcaccgccuccaacaagaacaagggcaucaucaagaccuucuccaacggcugcgacuacgucuccaacaagggcgucgacaccgucuccgucggcaacacccucuacuacgucaacaagcaggagggccagucccucuacgucaagggcgagcccaucaucaacuucuacgacccccucgucuuccccuccgacgaguucgacgccuccaucucccaggucaacgagaagaucaaccagucccucgccuucauccgcaaguccgacgagcuccuccacaacgucaacgccggcaaguccaccaccaacaucaugaucaccaccaucaucaucgucaucaucgucauccuccucucccucaucgccgucggccuccuccucuacugcaaggcccgcuccacccccgucacccucuccaaggaccagcucuccggcaucaacaacaucgccuucuccaacugaggacuaguaauaaggaaacuguaugaaugucugugggcaggaagugaagagauccuucuguaaagguuuuuggaauuaugucugcugaauaauaaacuuuuuugaaauaauaaaucugguagaaaaaugagaucuaaaaaaaaaaaaaaaaaaaaaaaaaaaaaaaaaaaaaaaaaaaaaaaaaaaaaaaaaaaaaaaaugcaucccccccccccccccccccccccccccccccaaaggcucuuuucagagccaccagaauu

SEQ ID NO: 6332 - RNA, 1967 nt, Artificial Sequence
  mRNA product Design g-2 comprising derived and/or modified sequence from HRSV(A2)__F_DSCav1_mut6 (opt3)
gggagaguccgcucagccagguugcagaagcggcuuagcguguguccuaaucuucucucugcguguagguaggccugugccgcaaacaagcuuaccauggagcugcucauccuuaaggccaacgcuauuaccacaauacugacugcagugacguucugcuuugccagcggccagaauaucaccgaagaguucuaccaauccacauguucugcggucucaaaaggguauuugggagcuuuaagaacugguugguacaccaguguuauuacaaucgaacugagcaacauuaaggagaauaaaugcaacggcaccgacgccaaggugaaacuaaucaagcaggaacucgauaaguauaaaaaugcaguaacugaccugcagaugcuuauguguuccacacccgccaccgggucuggaucggcuauagcaucaggcguggccgucugcaaggugcugcacuuggagggugagguuaacaaaaucaagagcgcucuccugaguacgaauaaagccguggucucccugucuaacggggugagcguacucacuuuuaagguuuuagaucugaagaauuacauugacaaacagcuuuugccuauccugaacaagcaauccuguucaauuccaaauccggaaaccgugauggaguuccagcagaaaaacaauaggcuacucgaaaucacacgggaguuuagugucaacgcgggagugacuacccccgugagcacauauaugcugaccaauucugagcuucuguccuugauaaacgauaugccuauuacgaacgaccagaagaaacucaugucaaauaacguccaaaucguucgccagcagagcuacaguauuaugugcaucaucaaggaagaggugcuggcauauguagugcaguuaccacuguacggcgucauugauacucccuguuggaaacuccauacaucuccucuuugcaccacuaauacaaaggaaggcuccaacauaugucugacccgaacggaccgugggugguacugcgauaaugccggaagcgugucguucuuuccacaagcugagaccuguaagguuugcucuaacagaguguucugcgacacaaugaacuccuugacucuacccucagaagucaaucuguguaauguggauaucuuuaacccuaaauaugacugcaagauuaugaccaguaaaacagauguaagcuccucuguuaucacuagccucggugccauagugucauguuacggcaagaccaaaugcacagcaaguaauaagaacaaggggauuaucaaaaccuucuccaauggaugugacuaugucagcaacaagggcguggacacugucucuguggguaauacgcuguacuauguuaacaaacaggaggggcagucacuuuacgugaagggagagccaaucauuaacuuuuaugauccgcugguauuccccagugacgaauuugaugcuagcaucucccaagucaaugagaaaauuaaccagucuuuggccuucauaaggaagucggacgaacuccugcacaaugugaacgcgggcaagagcacaaccaauaucaugauuacuaccaucaucauuguuauaaucgugauuuuacugucccuaaucgccgucggccuccugcuuuacugcaaagcacggucaacaccugugaccuugaguaaggaucagcugucugggauuaacaauaucgcuuucagcaacugaggacuaguaauaaggaaacuguaugaaugucugugggcaggaagugaagagauccuucuguaaagguuuuuggaauuaugucugcugaauaauaaacuuuuuugaaauaauaaaucugguagaaaaaugagaucuaaaaaaaaaaaaaaaaaaaaaaaaaaaaaaaaaaaaaaaaaaaaaaaaaaaaaaaaaaaaaaaaugcaucccccccccccccccccccccccccccccccaaaggcucuuuucagagccaccagaauu

SEQ ID NO: 6333 - RNA, 1967 nt, Artificial Sequence
  mRNA product Design g-2 comprising derived and/or modified sequence from HRSV(A2)__F_DSCav1_mut6 (opt4)
gggagaguccgcucagccagguugcagaagcggcuuagcguguguccuaaucuucucucugcguguagguaggccugugccgcaaacaagcuuaccauggagcugcugauccugaaggccaacgccaucaccaccauccugaccgccgugaccuucugcuucgccagcggccagaacaucaccgaggaguucuaccagagcaccugcagcgccgugagcaagggcuaccugggcgcccugagaaccggcugguacaccagcgugaucaccaucgagcugagcaacaucaaggagaacaagugcaacggcaccgacgccaaggugaagcugaucaagcaggagcuggacaaguacaagaacgccgugaccgaccugcagaugcugaugugcagcacccccgccaccggcagcggcagcgccaucgccagcggcguggccgugugcaaggugcugcaccuggagggcgaggugaacaagaucaagagcgcccugcugagcaccaacaaggccguggugagccugagcaacggcgugagcgugcugaccuucaaggugcuggaccugaagaacuacaucgacaagcagcugcugcccauccugaacaagcagagcugcagcauccccaaccccgagaccgugauggaguuccagcagaagaacaacagacugcuggagaucaccagagaguucagcgugaacgccggcgugaccacccccgugagcaccuacaugcugaccaacagcgagcugcugagccugaucaacgacaugcccaucaccaacgaccagaagaagcugaugagcaacaacgugcagaucgugagacagcagagcuacagcaucaugugcaucaucaaggaggaggugcuggccuacguggugcagcugccccuguacggcgugaucgacacccccugcuggaagcugcacaccagcccccugugcaccaccaacaccaaggagggcagcaacaucugccugaccagaaccgacagaggcugguacugcgacaacgccggcagcgugagcuucuucccccaggccgagaccugcaaggugugcagcaacagaguguucugcgacaccaugaacagccugacccugcccagcgaggugaaccugugcaacguggacaucuucaaccccaaguacgacugcaagaucaugaccagcaagaccgacgugagcagcagcgugaucaccagccugggcgccaucgugagcugcuacggcaagaccaagugcaccgccagcaacaagaacaagggcaucaucaagaccuucagcaacggcugcgacuacgugagcaacaagggcguggacaccgugagcgugggcaacacccuguacuacgugaacaagcaggagggccagagccuguacgugaagggcgagcccaucaucaacuucuacgacccccugguguuccccagcgacgaguucgacgccagcaucagccaggugaacgagaagaucaaccagagccuggccuucaucagaaagagcgacgagcugcugcacaacgugaacgccggcaagagcaccaccaacaucaugaucaccaccaucaucaucgugaucaucgugauccugcugagccugaucgccgugggccugcugcuguacugcaaggccagaagcacccccgugacccugagcaaggaccagcugagcggcaucaacaacaucgccuucagcaacugaggacuaguaauaaggaaacuguaugaaugucugugggcaggaagugaagagauccuucuguaaagguuuuuggaauuaugucugcugaauaauaaacuuuuuugaaauaauaaaucugguagaaaaaugagaucuaaaaaaaaaaaaaaaaaaaaaaaaaaaaaaaaaaaaaaaaaaaaaaaaaaaaaaaaaaaaaaaaugcaucccccccccccccccccccccccccccccccaaaggcucuuuucagagccaccagaauu

SEQ ID NO: 6334 - RNA, 1967 nt, Artificial Sequence
  mRNA product Design g-2 comprising derived and/or modified sequence from HRSV(A2)__F_DSCav1_mut6 (opt5)
gggagaguccgcucagccagguugcagaagcggcuuagcguguguccuaaucuucucucugcguguagguaggccugugccgcaaacaagcuuaccauggagcugcucauccugaaggccaacgcuauuaccacaauccuuacggccgugaccuucugcuuugcgagcggccagaauauuacagaagaguucuaccaauccaccuguucugcugucagcaaaggguaucugggagcccucagaacaggcugguacaccuccguuaucacaauugaacugucuaacaucaaggagaauaaaugcaacgggaccgacgccaaggugaaacuuaucaagcaggaacuggauaaguauaaaaaugcugugacggaccuccagaugcugauguguagcacccccgccacaggauccggcucugcuauugccagcggggucgcggugugcaagguucugcaccucgagggagaggugaacaaaaucaaguccgcccugcuuagcaccaauaaagcugucgugucucuguccaacggcguuagcgugcucacauuuaagguccuggaucuuaagaauuacauugacaaacagcugcucccuauccugaacaagcaaucuuguuccauuccgaaucccgaaaccgugauggaguuccagcagaaaaacaaucggcugcucgaaaucacgcgcgaguuuagcgugaacgccggcgucacaaccccuguuucuacauauaugcugaccaauuccgagcuucugagccucauuaacgauaugcccaucaccaacgaccagaagaaacugauguccaauaacgugcaaaucgugagacagcagucuuacagcauuaugugcaucauuaaggaagagguccuugcuuaugugguucagcugccucucuacggggugaucgauacacccuguuggaaacugcauacguccccucugugcaccacaaauaccaaggaaggaagcaacauuugucucacacggaccgaccgcggcugguacugcgauaaugccgggucugucuccuucuuuccgcaagcggagacguguaaggugugcagcaacagaguuuucugcgacacaaugaacucucugacccuucccagcgaagugaaucuguguaaugucgauaucuuuaacccuaaauaugacugcaagaucaugaccuccaaaacagaugugucuagcuccgucauuaccagccucggagccaucgugucuuguuacggcaagacaaaaugcacggcuuccaauaagaacaaggggauuaucaaaaccuucagcaauggaugugacuauguuucuaacaagggcguggacacagucuccgugggcaauacccuguacuauguuaacaaacaggaggggcagagccuuuacgugaagggagagcccauuaucaacuuuuaugauccucuggucuuccccuccgacgaauuugaugccucuaucagccaagugaaugagaaaauuaaccagucccucgcuuucauccggaagucugacgaacugcugcacaaugugaacgccggcaagagcacaaccaauauuaugaucacgaccauuaucauuguuaucaucgucauucuccugucccuuaucgccguggggcugcuccuguacugcaaagcucgcagcacaccggugacccugucuaaggaucagcuuuccggaauuaacaauaucgcguucagcaacugaggacuaguaauaaggaaacuguaugaaugucugugggcaggaagugaagagauccuucuguaaagguuuuuggaauuaugucugcugaauaauaaacuuuuuugaaauaauaaaucugguagaaaaaugagaucuaaaaaaaaaaaaaaaaaaaaaaaaaaaaaaaaaaaaaaaaaaaaaaaaaaaaaaaaaaaaaaaaugcaucccccccccccccccccccccccccccccccaaaggcucuuuucagagccaccagaauu

SEQ ID NO: 6335 - RNA, 1967 nt, Artificial Sequence
  mRNA product Design g-2 comprising derived and/or modified sequence from HRSV(A2)__F_DSCav1_mut6 (opt6)
gggagaguccgcucagccagguugcagaagcggcuuagcguguguccuaaucuucucucugcguguagguaggccugugccgcaaacaagcuuaccauggaacuauuaaucuuaaaagcaaaugcuauaaccacaauauuaacagcaguaacauucuguuuugccuccggacaaaacauaacagaagaauuuuaucaaucaacaugcucugcaguauccaaagguuacuuaggcgcacuacgcacuggaugguauacaucaguaauaacaauagaacuaucaaacauaaaagaaaauaaauguaacgguacugacgcaaaagugaaacuaauuaaacaagaacucgacaaauacaaaaaugcuguaacagaccuacaaaugcuaaugugcucaacacccgcaaccggaucaggaucagccauagccuccggagucgcaguaugcaaaguauuacaucuugaaggagaaguaaauaaaauaaaaucagcauuacuauccacaaauaaagccguaguaucacuaucaaacgguguauccguccuuacauucaaaguauuagaucuaaaaaacuacauagauaaacaacuacuacccaucuuaaacaaacaaucaugcucaauucccaacccagaaacagucauggaauuucaacaaaaaaacaacagacucuuagaaauaacacgagaauuuucaguaaacgcaggaguaaccacaccaguaaguacauacaugcucaccaacucagaauuauuaucacuuauuaacgacaugccaauuacaaacgaccaaaaaaaauuaaugucaaacaauguccaaauuguuagacaacaaucauacucuauaauguguauaauaaaagaagaaguacuagcuuacguaguucaauuaccacuauauggcguaauagauacaccuugcuggaaacuacauacaucuccauuauguacaacuaacacaaaagaaggaucuaacauaugccuaacacgcacagaucgaggaugguacugcgauaaugcagguuccguaucauucuuuccacaagcagaaacauguaaaguaugcucaaacagaguauucugugacacuaugaacuccuuaacccuacccucagaagucaaucuaugcaacguugacauauuuaacccaaaauacgacuguaaaaucaugacaucuaaaacagacguaucaucaucaguuauuacaucccuaggagcaauaguaucuugcuacggaaaaacaaaauguacagcauccaacaaaaacaaaggaauaaucaaaacauucucaaacggcugcgacuacguaucaaacaaagguguagacacaguaucaguaggaaauacuuuauauuacguaaauaaacaagaaggacaaucucuauacguuaaaggcgaaccuauuauaaacuucuacgacccacucguauucccuucagacgaauuugacgcaucuauaucccaaguuaacgaaaaaaucaaccaaucauuagccuuuauaagaaaauccgacgaauuauuacauaacgucaacgcuggaaaaucaacaacuaacauaaugauaaccacaauaauaauagucaucauaguuauauuacuaagucuaauagccguaggccuccuacuuuauugcaaagcaagaucaacaccaguaacauuauccaaagaccaacucagcggcauaaacaauauagcuuuuucaaacuagggacuaguaauaaggaaacuguaugaaugucugugggcaggaagugaagagauccuucuguaaagguuuuuggaauuaugucugcugaauaauaaacuuuuuugaaauaauaaaucugguagaaaaaugagaucuaaaaaaaaaaaaaaaaaaaaaaaaaaaaaaaaaaaaaaaaaaaaaaaaaaaaaaaaaaaaaaaaugcaucccccccccccccccccccccccccccccccaaaggcucuuuucagagccaccagaauu

SEQ ID NO: 6336 - RNA, 1967 nt, Artificial Sequence
  mRNA product Design g-2 comprising derived and/or modified sequence from HRSV(A2)__F_DSCav1_mut6 (opt11)
gggagaguccgcucagccagguugcagaagcggcuuagcguguguccuaaucuucucucugcguguagguaggccugugccgcaaacaagcuuaccauggaacuccucauccucaaagccaacgcaaucacaaccauacuaacugcaguuacuuucugcuucgcauccggccaaaacaucaccgaagaguucuaccaaucaaccugcuccgcagucuccaaaggauaccucggagcccuucgcaccggcugguacaccuccgucauaaccaucgaacucucaaacauaaaagaaaacaaaugcaacggcacagacgcgaaagucaaacuuaucaaacaagaacucgacaaauacaaaaacgccgucaccgaccugcagaugcucaugugcucaacccccgccacaggaagcggcucugcuaucgcuuccggcgucgccgucugcaaaguccuccaccucgaaggcgaaguaaacaaaaucaagucagcccuccucuccaccaacaaagccgucgucucucucucaaacggcguauccguccucacauucaaaguccucgaccucaaaaacuacaucgacaaacaacuucuccccauccuaaacaaacaaucaugcuccauccccaaccccgaaacagucauggaauuucaacaaaagaacaaccgccucuuagaaaucacccgagaauuuuccgucaacgcgggagucacaacccccguuucuacguauaugcucaccaacuccgaacuccuuucccucauaaacgacaugccaaucaccaacgaccaaaagaaacucaugucaaacaacguccaaaucguccgacaacaauccuacucuauuaugugcaucaucaaagaagaaguucucgccuacgucguccaacuaccccucuacggcgugaucgacacccccugcuggaaacuacacaccucaccccucugcaccaccaacaccaaggaaggcuccaacaucugccucacccgcaccgaccgcggcugguacugcgacaacgcuggcuccgucucauucuucccgcaagccgaaacuugcaaaguaugcuccaacagaguauucugcgacaccaugaacucacuaacccucccuuccgaagucaaccuuugcaacguugacauauucaacccaaaguacgauugcaaaauuaugacauccaaaacagaugucuccuccuccgucaucacaucccucggugccauuguaucaugcuacggaaaaaccaaaugcaccgcauccaacaaaaacaaaggaaucaucaaaaccuucucaaacggcugcgauuacgucucaaacaaaggagucgacacagucuccgucggaaacacccuauacuacgucaacaaacaagaaggccaaucccuguacgucaaaggagaacccaucaucaacuucuacgacccccucgucuucccgagcgacgaguucgacgccuccaucucacaagucaaugaaaagaucaaccaaucccuugccuucauccggaaaucggacgaacuccuacacaacgugaacgcuggaaaaucaaccaccaacaucaugaucacaaccaucauuaucgucaucaucgucauacuccucucccuaaucgccgucggccuccuccuguauugcaaagcucgcuccacccccgucacccuguccaaagaccaacucuccggaaucaacaacaucgccuucucaaacuaaggacuaguaauaaggaaacuguaugaaugucugugggcaggaagugaagagauccuucuguaaagguuuuuggaauuaugucugcugaauaauaaacuuuuuugaaauaauaaaucugguagaaaaaugagaucuaaaaaaaaaaaaaaaaaaaaaaaaaaaaaaaaaaaaaaaaaaaaaaaaaaaaaaaaaaaaaaaaugcaucccccccccccccccccccccccccccccccaaaggcucuuuucagagccaccagaauu

SEQ ID NO: 6337 - RNA, 2199 nt, Artificial Sequence
  mRNA product Design g-3 comprising derived and/or modified sequence from HRSV(A2)__F_DSCav1_mut6 (opt1)
gggagaguccgcucagccagguugcagaagcggcuuagcguguguccuaaucuucucucugcguguagguaggccugugccgcaaacaagcuuaccauggagcugcucauccugaaggccaacgccaucaccaccauccugacggcggugaccuucugcuucgccagcggccagaacaucaccgaggaguucuaccaguccacgugcagcgccgucuccaagggguaccucggcgcccugcggaccggcugguacaccuccgugaucaccaucgagcugagcaacaucaaggagaacaagugcaacgggaccgacgccaaggugaagcucaucaagcaggagcuggacaaguacaagaacgcggucacggaccugcagaugcugaugugcuccaccccggcaaccggcuccggcuccgccaucgcgagcggcgucgccgugugcaaggugcugcaccucgagggggaggucaacaagaucaagagcgcccugcuguccaccaacaaggccguggugagccucuccaacggcgucagcgugcugaccuucaaggugcuggaccucaagaacuacaucgacaagcagcugcugcccauccugaacaagcagagcugcuccauccccaaccccgagacggugauggaguuccagcagaagaacaaccggcuccuggagaucacccgcgaguucagcgugaacgccggggucaccacccccguguccacguacaugcugaccaacagcgagcuccugucccugaucaacgacaugccgaucaccaacgaccagaagaagcucaugagcaacaacgugcagaucguccggcagcaguccuacagcaucaugugcaucaucaaggaggaggugcuggcguacgugguccagcugccccucuacggcgugaucgacacccccugcuggaagcugcacacgagcccccugugcaccaccaacaccaaggagggguccaacaucugccucacgcgcaccgaccggggcugguacugcgacaacgccggcagcgucuccuucuucccgcaggccgagaccugcaaggugugcagcaaccgcguguucugcgacaccaugaacucccugacgcugcccagcgagguaaaccucugcaacgucgacaucuucaaccccaaguacgacugcaagaucaugaccuccaagaccgacgugagcuccagcgugaucaccucccugggggccaucgucagcugcuacggcaagacgaagugcaccgccagcaacaagaacaaggggaucaucaagaccuucuccaacggcugcgacuacgugagcaacaagggcguggacaccguguccgucgggaacacccuguacuacgugaacaagcaggagggccagagccucuacgugaagggggagcccaucaucaacuucuacgacccgcuggucuuccccuccgacgaguucgacgcgagcaucucccaggugaacgagaagaucaaccagagccuggccuucauccgcaaguccgacgagcugcuccacaacgugaacgccggcaagagcacgaccaacaucaugaucaccaccaucaucaucgucaucaucgugauccugcugucccucaucgccguggggcugcugcucuacugcaaggcccggagcacgcccgucacccuguccaaggaccagcugagcggcaucaacaacaucgcguucuccaacugaggacuagugaagggaacacccaaauuuaauucagccuuaagcacaauuaauuaagagugaaacguaauuguacaagcaguuggucacccaccauagggcaugaucaacaccgcaaccuuuccuuuuucccccagugauucugaaaaaccccucuucccuucagcuugcuuagauguuccaaauuuaguaagcuuaaggcggccuacagaagaaaaagaaaaaaaaggccacaaaaguucccucucacuuucaguaaauaaaauaaaagcagcaacagaaauaaagaaauaaaugaaauucaaaaugaaauaaauauuguguugugcagcauuaaaaaaucaauaaaaauuaaaaaugagcaagaucuaaaaaaaaaaaaaaaaaaaaaaaaaaaaaaaaaaaaaaaaaaaaaaaaaaaaaaaaaaaaaaaaugcaucccccccccccccccccccccccccccccccaaaggcucuuuucagagccaccagaauu

SEQ ID NO: 6338 - RNA, 2199 nt, Artificial Sequence
  mRNA product Design g-3 comprising derived and/or modified sequence from HRSV(A2)__F_DSCav1_mut6 (opt1)
gggagaguccgcucagccagguugcagaagcggcuuagcguguguccuaaucuucucucugcguguagguaggccugugccgcaaacaagcuuaccauggagcugcucauccugaaggccaacgccaucaccaccauccugacggcggugaccuucugcuucgccagcggccagaacaucaccgaggaguucuaccaguccacgugcagcgccgucuccaagggguaccucggcgcccugcgcaccgggugguacaccagcgugaucaccaucgagcuguccaacaucaaggagaacaagugcaacggcaccgacgccaaggugaagcucaucaagcaggagcuggacaaguacaagaacgcggucacggaccugcagaugcucaugugcagcacccccgccaccggguccggcagcgccaucgccuccggcguggcggugugcaagguccugcaccuggagggggaggugaacaagaucaagagcgcccuccuguccaccaacaaggccguggucagccuguccaacggcgugagcgugcucacguucaagguccuggaccugaagaacuacaucgacaagcagcuccugccgauccugaacaagcaguccugcagcauccccaaccccgagaccgugauggaguuccagcagaagaacaaccggcuccuggagaucacccgcgaguucuccgugaacgccggggucaccacgcccgugagcaccuacaugcugaccaacuccgagcuccugagccugaucaacgacaugccgaucaccaacgaccagaagaagcucaugagcaacaacgugcagaucguccggcagcaguccuacagcaucaugugcaucaucaaggaggaggugcuggccuacgugguccagcugccccucuacggcgugaucgacacgcccugcuggaagcugcacaccagcccccugugcaccaccaacacgaaggaggggagcaacaucugccucacccgcaccgaccggggcugguacugcgacaacgcgggcuccgugagcuucuucccgcaggccgagaccugcaaggucugcuccaaccgcguguucugcgacacgaugaacagccugacccugcccuccgaggucaaccucugcaacguggacaucuucaaccccaaguacgacugcaagaucaugaccagcaagaccgacguguccagcuccgucaucacgagccugggggccaucguguccugcuacggcaagaccaagugcaccgccagcaacaagaacaaggggaucaucaagaccuucuccaacggcugcgacuacgugagcaacaagggcgucgacacgguguccguggggaacacccuguacuacgucaacaagcaggagggccagagccucuacgugaagggggagcccaucaucaacuucuacgacccgcugguguuccccagcgacgaguucgacgccuccaucagccaggucaacgagaagaucaaccagucccuggcguucauccggaaguccgacgagcuccugcacaacgugaacgccggcaaguccaccaccaacaucaugaucaccacgaucaucaucgugaucaucgucauccugcucagccugaucgccguggggcugcuccuguacugcaaggcccgcuccacccccgugacccugagcaaggaccagcuguccggcaucaacaacaucgccuucagcaacugaggacuagugaagggaacacccaaauuuaauucagccuuaagcacaauuaauuaagagugaaacguaauuguacaagcaguuggucacccaccauagggcaugaucaacaccgcaaccuuuccuuuuucccccagugauucugaaaaaccccucuucccuucagcuugcuuagauguuccaaauuuaguaagcuuaaggcggccuacagaagaaaaagaaaaaaaaggccacaaaaguucccucucacuuucaguaaauaaaauaaaagcagcaacagaaauaaagaaauaaaugaaauucaaaaugaaauaaauauuguguugugcagcauuaaaaaaucaauaaaaauuaaaaaugagcaagaucuaaaaaaaaaaaaaaaaaaaaaaaaaaaaaaaaaaaaaaaaaaaaaaaaaaaaaaaaaaaaaaaaugcaucccccccccccccccccccccccccccccccaaaggcucuuuucagagccaccagaauu

SEQ ID NO: 6339 - RNA, 2199 nt, Artificial Sequence
  mRNA product Design g-3 comprising derived and/or modified sequence from HRSV(A2)__F_DSCav1_mut6 (opt2)
gggagaguccgcucagccagguugcagaagcggcuuagcguguguccuaaucuucucucugcguguagguaggccugugccgcaaacaagcuuaccauggagcuccucauccucaaggccaacgccaucaccaccauccucaccgccgucaccuucugcuucgccuccggccagaacaucaccgaggaguucuaccaguccaccugcuccgccgucuccaagggcuaccucggcgcccuccgcaccggcugguacaccuccgucaucaccaucgagcucuccaacaucaaggagaacaagugcaacggcaccgacgccaaggucaagcucaucaagcaggagcucgacaaguacaagaacgccgucaccgaccuccagaugcucaugugcuccacccccgccaccggcuccggcuccgccaucgccuccggcgucgccgucugcaagguccuccaccucgagggcgaggucaacaagaucaaguccgcccuccucuccaccaacaaggccgucgucucccucuccaacggcgucuccguccucaccuucaagguccucgaccucaagaacuacaucgacaagcagcuccuccccauccucaacaagcaguccugcuccauccccaaccccgagaccgucauggaguuccagcagaagaacaaccgccuccucgagaucacccgcgaguucuccgucaacgccggcgucaccacccccgucuccaccuacaugcucaccaacuccgagcuccucucccucaucaacgacaugcccaucaccaacgaccagaagaagcucauguccaacaacguccagaucguccgccagcaguccuacuccaucaugugcaucaucaaggaggagguccucgccuacgucguccagcucccccucuacggcgucaucgacacccccugcuggaagcuccacaccuccccccucugcaccaccaacaccaaggagggcuccaacaucugccucacccgcaccgaccgcggcugguacugcgacaacgccggcuccgucuccuucuucccccaggccgagaccugcaaggucugcuccaaccgcgucuucugcgacaccaugaacucccucacccuccccuccgaggucaaccucugcaacgucgacaucuucaaccccaaguacgacugcaagaucaugaccuccaagaccgacgucuccuccuccgucaucaccucccucggcgccaucgucuccugcuacggcaagaccaagugcaccgccuccaacaagaacaagggcaucaucaagaccuucuccaacggcugcgacuacgucuccaacaagggcgucgacaccgucuccgucggcaacacccucuacuacgucaacaagcaggagggccagucccucuacgucaagggcgagcccaucaucaacuucuacgacccccucgucuuccccuccgacgaguucgacgccuccaucucccaggucaacgagaagaucaaccagucccucgccuucauccgcaaguccgacgagcuccuccacaacgucaacgccggcaaguccaccaccaacaucaugaucaccaccaucaucaucgucaucaucgucauccuccucucccucaucgccgucggccuccuccucuacugcaaggcccgcuccacccccgucacccucuccaaggaccagcucuccggcaucaacaacaucgccuucuccaacugaggacuagugaagggaacacccaaauuuaauucagccuuaagcacaauuaauuaagagugaaacguaauuguacaagcaguuggucacccaccauagggcaugaucaacaccgcaaccuuuccuuuuucccccagugauucugaaaaaccccucuucccuucagcuugcuuagauguuccaaauuuaguaagcuuaaggcggccuacagaagaaaaagaaaaaaaaggccacaaaaguucccucucacuuucaguaaauaaaauaaaagcagcaacagaaauaaagaaauaaaugaaauucaaaaugaaauaaauauuguguugugcagcauuaaaaaaucaauaaaaauuaaaaaugagcaagaucuaaaaaaaaaaaaaaaaaaaaaaaaaaaaaaaaaaaaaaaaaaaaaaaaaaaaaaaaaaaaaaaaugcaucccccccccccccccccccccccccccccccaaaggcucuuuucagagccaccagaauu

SEQ ID NO: 6340 - RNA, 2199 nt, Artificial Sequence
  mRNA product Design g-3 comprising derived and/or modified sequence from HRSV(A2)__F_DSCav1_mut6 (opt3)
gggagaguccgcucagccagguugcagaagcggcuuagcguguguccuaaucuucucucugcguguagguaggccugugccgcaaacaagcuuaccauggagcugcucauccuuaaggccaacgcuauuaccacaauacugacugcagugacguucugcuuugccagcggccagaauaucaccgaagaguucuaccaauccacauguucugcggucucaaaaggguauuugggagcuuuaagaacugguugguacaccaguguuauuacaaucgaacugagcaacauuaaggagaauaaaugcaacggcaccgacgccaaggugaaacuaaucaagcaggaacucgauaaguauaaaaaugcaguaacugaccugcagaugcuuauguguuccacacccgccaccgggucuggaucggcuauagcaucaggcguggccgucugcaaggugcugcacuuggagggugagguuaacaaaaucaagagcgcucuccugaguacgaauaaagccguggucucccugucuaacggggugagcguacucacuuuuaagguuuuagaucugaagaauuacauugacaaacagcuuuugccuauccugaacaagcaauccuguucaauuccaaauccggaaaccgugauggaguuccagcagaaaaacaauaggcuacucgaaaucacacgggaguuuagugucaacgcgggagugacuacccccgugagcacauauaugcugaccaauucugagcuucuguccuugauaaacgauaugccuauuacgaacgaccagaagaaacucaugucaaauaacguccaaaucguucgccagcagagcuacaguauuaugugcaucaucaaggaagaggugcuggcauauguagugcaguuaccacuguacggcgucauugauacucccuguuggaaacuccauacaucuccucuuugcaccacuaauacaaaggaaggcuccaacauaugucugacccgaacggaccgugggugguacugcgauaaugccggaagcgugucguucuuuccacaagcugagaccuguaagguuugcucuaacagaguguucugcgacacaaugaacuccuugacucuacccucagaagucaaucuguguaauguggauaucuuuaacccuaaauaugacugcaagauuaugaccaguaaaacagauguaagcuccucuguuaucacuagccucggugccauagugucauguuacggcaagaccaaaugcacagcaaguaauaagaacaaggggauuaucaaaaccuucuccaauggaugugacuaugucagcaacaagggcguggacacugucucuguggguaauacgcuguacuauguuaacaaacaggaggggcagucacuuuacgugaagggagagccaaucauuaacuuuuaugauccgcugguauuccccagugacgaauuugaugcuagcaucucccaagucaaugagaaaauuaaccagucuuuggccuucauaaggaagucggacgaacuccugcacaaugugaacgcgggcaagagcacaaccaauaucaugauuacuaccaucaucauuguuauaaucgugauuuuacugucccuaaucgccgucggccuccugcuuuacugcaaagcacggucaacaccugugaccuugaguaaggaucagcugucugggauuaacaauaucgcuuucagcaacugaggacuagugaagggaacacccaaauuuaauucagccuuaagcacaauuaauuaagagugaaacguaauuguacaagcaguuggucacccaccauagggcaugaucaacaccgcaaccuuuccuuuuucccccagugauucugaaaaaccccucuucccuucagcuugcuuagauguuccaaauuuaguaagcuuaaggcggccuacagaagaaaaagaaaaaaaaggccacaaaaguucccucucacuuucaguaaauaaaauaaaagcagcaacagaaauaaagaaauaaaugaaauucaaaaugaaauaaauauuguguugugcagcauuaaaaaaucaauaaaaauuaaaaaugagcaagaucuaaaaaaaaaaaaaaaaaaaaaaaaaaaaaaaaaaaaaaaaaaaaaaaaaaaaaaaaaaaaaaaaugcaucccccccccccccccccccccccccccccccaaaggcucuuuucagagccaccagaauu

SEQ ID NO: 6341 - RNA, 2199 nt, Artificial Sequence
  mRNA product Design g-3 comprising derived and/or modified sequence from HRSV(A2)__F_DSCav1_mut6 (opt4)
gggagaguccgcucagccagguugcagaagcggcuuagcguguguccuaaucuucucucugcguguagguaggccugugccgcaaacaagcuuaccauggagcugcugauccugaaggccaacgccaucaccaccauccugaccgccgugaccuucugcuucgccagcggccagaacaucaccgaggaguucuaccagagcaccugcagcgccgugagcaagggcuaccugggcgcccugagaaccggcugguacaccagcgugaucaccaucgagcugagcaacaucaaggagaacaagugcaacggcaccgacgccaaggugaagcugaucaagcaggagcuggacaaguacaagaacgccgugaccgaccugcagaugcugaugugcagcacccccgccaccggcagcggcagcgccaucgccagcggcguggccgugugcaaggugcugcaccuggagggcgaggugaacaagaucaagagcgcccugcugagcaccaacaaggccguggugagccugagcaacggcgugagcgugcugaccuucaaggugcuggaccugaagaacuacaucgacaagcagcugcugcccauccugaacaagcagagcugcagcauccccaaccccgagaccgugauggaguuccagcagaagaacaacagacugcuggagaucaccagagaguucagcgugaacgccggcgugaccacccccgugagcaccuacaugcugaccaacagcgagcugcugagccugaucaacgacaugcccaucaccaacgaccagaagaagcugaugagcaacaacgugcagaucgugagacagcagagcuacagcaucaugugcaucaucaaggaggaggugcuggccuacguggugcagcugccccuguacggcgugaucgacacccccugcuggaagcugcacaccagcccccugugcaccaccaacaccaaggagggcagcaacaucugccugaccagaaccgacagaggcugguacugcgacaacgccggcagcgugagcuucuucccccaggccgagaccugcaaggugugcagcaacagaguguucugcgacaccaugaacagccugacccugcccagcgaggugaaccugugcaacguggacaucuucaaccccaaguacgacugcaagaucaugaccagcaagaccgacgugagcagcagcgugaucaccagccugggcgccaucgugagcugcuacggcaagaccaagugcaccgccagcaacaagaacaagggcaucaucaagaccuucagcaacggcugcgacuacgugagcaacaagggcguggacaccgugagcgugggcaacacccuguacuacgugaacaagcaggagggccagagccuguacgugaagggcgagcccaucaucaacuucuacgacccccugguguuccccagcgacgaguucgacgccagcaucagccaggugaacgagaagaucaaccagagccuggccuucaucagaaagagcgacgagcugcugcacaacgugaacgccggcaagagcaccaccaacaucaugaucaccaccaucaucaucgugaucaucgugauccugcugagccugaucgccgugggccugcugcuguacugcaaggccagaagcacccccgugacccugagcaaggaccagcugagcggcaucaacaacaucgccuucagcaacugaggacuagugaagggaacacccaaauuuaauucagccuuaagcacaauuaauuaagagugaaacguaauuguacaagcaguuggucacccaccauagggcaugaucaacaccgcaaccuuuccuuuuucccccagugauucugaaaaaccccucuucccuucagcuugcuuagauguuccaaauuuaguaagcuuaaggcggccuacagaagaaaaagaaaaaaaaggccacaaaaguucccucucacuuucaguaaauaaaauaaaagcagcaacagaaauaaagaaauaaaugaaauucaaaaugaaauaaauauuguguugugcagcauuaaaaaaucaauaaaaauuaaaaaugagcaagaucuaaaaaaaaaaaaaaaaaaaaaaaaaaaaaaaaaaaaaaaaaaaaaaaaaaaaaaaaaaaaaaaaugcaucccccccccccccccccccccccccccccccaaaggcucuuuucagagccaccagaauu

SEQ ID NO: 6342 - RNA, 2199 nt, Artificial Sequence
  mRNA product Design g-3 comprising derived and/or modified sequence from HRSV(A2)__F_DSCav1_mut6 (opt5)
gggagaguccgcucagccagguugcagaagcggcuuagcguguguccuaaucuucucucugcguguagguaggccugugccgcaaacaagcuuaccauggagcugcucauccugaaggccaacgcuauuaccacaauccuuacggccgugaccuucugcuuugcgagcggccagaauauuacagaagaguucuaccaauccaccuguucugcugucagcaaaggguaucugggagcccucagaacaggcugguacaccuccguuaucacaauugaacugucuaacaucaaggagaauaaaugcaacgggaccgacgccaaggugaaacuuaucaagcaggaacuggauaaguauaaaaaugcugugacggaccuccagaugcugauguguagcacccccgccacaggauccggcucugcuauugccagcggggucgcggugugcaagguucugcaccucgagggagaggugaacaaaaucaaguccgcccugcuuagcaccaauaaagcugucgugucucuguccaacggcguuagcgugcucacauuuaagguccuggaucuuaagaauuacauugacaaacagcugcucccuauccugaacaagcaaucuuguuccauuccgaaucccgaaaccgugauggaguuccagcagaaaaacaaucggcugcucgaaaucacgcgcgaguuuagcgugaacgccggcgucacaaccccuguuucuacauauaugcugaccaauuccgagcuucugagccucauuaacgauaugcccaucaccaacgaccagaagaaacugauguccaauaacgugcaaaucgugagacagcagucuuacagcauuaugugcaucauuaaggaagagguccuugcuuaugugguucagcugccucucuacggggugaucgauacacccuguuggaaacugcauacguccccucugugcaccacaaauaccaaggaaggaagcaacauuugucucacacggaccgaccgcggcugguacugcgauaaugccgggucugucuccuucuuuccgcaagcggagacguguaaggugugcagcaacagaguuuucugcgacacaaugaacucucugacccuucccagcgaagugaaucuguguaaugucgauaucuuuaacccuaaauaugacugcaagaucaugaccuccaaaacagaugugucuagcuccgucauuaccagccucggagccaucgugucuuguuacggcaagacaaaaugcacggcuuccaauaagaacaaggggauuaucaaaaccuucagcaauggaugugacuauguuucuaacaagggcguggacacagucuccgugggcaauacccuguacuauguuaacaaacaggaggggcagagccuuuacgugaagggagagcccauuaucaacuuuuaugauccucuggucuuccccuccgacgaauuugaugccucuaucagccaagugaaugagaaaauuaaccagucccucgcuuucauccggaagucugacgaacugcugcacaaugugaacgccggcaagagcacaaccaauauuaugaucacgaccauuaucauuguuaucaucgucauucuccugucccuuaucgccguggggcugcuccuguacugcaaagcucgcagcacaccggugacccugucuaaggaucagcuuuccggaauuaacaauaucgcguucagcaacugaggacuagugaagggaacacccaaauuuaauucagccuuaagcacaauuaauuaagagugaaacguaauuguacaagcaguuggucacccaccauagggcaugaucaacaccgcaaccuuuccuuuuucccccagugauucugaaaaaccccucuucccuucagcuugcuuagauguuccaaauuuaguaagcuuaaggcggccuacagaagaaaaagaaaaaaaaggccacaaaaguucccucucacuuucaguaaauaaaauaaaagcagcaacagaaauaaagaaauaaaugaaauucaaaaugaaauaaauauuguguugugcagcauuaaaaaaucaauaaaaauuaaaaaugagcaagaucuaaaaaaaaaaaaaaaaaaaaaaaaaaaaaaaaaaaaaaaaaaaaaaaaaaaaaaaaaaaaaaaaugcaucccccccccccccccccccccccccccccccaaaggcucuuuucagagccaccagaauu

SEQ ID NO: 6343 - RNA, 2199 nt, Artificial Sequence
  mRNA product Design g-3 comprising derived and/or modified sequence from HRSV(A2)__F_DSCav1_mut6 (opt6)
gggagaguccgcucagccagguugcagaagcggcuuagcguguguccuaaucuucucucugcguguagguaggccugugccgcaaacaagcuuaccauggaacuauuaaucuuaaaagcaaaugcuauaaccacaauauuaacagcaguaacauucuguuuugccuccggacaaaacauaacagaagaauuuuaucaaucaacaugcucugcaguauccaaagguuacuuaggcgcacuacgcacuggaugguauacaucaguaauaacaauagaacuaucaaacauaaaagaaaauaaauguaacgguacugacgcaaaagugaaacuaauuaaacaagaacucgacaaauacaaaaaugcuguaacagaccuacaaaugcuaaugugcucaacacccgcaaccggaucaggaucagccauagccuccggagucgcaguaugcaaaguauuacaucuugaaggagaaguaaauaaaauaaaaucagcauuacuauccacaaauaaagccguaguaucacuaucaaacgguguauccguccuuacauucaaaguauuagaucuaaaaaacuacauagauaaacaacuacuacccaucuuaaacaaacaaucaugcucaauucccaacccagaaacagucauggaauuucaacaaaaaaacaacagacucuuagaaauaacacgagaauuuucaguaaacgcaggaguaaccacaccaguaaguacauacaugcucaccaacucagaauuauuaucacuuauuaacgacaugccaauuacaaacgaccaaaaaaaauuaaugucaaacaauguccaaauuguuagacaacaaucauacucuauaauguguauaauaaaagaagaaguacuagcuuacguaguucaauuaccacuauauggcguaauagauacaccuugcuggaaacuacauacaucuccauuauguacaacuaacacaaaagaaggaucuaacauaugccuaacacgcacagaucgaggaugguacugcgauaaugcagguuccguaucauucuuuccacaagcagaaacauguaaaguaugcucaaacagaguauucugugacacuaugaacuccuuaacccuacccucagaagucaaucuaugcaacguugacauauuuaacccaaaauacgacuguaaaaucaugacaucuaaaacagacguaucaucaucaguuauuacaucccuaggagcaauaguaucuugcuacggaaaaacaaaauguacagcauccaacaaaaacaaaggaauaaucaaaacauucucaaacggcugcgacuacguaucaaacaaagguguagacacaguaucaguaggaaauacuuuauauuacguaaauaaacaagaaggacaaucucuauacguuaaaggcgaaccuauuauaaacuucuacgacccacucguauucccuucagacgaauuugacgcaucuauaucccaaguuaacgaaaaaaucaaccaaucauuagccuuuauaagaaaauccgacgaauuauuacauaacgucaacgcuggaaaaucaacaacuaacauaaugauaaccacaauaauaauagucaucauaguuauauuacuaagucuaauagccguaggccuccuacuuuauugcaaagcaagaucaacaccaguaacauuauccaaagaccaacucagcggcauaaacaauauagcuuuuucaaacuagggacuagugaagggaacacccaaauuuaauucagccuuaagcacaauuaauuaagagugaaacguaauuguacaagcaguuggucacccaccauagggcaugaucaacaccgcaaccuuuccuuuuucccccagugauucugaaaaaccccucuucccuucagcuugcuuagauguuccaaauuuaguaagcuuaaggcggccuacagaagaaaaagaaaaaaaaggccacaaaaguucccucucacuuucaguaaauaaaauaaaagcagcaacagaaauaaagaaauaaaugaaauucaaaaugaaauaaauauuguguugugcagcauuaaaaaaucaauaaaaauuaaaaaugagcaagaucuaaaaaaaaaaaaaaaaaaaaaaaaaaaaaaaaaaaaaaaaaaaaaaaaaaaaaaaaaaaaaaaaugcaucccccccccccccccccccccccccccccccaaaggcucuuuucagagccaccagaauu

SEQ ID NO: 6344 - RNA, 2199 nt, Artificial Sequence
  mRNA product Design g-3 comprising derived and/or modified sequence from HRSV(A2)__F_DSCav1_mut6 (opt11)
gggagaguccgcucagccagguugcagaagcggcuuagcguguguccuaaucuucucucugcguguagguaggccugugccgcaaacaagcuuaccauggaacuccucauccucaaagccaacgcaaucacaaccauacuaacugcaguuacuuucugcuucgcauccggccaaaacaucaccgaagaguucuaccaaucaaccugcuccgcagucuccaaaggauaccucggagcccuucgcaccggcugguacaccuccgucauaaccaucgaacucucaaacauaaaagaaaacaaaugcaacggcacagacgcgaaagucaaacuuaucaaacaagaacucgacaaauacaaaaacgccgucaccgaccugcagaugcucaugugcucaacccccgccacaggaagcggcucugcuaucgcuuccggcgucgccgucugcaaaguccuccaccucgaaggcgaaguaaacaaaaucaagucagcccuccucuccaccaacaaagccgucgucucucucucaaacggcguauccguccucacauucaaaguccucgaccucaaaaacuacaucgacaaacaacuucuccccauccuaaacaaacaaucaugcuccauccccaaccccgaaacagucauggaauuucaacaaaagaacaaccgccucuuagaaaucacccgagaauuuuccgucaacgcgggagucacaacccccguuucuacguauaugcucaccaacuccgaacuccuuucccucauaaacgacaugccaaucaccaacgaccaaaagaaacucaugucaaacaacguccaaaucguccgacaacaauccuacucuauuaugugcaucaucaaagaagaaguucucgccuacgucguccaacuaccccucuacggcgugaucgacacccccugcuggaaacuacacaccucaccccucugcaccaccaacaccaaggaaggcuccaacaucugccucacccgcaccgaccgcggcugguacugcgacaacgcuggcuccgucucauucuucccgcaagccgaaacuugcaaaguaugcuccaacagaguauucugcgacaccaugaacucacuaacccucccuuccgaagucaaccuuugcaacguugacauauucaacccaaaguacgauugcaaaauuaugacauccaaaacagaugucuccuccuccgucaucacaucccucggugccauuguaucaugcuacggaaaaaccaaaugcaccgcauccaacaaaaacaaaggaaucaucaaaaccuucucaaacggcugcgauuacgucucaaacaaaggagucgacacagucuccgucggaaacacccuauacuacgucaacaaacaagaaggccaaucccuguacgucaaaggagaacccaucaucaacuucuacgacccccucgucuucccgagcgacgaguucgacgccuccaucucacaagucaaugaaaagaucaaccaaucccuugccuucauccggaaaucggacgaacuccuacacaacgugaacgcuggaaaaucaaccaccaacaucaugaucacaaccaucauuaucgucaucaucgucauacuccucucccuaaucgccgucggccuccuccuguauugcaaagcucgcuccacccccgucacccuguccaaagaccaacucuccggaaucaacaacaucgccuucucaaacuaaggacuagugaagggaacacccaaauuuaauucagccuuaagcacaauuaauuaagagugaaacguaauuguacaagcaguuggucacccaccauagggcaugaucaacaccgcaaccuuuccuuuuucccccagugauucugaaaaaccccucuucccuucagcuugcuuagauguuccaaauuuaguaagcuuaaggcggccuacagaagaaaaagaaaaaaaaggccacaaaaguucccucucacuuucaguaaauaaaauaaaagcagcaacagaaauaaagaaauaaaugaaauucaaaaugaaauaaauauuguguugugcagcauuaaaaaaucaauaaaaauuaaaaaugagcaagaucuaaaaaaaaaaaaaaaaaaaaaaaaaaaaaaaaaaaaaaaaaaaaaaaaaaaaaaaaaaaaaaaaugcaucccccccccccccccccccccccccccccccaaaggcucuuuucagagccaccagaauu

SEQ ID NO: 6345 - RNA, 1994 nt, Artificial Sequence
  mRNA product Design g-4 comprising derived and/or modified sequence from HRSV(A2)__F_DSCav1_mut6 (opt1)
gggagacuccugucgggcggaaguaggaggaguagaguuuaaaaacaguacucuuuuuccgguucgggacguaguugaagcaacgacaagccggauaaccgcucuugagacaggaagcuuaccauggagcugcucauccugaaggccaacgccaucaccaccauccugacggcggugaccuucugcuucgccagcggccagaacaucaccgaggaguucuaccaguccacgugcagcgccgucuccaagggguaccucggcgcccugcggaccggcugguacaccuccgugaucaccaucgagcugagcaacaucaaggagaacaagugcaacgggaccgacgccaaggugaagcucaucaagcaggagcuggacaaguacaagaacgcggucacggaccugcagaugcugaugugcuccaccccggcaaccggcuccggcuccgccaucgcgagcggcgucgccgugugcaaggugcugcaccucgagggggaggucaacaagaucaagagcgcccugcuguccaccaacaaggccguggugagccucuccaacggcgucagcgugcugaccuucaaggugcuggaccucaagaacuacaucgacaagcagcugcugcccauccugaacaagcagagcugcuccauccccaaccccgagacggugauggaguuccagcagaagaacaaccggcuccuggagaucacccgcgaguucagcgugaacgccggggucaccacccccguguccacguacaugcugaccaacagcgagcuccugucccugaucaacgacaugccgaucaccaacgaccagaagaagcucaugagcaacaacgugcagaucguccggcagcaguccuacagcaucaugugcaucaucaaggaggaggugcuggcguacgugguccagcugccccucuacggcgugaucgacacccccugcuggaagcugcacacgagcccccugugcaccaccaacaccaaggagggguccaacaucugccucacgcgcaccgaccggggcugguacugcgacaacgccggcagcgucuccuucuucccgcaggccgagaccugcaaggugugcagcaaccgcguguucugcgacaccaugaacucccugacgcugcccagcgagguaaaccucugcaacgucgacaucuucaaccccaaguacgacugcaagaucaugaccuccaagaccgacgugagcuccagcgugaucaccucccugggggccaucgucagcugcuacggcaagacgaagugcaccgccagcaacaagaacaaggggaucaucaagaccuucuccaacggcugcgacuacgugagcaacaagggcguggacaccguguccgucgggaacacccuguacuacgugaacaagcaggagggccagagccucuacgugaagggggagcccaucaucaacuucuacgacccgcuggucuuccccuccgacgaguucgacgcgagcaucucccaggugaacgagaagaucaaccagagccuggccuucauccgcaaguccgacgagcugcuccacaacgugaacgccggcaagagcacgaccaacaucaugaucaccaccaucaucaucgucaucaucgugauccugcugucccucaucgccguggggcugcugcucuacugcaaggcccggagcacgcccgucacccuguccaaggaccagcugagcggcaucaacaacaucgcguucuccaacugaggacuaguaauaaggaaacuguaugaaugucugugggcaggaagugaagagauccuucuguaaagguuuuuggaauuaugucugcugaauaauaaacuuuuuugaaauaauaaaucugguagaaaaaugagaucuaaaaaaaaaaaaaaaaaaaaaaaaaaaaaaaaaaaaaaaaaaaaaaaaaaaaaaaaaaaaaaaaugcaucccccccccccccccccccccccccccccccaaaggcucuuuucagagccaccagaauu

SEQ ID NO: 6346 - RNA, 1994 nt, Artificial Sequence
  mRNA product Design g-4 comprising derived and/or modified sequence from HRSV(A2)__F_DSCav1_mut6 (opt1)
gggagacuccugucgggcggaaguaggaggaguagaguuuaaaaacaguacucuuuuuccgguucgggacguaguugaagcaacgacaagccggauaaccgcucuugagacaggaagcuuaccauggagcugcucauccugaaggccaacgccaucaccaccauccugacggcggugaccuucugcuucgccagcggccagaacaucaccgaggaguucuaccaguccacgugcagcgccgucuccaagggguaccucggcgcccugcgcaccgggugguacaccagcgugaucaccaucgagcuguccaacaucaaggagaacaagugcaacggcaccgacgccaaggugaagcucaucaagcaggagcuggacaaguacaagaacgcggucacggaccugcagaugcucaugugcagcacccccgccaccggguccggcagcgccaucgccuccggcguggcggugugcaagguccugcaccuggagggggaggugaacaagaucaagagcgcccuccuguccaccaacaaggccguggucagccuguccaacggcgugagcgugcucacguucaagguccuggaccugaagaacuacaucgacaagcagcuccugccgauccugaacaagcaguccugcagcauccccaaccccgagaccgugauggaguuccagcagaagaacaaccggcuccuggagaucacccgcgaguucuccgugaacgccggggucaccacgcccgugagcaccuacaugcugaccaacuccgagcuccugagccugaucaacgacaugccgaucaccaacgaccagaagaagcucaugagcaacaacgugcagaucguccggcagcaguccuacagcaucaugugcaucaucaaggaggaggugcuggccuacgugguccagcugccccucuacggcgugaucgacacgcccugcuggaagcugcacaccagcccccugugcaccaccaacacgaaggaggggagcaacaucugccucacccgcaccgaccggggcugguacugcgacaacgcgggcuccgugagcuucuucccgcaggccgagaccugcaaggucugcuccaaccgcguguucugcgacacgaugaacagccugacccugcccuccgaggucaaccucugcaacguggacaucuucaaccccaaguacgacugcaagaucaugaccagcaagaccgacguguccagcuccgucaucacgagccugggggccaucguguccugcuacggcaagaccaagugcaccgccagcaacaagaacaaggggaucaucaagaccuucuccaacggcugcgacuacgugagcaacaagggcgucgacacgguguccguggggaacacccuguacuacgucaacaagcaggagggccagagccucuacgugaagggggagcccaucaucaacuucuacgacccgcugguguuccccagcgacgaguucgacgccuccaucagccaggucaacgagaagaucaaccagucccuggcguucauccggaaguccgacgagcuccugcacaacgugaacgccggcaaguccaccaccaacaucaugaucaccacgaucaucaucgugaucaucgucauccugcucagccugaucgccguggggcugcuccuguacugcaaggcccgcuccacccccgugacccugagcaaggaccagcuguccggcaucaacaacaucgccuucagcaacugaggacuaguaauaaggaaacuguaugaaugucugugggcaggaagugaagagauccuucuguaaagguuuuuggaauuaugucugcugaauaauaaacuuuuuugaaauaauaaaucugguagaaaaaugagaucuaaaaaaaaaaaaaaaaaaaaaaaaaaaaaaaaaaaaaaaaaaaaaaaaaaaaaaaaaaaaaaaaugcaucccccccccccccccccccccccccccccccaaaggcucuuuucagagccaccagaauu

SEQ ID NO: 6347 - RNA, 1994 nt, Artificial Sequence
  mRNA product Design g-4 comprising derived and/or modified sequence from HRSV(A2)__F_DSCav1_mut6 (opt2)
gggagacuccugucgggcggaaguaggaggaguagaguuuaaaaacaguacucuuuuuccgguucgggacguaguugaagcaacgacaagccggauaaccgcucuugagacaggaagcuuaccauggagcuccucauccucaaggccaacgccaucaccaccauccucaccgccgucaccuucugcuucgccuccggccagaacaucaccgaggaguucuaccaguccaccugcuccgccgucuccaagggcuaccucggcgcccuccgcaccggcugguacaccuccgucaucaccaucgagcucuccaacaucaaggagaacaagugcaacggcaccgacgccaaggucaagcucaucaagcaggagcucgacaaguacaagaacgccgucaccgaccuccagaugcucaugugcuccacccccgccaccggcuccggcuccgccaucgccuccggcgucgccgucugcaagguccuccaccucgagggcgaggucaacaagaucaaguccgcccuccucuccaccaacaaggccgucgucucccucuccaacggcgucuccguccucaccuucaagguccucgaccucaagaacuacaucgacaagcagcuccuccccauccucaacaagcaguccugcuccauccccaaccccgagaccgucauggaguuccagcagaagaacaaccgccuccucgagaucacccgcgaguucuccgucaacgccggcgucaccacccccgucuccaccuacaugcucaccaacuccgagcuccucucccucaucaacgacaugcccaucaccaacgaccagaagaagcucauguccaacaacguccagaucguccgccagcaguccuacuccaucaugugcaucaucaaggaggagguccucgccuacgucguccagcucccccucuacggcgucaucgacacccccugcuggaagcuccacaccuccccccucugcaccaccaacaccaaggagggcuccaacaucugccucacccgcaccgaccgcggcugguacugcgacaacgccggcuccgucuccuucuucccccaggccgagaccugcaaggucugcuccaaccgcgucuucugcgacaccaugaacucccucacccuccccuccgaggucaaccucugcaacgucgacaucuucaaccccaaguacgacugcaagaucaugaccuccaagaccgacgucuccuccuccgucaucaccucccucggcgccaucgucuccugcuacggcaagaccaagugcaccgccuccaacaagaacaagggcaucaucaagaccuucuccaacggcugcgacuacgucuccaacaagggcgucgacaccgucuccgucggcaacacccucuacuacgucaacaagcaggagggccagucccucuacgucaagggcgagcccaucaucaacuucuacgacccccucgucuuccccuccgacgaguucgacgccuccaucucccaggucaacgagaagaucaaccagucccucgccuucauccgcaaguccgacgagcuccuccacaacgucaacgccggcaaguccaccaccaacaucaugaucaccaccaucaucaucgucaucaucgucauccuccucucccucaucgccgucggccuccuccucuacugcaaggcccgcuccacccccgucacccucuccaaggaccagcucuccggcaucaacaacaucgccuucuccaacugaggacuaguaauaaggaaacuguaugaaugucugugggcaggaagugaagagauccuucuguaaagguuuuuggaauuaugucugcugaauaauaaacuuuuuugaaauaauaaaucugguagaaaaaugagaucuaaaaaaaaaaaaaaaaaaaaaaaaaaaaaaaaaaaaaaaaaaaaaaaaaaaaaaaaaaaaaaaaugcaucccccccccccccccccccccccccccccccaaaggcucuuuucagagccaccagaauu

SEQ ID NO: 6348 - RNA, 1994 nt, Artificial Sequence
  mRNA product Design g-4 comprising derived and/or modified sequence from HRSV(A2)__F_DSCav1_mut6 (opt3)
gggagacuccugucgggcggaaguaggaggaguagaguuuaaaaacaguacucuuuuuccgguucgggacguaguugaagcaacgacaagccggauaaccgcucuugagacaggaagcuuaccauggagcugcucauccuuaaggccaacgcuauuaccacaauacugacugcagugacguucugcuuugccagcggccagaauaucaccgaagaguucuaccaauccacauguucugcggucucaaaaggguauuugggagcuuuaagaacugguugguacaccaguguuauuacaaucgaacugagcaacauuaaggagaauaaaugcaacggcaccgacgccaaggugaaacuaaucaagcaggaacucgauaaguauaaaaaugcaguaacugaccugcagaugcuuauguguuccacacccgccaccgggucuggaucggcuauagcaucaggcguggccgucugcaaggugcugcacuuggagggugagguuaacaaaaucaagagcgcucuccugaguacgaauaaagccguggucucccugucuaacggggugagcguacucacuuuuaagguuuuagaucugaagaauuacauugacaaacagcuuuugccuauccugaacaagcaauccuguucaauuccaaauccggaaaccgugauggaguuccagcagaaaaacaauaggcuacucgaaaucacacgggaguuuagugucaacgcgggagugacuacccccgugagcacauauaugcugaccaauucugagcuucuguccuugauaaacgauaugccuauuacgaacgaccagaagaaacucaugucaaauaacguccaaaucguucgccagcagagcuacaguauuaugugcaucaucaaggaagaggugcuggcauauguagugcaguuaccacuguacggcgucauugauacucccuguuggaaacuccauacaucuccucuuugcaccacuaauacaaaggaaggcuccaacauaugucugacccgaacggaccgugggugguacugcgauaaugccggaagcgugucguucuuuccacaagcugagaccuguaagguuugcucuaacagaguguucugcgacacaaugaacuccuugacucuacccucagaagucaaucuguguaauguggauaucuuuaacccuaaauaugacugcaagauuaugaccaguaaaacagauguaagcuccucuguuaucacuagccucggugccauagugucauguuacggcaagaccaaaugcacagcaaguaauaagaacaaggggauuaucaaaaccuucuccaauggaugugacuaugucagcaacaagggcguggacacugucucuguggguaauacgcuguacuauguuaacaaacaggaggggcagucacuuuacgugaagggagagccaaucauuaacuuuuaugauccgcugguauuccccagugacgaauuugaugcuagcaucucccaagucaaugagaaaauuaaccagucuuuggccuucauaaggaagucggacgaacuccugcacaaugugaacgcgggcaagagcacaaccaauaucaugauuacuaccaucaucauuguuauaaucgugauuuuacugucccuaaucgccgucggccuccugcuuuacugcaaagcacggucaacaccugugaccuugaguaaggaucagcugucugggauuaacaauaucgcuuucagcaacugaggacuaguaauaaggaaacuguaugaaugucugugggcaggaagugaagagauccuucuguaaagguuuuuggaauuaugucugcugaauaauaaacuuuuuugaaauaauaaaucugguagaaaaaugagaucuaaaaaaaaaaaaaaaaaaaaaaaaaaaaaaaaaaaaaaaaaaaaaaaaaaaaaaaaaaaaaaaaugcaucccccccccccccccccccccccccccccccaaaggcucuuuucagagccaccagaauu

SEQ ID NO: 6349 - RNA, 1994 nt, Artificial Sequence
  mRNA product Design g-4 comprising derived and/or modified sequence from HRSV(A2)__F_DSCav1_mut6 (opt4)
gggagacuccugucgggcggaaguaggaggaguagaguuuaaaaacaguacucuuuuuccgguucgggacguaguugaagcaacgacaagccggauaaccgcucuugagacaggaagcuuaccauggagcugcugauccugaaggccaacgccaucaccaccauccugaccgccgugaccuucugcuucgccagcggccagaacaucaccgaggaguucuaccagagcaccugcagcgccgugagcaagggcuaccugggcgcccugagaaccggcugguacaccagcgugaucaccaucgagcugagcaacaucaaggagaacaagugcaacggcaccgacgccaaggugaagcugaucaagcaggagcuggacaaguacaagaacgccgugaccgaccugcagaugcugaugugcagcacccccgccaccggcagcggcagcgccaucgccagcggcguggccgugugcaaggugcugcaccuggagggcgaggugaacaagaucaagagcgcccugcugagcaccaacaaggccguggugagccugagcaacggcgugagcgugcugaccuucaaggugcuggaccugaagaacuacaucgacaagcagcugcugcccauccugaacaagcagagcugcagcauccccaaccccgagaccgugauggaguuccagcagaagaacaacagacugcuggagaucaccagagaguucagcgugaacgccggcgugaccacccccgugagcaccuacaugcugaccaacagcgagcugcugagccugaucaacgacaugcccaucaccaacgaccagaagaagcugaugagcaacaacgugcagaucgugagacagcagagcuacagcaucaugugcaucaucaaggaggaggugcuggccuacguggugcagcugccccuguacggcgugaucgacacccccugcuggaagcugcacaccagcccccugugcaccaccaacaccaaggagggcagcaacaucugccugaccagaaccgacagaggcugguacugcgacaacgccggcagcgugagcuucuucccccaggccgagaccugcaaggugugcagcaacagaguguucugcgacaccaugaacagccugacccugcccagcgaggugaaccugugcaacguggacaucuucaaccccaaguacgacugcaagaucaugaccagcaagaccgacgugagcagcagcgugaucaccagccugggcgccaucgugagcugcuacggcaagaccaagugcaccgccagcaacaagaacaagggcaucaucaagaccuucagcaacggcugcgacuacgugagcaacaagggcguggacaccgugagcgugggcaacacccuguacuacgugaacaagcaggagggccagagccuguacgugaagggcgagcccaucaucaacuucuacgacccccugguguuccccagcgacgaguucgacgccagcaucagccaggugaacgagaagaucaaccagagccuggccuucaucagaaagagcgacgagcugcugcacaacgugaacgccggcaagagcaccaccaacaucaugaucaccaccaucaucaucgugaucaucgugauccugcugagccugaucgccgugggccugcugcuguacugcaaggccagaagcacccccgugacccugagcaaggaccagcugagcggcaucaacaacaucgccuucagcaacugaggacuaguaauaaggaaacuguaugaaugucugugggcaggaagugaagagauccuucuguaaagguuuuuggaauuaugucugcugaauaauaaacuuuuuugaaauaauaaaucugguagaaaaaugagaucuaaaaaaaaaaaaaaaaaaaaaaaaaaaaaaaaaaaaaaaaaaaaaaaaaaaaaaaaaaaaaaaaugcaucccccccccccccccccccccccccccccccaaaggcucuuuucagagccaccagaauu

SEQ ID NO: 6350 - RNA, 1994 nt, Artificial Sequence
  mRNA product Design g-4 comprising derived and/or modified sequence from HRSV(A2)__F_DSCav1_mut6 (opt5)
gggagacuccugucgggcggaaguaggaggaguagaguuuaaaaacaguacucuuuuuccgguucgggacguaguugaagcaacgacaagccggauaaccgcucuugagacaggaagcuuaccauggagcugcucauccugaaggccaacgcuauuaccacaauccuuacggccgugaccuucugcuuugcgagcggccagaauauuacagaagaguucuaccaauccaccuguucugcugucagcaaaggguaucugggagcccucagaacaggcugguacaccuccguuaucacaauugaacugucuaacaucaaggagaauaaaugcaacgggaccgacgccaaggugaaacuuaucaagcaggaacuggauaaguauaaaaaugcugugacggaccuccagaugcugauguguagcacccccgccacaggauccggcucugcuauugccagcggggucgcggugugcaagguucugcaccucgagggagaggugaacaaaaucaaguccgcccugcuuagcaccaauaaagcugucgugucucuguccaacggcguuagcgugcucacauuuaagguccuggaucuuaagaauuacauugacaaacagcugcucccuauccugaacaagcaaucuuguuccauuccgaaucccgaaaccgugauggaguuccagcagaaaaacaaucggcugcucgaaaucacgcgcgaguuuagcgugaacgccggcgucacaaccccuguuucuacauauaugcugaccaauuccgagcuucugagccucauuaacgauaugcccaucaccaacgaccagaagaaacugauguccaauaacgugcaaaucgugagacagcagucuuacagcauuaugugcaucauuaaggaagagguccuugcuuaugugguucagcugccucucuacggggugaucgauacacccuguuggaaacugcauacguccccucugugcaccacaaauaccaaggaaggaagcaacauuugucucacacggaccgaccgcggcugguacugcgauaaugccgggucugucuccuucuuuccgcaagcggagacguguaaggugugcagcaacagaguuuucugcgacacaaugaacucucugacccuucccagcgaagugaaucuguguaaugucgauaucuuuaacccuaaauaugacugcaagaucaugaccuccaaaacagaugugucuagcuccgucauuaccagccucggagccaucgugucuuguuacggcaagacaaaaugcacggcuuccaauaagaacaaggggauuaucaaaaccuucagcaauggaugugacuauguuucuaacaagggcguggacacagucuccgugggcaauacccuguacuauguuaacaaacaggaggggcagagccuuuacgugaagggagagcccauuaucaacuuuuaugauccucuggucuuccccuccgacgaauuugaugccucuaucagccaagugaaugagaaaauuaaccagucccucgcuuucauccggaagucugacgaacugcugcacaaugugaacgccggcaagagcacaaccaauauuaugaucacgaccauuaucauuguuaucaucgucauucuccugucccuuaucgccguggggcugcuccuguacugcaaagcucgcagcacaccggugacccugucuaaggaucagcuuuccggaauuaacaauaucgcguucagcaacugaggacuaguaauaaggaaacuguaugaaugucugugggcaggaagugaagagauccuucuguaaagguuuuuggaauuaugucugcugaauaauaaacuuuuuugaaauaauaaaucugguagaaaaaugagaucuaaaaaaaaaaaaaaaaaaaaaaaaaaaaaaaaaaaaaaaaaaaaaaaaaaaaaaaaaaaaaaaaugcaucccccccccccccccccccccccccccccccaaaggcucuuuucagagccaccagaauu

SEQ ID NO: 6351 - RNA, 1994 nt, Artificial Sequence
  mRNA product Design g-4 comprising derived and/or modified sequence from HRSV(A2)__F_DSCav1_mut6 (opt6)
gggagacuccugucgggcggaaguaggaggaguagaguuuaaaaacaguacucuuuuuccgguucgggacguaguugaagcaacgacaagccggauaaccgcucuugagacaggaagcuuaccauggaacuauuaaucuuaaaagcaaaugcuauaaccacaauauuaacagcaguaacauucuguuuugccuccggacaaaacauaacagaagaauuuuaucaaucaacaugcucugcaguauccaaagguuacuuaggcgcacuacgcacuggaugguauacaucaguaauaacaauagaacuaucaaacauaaaagaaaauaaauguaacgguacugacgcaaaagugaaacuaauuaaacaagaacucgacaaauacaaaaaugcuguaacagaccuacaaaugcuaaugugcucaacacccgcaaccggaucaggaucagccauagccuccggagucgcaguaugcaaaguauuacaucuugaaggagaaguaaauaaaauaaaaucagcauuacuauccacaaauaaagccguaguaucacuaucaaacgguguauccguccuuacauucaaaguauuagaucuaaaaaacuacauagauaaacaacuacuacccaucuuaaacaaacaaucaugcucaauucccaacccagaaacagucauggaauuucaacaaaaaaacaacagacucuuagaaauaacacgagaauuuucaguaaacgcaggaguaaccacaccaguaaguacauacaugcucaccaacucagaauuauuaucacuuauuaacgacaugccaauuacaaacgaccaaaaaaaauuaaugucaaacaauguccaaauuguuagacaacaaucauacucuauaauguguauaauaaaagaagaaguacuagcuuacguaguucaauuaccacuauauggcguaauagauacaccuugcuggaaacuacauacaucuccauuauguacaacuaacacaaaagaaggaucuaacauaugccuaacacgcacagaucgaggaugguacugcgauaaugcagguuccguaucauucuuuccacaagcagaaacauguaaaguaugcucaaacagaguauucugugacacuaugaacuccuuaacccuacccucagaagucaaucuaugcaacguugacauauuuaacccaaaauacgacuguaaaaucaugacaucuaaaacagacguaucaucaucaguuauuacaucccuaggagcaauaguaucuugcuacggaaaaacaaaauguacagcauccaacaaaaacaaaggaauaaucaaaacauucucaaacggcugcgacuacguaucaaacaaagguguagacacaguaucaguaggaaauacuuuauauuacguaaauaaacaagaaggacaaucucuauacguuaaaggcgaaccuauuauaaacuucuacgacccacucguauucccuucagacgaauuugacgcaucuauaucccaaguuaacgaaaaaaucaaccaaucauuagccuuuauaagaaaauccgacgaauuauuacauaacgucaacgcuggaaaaucaacaacuaacauaaugauaaccacaauaauaauagucaucauaguuauauuacuaagucuaauagccguaggccuccuacuuuauugcaaagcaagaucaacaccaguaacauuauccaaagaccaacucagcggcauaaacaauauagcuuuuucaaacuagggacuaguaauaaggaaacuguaugaaugucugugggcaggaagugaagagauccuucuguaaagguuuuuggaauuaugucugcugaauaauaaacuuuuuugaaauaauaaaucugguagaaaaaugagaucuaaaaaaaaaaaaaaaaaaaaaaaaaaaaaaaaaaaaaaaaaaaaaaaaaaaaaaaaaaaaaaaaugcaucccccccccccccccccccccccccccccccaaaggcucuuuucagagccaccagaauu

SEQ ID NO: 6352 - RNA, 1994 nt, Artificial Sequence
  mRNA product Design g-4 comprising derived and/or modified sequence from HRSV(A2)__F_DSCav1_mut6 (opt11)
gggagacuccugucgggcggaaguaggaggaguagaguuuaaaaacaguacucuuuuuccgguucgggacguaguugaagcaacgacaagccggauaaccgcucuugagacaggaagcuuaccauggaacuccucauccucaaagccaacgcaaucacaaccauacuaacugcaguuacuuucugcuucgcauccggccaaaacaucaccgaagaguucuaccaaucaaccugcuccgcagucuccaaaggauaccucggagcccuucgcaccggcugguacaccuccgucauaaccaucgaacucucaaacauaaaagaaaacaaaugcaacggcacagacgcgaaagucaaacuuaucaaacaagaacucgacaaauacaaaaacgccgucaccgaccugcagaugcucaugugcucaacccccgccacaggaagcggcucugcuaucgcuuccggcgucgccgucugcaaaguccuccaccucgaaggcgaaguaaacaaaaucaagucagcccuccucuccaccaacaaagccgucgucucucucucaaacggcguauccguccucacauucaaaguccucgaccucaaaaacuacaucgacaaacaacuucuccccauccuaaacaaacaaucaugcuccauccccaaccccgaaacagucauggaauuucaacaaaagaacaaccgccucuuagaaaucacccgagaauuuuccgucaacgcgggagucacaacccccguuucuacguauaugcucaccaacuccgaacuccuuucccucauaaacgacaugccaaucaccaacgaccaaaagaaacucaugucaaacaacguccaaaucguccgacaacaauccuacucuauuaugugcaucaucaaagaagaaguucucgccuacgucguccaacuaccccucuacggcgugaucgacacccccugcuggaaacuacacaccucaccccucugcaccaccaacaccaaggaaggcuccaacaucugccucacccgcaccgaccgcggcugguacugcgacaacgcuggcuccgucucauucuucccgcaagccgaaacuugcaaaguaugcuccaacagaguauucugcgacaccaugaacucacuaacccucccuuccgaagucaaccuuugcaacguugacauauucaacccaaaguacgauugcaaaauuaugacauccaaaacagaugucuccuccuccgucaucacaucccucggugccauuguaucaugcuacggaaaaaccaaaugcaccgcauccaacaaaaacaaaggaaucaucaaaaccuucucaaacggcugcgauuacgucucaaacaaaggagucgacacagucuccgucggaaacacccuauacuacgucaacaaacaagaaggccaaucccuguacgucaaaggagaacccaucaucaacuucuacgacccccucgucuucccgagcgacgaguucgacgccuccaucucacaagucaaugaaaagaucaaccaaucccuugccuucauccggaaaucggacgaacuccuacacaacgugaacgcuggaaaaucaaccaccaacaucaugaucacaaccaucauuaucgucaucaucgucauacuccucucccuaaucgccgucggccuccuccuguauugcaaagcucgcuccacccccgucacccuguccaaagaccaacucuccggaaucaacaacaucgccuucucaaacuaaggacuaguaauaaggaaacuguaugaaugucugugggcaggaagugaagagauccuucuguaaagguuuuuggaauuaugucugcugaauaauaaacuuuuuugaaauaauaaaucugguagaaaaaugagaucuaaaaaaaaaaaaaaaaaaaaaaaaaaaaaaaaaaaaaaaaaaaaaaaaaaaaaaaaaaaaaaaaugcaucccccccccccccccccccccccccccccccaaaggcucuuuucagagccaccagaauu

SEQ ID NO: 6353 - RNA, 1970 nt, Artificial Sequence
  mRNA product Design g-5 comprising derived and/or modified sequence from HRSV(A2)__F_DSCav1_mut6 (opt1)
gggagacccgugacccggaaguuguacggcuacgcgacuuucccucccacaaacccucgcgcccuuccuuuccuacuugggcccggcagaaagcuuaccauggagcugcucauccugaaggccaacgccaucaccaccauccugacggcggugaccuucugcuucgccagcggccagaacaucaccgaggaguucuaccaguccacgugcagcgccgucuccaagggguaccucggcgcccugcggaccggcugguacaccuccgugaucaccaucgagcugagcaacaucaaggagaacaagugcaacgggaccgacgccaaggugaagcucaucaagcaggagcuggacaaguacaagaacgcggucacggaccugcagaugcugaugugcuccaccccggcaaccggcuccggcuccgccaucgcgagcggcgucgccgugugcaaggugcugcaccucgagggggaggucaacaagaucaagagcgcccugcuguccaccaacaaggccguggugagccucuccaacggcgucagcgugcugaccuucaaggugcuggaccucaagaacuacaucgacaagcagcugcugcccauccugaacaagcagagcugcuccauccccaaccccgagacggugauggaguuccagcagaagaacaaccggcuccuggagaucacccgcgaguucagcgugaacgccggggucaccacccccguguccacguacaugcugaccaacagcgagcuccugucccugaucaacgacaugccgaucaccaacgaccagaagaagcucaugagcaacaacgugcagaucguccggcagcaguccuacagcaucaugugcaucaucaaggaggaggugcuggcguacgugguccagcugccccucuacggcgugaucgacacccccugcuggaagcugcacacgagcccccugugcaccaccaacaccaaggagggguccaacaucugccucacgcgcaccgaccggggcugguacugcgacaacgccggcagcgucuccuucuucccgcaggccgagaccugcaaggugugcagcaaccgcguguucugcgacaccaugaacucccugacgcugcccagcgagguaaaccucugcaacgucgacaucuucaaccccaaguacgacugcaagaucaugaccuccaagaccgacgugagcuccagcgugaucaccucccugggggccaucgucagcugcuacggcaagacgaagugcaccgccagcaacaagaacaaggggaucaucaagaccuucuccaacggcugcgacuacgugagcaacaagggcguggacaccguguccgucgggaacacccuguacuacgugaacaagcaggagggccagagccucuacgugaagggggagcccaucaucaacuucuacgacccgcuggucuuccccuccgacgaguucgacgcgagcaucucccaggugaacgagaagaucaaccagagccuggccuucauccgcaaguccgacgagcugcuccacaacgugaacgccggcaagagcacgaccaacaucaugaucaccaccaucaucaucgucaucaucgugauccugcugucccucaucgccguggggcugcugcucuacugcaaggcccggagcacgcccgucacccuguccaaggaccagcugagcggcaucaacaacaucgcguucuccaacugaggacuaguaauaaggaaacuguaugaaugucugugggcaggaagugaagagauccuucuguaaagguuuuuggaauuaugucugcugaauaauaaacuuuuuugaaauaauaaaucugguagaaaaaugagaucuaaaaaaaaaaaaaaaaaaaaaaaaaaaaaaaaaaaaaaaaaaaaaaaaaaaaaaaaaaaaaaaaugcaucccccccccccccccccccccccccccccccaaaggcucuuuucagagccaccagaauu

SEQ ID NO: 6354 - RNA, 1970 nt, Artificial Sequence
  mRNA product Design g-5 comprising derived and/or modified sequence from HRSV(A2)__F_DSCav1_mut6 (opt1)
gggagacccgugacccggaaguuguacggcuacgcgacuuucccucccacaaacccucgcgcccuuccuuuccuacuugggcccggcagaaagcuuaccauggagcugcucauccugaaggccaacgccaucaccaccauccugacggcggugaccuucugcuucgccagcggccagaacaucaccgaggaguucuaccaguccacgugcagcgccgucuccaagggguaccucggcgcccugcgcaccgggugguacaccagcgugaucaccaucgagcuguccaacaucaaggagaacaagugcaacggcaccgacgccaaggugaagcucaucaagcaggagcuggacaaguacaagaacgcggucacggaccugcagaugcucaugugcagcacccccgccaccggguccggcagcgccaucgccuccggcguggcggugugcaagguccugcaccuggagggggaggugaacaagaucaagagcgcccuccuguccaccaacaaggccguggucagccuguccaacggcgugagcgugcucacguucaagguccuggaccugaagaacuacaucgacaagcagcuccugccgauccugaacaagcaguccugcagcauccccaaccccgagaccgugauggaguuccagcagaagaacaaccggcuccuggagaucacccgcgaguucuccgugaacgccggggucaccacgcccgugagcaccuacaugcugaccaacuccgagcuccugagccugaucaacgacaugccgaucaccaacgaccagaagaagcucaugagcaacaacgugcagaucguccggcagcaguccuacagcaucaugugcaucaucaaggaggaggugcuggccuacgugguccagcugccccucuacggcgugaucgacacgcccugcuggaagcugcacaccagcccccugugcaccaccaacacgaaggaggggagcaacaucugccucacccgcaccgaccggggcugguacugcgacaacgcgggcuccgugagcuucuucccgcaggccgagaccugcaaggucugcuccaaccgcguguucugcgacacgaugaacagccugacccugcccuccgaggucaaccucugcaacguggacaucuucaaccccaaguacgacugcaagaucaugaccagcaagaccgacguguccagcuccgucaucacgagccugggggccaucguguccugcuacggcaagaccaagugcaccgccagcaacaagaacaaggggaucaucaagaccuucuccaacggcugcgacuacgugagcaacaagggcgucgacacgguguccguggggaacacccuguacuacgucaacaagcaggagggccagagccucuacgugaagggggagcccaucaucaacuucuacgacccgcugguguuccccagcgacgaguucgacgccuccaucagccaggucaacgagaagaucaaccagucccuggcguucauccggaaguccgacgagcuccugcacaacgugaacgccggcaaguccaccaccaacaucaugaucaccacgaucaucaucgugaucaucgucauccugcucagccugaucgccguggggcugcuccuguacugcaaggcccgcuccacccccgugacccugagcaaggaccagcuguccggcaucaacaacaucgccuucagcaacugaggacuaguaauaaggaaacuguaugaaugucugugggcaggaagugaagagauccuucuguaaagguuuuuggaauuaugucugcugaauaauaaacuuuuuugaaauaauaaaucugguagaaaaaugagaucuaaaaaaaaaaaaaaaaaaaaaaaaaaaaaaaaaaaaaaaaaaaaaaaaaaaaaaaaaaaaaaaaugcaucccccccccccccccccccccccccccccccaaaggcucuuuucagagccaccagaauu

SEQ ID NO: 6355 - RNA, 1970 nt, Artificial Sequence
  mRNA product Design g-5 comprising derived and/or modified sequence from HRSV(A2)__F_DSCav1_mut6 (opt2)
gggagacccgugacccggaaguuguacggcuacgcgacuuucccucccacaaacccucgcgcccuuccuuuccuacuugggcccggcagaaagcuuaccauggagcuccucauccucaaggccaacgccaucaccaccauccucaccgccgucaccuucugcuucgccuccggccagaacaucaccgaggaguucuaccaguccaccugcuccgccgucuccaagggcuaccucggcgcccuccgcaccggcugguacaccuccgucaucaccaucgagcucuccaacaucaaggagaacaagugcaacggcaccgacgccaaggucaagcucaucaagcaggagcucgacaaguacaagaacgccgucaccgaccuccagaugcucaugugcuccacccccgccaccggcuccggcuccgccaucgccuccggcgucgccgucugcaagguccuccaccucgagggcgaggucaacaagaucaaguccgcccuccucuccaccaacaaggccgucgucucccucuccaacggcgucuccguccucaccuucaagguccucgaccucaagaacuacaucgacaagcagcuccuccccauccucaacaagcaguccugcuccauccccaaccccgagaccgucauggaguuccagcagaagaacaaccgccuccucgagaucacccgcgaguucuccgucaacgccggcgucaccacccccgucuccaccuacaugcucaccaacuccgagcuccucucccucaucaacgacaugcccaucaccaacgaccagaagaagcucauguccaacaacguccagaucguccgccagcaguccuacuccaucaugugcaucaucaaggaggagguccucgccuacgucguccagcucccccucuacggcgucaucgacacccccugcuggaagcuccacaccuccccccucugcaccaccaacaccaaggagggcuccaacaucugccucacccgcaccgaccgcggcugguacugcgacaacgccggcuccgucuccuucuucccccaggccgagaccugcaaggucugcuccaaccgcgucuucugcgacaccaugaacucccucacccuccccuccgaggucaaccucugcaacgucgacaucuucaaccccaaguacgacugcaagaucaugaccuccaagaccgacgucuccuccuccgucaucaccucccucggcgccaucgucuccugcuacggcaagaccaagugcaccgccuccaacaagaacaagggcaucaucaagaccuucuccaacggcugcgacuacgucuccaacaagggcgucgacaccgucuccgucggcaacacccucuacuacgucaacaagcaggagggccagucccucuacgucaagggcgagcccaucaucaacuucuacgacccccucgucuuccccuccgacgaguucgacgccuccaucucccaggucaacgagaagaucaaccagucccucgccuucauccgcaaguccgacgagcuccuccacaacgucaacgccggcaaguccaccaccaacaucaugaucaccaccaucaucaucgucaucaucgucauccuccucucccucaucgccgucggccuccuccucuacugcaaggcccgcuccacccccgucacccucuccaaggaccagcucuccggcaucaacaacaucgccuucuccaacugaggacuaguaauaaggaaacuguaugaaugucugugggcaggaagugaagagauccuucuguaaagguuuuuggaauuaugucugcugaauaauaaacuuuuuugaaauaauaaaucugguagaaaaaugagaucuaaaaaaaaaaaaaaaaaaaaaaaaaaaaaaaaaaaaaaaaaaaaaaaaaaaaaaaaaaaaaaaaugcaucccccccccccccccccccccccccccccccaaaggcucuuuucagagccaccagaauu

SEQ ID NO: 6356 - RNA, 1970 nt, Artificial Sequence
  mRNA product Design g-5 comprising derived and/or modified sequence from HRSV(A2)__F_DSCav1_mut6 (opt3)
gggagacccgugacccggaaguuguacggcuacgcgacuuucccucccacaaacccucgcgcccuuccuuuccuacuugggcccggcagaaagcuuaccauggagcugcucauccuuaaggccaacgcuauuaccacaauacugacugcagugacguucugcuuugccagcggccagaauaucaccgaagaguucuaccaauccacauguucugcggucucaaaaggguauuugggagcuuuaagaacugguugguacaccaguguuauuacaaucgaacugagcaacauuaaggagaauaaaugcaacggcaccgacgccaaggugaaacuaaucaagcaggaacucgauaaguauaaaaaugcaguaacugaccugcagaugcuuauguguuccacacccgccaccgggucuggaucggcuauagcaucaggcguggccgucugcaaggugcugcacuuggagggugagguuaacaaaaucaagagcgcucuccugaguacgaauaaagccguggucucccugucuaacggggugagcguacucacuuuuaagguuuuagaucugaagaauuacauugacaaacagcuuuugccuauccugaacaagcaauccuguucaauuccaaauccggaaaccgugauggaguuccagcagaaaaacaauaggcuacucgaaaucacacgggaguuuagugucaacgcgggagugacuacccccgugagcacauauaugcugaccaauucugagcuucuguccuugauaaacgauaugccuauuacgaacgaccagaagaaacucaugucaaauaacguccaaaucguucgccagcagagcuacaguauuaugugcaucaucaaggaagaggugcuggcauauguagugcaguuaccacuguacggcgucauugauacucccuguuggaaacuccauacaucuccucuuugcaccacuaauacaaaggaaggcuccaacauaugucugacccgaacggaccgugggugguacugcgauaaugccggaagcgugucguucuuuccacaagcugagaccuguaagguuugcucuaacagaguguucugcgacacaaugaacuccuugacucuacccucagaagucaaucuguguaauguggauaucuuuaacccuaaauaugacugcaagauuaugaccaguaaaacagauguaagcuccucuguuaucacuagccucggugccauagugucauguuacggcaagaccaaaugcacagcaaguaauaagaacaaggggauuaucaaaaccuucuccaauggaugugacuaugucagcaacaagggcguggacacugucucuguggguaauacgcuguacuauguuaacaaacaggaggggcagucacuuuacgugaagggagagccaaucauuaacuuuuaugauccgcugguauuccccagugacgaauuugaugcuagcaucucccaagucaaugagaaaauuaaccagucuuuggccuucauaaggaagucggacgaacuccugcacaaugugaacgcgggcaagagcacaaccaauaucaugauuacuaccaucaucauuguuauaaucgugauuuuacugucccuaaucgccgucggccuccugcuuuacugcaaagcacggucaacaccugugaccuugaguaaggaucagcugucugggauuaacaauaucgcuuucagcaacugaggacuaguaauaaggaaacuguaugaaugucugugggcaggaagugaagagauccuucuguaaagguuuuuggaauuaugucugcugaauaauaaacuuuuuugaaauaauaaaucugguagaaaaaugagaucuaaaaaaaaaaaaaaaaaaaaaaaaaaaaaaaaaaaaaaaaaaaaaaaaaaaaaaaaaaaaaaaaugcaucccccccccccccccccccccccccccccccaaaggcucuuuucagagccaccagaauu

SEQ ID NO: 6357 - RNA, 1970 nt, Artificial Sequence
  mRNA product Design g-5 comprising derived and/or modified sequence from HRSV(A2)__F_DSCav1_mut6 (opt4)
gggagacccgugacccggaaguuguacggcuacgcgacuuucccucccacaaacccucgcgcccuuccuuuccuacuugggcccggcagaaagcuuaccauggagcugcugauccugaaggccaacgccaucaccaccauccugaccgccgugaccuucugcuucgccagcggccagaacaucaccgaggaguucuaccagagcaccugcagcgccgugagcaagggcuaccugggcgcccugagaaccggcugguacaccagcgugaucaccaucgagcugagcaacaucaaggagaacaagugcaacggcaccgacgccaaggugaagcugaucaagcaggagcuggacaaguacaagaacgccgugaccgaccugcagaugcugaugugcagcacccccgccaccggcagcggcagcgccaucgccagcggcguggccgugugcaaggugcugcaccuggagggcgaggugaacaagaucaagagcgcccugcugagcaccaacaaggccguggugagccugagcaacggcgugagcgugcugaccuucaaggugcuggaccugaagaacuacaucgacaagcagcugcugcccauccugaacaagcagagcugcagcauccccaaccccgagaccgugauggaguuccagcagaagaacaacagacugcuggagaucaccagagaguucagcgugaacgccggcgugaccacccccgugagcaccuacaugcugaccaacagcgagcugcugagccugaucaacgacaugcccaucaccaacgaccagaagaagcugaugagcaacaacgugcagaucgugagacagcagagcuacagcaucaugugcaucaucaaggaggaggugcuggccuacguggugcagcugccccuguacggcgugaucgacacccccugcuggaagcugcacaccagcccccugugcaccaccaacaccaaggagggcagcaacaucugccugaccagaaccgacagaggcugguacugcgacaacgccggcagcgugagcuucuucccccaggccgagaccugcaaggugugcagcaacagaguguucugcgacaccaugaacagccugacccugcccagcgaggugaaccugugcaacguggacaucuucaaccccaaguacgacugcaagaucaugaccagcaagaccgacgugagcagcagcgugaucaccagccugggcgccaucgugagcugcuacggcaagaccaagugcaccgccagcaacaagaacaagggcaucaucaagaccuucagcaacggcugcgacuacgugagcaacaagggcguggacaccgugagcgugggcaacacccuguacuacgugaacaagcaggagggccagagccuguacgugaagggcgagcccaucaucaacuucuacgacccccugguguuccccagcgacgaguucgacgccagcaucagccaggugaacgagaagaucaaccagagccuggccuucaucagaaagagcgacgagcugcugcacaacgugaacgccggcaagagcaccaccaacaucaugaucaccaccaucaucaucgugaucaucgugauccugcugagccugaucgccgugggccugcugcuguacugcaaggccagaagcacccccgugacccugagcaaggaccagcugagcggcaucaacaacaucgccuucagcaacugaggacuaguaauaaggaaacuguaugaaugucugugggcaggaagugaagagauccuucuguaaagguuuuuggaauuaugucugcugaauaauaaacuuuuuugaaauaauaaaucugguagaaaaaugagaucuaaaaaaaaaaaaaaaaaaaaaaaaaaaaaaaaaaaaaaaaaaaaaaaaaaaaaaaaaaaaaaaaugcaucccccccccccccccccccccccccccccccaaaggcucuuuucagagccaccagaauu

SEQ ID NO: 6358 - RNA, 1970 nt, Artificial Sequence
  mRNA product Design g-5 comprising derived and/or modified sequence from HRSV(A2)__F_DSCav1_mut6 (opt5)
gggagacccgugacccggaaguuguacggcuacgcgacuuucccucccacaaacccucgcgcccuuccuuuccuacuugggcccggcagaaagcuuaccauggagcugcucauccugaaggccaacgcuauuaccacaauccuuacggccgugaccuucugcuuugcgagcggccagaauauuacagaagaguucuaccaauccaccuguucugcugucagcaaaggguaucugggagcccucagaacaggcugguacaccuccguuaucacaauugaacugucuaacaucaaggagaauaaaugcaacgggaccgacgccaaggugaaacuuaucaagcaggaacuggauaaguauaaaaaugcugugacggaccuccagaugcugauguguagcacccccgccacaggauccggcucugcuauugccagcggggucgcggugugcaagguucugcaccucgagggagaggugaacaaaaucaaguccgcccugcuuagcaccaauaaagcugucgugucucuguccaacggcguuagcgugcucacauuuaagguccuggaucuuaagaauuacauugacaaacagcugcucccuauccugaacaagcaaucuuguuccauuccgaaucccgaaaccgugauggaguuccagcagaaaaacaaucggcugcucgaaaucacgcgcgaguuuagcgugaacgccggcgucacaaccccuguuucuacauauaugcugaccaauuccgagcuucugagccucauuaacgauaugcccaucaccaacgaccagaagaaacugauguccaauaacgugcaaaucgugagacagcagucuuacagcauuaugugcaucauuaaggaagagguccuugcuuaugugguucagcugccucucuacggggugaucgauacacccuguuggaaacugcauacguccccucugugcaccacaaauaccaaggaaggaagcaacauuugucucacacggaccgaccgcggcugguacugcgauaaugccgggucugucuccuucuuuccgcaagcggagacguguaaggugugcagcaacagaguuuucugcgacacaaugaacucucugacccuucccagcgaagugaaucuguguaaugucgauaucuuuaacccuaaauaugacugcaagaucaugaccuccaaaacagaugugucuagcuccgucauuaccagccucggagccaucgugucuuguuacggcaagacaaaaugcacggcuuccaauaagaacaaggggauuaucaaaaccuucagcaauggaugugacuauguuucuaacaagggcguggacacagucuccgugggcaauacccuguacuauguuaacaaacaggaggggcagagccuuuacgugaagggagagcccauuaucaacuuuuaugauccucuggucuuccccuccgacgaauuugaugccucuaucagccaagugaaugagaaaauuaaccagucccucgcuuucauccggaagucugacgaacugcugcacaaugugaacgccggcaagagcacaaccaauauuaugaucacgaccauuaucauuguuaucaucgucauucuccugucccuuaucgccguggggcugcuccuguacugcaaagcucgcagcacaccggugacccugucuaaggaucagcuuuccggaauuaacaauaucgcguucagcaacugaggacuaguaauaaggaaacuguaugaaugucugugggcaggaagugaagagauccuucuguaaagguuuuuggaauuaugucugcugaauaauaaacuuuuuugaaauaauaaaucugguagaaaaaugagaucuaaaaaaaaaaaaaaaaaaaaaaaaaaaaaaaaaaaaaaaaaaaaaaaaaaaaaaaaaaaaaaaaugcaucccccccccccccccccccccccccccccccaaaggcucuuuucagagccaccagaauu

SEQ ID NO: 6359 - RNA, 1970 nt, Artificial Sequence
  mRNA product Design g-5 comprising derived and/or modified sequence from HRSV(A2)__F_DSCav1_mut6 (opt6)
gggagacccgugacccggaaguuguacggcuacgcgacuuucccucccacaaacccucgcgcccuuccuuuccuacuugggcccggcagaaagcuuaccauggaacuauuaaucuuaaaagcaaaugcuauaaccacaauauuaacagcaguaacauucuguuuugccuccggacaaaacauaacagaagaauuuuaucaaucaacaugcucugcaguauccaaagguuacuuaggcgcacuacgcacuggaugguauacaucaguaauaacaauagaacuaucaaacauaaaagaaaauaaauguaacgguacugacgcaaaagugaaacuaauuaaacaagaacucgacaaauacaaaaaugcuguaacagaccuacaaaugcuaaugugcucaacacccgcaaccggaucaggaucagccauagccuccggagucgcaguaugcaaaguauuacaucuugaaggagaaguaaauaaaauaaaaucagcauuacuauccacaaauaaagccguaguaucacuaucaaacgguguauccguccuuacauucaaaguauuagaucuaaaaaacuacauagauaaacaacuacuacccaucuuaaacaaacaaucaugcucaauucccaacccagaaacagucauggaauuucaacaaaaaaacaacagacucuuagaaauaacacgagaauuuucaguaaacgcaggaguaaccacaccaguaaguacauacaugcucaccaacucagaauuauuaucacuuauuaacgacaugccaauuacaaacgaccaaaaaaaauuaaugucaaacaauguccaaauuguuagacaacaaucauacucuauaauguguauaauaaaagaagaaguacuagcuuacguaguucaauuaccacuauauggcguaauagauacaccuugcuggaaacuacauacaucuccauuauguacaacuaacacaaaagaaggaucuaacauaugccuaacacgcacagaucgaggaugguacugcgauaaugcagguuccguaucauucuuuccacaagcagaaacauguaaaguaugcucaaacagaguauucugugacacuaugaacuccuuaacccuacccucagaagucaaucuaugcaacguugacauauuuaacccaaaauacgacuguaaaaucaugacaucuaaaacagacguaucaucaucaguuauuacaucccuaggagcaauaguaucuugcuacggaaaaacaaaauguacagcauccaacaaaaacaaaggaauaaucaaaacauucucaaacggcugcgacuacguaucaaacaaagguguagacacaguaucaguaggaaauacuuuauauuacguaaauaaacaagaaggacaaucucuauacguuaaaggcgaaccuauuauaaacuucuacgacccacucguauucccuucagacgaauuugacgcaucuauaucccaaguuaacgaaaaaaucaaccaaucauuagccuuuauaagaaaauccgacgaauuauuacauaacgucaacgcuggaaaaucaacaacuaacauaaugauaaccacaauaauaauagucaucauaguuauauuacuaagucuaauagccguaggccuccuacuuuauugcaaagcaagaucaacaccaguaacauuauccaaagaccaacucagcggcauaaacaauauagcuuuuucaaacuagggacuaguaauaaggaaacuguaugaaugucugugggcaggaagugaagagauccuucuguaaagguuuuuggaauuaugucugcugaauaauaaacuuuuuugaaauaauaaaucugguagaaaaaugagaucuaaaaaaaaaaaaaaaaaaaaaaaaaaaaaaaaaaaaaaaaaaaaaaaaaaaaaaaaaaaaaaaaugcaucccccccccccccccccccccccccccccccaaaggcucuuuucagagccaccagaauu

SEQ ID NO: 6360 - RNA, 1970 nt, Artificial Sequence
  mRNA product Design g-5 comprising derived and/or modified sequence from HRSV(A2)__F_DSCav1_mut6 (opt11)
gggagacccgugacccggaaguuguacggcuacgcgacuuucccucccacaaacccucgcgcccuuccuuuccuacuugggcccggcagaaagcuuaccauggaacuccucauccucaaagccaacgcaaucacaaccauacuaacugcaguuacuuucugcuucgcauccggccaaaacaucaccgaagaguucuaccaaucaaccugcuccgcagucuccaaaggauaccucggagcccuucgcaccggcugguacaccuccgucauaaccaucgaacucucaaacauaaaagaaaacaaaugcaacggcacagacgcgaaagucaaacuuaucaaacaagaacucgacaaauacaaaaacgccgucaccgaccugcagaugcucaugugcucaacccccgccacaggaagcggcucugcuaucgcuuccggcgucgccgucugcaaaguccuccaccucgaaggcgaaguaaacaaaaucaagucagcccuccucuccaccaacaaagccgucgucucucucucaaacggcguauccguccucacauucaaaguccucgaccucaaaaacuacaucgacaaacaacuucuccccauccuaaacaaacaaucaugcuccauccccaaccccgaaacagucauggaauuucaacaaaagaacaaccgccucuuagaaaucacccgagaauuuuccgucaacgcgggagucacaacccccguuucuacguauaugcucaccaacuccgaacuccuuucccucauaaacgacaugccaaucaccaacgaccaaaagaaacucaugucaaacaacguccaaaucguccgacaacaauccuacucuauuaugugcaucaucaaagaagaaguucucgccuacgucguccaacuaccccucuacggcgugaucgacacccccugcuggaaacuacacaccucaccccucugcaccaccaacaccaaggaaggcuccaacaucugccucacccgcaccgaccgcggcugguacugcgacaacgcuggcuccgucucauucuucccgcaagccgaaacuugcaaaguaugcuccaacagaguauucugcgacaccaugaacucacuaacccucccuuccgaagucaaccuuugcaacguugacauauucaacccaaaguacgauugcaaaauuaugacauccaaaacagaugucuccuccuccgucaucacaucccucggugccauuguaucaugcuacggaaaaaccaaaugcaccgcauccaacaaaaacaaaggaaucaucaaaaccuucucaaacggcugcgauuacgucucaaacaaaggagucgacacagucuccgucggaaacacccuauacuacgucaacaaacaagaaggccaaucccuguacgucaaaggagaacccaucaucaacuucuacgacccccucgucuucccgagcgacgaguucgacgccuccaucucacaagucaaugaaaagaucaaccaaucccuugccuucauccggaaaucggacgaacuccuacacaacgugaacgcuggaaaaucaaccaccaacaucaugaucacaaccaucauuaucgucaucaucgucauacuccucucccuaaucgccgucggccuccuccuguauugcaaagcucgcuccacccccgucacccuguccaaagaccaacucuccggaaucaacaacaucgccuucucaaacuaaggacuaguaauaaggaaacuguaugaaugucugugggcaggaagugaagagauccuucuguaaagguuuuuggaauuaugucugcugaauaauaaacuuuuuugaaauaauaaaucugguagaaaaaugagaucuaaaaaaaaaaaaaaaaaaaaaaaaaaaaaaaaaaaaaaaaaaaaaaaaaaaaaaaaaaaaaaaaugcaucccccccccccccccccccccccccccccccaaaggcucuuuucagagccaccagaauu

SEQ ID NO: 6361 - RNA, 1986 nt, Artificial Sequence
  mRNA product Design h-1 comprising derived and/or modified sequence from HRSV(A2)__F_DSCav1_mut6 (opt1)
gggagacccgugacccggaaguuguacggcuacgcgacuuucccucccacaaacccucgcgcccuuccuuuccuacuugggcccggcagaaagcuuaccauggagcugcucauccugaaggccaacgccaucaccaccauccugacggcggugaccuucugcuucgccagcggccagaacaucaccgaggaguucuaccaguccacgugcagcgccgucuccaagggguaccucggcgcccugcggaccggcugguacaccuccgugaucaccaucgagcugagcaacaucaaggagaacaagugcaacgggaccgacgccaaggugaagcucaucaagcaggagcuggacaaguacaagaacgcggucacggaccugcagaugcugaugugcuccaccccggcaaccggcuccggcuccgccaucgcgagcggcgucgccgugugcaaggugcugcaccucgagggggaggucaacaagaucaagagcgcccugcuguccaccaacaaggccguggugagccucuccaacggcgucagcgugcugaccuucaaggugcuggaccucaagaacuacaucgacaagcagcugcugcccauccugaacaagcagagcugcuccauccccaaccccgagacggugauggaguuccagcagaagaacaaccggcuccuggagaucacccgcgaguucagcgugaacgccggggucaccacccccguguccacguacaugcugaccaacagcgagcuccugucccugaucaacgacaugccgaucaccaacgaccagaagaagcucaugagcaacaacgugcagaucguccggcagcaguccuacagcaucaugugcaucaucaaggaggaggugcuggcguacgugguccagcugccccucuacggcgugaucgacacccccugcuggaagcugcacacgagcccccugugcaccaccaacaccaaggagggguccaacaucugccucacgcgcaccgaccggggcugguacugcgacaacgccggcagcgucuccuucuucccgcaggccgagaccugcaaggugugcagcaaccgcguguucugcgacaccaugaacucccugacgcugcccagcgagguaaaccucugcaacgucgacaucuucaaccccaaguacgacugcaagaucaugaccuccaagaccgacgugagcuccagcgugaucaccucccugggggccaucgucagcugcuacggcaagacgaagugcaccgccagcaacaagaacaaggggaucaucaagaccuucuccaacggcugcgacuacgugagcaacaagggcguggacaccguguccgucgggaacacccuguacuacgugaacaagcaggagggccagagccucuacgugaagggggagcccaucaucaacuucuacgacccgcuggucuuccccuccgacgaguucgacgcgagcaucucccaggugaacgagaagaucaaccagagccuggccuucauccgcaaguccgacgagcugcuccacaacgugaacgccggcaagagcacgaccaacaucaugaucaccaccaucaucaucgucaucaucgugauccugcugucccucaucgccguggggcugcugcucuacugcaaggcccggagcacgcccgucacccuguccaaggaccagcugagcggcaucaacaacaucgcguucuccaacugaggacuaguacuggcugcaucucccuuuccucuguccuccauccuucucccaggauggugaagggggaccugguacccagugauccccaccccaggauccuaaaucaugacuuaccugcuaauaaaaacucauuggaaaagugagaagaucuaaaaaaaaaaaaaaaaaaaaaaaaaaaaaaaaaaaaaaaaaaaaaaaaaaaaaaaaaaaaaaaaugcaucccccccccccccccccccccccccccccccaaaggcucuuuucagagccaccagaauu

SEQ ID NO: 6362 - RNA, 1986 nt, Artificial Sequence
  mRNA product Design h-1 comprising derived and/or modified sequence from HRSV(A2)__F_DSCav1_mut6 (opt1)
gggagacccgugacccggaaguuguacggcuacgcgacuuucccucccacaaacccucgcgcccuuccuuuccuacuugggcccggcagaaagcuuaccauggagcugcucauccugaaggccaacgccaucaccaccauccugacggcggugaccuucugcuucgccagcggccagaacaucaccgaggaguucuaccaguccacgugcagcgccgucuccaagggguaccucggcgcccugcgcaccgggugguacaccagcgugaucaccaucgagcuguccaacaucaaggagaacaagugcaacggcaccgacgccaaggugaagcucaucaagcaggagcuggacaaguacaagaacgcggucacggaccugcagaugcucaugugcagcacccccgccaccggguccggcagcgccaucgccuccggcguggcggugugcaagguccugcaccuggagggggaggugaacaagaucaagagcgcccuccuguccaccaacaaggccguggucagccuguccaacggcgugagcgugcucacguucaagguccuggaccugaagaacuacaucgacaagcagcuccugccgauccugaacaagcaguccugcagcauccccaaccccgagaccgugauggaguuccagcagaagaacaaccggcuccuggagaucacccgcgaguucuccgugaacgccggggucaccacgcccgugagcaccuacaugcugaccaacuccgagcuccugagccugaucaacgacaugccgaucaccaacgaccagaagaagcucaugagcaacaacgugcagaucguccggcagcaguccuacagcaucaugugcaucaucaaggaggaggugcuggccuacgugguccagcugccccucuacggcgugaucgacacgcccugcuggaagcugcacaccagcccccugugcaccaccaacacgaaggaggggagcaacaucugccucacccgcaccgaccggggcugguacugcgacaacgcgggcuccgugagcuucuucccgcaggccgagaccugcaaggucugcuccaaccgcguguucugcgacacgaugaacagccugacccugcccuccgaggucaaccucugcaacguggacaucuucaaccccaaguacgacugcaagaucaugaccagcaagaccgacguguccagcuccgucaucacgagccugggggccaucguguccugcuacggcaagaccaagugcaccgccagcaacaagaacaaggggaucaucaagaccuucuccaacggcugcgacuacgugagcaacaagggcgucgacacgguguccguggggaacacccuguacuacgucaacaagcaggagggccagagccucuacgugaagggggagcccaucaucaacuucuacgacccgcugguguuccccagcgacgaguucgacgccuccaucagccaggucaacgagaagaucaaccagucccuggcguucauccggaaguccgacgagcuccugcacaacgugaacgccggcaaguccaccaccaacaucaugaucaccacgaucaucaucgugaucaucgucauccugcucagccugaucgccguggggcugcuccuguacugcaaggcccgcuccacccccgugacccugagcaaggaccagcuguccggcaucaacaacaucgccuucagcaacugaggacuaguacuggcugcaucucccuuuccucuguccuccauccuucucccaggauggugaagggggaccugguacccagugauccccaccccaggauccuaaaucaugacuuaccugcuaauaaaaacucauuggaaaagugagaagaucuaaaaaaaaaaaaaaaaaaaaaaaaaaaaaaaaaaaaaaaaaaaaaaaaaaaaaaaaaaaaaaaaugcaucccccccccccccccccccccccccccccccaaaggcucuuuucagagccaccagaauu

SEQ ID NO: 6363 - RNA, 1986 nt, Artificial Sequence
  mRNA product Design h-1 comprising derived and/or modified sequence from HRSV(A2)__F_DSCav1_mut6 (opt2)
gggagacccgugacccggaaguuguacggcuacgcgacuuucccucccacaaacccucgcgcccuuccuuuccuacuugggcccggcagaaagcuuaccauggagcuccucauccucaaggccaacgccaucaccaccauccucaccgccgucaccuucugcuucgccuccggccagaacaucaccgaggaguucuaccaguccaccugcuccgccgucuccaagggcuaccucggcgcccuccgcaccggcugguacaccuccgucaucaccaucgagcucuccaacaucaaggagaacaagugcaacggcaccgacgccaaggucaagcucaucaagcaggagcucgacaaguacaagaacgccgucaccgaccuccagaugcucaugugcuccacccccgccaccggcuccggcuccgccaucgccuccggcgucgccgucugcaagguccuccaccucgagggcgaggucaacaagaucaaguccgcccuccucuccaccaacaaggccgucgucucccucuccaacggcgucuccguccucaccuucaagguccucgaccucaagaacuacaucgacaagcagcuccuccccauccucaacaagcaguccugcuccauccccaaccccgagaccgucauggaguuccagcagaagaacaaccgccuccucgagaucacccgcgaguucuccgucaacgccggcgucaccacccccgucuccaccuacaugcucaccaacuccgagcuccucucccucaucaacgacaugcccaucaccaacgaccagaagaagcucauguccaacaacguccagaucguccgccagcaguccuacuccaucaugugcaucaucaaggaggagguccucgccuacgucguccagcucccccucuacggcgucaucgacacccccugcuggaagcuccacaccuccccccucugcaccaccaacaccaaggagggcuccaacaucugccucacccgcaccgaccgcggcugguacugcgacaacgccggcuccgucuccuucuucccccaggccgagaccugcaaggucugcuccaaccgcgucuucugcgacaccaugaacucccucacccuccccuccgaggucaaccucugcaacgucgacaucuucaaccccaaguacgacugcaagaucaugaccuccaagaccgacgucuccuccuccgucaucaccucccucggcgccaucgucuccugcuacggcaagaccaagugcaccgccuccaacaagaacaagggcaucaucaagaccuucuccaacggcugcgacuacgucuccaacaagggcgucgacaccgucuccgucggcaacacccucuacuacgucaacaagcaggagggccagucccucuacgucaagggcgagcccaucaucaacuucuacgacccccucgucuuccccuccgacgaguucgacgccuccaucucccaggucaacgagaagaucaaccagucccucgccuucauccgcaaguccgacgagcuccuccacaacgucaacgccggcaaguccaccaccaacaucaugaucaccaccaucaucaucgucaucaucgucauccuccucucccucaucgccgucggccuccuccucuacugcaaggcccgcuccacccccgucacccucuccaaggaccagcucuccggcaucaacaacaucgccuucuccaacugaggacuaguacuggcugcaucucccuuuccucuguccuccauccuucucccaggauggugaagggggaccugguacccagugauccccaccccaggauccuaaaucaugacuuaccugcuaauaaaaacucauuggaaaagugagaagaucuaaaaaaaaaaaaaaaaaaaaaaaaaaaaaaaaaaaaaaaaaaaaaaaaaaaaaaaaaaaaaaaaugcaucccccccccccccccccccccccccccccccaaaggcucuuuucagagccaccagaauu

SEQ ID NO: 6364 - RNA, 1986 nt, Artificial Sequence
  mRNA product Design h-1 comprising derived and/or modified sequence from HRSV(A2)__F_DSCav1_mut6 (opt3)
gggagacccgugacccggaaguuguacggcuacgcgacuuucccucccacaaacccucgcgcccuuccuuuccuacuugggcccggcagaaagcuuaccauggagcugcucauccuuaaggccaacgcuauuaccacaauacugacugcagugacguucugcuuugccagcggccagaauaucaccgaagaguucuaccaauccacauguucugcggucucaaaaggguauuugggagcuuuaagaacugguugguacaccaguguuauuacaaucgaacugagcaacauuaaggagaauaaaugcaacggcaccgacgccaaggugaaacuaaucaagcaggaacucgauaaguauaaaaaugcaguaacugaccugcagaugcuuauguguuccacacccgccaccgggucuggaucggcuauagcaucaggcguggccgucugcaaggugcugcacuuggagggugagguuaacaaaaucaagagcgcucuccugaguacgaauaaagccguggucucccugucuaacggggugagcguacucacuuuuaagguuuuagaucugaagaauuacauugacaaacagcuuuugccuauccugaacaagcaauccuguucaauuccaaauccggaaaccgugauggaguuccagcagaaaaacaauaggcuacucgaaaucacacgggaguuuagugucaacgcgggagugacuacccccgugagcacauauaugcugaccaauucugagcuucuguccuugauaaacgauaugccuauuacgaacgaccagaagaaacucaugucaaauaacguccaaaucguucgccagcagagcuacaguauuaugugcaucaucaaggaagaggugcuggcauauguagugcaguuaccacuguacggcgucauugauacucccuguuggaaacuccauacaucuccucuuugcaccacuaauacaaaggaaggcuccaacauaugucugacccgaacggaccgugggugguacugcgauaaugccggaagcgugucguucuuuccacaagcugagaccuguaagguuugcucuaacagaguguucugcgacacaaugaacuccuugacucuacccucagaagucaaucuguguaauguggauaucuuuaacccuaaauaugacugcaagauuaugaccaguaaaacagauguaagcuccucuguuaucacuagccucggugccauagugucauguuacggcaagaccaaaugcacagcaaguaauaagaacaaggggauuaucaaaaccuucuccaauggaugugacuaugucagcaacaagggcguggacacugucucuguggguaauacgcuguacuauguuaacaaacaggaggggcagucacuuuacgugaagggagagccaaucauuaacuuuuaugauccgcugguauuccccagugacgaauuugaugcuagcaucucccaagucaaugagaaaauuaaccagucuuuggccuucauaaggaagucggacgaacuccugcacaaugugaacgcgggcaagagcacaaccaauaucaugauuacuaccaucaucauuguuauaaucgugauuuuacugucccuaaucgccgucggccuccugcuuuacugcaaagcacggucaacaccugugaccuugaguaaggaucagcugucugggauuaacaauaucgcuuucagcaacugaggacuaguacuggcugcaucucccuuuccucuguccuccauccuucucccaggauggugaagggggaccugguacccagugauccccaccccaggauccuaaaucaugacuuaccugcuaauaaaaacucauuggaaaagugagaagaucuaaaaaaaaaaaaaaaaaaaaaaaaaaaaaaaaaaaaaaaaaaaaaaaaaaaaaaaaaaaaaaaaugcaucccccccccccccccccccccccccccccccaaaggcucuuuucagagccaccagaauu

SEQ ID NO: 6365 - RNA, 1986 nt, Artificial Sequence
  mRNA product Design h-1 comprising derived and/or modified sequence from HRSV(A2)__F_DSCav1_mut6 (opt4)
gggagacccgugacccggaaguuguacggcuacgcgacuuucccucccacaaacccucgcgcccuuccuuuccuacuugggcccggcagaaagcuuaccauggagcugcugauccugaaggccaacgccaucaccaccauccugaccgccgugaccuucugcuucgccagcggccagaacaucaccgaggaguucuaccagagcaccugcagcgccgugagcaagggcuaccugggcgcccugagaaccggcugguacaccagcgugaucaccaucgagcugagcaacaucaaggagaacaagugcaacggcaccgacgccaaggugaagcugaucaagcaggagcuggacaaguacaagaacgccgugaccgaccugcagaugcugaugugcagcacccccgccaccggcagcggcagcgccaucgccagcggcguggccgugugcaaggugcugcaccuggagggcgaggugaacaagaucaagagcgcccugcugagcaccaacaaggccguggugagccugagcaacggcgugagcgugcugaccuucaaggugcuggaccugaagaacuacaucgacaagcagcugcugcccauccugaacaagcagagcugcagcauccccaaccccgagaccgugauggaguuccagcagaagaacaacagacugcuggagaucaccagagaguucagcgugaacgccggcgugaccacccccgugagcaccuacaugcugaccaacagcgagcugcugagccugaucaacgacaugcccaucaccaacgaccagaagaagcugaugagcaacaacgugcagaucgugagacagcagagcuacagcaucaugugcaucaucaaggaggaggugcuggccuacguggugcagcugccccuguacggcgugaucgacacccccugcuggaagcugcacaccagcccccugugcaccaccaacaccaaggagggcagcaacaucugccugaccagaaccgacagaggcugguacugcgacaacgccggcagcgugagcuucuucccccaggccgagaccugcaaggugugcagcaacagaguguucugcgacaccaugaacagccugacccugcccagcgaggugaaccugugcaacguggacaucuucaaccccaaguacgacugcaagaucaugaccagcaagaccgacgugagcagcagcgugaucaccagccugggcgccaucgugagcugcuacggcaagaccaagugcaccgccagcaacaagaacaagggcaucaucaagaccuucagcaacggcugcgacuacgugagcaacaagggcguggacaccgugagcgugggcaacacccuguacuacgugaacaagcaggagggccagagccuguacgugaagggcgagcccaucaucaacuucuacgacccccugguguuccccagcgacgaguucgacgccagcaucagccaggugaacgagaagaucaaccagagccuggccuucaucagaaagagcgacgagcugcugcacaacgugaacgccggcaagagcaccaccaacaucaugaucaccaccaucaucaucgugaucaucgugauccugcugagccugaucgccgugggccugcugcuguacugcaaggccagaagcacccccgugacccugagcaaggaccagcugagcggcaucaacaacaucgccuucagcaacugaggacuaguacuggcugcaucucccuuuccucuguccuccauccuucucccaggauggugaagggggaccugguacccagugauccccaccccaggauccuaaaucaugacuuaccugcuaauaaaaacucauuggaaaagugagaagaucuaaaaaaaaaaaaaaaaaaaaaaaaaaaaaaaaaaaaaaaaaaaaaaaaaaaaaaaaaaaaaaaaugcaucccccccccccccccccccccccccccccccaaaggcucuuuucagagccaccagaauu

SEQ ID NO: 6366 - RNA, 1986 nt, Artificial Sequence
  mRNA product Design h-1 comprising derived and/or modified sequence from HRSV(A2)__F_DSCav1_mut6 (opt5)
gggagacccgugacccggaaguuguacggcuacgcgacuuucccucccacaaacccucgcgcccuuccuuuccuacuugggcccggcagaaagcuuaccauggagcugcucauccugaaggccaacgcuauuaccacaauccuuacggccgugaccuucugcuuugcgagcggccagaauauuacagaagaguucuaccaauccaccuguucugcugucagcaaaggguaucugggagcccucagaacaggcugguacaccuccguuaucacaauugaacugucuaacaucaaggagaauaaaugcaacgggaccgacgccaaggugaaacuuaucaagcaggaacuggauaaguauaaaaaugcugugacggaccuccagaugcugauguguagcacccccgccacaggauccggcucugcuauugccagcggggucgcggugugcaagguucugcaccucgagggagaggugaacaaaaucaaguccgcccugcuuagcaccaauaaagcugucgugucucuguccaacggcguuagcgugcucacauuuaagguccuggaucuuaagaauuacauugacaaacagcugcucccuauccugaacaagcaaucuuguuccauuccgaaucccgaaaccgugauggaguuccagcagaaaaacaaucggcugcucgaaaucacgcgcgaguuuagcgugaacgccggcgucacaaccccuguuucuacauauaugcugaccaauuccgagcuucugagccucauuaacgauaugcccaucaccaacgaccagaagaaacugauguccaauaacgugcaaaucgugagacagcagucuuacagcauuaugugcaucauuaaggaagagguccuugcuuaugugguucagcugccucucuacggggugaucgauacacccuguuggaaacugcauacguccccucugugcaccacaaauaccaaggaaggaagcaacauuugucucacacggaccgaccgcggcugguacugcgauaaugccgggucugucuccuucuuuccgcaagcggagacguguaaggugugcagcaacagaguuuucugcgacacaaugaacucucugacccuucccagcgaagugaaucuguguaaugucgauaucuuuaacccuaaauaugacugcaagaucaugaccuccaaaacagaugugucuagcuccgucauuaccagccucggagccaucgugucuuguuacggcaagacaaaaugcacggcuuccaauaagaacaaggggauuaucaaaaccuucagcaauggaugugacuauguuucuaacaagggcguggacacagucuccgugggcaauacccuguacuauguuaacaaacaggaggggcagagccuuuacgugaagggagagcccauuaucaacuuuuaugauccucuggucuuccccuccgacgaauuugaugccucuaucagccaagugaaugagaaaauuaaccagucccucgcuuucauccggaagucugacgaacugcugcacaaugugaacgccggcaagagcacaaccaauauuaugaucacgaccauuaucauuguuaucaucgucauucuccugucccuuaucgccguggggcugcuccuguacugcaaagcucgcagcacaccggugacccugucuaaggaucagcuuuccggaauuaacaauaucgcguucagcaacugaggacuaguacuggcugcaucucccuuuccucuguccuccauccuucucccaggauggugaagggggaccugguacccagugauccccaccccaggauccuaaaucaugacuuaccugcuaauaaaaacucauuggaaaagugagaagaucuaaaaaaaaaaaaaaaaaaaaaaaaaaaaaaaaaaaaaaaaaaaaaaaaaaaaaaaaaaaaaaaaugcaucccccccccccccccccccccccccccccccaaaggcucuuuucagagccaccagaauu

SEQ ID NO: 6367 - RNA, 1986 nt, Artificial Sequence
  mRNA product Design h-1 comprising derived and/or modified sequence from HRSV(A2)__F_DSCav1_mut6 (opt6)
gggagacccgugacccggaaguuguacggcuacgcgacuuucccucccacaaacccucgcgcccuuccuuuccuacuugggcccggcagaaagcuuaccauggaacuauuaaucuuaaaagcaaaugcuauaaccacaauauuaacagcaguaacauucuguuuugccuccggacaaaacauaacagaagaauuuuaucaaucaacaugcucugcaguauccaaagguuacuuaggcgcacuacgcacuggaugguauacaucaguaauaacaauagaacuaucaaacauaaaagaaaauaaauguaacgguacugacgcaaaagugaaacuaauuaaacaagaacucgacaaauacaaaaaugcuguaacagaccuacaaaugcuaaugugcucaacacccgcaaccggaucaggaucagccauagccuccggagucgcaguaugcaaaguauuacaucuugaaggagaaguaaauaaaauaaaaucagcauuacuauccacaaauaaagccguaguaucacuaucaaacgguguauccguccuuacauucaaaguauuagaucuaaaaaacuacauagauaaacaacuacuacccaucuuaaacaaacaaucaugcucaauucccaacccagaaacagucauggaauuucaacaaaaaaacaacagacucuuagaaauaacacgagaauuuucaguaaacgcaggaguaaccacaccaguaaguacauacaugcucaccaacucagaauuauuaucacuuauuaacgacaugccaauuacaaacgaccaaaaaaaauuaaugucaaacaauguccaaauuguuagacaacaaucauacucuauaauguguauaauaaaagaagaaguacuagcuuacguaguucaauuaccacuauauggcguaauagauacaccuugcuggaaacuacauacaucuccauuauguacaacuaacacaaaagaaggaucuaacauaugccuaacacgcacagaucgaggaugguacugcgauaaugcagguuccguaucauucuuuccacaagcagaaacauguaaaguaugcucaaacagaguauucugugacacuaugaacuccuuaacccuacccucagaagucaaucuaugcaacguugacauauuuaacccaaaauacgacuguaaaaucaugacaucuaaaacagacguaucaucaucaguuauuacaucccuaggagcaauaguaucuugcuacggaaaaacaaaauguacagcauccaacaaaaacaaaggaauaaucaaaacauucucaaacggcugcgacuacguaucaaacaaagguguagacacaguaucaguaggaaauacuuuauauuacguaaauaaacaagaaggacaaucucuauacguuaaaggcgaaccuauuauaaacuucuacgacccacucguauucccuucagacgaauuugacgcaucuauaucccaaguuaacgaaaaaaucaaccaaucauuagccuuuauaagaaaauccgacgaauuauuacauaacgucaacgcuggaaaaucaacaacuaacauaaugauaaccacaauaauaauagucaucauaguuauauuacuaagucuaauagccguaggccuccuacuuuauugcaaagcaagaucaacaccaguaacauuauccaaagaccaacucagcggcauaaacaauauagcuuuuucaaacuagggacuaguacuggcugcaucucccuuuccucuguccuccauccuucucccaggauggugaagggggaccugguacccagugauccccaccccaggauccuaaaucaugacuuaccugcuaauaaaaacucauuggaaaagugagaagaucuaaaaaaaaaaaaaaaaaaaaaaaaaaaaaaaaaaaaaaaaaaaaaaaaaaaaaaaaaaaaaaaaugcaucccccccccccccccccccccccccccccccaaaggcucuuuucagagccaccagaauu

SEQ ID NO: 6368 - RNA, 1986 nt, Artificial Sequence
  mRNA product Design h-1 comprising derived and/or modified sequence from HRSV(A2)__F_DSCav1_mut6 (opt11)
gggagacccgugacccggaaguuguacggcuacgcgacuuucccucccacaaacccucgcgcccuuccuuuccuacuugggcccggcagaaagcuuaccauggaacuccucauccucaaagccaacgcaaucacaaccauacuaacugcaguuacuuucugcuucgcauccggccaaaacaucaccgaagaguucuaccaaucaaccugcuccgcagucuccaaaggauaccucggagcccuucgcaccggcugguacaccuccgucauaaccaucgaacucucaaacauaaaagaaaacaaaugcaacggcacagacgcgaaagucaaacuuaucaaacaagaacucgacaaauacaaaaacgccgucaccgaccugcagaugcucaugugcucaacccccgccacaggaagcggcucugcuaucgcuuccggcgucgccgucugcaaaguccuccaccucgaaggcgaaguaaacaaaaucaagucagcccuccucuccaccaacaaagccgucgucucucucucaaacggcguauccguccucacauucaaaguccucgaccucaaaaacuacaucgacaaacaacuucuccccauccuaaacaaacaaucaugcuccauccccaaccccgaaacagucauggaauuucaacaaaagaacaaccgccucuuagaaaucacccgagaauuuuccgucaacgcgggagucacaacccccguuucuacguauaugcucaccaacuccgaacuccuuucccucauaaacgacaugccaaucaccaacgaccaaaagaaacucaugucaaacaacguccaaaucguccgacaacaauccuacucuauuaugugcaucaucaaagaagaaguucucgccuacgucguccaacuaccccucuacggcgugaucgacacccccugcuggaaacuacacaccucaccccucugcaccaccaacaccaaggaaggcuccaacaucugccucacccgcaccgaccgcggcugguacugcgacaacgcuggcuccgucucauucuucccgcaagccgaaacuugcaaaguaugcuccaacagaguauucugcgacaccaugaacucacuaacccucccuuccgaagucaaccuuugcaacguugacauauucaacccaaaguacgauugcaaaauuaugacauccaaaacagaugucuccuccuccgucaucacaucccucggugccauuguaucaugcuacggaaaaaccaaaugcaccgcauccaacaaaaacaaaggaaucaucaaaaccuucucaaacggcugcgauuacgucucaaacaaaggagucgacacagucuccgucggaaacacccuauacuacgucaacaaacaagaaggccaaucccuguacgucaaaggagaacccaucaucaacuucuacgacccccucgucuucccgagcgacgaguucgacgccuccaucucacaagucaaugaaaagaucaaccaaucccuugccuucauccggaaaucggacgaacuccuacacaacgugaacgcuggaaaaucaaccaccaacaucaugaucacaaccaucauuaucgucaucaucgucauacuccucucccuaaucgccgucggccuccuccuguauugcaaagcucgcuccacccccgucacccuguccaaagaccaacucuccggaaucaacaacaucgccuucucaaacuaaggacuaguacuggcugcaucucccuuuccucuguccuccauccuucucccaggauggugaagggggaccugguacccagugauccccaccccaggauccuaaaucaugacuuaccugcuaauaaaaacucauuggaaaagugagaagaucuaaaaaaaaaaaaaaaaaaaaaaaaaaaaaaaaaaaaaaaaaaaaaaaaaaaaaaaaaaaaaaaaugcaucccccccccccccccccccccccccccccccaaaggcucuuuucagagccaccagaauu

SEQ ID NO: 6369 - RNA, 2202 nt, Artificial Sequence
  mRNA product Design h-2 comprising derived and/or modified sequence from HRSV(A2)__F_DSCav1_mut6 (opt1)
gggagacccgugacccggaaguuguacggcuacgcgacuuucccucccacaaacccucgcgcccuuccuuuccuacuugggcccggcagaaagcuuaccauggagcugcucauccugaaggccaacgccaucaccaccauccugacggcggugaccuucugcuucgccagcggccagaacaucaccgaggaguucuaccaguccacgugcagcgccgucuccaagggguaccucggcgcccugcggaccggcugguacaccuccgugaucaccaucgagcugagcaacaucaaggagaacaagugcaacgggaccgacgccaaggugaagcucaucaagcaggagcuggacaaguacaagaacgcggucacggaccugcagaugcugaugugcuccaccccggcaaccggcuccggcuccgccaucgcgagcggcgucgccgugugcaaggugcugcaccucgagggggaggucaacaagaucaagagcgcccugcuguccaccaacaaggccguggugagccucuccaacggcgucagcgugcugaccuucaaggugcuggaccucaagaacuacaucgacaagcagcugcugcccauccugaacaagcagagcugcuccauccccaaccccgagacggugauggaguuccagcagaagaacaaccggcuccuggagaucacccgcgaguucagcgugaacgccggggucaccacccccguguccacguacaugcugaccaacagcgagcuccugucccugaucaacgacaugccgaucaccaacgaccagaagaagcucaugagcaacaacgugcagaucguccggcagcaguccuacagcaucaugugcaucaucaaggaggaggugcuggcguacgugguccagcugccccucuacggcgugaucgacacccccugcuggaagcugcacacgagcccccugugcaccaccaacaccaaggagggguccaacaucugccucacgcgcaccgaccggggcugguacugcgacaacgccggcagcgucuccuucuucccgcaggccgagaccugcaaggugugcagcaaccgcguguucugcgacaccaugaacucccugacgcugcccagcgagguaaaccucugcaacgucgacaucuucaaccccaaguacgacugcaagaucaugaccuccaagaccgacgugagcuccagcgugaucaccucccugggggccaucgucagcugcuacggcaagacgaagugcaccgccagcaacaagaacaaggggaucaucaagaccuucuccaacggcugcgacuacgugagcaacaagggcguggacaccguguccgucgggaacacccuguacuacgugaacaagcaggagggccagagccucuacgugaagggggagcccaucaucaacuucuacgacccgcuggucuuccccuccgacgaguucgacgcgagcaucucccaggugaacgagaagaucaaccagagccuggccuucauccgcaaguccgacgagcugcuccacaacgugaacgccggcaagagcacgaccaacaucaugaucaccaccaucaucaucgucaucaucgugauccugcugucccucaucgccguggggcugcugcucuacugcaaggcccggagcacgcccgucacccuguccaaggaccagcugagcggcaucaacaacaucgcguucuccaacugaggacuagugaagggaacacccaaauuuaauucagccuuaagcacaauuaauuaagagugaaacguaauuguacaagcaguuggucacccaccauagggcaugaucaacaccgcaaccuuuccuuuuucccccagugauucugaaaaaccccucuucccuucagcuugcuuagauguuccaaauuuaguaagcuuaaggcggccuacagaagaaaaagaaaaaaaaggccacaaaaguucccucucacuuucaguaaauaaaauaaaagcagcaacagaaauaaagaaauaaaugaaauucaaaaugaaauaaauauuguguugugcagcauuaaaaaaucaauaaaaauuaaaaaugagcaagaucuaaaaaaaaaaaaaaaaaaaaaaaaaaaaaaaaaaaaaaaaaaaaaaaaaaaaaaaaaaaaaaaaugcaucccccccccccccccccccccccccccccccaaaggcucuuuucagagccaccagaauu

SEQ ID NO: 6370 - RNA, 2202 nt, Artificial Sequence
  mRNA product Design h-2 comprising derived and/or modified sequence from HRSV(A2)__F_DSCav1_mut6 (opt1)
gggagacccgugacccggaaguuguacggcuacgcgacuuucccucccacaaacccucgcgcccuuccuuuccuacuugggcccggcagaaagcuuaccauggagcugcucauccugaaggccaacgccaucaccaccauccugacggcggugaccuucugcuucgccagcggccagaacaucaccgaggaguucuaccaguccacgugcagcgccgucuccaagggguaccucggcgcccugcgcaccgggugguacaccagcgugaucaccaucgagcuguccaacaucaaggagaacaagugcaacggcaccgacgccaaggugaagcucaucaagcaggagcuggacaaguacaagaacgcggucacggaccugcagaugcucaugugcagcacccccgccaccggguccggcagcgccaucgccuccggcguggcggugugcaagguccugcaccuggagggggaggugaacaagaucaagagcgcccuccuguccaccaacaaggccguggucagccuguccaacggcgugagcgugcucacguucaagguccuggaccugaagaacuacaucgacaagcagcuccugccgauccugaacaagcaguccugcagcauccccaaccccgagaccgugauggaguuccagcagaagaacaaccggcuccuggagaucacccgcgaguucuccgugaacgccggggucaccacgcccgugagcaccuacaugcugaccaacuccgagcuccugagccugaucaacgacaugccgaucaccaacgaccagaagaagcucaugagcaacaacgugcagaucguccggcagcaguccuacagcaucaugugcaucaucaaggaggaggugcuggccuacgugguccagcugccccucuacggcgugaucgacacgcccugcuggaagcugcacaccagcccccugugcaccaccaacacgaaggaggggagcaacaucugccucacccgcaccgaccggggcugguacugcgacaacgcgggcuccgugagcuucuucccgcaggccgagaccugcaaggucugcuccaaccgcguguucugcgacacgaugaacagccugacccugcccuccgaggucaaccucugcaacguggacaucuucaaccccaaguacgacugcaagaucaugaccagcaagaccgacguguccagcuccgucaucacgagccugggggccaucguguccugcuacggcaagaccaagugcaccgccagcaacaagaacaaggggaucaucaagaccuucuccaacggcugcgacuacgugagcaacaagggcgucgacacgguguccguggggaacacccuguacuacgucaacaagcaggagggccagagccucuacgugaagggggagcccaucaucaacuucuacgacccgcugguguuccccagcgacgaguucgacgccuccaucagccaggucaacgagaagaucaaccagucccuggcguucauccggaaguccgacgagcuccugcacaacgugaacgccggcaaguccaccaccaacaucaugaucaccacgaucaucaucgugaucaucgucauccugcucagccugaucgccguggggcugcuccuguacugcaaggcccgcuccacccccgugacccugagcaaggaccagcuguccggcaucaacaacaucgccuucagcaacugaggacuagugaagggaacacccaaauuuaauucagccuuaagcacaauuaauuaagagugaaacguaauuguacaagcaguuggucacccaccauagggcaugaucaacaccgcaaccuuuccuuuuucccccagugauucugaaaaaccccucuucccuucagcuugcuuagauguuccaaauuuaguaagcuuaaggcggccuacagaagaaaaagaaaaaaaaggccacaaaaguucccucucacuuucaguaaauaaaauaaaagcagcaacagaaauaaagaaauaaaugaaauucaaaaugaaauaaauauuguguugugcagcauuaaaaaaucaauaaaaauuaaaaaugagcaagaucuaaaaaaaaaaaaaaaaaaaaaaaaaaaaaaaaaaaaaaaaaaaaaaaaaaaaaaaaaaaaaaaaugcaucccccccccccccccccccccccccccccccaaaggcucuuuucagagccaccagaauu

SEQ ID NO: 6371 - RNA, 2202 nt, Artificial Sequence
  mRNA product Design h-2 comprising derived and/or modified sequence from HRSV(A2)__F_DSCav1_mut6 (opt2)
gggagacccgugacccggaaguuguacggcuacgcgacuuucccucccacaaacccucgcgcccuuccuuuccuacuugggcccggcagaaagcuuaccauggagcuccucauccucaaggccaacgccaucaccaccauccucaccgccgucaccuucugcuucgccuccggccagaacaucaccgaggaguucuaccaguccaccugcuccgccgucuccaagggcuaccucggcgcccuccgcaccggcugguacaccuccgucaucaccaucgagcucuccaacaucaaggagaacaagugcaacggcaccgacgccaaggucaagcucaucaagcaggagcucgacaaguacaagaacgccgucaccgaccuccagaugcucaugugcuccacccccgccaccggcuccggcuccgccaucgccuccggcgucgccgucugcaagguccuccaccucgagggcgaggucaacaagaucaaguccgcccuccucuccaccaacaaggccgucgucucccucuccaacggcgucuccguccucaccuucaagguccucgaccucaagaacuacaucgacaagcagcuccuccccauccucaacaagcaguccugcuccauccccaaccccgagaccgucauggaguuccagcagaagaacaaccgccuccucgagaucacccgcgaguucuccgucaacgccggcgucaccacccccgucuccaccuacaugcucaccaacuccgagcuccucucccucaucaacgacaugcccaucaccaacgaccagaagaagcucauguccaacaacguccagaucguccgccagcaguccuacuccaucaugugcaucaucaaggaggagguccucgccuacgucguccagcucccccucuacggcgucaucgacacccccugcuggaagcuccacaccuccccccucugcaccaccaacaccaaggagggcuccaacaucugccucacccgcaccgaccgcggcugguacugcgacaacgccggcuccgucuccuucuucccccaggccgagaccugcaaggucugcuccaaccgcgucuucugcgacaccaugaacucccucacccuccccuccgaggucaaccucugcaacgucgacaucuucaaccccaaguacgacugcaagaucaugaccuccaagaccgacgucuccuccuccgucaucaccucccucggcgccaucgucuccugcuacggcaagaccaagugcaccgccuccaacaagaacaagggcaucaucaagaccuucuccaacggcugcgacuacgucuccaacaagggcgucgacaccgucuccgucggcaacacccucuacuacgucaacaagcaggagggccagucccucuacgucaagggcgagcccaucaucaacuucuacgacccccucgucuuccccuccgacgaguucgacgccuccaucucccaggucaacgagaagaucaaccagucccucgccuucauccgcaaguccgacgagcuccuccacaacgucaacgccggcaaguccaccaccaacaucaugaucaccaccaucaucaucgucaucaucgucauccuccucucccucaucgccgucggccuccuccucuacugcaaggcccgcuccacccccgucacccucuccaaggaccagcucuccggcaucaacaacaucgccuucuccaacugaggacuagugaagggaacacccaaauuuaauucagccuuaagcacaauuaauuaagagugaaacguaauuguacaagcaguuggucacccaccauagggcaugaucaacaccgcaaccuuuccuuuuucccccagugauucugaaaaaccccucuucccuucagcuugcuuagauguuccaaauuuaguaagcuuaaggcggccuacagaagaaaaagaaaaaaaaggccacaaaaguucccucucacuuucaguaaauaaaauaaaagcagcaacagaaauaaagaaauaaaugaaauucaaaaugaaauaaauauuguguugugcagcauuaaaaaaucaauaaaaauuaaaaaugagcaagaucuaaaaaaaaaaaaaaaaaaaaaaaaaaaaaaaaaaaaaaaaaaaaaaaaaaaaaaaaaaaaaaaaugcaucccccccccccccccccccccccccccccccaaaggcucuuuucagagccaccagaauu

SEQ ID NO: 6372 - RNA, 2202 nt, Artificial Sequence
  mRNA product Design h-2 comprising derived and/or modified sequence from HRSV(A2)__F_DSCav1_mut6 (opt3)
gggagacccgugacccggaaguuguacggcuacgcgacuuucccucccacaaacccucgcgcccuuccuuuccuacuugggcccggcagaaagcuuaccauggagcugcucauccuuaaggccaacgcuauuaccacaauacugacugcagugacguucugcuuugccagcggccagaauaucaccgaagaguucuaccaauccacauguucugcggucucaaaaggguauuugggagcuuuaagaacugguugguacaccaguguuauuacaaucgaacugagcaacauuaaggagaauaaaugcaacggcaccgacgccaaggugaaacuaaucaagcaggaacucgauaaguauaaaaaugcaguaacugaccugcagaugcuuauguguuccacacccgccaccgggucuggaucggcuauagcaucaggcguggccgucugcaaggugcugcacuuggagggugagguuaacaaaaucaagagcgcucuccugaguacgaauaaagccguggucucccugucuaacggggugagcguacucacuuuuaagguuuuagaucugaagaauuacauugacaaacagcuuuugccuauccugaacaagcaauccuguucaauuccaaauccggaaaccgugauggaguuccagcagaaaaacaauaggcuacucgaaaucacacgggaguuuagugucaacgcgggagugacuacccccgugagcacauauaugcugaccaauucugagcuucuguccuugauaaacgauaugccuauuacgaacgaccagaagaaacucaugucaaauaacguccaaaucguucgccagcagagcuacaguauuaugugcaucaucaaggaagaggugcuggcauauguagugcaguuaccacuguacggcgucauugauacucccuguuggaaacuccauacaucuccucuuugcaccacuaauacaaaggaaggcuccaacauaugucugacccgaacggaccgugggugguacugcgauaaugccggaagcgugucguucuuuccacaagcugagaccuguaagguuugcucuaacagaguguucugcgacacaaugaacuccuugacucuacccucagaagucaaucuguguaauguggauaucuuuaacccuaaauaugacugcaagauuaugaccaguaaaacagauguaagcuccucuguuaucacuagccucggugccauagugucauguuacggcaagaccaaaugcacagcaaguaauaagaacaaggggauuaucaaaaccuucuccaauggaugugacuaugucagcaacaagggcguggacacugucucuguggguaauacgcuguacuauguuaacaaacaggaggggcagucacuuuacgugaagggagagccaaucauuaacuuuuaugauccgcugguauuccccagugacgaauuugaugcuagcaucucccaagucaaugagaaaauuaaccagucuuuggccuucauaaggaagucggacgaacuccugcacaaugugaacgcgggcaagagcacaaccaauaucaugauuacuaccaucaucauuguuauaaucgugauuuuacugucccuaaucgccgucggccuccugcuuuacugcaaagcacggucaacaccugugaccuugaguaaggaucagcugucugggauuaacaauaucgcuuucagcaacugaggacuagugaagggaacacccaaauuuaauucagccuuaagcacaauuaauuaagagugaaacguaauuguacaagcaguuggucacccaccauagggcaugaucaacaccgcaaccuuuccuuuuucccccagugauucugaaaaaccccucuucccuucagcuugcuuagauguuccaaauuuaguaagcuuaaggcggccuacagaagaaaaagaaaaaaaaggccacaaaaguucccucucacuuucaguaaauaaaauaaaagcagcaacagaaauaaagaaauaaaugaaauucaaaaugaaauaaauauuguguugugcagcauuaaaaaaucaauaaaaauuaaaaaugagcaagaucuaaaaaaaaaaaaaaaaaaaaaaaaaaaaaaaaaaaaaaaaaaaaaaaaaaaaaaaaaaaaaaaaugcaucccccccccccccccccccccccccccccccaaaggcucuuuucagagccaccagaauu

SEQ ID NO: 6373 - RNA, 2202 nt, Artificial Sequence
  mRNA product Design h-2 comprising derived and/or modified sequence from HRSV(A2)__F_DSCav1_mut6 (opt4)
gggagacccgugacccggaaguuguacggcuacgcgacuuucccucccacaaacccucgcgcccuuccuuuccuacuugggcccggcagaaagcuuaccauggagcugcugauccugaaggccaacgccaucaccaccauccugaccgccgugaccuucugcuucgccagcggccagaacaucaccgaggaguucuaccagagcaccugcagcgccgugagcaagggcuaccugggcgcccugagaaccggcugguacaccagcgugaucaccaucgagcugagcaacaucaaggagaacaagugcaacggcaccgacgccaaggugaagcugaucaagcaggagcuggacaaguacaagaacgccgugaccgaccugcagaugcugaugugcagcacccccgccaccggcagcggcagcgccaucgccagcggcguggccgugugcaaggugcugcaccuggagggcgaggugaacaagaucaagagcgcccugcugagcaccaacaaggccguggugagccugagcaacggcgugagcgugcugaccuucaaggugcuggaccugaagaacuacaucgacaagcagcugcugcccauccugaacaagcagagcugcagcauccccaaccccgagaccgugauggaguuccagcagaagaacaacagacugcuggagaucaccagagaguucagcgugaacgccggcgugaccacccccgugagcaccuacaugcugaccaacagcgagcugcugagccugaucaacgacaugcccaucaccaacgaccagaagaagcugaugagcaacaacgugcagaucgugagacagcagagcuacagcaucaugugcaucaucaaggaggaggugcuggccuacguggugcagcugccccuguacggcgugaucgacacccccugcuggaagcugcacaccagcccccugugcaccaccaacaccaaggagggcagcaacaucugccugaccagaaccgacagaggcugguacugcgacaacgccggcagcgugagcuucuucccccaggccgagaccugcaaggugugcagcaacagaguguucugcgacaccaugaacagccugacccugcccagcgaggugaaccugugcaacguggacaucuucaaccccaaguacgacugcaagaucaugaccagcaagaccgacgugagcagcagcgugaucaccagccugggcgccaucgugagcugcuacggcaagaccaagugcaccgccagcaacaagaacaagggcaucaucaagaccuucagcaacggcugcgacuacgugagcaacaagggcguggacaccgugagcgugggcaacacccuguacuacgugaacaagcaggagggccagagccuguacgugaagggcgagcccaucaucaacuucuacgacccccugguguuccccagcgacgaguucgacgccagcaucagccaggugaacgagaagaucaaccagagccuggccuucaucagaaagagcgacgagcugcugcacaacgugaacgccggcaagagcaccaccaacaucaugaucaccaccaucaucaucgugaucaucgugauccugcugagccugaucgccgugggccugcugcuguacugcaaggccagaagcacccccgugacccugagcaaggaccagcugagcggcaucaacaacaucgccuucagcaacugaggacuagugaagggaacacccaaauuuaauucagccuuaagcacaauuaauuaagagugaaacguaauuguacaagcaguuggucacccaccauagggcaugaucaacaccgcaaccuuuccuuuuucccccagugauucugaaaaaccccucuucccuucagcuugcuuagauguuccaaauuuaguaagcuuaaggcggccuacagaagaaaaagaaaaaaaaggccacaaaaguucccucucacuuucaguaaauaaaauaaaagcagcaacagaaauaaagaaauaaaugaaauucaaaaugaaauaaauauuguguugugcagcauuaaaaaaucaauaaaaauuaaaaaugagcaagaucuaaaaaaaaaaaaaaaaaaaaaaaaaaaaaaaaaaaaaaaaaaaaaaaaaaaaaaaaaaaaaaaaugcaucccccccccccccccccccccccccccccccaaaggcucuuuucagagccaccagaauu

SEQ ID NO: 6374 - RNA, 2202 nt, Artificial Sequence
  mRNA product Design h-2 comprising derived and/or modified sequence from HRSV(A2)__F_DSCav1_mut6 (opt5)
gggagacccgugacccggaaguuguacggcuacgcgacuuucccucccacaaacccucgcgcccuuccuuuccuacuugggcccggcagaaagcuuaccauggagcugcucauccugaaggccaacgcuauuaccacaauccuuacggccgugaccuucugcuuugcgagcggccagaauauuacagaagaguucuaccaauccaccuguucugcugucagcaaaggguaucugggagcccucagaacaggcugguacaccuccguuaucacaauugaacugucuaacaucaaggagaauaaaugcaacgggaccgacgccaaggugaaacuuaucaagcaggaacuggauaaguauaaaaaugcugugacggaccuccagaugcugauguguagcacccccgccacaggauccggcucugcuauugccagcggggucgcggugugcaagguucugcaccucgagggagaggugaacaaaaucaaguccgcccugcuuagcaccaauaaagcugucgugucucuguccaacggcguuagcgugcucacauuuaagguccuggaucuuaagaauuacauugacaaacagcugcucccuauccugaacaagcaaucuuguuccauuccgaaucccgaaaccgugauggaguuccagcagaaaaacaaucggcugcucgaaaucacgcgcgaguuuagcgugaacgccggcgucacaaccccuguuucuacauauaugcugaccaauuccgagcuucugagccucauuaacgauaugcccaucaccaacgaccagaagaaacugauguccaauaacgugcaaaucgugagacagcagucuuacagcauuaugugcaucauuaaggaagagguccuugcuuaugugguucagcugccucucuacggggugaucgauacacccuguuggaaacugcauacguccccucugugcaccacaaauaccaaggaaggaagcaacauuugucucacacggaccgaccgcggcugguacugcgauaaugccgggucugucuccuucuuuccgcaagcggagacguguaaggugugcagcaacagaguuuucugcgacacaaugaacucucugacccuucccagcgaagugaaucuguguaaugucgauaucuuuaacccuaaauaugacugcaagaucaugaccuccaaaacagaugugucuagcuccgucauuaccagccucggagccaucgugucuuguuacggcaagacaaaaugcacggcuuccaauaagaacaaggggauuaucaaaaccuucagcaauggaugugacuauguuucuaacaagggcguggacacagucuccgugggcaauacccuguacuauguuaacaaacaggaggggcagagccuuuacgugaagggagagcccauuaucaacuuuuaugauccucuggucuuccccuccgacgaauuugaugccucuaucagccaagugaaugagaaaauuaaccagucccucgcuuucauccggaagucugacgaacugcugcacaaugugaacgccggcaagagcacaaccaauauuaugaucacgaccauuaucauuguuaucaucgucauucuccugucccuuaucgccguggggcugcuccuguacugcaaagcucgcagcacaccggugacccugucuaaggaucagcuuuccggaauuaacaauaucgcguucagcaacugaggacuagugaagggaacacccaaauuuaauucagccuuaagcacaauuaauuaagagugaaacguaauuguacaagcaguuggucacccaccauagggcaugaucaacaccgcaaccuuuccuuuuucccccagugauucugaaaaaccccucuucccuucagcuugcuuagauguuccaaauuuaguaagcuuaaggcggccuacagaagaaaaagaaaaaaaaggccacaaaaguucccucucacuuucaguaaauaaaauaaaagcagcaacagaaauaaagaaauaaaugaaauucaaaaugaaauaaauauuguguugugcagcauuaaaaaaucaauaaaaauuaaaaaugagcaagaucuaaaaaaaaaaaaaaaaaaaaaaaaaaaaaaaaaaaaaaaaaaaaaaaaaaaaaaaaaaaaaaaaugcaucccccccccccccccccccccccccccccccaaaggcucuuuucagagccaccagaauu

SEQ ID NO: 6375 - RNA, 2202 nt, Artificial Sequence
  mRNA product Design h-2 comprising derived and/or modified sequence from HRSV(A2)__F_DSCav1_mut6 (opt6)
gggagacccgugacccggaaguuguacggcuacgcgacuuucccucccacaaacccucgcgcccuuccuuuccuacuugggcccggcagaaagcuuaccauggaacuauuaaucuuaaaagcaaaugcuauaaccacaauauuaacagcaguaacauucuguuuugccuccggacaaaacauaacagaagaauuuuaucaaucaacaugcucugcaguauccaaagguuacuuaggcgcacuacgcacuggaugguauacaucaguaauaacaauagaacuaucaaacauaaaagaaaauaaauguaacgguacugacgcaaaagugaaacuaauuaaacaagaacucgacaaauacaaaaaugcuguaacagaccuacaaaugcuaaugugcucaacacccgcaaccggaucaggaucagccauagccuccggagucgcaguaugcaaaguauuacaucuugaaggagaaguaaauaaaauaaaaucagcauuacuauccacaaauaaagccguaguaucacuaucaaacgguguauccguccuuacauucaaaguauuagaucuaaaaaacuacauagauaaacaacuacuacccaucuuaaacaaacaaucaugcucaauucccaacccagaaacagucauggaauuucaacaaaaaaacaacagacucuuagaaauaacacgagaauuuucaguaaacgcaggaguaaccacaccaguaaguacauacaugcucaccaacucagaauuauuaucacuuauuaacgacaugccaauuacaaacgaccaaaaaaaauuaaugucaaacaauguccaaauuguuagacaacaaucauacucuauaauguguauaauaaaagaagaaguacuagcuuacguaguucaauuaccacuauauggcguaauagauacaccuugcuggaaacuacauacaucuccauuauguacaacuaacacaaaagaaggaucuaacauaugccuaacacgcacagaucgaggaugguacugcgauaaugcagguuccguaucauucuuuccacaagcagaaacauguaaaguaugcucaaacagaguauucugugacacuaugaacuccuuaacccuacccucagaagucaaucuaugcaacguugacauauuuaacccaaaauacgacuguaaaaucaugacaucuaaaacagacguaucaucaucaguuauuacaucccuaggagcaauaguaucuugcuacggaaaaacaaaauguacagcauccaacaaaaacaaaggaauaaucaaaacauucucaaacggcugcgacuacguaucaaacaaagguguagacacaguaucaguaggaaauacuuuauauuacguaaauaaacaagaaggacaaucucuauacguuaaaggcgaaccuauuauaaacuucuacgacccacucguauucccuucagacgaauuugacgcaucuauaucccaaguuaacgaaaaaaucaaccaaucauuagccuuuauaagaaaauccgacgaauuauuacauaacgucaacgcuggaaaaucaacaacuaacauaaugauaaccacaauaauaauagucaucauaguuauauuacuaagucuaauagccguaggccuccuacuuuauugcaaagcaagaucaacaccaguaacauuauccaaagaccaacucagcggcauaaacaauauagcuuuuucaaacuagggacuagugaagggaacacccaaauuuaauucagccuuaagcacaauuaauuaagagugaaacguaauuguacaagcaguuggucacccaccauagggcaugaucaacaccgcaaccuuuccuuuuucccccagugauucugaaaaaccccucuucccuucagcuugcuuagauguuccaaauuuaguaagcuuaaggcggccuacagaagaaaaagaaaaaaaaggccacaaaaguucccucucacuuucaguaaauaaaauaaaagcagcaacagaaauaaagaaauaaaugaaauucaaaaugaaauaaauauuguguugugcagcauuaaaaaaucaauaaaaauuaaaaaugagcaagaucuaaaaaaaaaaaaaaaaaaaaaaaaaaaaaaaaaaaaaaaaaaaaaaaaaaaaaaaaaaaaaaaaugcaucccccccccccccccccccccccccccccccaaaggcucuuuucagagccaccagaauu

SEQ ID NO: 6376 - RNA, 2202 nt, Artificial Sequence
  mRNA product Design h-2 comprising derived and/or modified sequence from HRSV(A2)__F_DSCav1_mut6 (opt11)
gggagacccgugacccggaaguuguacggcuacgcgacuuucccucccacaaacccucgcgcccuuccuuuccuacuugggcccggcagaaagcuuaccauggaacuccucauccucaaagccaacgcaaucacaaccauacuaacugcaguuacuuucugcuucgcauccggccaaaacaucaccgaagaguucuaccaaucaaccugcuccgcagucuccaaaggauaccucggagcccuucgcaccggcugguacaccuccgucauaaccaucgaacucucaaacauaaaagaaaacaaaugcaacggcacagacgcgaaagucaaacuuaucaaacaagaacucgacaaauacaaaaacgccgucaccgaccugcagaugcucaugugcucaacccccgccacaggaagcggcucugcuaucgcuuccggcgucgccgucugcaaaguccuccaccucgaaggcgaaguaaacaaaaucaagucagcccuccucuccaccaacaaagccgucgucucucucucaaacggcguauccguccucacauucaaaguccucgaccucaaaaacuacaucgacaaacaacuucuccccauccuaaacaaacaaucaugcuccauccccaaccccgaaacagucauggaauuucaacaaaagaacaaccgccucuuagaaaucacccgagaauuuuccgucaacgcgggagucacaacccccguuucuacguauaugcucaccaacuccgaacuccuuucccucauaaacgacaugccaaucaccaacgaccaaaagaaacucaugucaaacaacguccaaaucguccgacaacaauccuacucuauuaugugcaucaucaaagaagaaguucucgccuacgucguccaacuaccccucuacggcgugaucgacacccccugcuggaaacuacacaccucaccccucugcaccaccaacaccaaggaaggcuccaacaucugccucacccgcaccgaccgcggcugguacugcgacaacgcuggcuccgucucauucuucccgcaagccgaaacuugcaaaguaugcuccaacagaguauucugcgacaccaugaacucacuaacccucccuuccgaagucaaccuuugcaacguugacauauucaacccaaaguacgauugcaaaauuaugacauccaaaacagaugucuccuccuccgucaucacaucccucggugccauuguaucaugcuacggaaaaaccaaaugcaccgcauccaacaaaaacaaaggaaucaucaaaaccuucucaaacggcugcgauuacgucucaaacaaaggagucgacacagucuccgucggaaacacccuauacuacgucaacaaacaagaaggccaaucccuguacgucaaaggagaacccaucaucaacuucuacgacccccucgucuucccgagcgacgaguucgacgccuccaucucacaagucaaugaaaagaucaaccaaucccuugccuucauccggaaaucggacgaacuccuacacaacgugaacgcuggaaaaucaaccaccaacaucaugaucacaaccaucauuaucgucaucaucgucauacuccucucccuaaucgccgucggccuccuccuguauugcaaagcucgcuccacccccgucacccuguccaaagaccaacucuccggaaucaacaacaucgccuucucaaacuaaggacuagugaagggaacacccaaauuuaauucagccuuaagcacaauuaauuaagagugaaacguaauuguacaagcaguuggucacccaccauagggcaugaucaacaccgcaaccuuuccuuuuucccccagugauucugaaaaaccccucuucccuucagcuugcuuagauguuccaaauuuaguaagcuuaaggcggccuacagaagaaaaagaaaaaaaaggccacaaaaguucccucucacuuucaguaaauaaaauaaaagcagcaacagaaauaaagaaauaaaugaaauucaaaaugaaauaaauauuguguugugcagcauuaaaaaaucaauaaaaauuaaaaaugagcaagaucuaaaaaaaaaaaaaaaaaaaaaaaaaaaaaaaaaaaaaaaaaaaaaaaaaaaaaaaaaaaaaaaaugcaucccccccccccccccccccccccccccccccaaaggcucuuuucagagccaccagaauu

SEQ ID NO: 6377 - RNA, 1982 nt, Artificial Sequence
  mRNA product Design h-3 comprising derived and/or modified sequence from HRSV(A2)__F_DSCav1_mut6 (opt1)
gggagacccgugacccggaaguuguacggcuacgcgacuuucccucccacaaacccucgcgcccuuccuuuccuacuugggcccggcagaaagcuuaccauggagcugcucauccugaaggccaacgccaucaccaccauccugacggcggugaccuucugcuucgccagcggccagaacaucaccgaggaguucuaccaguccacgugcagcgccgucuccaagggguaccucggcgcccugcggaccggcugguacaccuccgugaucaccaucgagcugagcaacaucaaggagaacaagugcaacgggaccgacgccaaggugaagcucaucaagcaggagcuggacaaguacaagaacgcggucacggaccugcagaugcugaugugcuccaccccggcaaccggcuccggcuccgccaucgcgagcggcgucgccgugugcaaggugcugcaccucgagggggaggucaacaagaucaagagcgcccugcuguccaccaacaaggccguggugagccucuccaacggcgucagcgugcugaccuucaaggugcuggaccucaagaacuacaucgacaagcagcugcugcccauccugaacaagcagagcugcuccauccccaaccccgagacggugauggaguuccagcagaagaacaaccggcuccuggagaucacccgcgaguucagcgugaacgccggggucaccacccccguguccacguacaugcugaccaacagcgagcuccugucccugaucaacgacaugccgaucaccaacgaccagaagaagcucaugagcaacaacgugcagaucguccggcagcaguccuacagcaucaugugcaucaucaaggaggaggugcuggcguacgugguccagcugccccucuacggcgugaucgacacccccugcuggaagcugcacacgagcccccugugcaccaccaacaccaaggagggguccaacaucugccucacgcgcaccgaccggggcugguacugcgacaacgccggcagcgucuccuucuucccgcaggccgagaccugcaaggugugcagcaaccgcguguucugcgacaccaugaacucccugacgcugcccagcgagguaaaccucugcaacgucgacaucuucaaccccaaguacgacugcaagaucaugaccuccaagaccgacgugagcuccagcgugaucaccucccugggggccaucgucagcugcuacggcaagacgaagugcaccgccagcaacaagaacaaggggaucaucaagaccuucuccaacggcugcgacuacgugagcaacaagggcguggacaccguguccgucgggaacacccuguacuacgugaacaagcaggagggccagagccucuacgugaagggggagcccaucaucaacuucuacgacccgcuggucuuccccuccgacgaguucgacgcgagcaucucccaggugaacgagaagaucaaccagagccuggccuucauccgcaaguccgacgagcugcuccacaacgugaacgccggcaagagcacgaccaacaucaugaucaccaccaucaucaucgucaucaucgugauccugcugucccucaucgccguggggcugcugcucuacugcaaggcccggagcacgcccgucacccuguccaaggaccagcugagcggcaucaacaacaucgcguucuccaacugaggacuaguggaagcauuuuccuggcugauuaaaagaaauuacucagcuauggucaucuguuccuguuagaaggcuaugcagcauauuauauacuaugcgcauguuaugaaaugcauaauaaaaaauuuuaaaaaaucuaaaagaucuaaaaaaaaaaaaaaaaaaaaaaaaaaaaaaaaaaaaaaaaaaaaaaaaaaaaaaaaaaaaaaaaugcaucccccccccccccccccccccccccccccccaaaggcucuuuucagagccaccagaauu

SEQ ID NO: 6378 - RNA, 1982 nt, Artificial Sequence
  mRNA product Design h-3 comprising derived and/or modified sequence from HRSV(A2)__F_DSCav1_mut6 (opt1)
gggagacccgugacccggaaguuguacggcuacgcgacuuucccucccacaaacccucgcgcccuuccuuuccuacuugggcccggcagaaagcuuaccauggagcugcucauccugaaggccaacgccaucaccaccauccugacggcggugaccuucugcuucgccagcggccagaacaucaccgaggaguucuaccaguccacgugcagcgccgucuccaagggguaccucggcgcccugcgcaccgggugguacaccagcgugaucaccaucgagcuguccaacaucaaggagaacaagugcaacggcaccgacgccaaggugaagcucaucaagcaggagcuggacaaguacaagaacgcggucacggaccugcagaugcucaugugcagcacccccgccaccggguccggcagcgccaucgccuccggcguggcggugugcaagguccugcaccuggagggggaggugaacaagaucaagagcgcccuccuguccaccaacaaggccguggucagccuguccaacggcgugagcgugcucacguucaagguccuggaccugaagaacuacaucgacaagcagcuccugccgauccugaacaagcaguccugcagcauccccaaccccgagaccgugauggaguuccagcagaagaacaaccggcuccuggagaucacccgcgaguucuccgugaacgccggggucaccacgcccgugagcaccuacaugcugaccaacuccgagcuccugagccugaucaacgacaugccgaucaccaacgaccagaagaagcucaugagcaacaacgugcagaucguccggcagcaguccuacagcaucaugugcaucaucaaggaggaggugcuggccuacgugguccagcugccccucuacggcgugaucgacacgcccugcuggaagcugcacaccagcccccugugcaccaccaacacgaaggaggggagcaacaucugccucacccgcaccgaccggggcugguacugcgacaacgcgggcuccgugagcuucuucccgcaggccgagaccugcaaggucugcuccaaccgcguguucugcgacacgaugaacagccugacccugcccuccgaggucaaccucugcaacguggacaucuucaaccccaaguacgacugcaagaucaugaccagcaagaccgacguguccagcuccgucaucacgagccugggggccaucguguccugcuacggcaagaccaagugcaccgccagcaacaagaacaaggggaucaucaagaccuucuccaacggcugcgacuacgugagcaacaagggcgucgacacgguguccguggggaacacccuguacuacgucaacaagcaggagggccagagccucuacgugaagggggagcccaucaucaacuucuacgacccgcugguguuccccagcgacgaguucgacgccuccaucagccaggucaacgagaagaucaaccagucccuggcguucauccggaaguccgacgagcuccugcacaacgugaacgccggcaaguccaccaccaacaucaugaucaccacgaucaucaucgugaucaucgucauccugcucagccugaucgccguggggcugcuccuguacugcaaggcccgcuccacccccgugacccugagcaaggaccagcuguccggcaucaacaacaucgccuucagcaacugaggacuaguggaagcauuuuccuggcugauuaaaagaaauuacucagcuauggucaucuguuccuguuagaaggcuaugcagcauauuauauacuaugcgcauguuaugaaaugcauaauaaaaaauuuuaaaaaaucuaaaagaucuaaaaaaaaaaaaaaaaaaaaaaaaaaaaaaaaaaaaaaaaaaaaaaaaaaaaaaaaaaaaaaaaugcaucccccccccccccccccccccccccccccccaaaggcucuuuucagagccaccagaauu

SEQ ID NO: 6379 - RNA, 1982 nt, Artificial Sequence
  mRNA product Design h-3 comprising derived and/or modified sequence from HRSV(A2)__F_DSCav1_mut6 (opt2)
gggagacccgugacccggaaguuguacggcuacgcgacuuucccucccacaaacccucgcgcccuuccuuuccuacuugggcccggcagaaagcuuaccauggagcuccucauccucaaggccaacgccaucaccaccauccucaccgccgucaccuucugcuucgccuccggccagaacaucaccgaggaguucuaccaguccaccugcuccgccgucuccaagggcuaccucggcgcccuccgcaccggcugguacaccuccgucaucaccaucgagcucuccaacaucaaggagaacaagugcaacggcaccgacgccaaggucaagcucaucaagcaggagcucgacaaguacaagaacgccgucaccgaccuccagaugcucaugugcuccacccccgccaccggcuccggcuccgccaucgccuccggcgucgccgucugcaagguccuccaccucgagggcgaggucaacaagaucaaguccgcccuccucuccaccaacaaggccgucgucucccucuccaacggcgucuccguccucaccuucaagguccucgaccucaagaacuacaucgacaagcagcuccuccccauccucaacaagcaguccugcuccauccccaaccccgagaccgucauggaguuccagcagaagaacaaccgccuccucgagaucacccgcgaguucuccgucaacgccggcgucaccacccccgucuccaccuacaugcucaccaacuccgagcuccucucccucaucaacgacaugcccaucaccaacgaccagaagaagcucauguccaacaacguccagaucguccgccagcaguccuacuccaucaugugcaucaucaaggaggagguccucgccuacgucguccagcucccccucuacggcgucaucgacacccccugcuggaagcuccacaccuccccccucugcaccaccaacaccaaggagggcuccaacaucugccucacccgcaccgaccgcggcugguacugcgacaacgccggcuccgucuccuucuucccccaggccgagaccugcaaggucugcuccaaccgcgucuucugcgacaccaugaacucccucacccuccccuccgaggucaaccucugcaacgucgacaucuucaaccccaaguacgacugcaagaucaugaccuccaagaccgacgucuccuccuccgucaucaccucccucggcgccaucgucuccugcuacggcaagaccaagugcaccgccuccaacaagaacaagggcaucaucaagaccuucuccaacggcugcgacuacgucuccaacaagggcgucgacaccgucuccgucggcaacacccucuacuacgucaacaagcaggagggccagucccucuacgucaagggcgagcccaucaucaacuucuacgacccccucgucuuccccuccgacgaguucgacgccuccaucucccaggucaacgagaagaucaaccagucccucgccuucauccgcaaguccgacgagcuccuccacaacgucaacgccggcaaguccaccaccaacaucaugaucaccaccaucaucaucgucaucaucgucauccuccucucccucaucgccgucggccuccuccucuacugcaaggcccgcuccacccccgucacccucuccaaggaccagcucuccggcaucaacaacaucgccuucuccaacugaggacuaguggaagcauuuuccuggcugauuaaaagaaauuacucagcuauggucaucuguuccuguuagaaggcuaugcagcauauuauauacuaugcgcauguuaugaaaugcauaauaaaaaauuuuaaaaaaucuaaaagaucuaaaaaaaaaaaaaaaaaaaaaaaaaaaaaaaaaaaaaaaaaaaaaaaaaaaaaaaaaaaaaaaaugcaucccccccccccccccccccccccccccccccaaaggcucuuuucagagccaccagaauu

SEQ ID NO: 6380 - RNA, 1982 nt, Artificial Sequence
  mRNA product Design h-3 comprising derived and/or modified sequence from HRSV(A2)__F_DSCav1_mut6 (opt3)
gggagacccgugacccggaaguuguacggcuacgcgacuuucccucccacaaacccucgcgcccuuccuuuccuacuugggcccggcagaaagcuuaccauggagcugcucauccuuaaggccaacgcuauuaccacaauacugacugcagugacguucugcuuugccagcggccagaauaucaccgaagaguucuaccaauccacauguucugcggucucaaaaggguauuugggagcuuuaagaacugguugguacaccaguguuauuacaaucgaacugagcaacauuaaggagaauaaaugcaacggcaccgacgccaaggugaaacuaaucaagcaggaacucgauaaguauaaaaaugcaguaacugaccugcagaugcuuauguguuccacacccgccaccgggucuggaucggcuauagcaucaggcguggccgucugcaaggugcugcacuuggagggugagguuaacaaaaucaagagcgcucuccugaguacgaauaaagccguggucucccugucuaacggggugagcguacucacuuuuaagguuuuagaucugaagaauuacauugacaaacagcuuuugccuauccugaacaagcaauccuguucaauuccaaauccggaaaccgugauggaguuccagcagaaaaacaauaggcuacucgaaaucacacgggaguuuagugucaacgcgggagugacuacccccgugagcacauauaugcugaccaauucugagcuucuguccuugauaaacgauaugccuauuacgaacgaccagaagaaacucaugucaaauaacguccaaaucguucgccagcagagcuacaguauuaugugcaucaucaaggaagaggugcuggcauauguagugcaguuaccacuguacggcgucauugauacucccuguuggaaacuccauacaucuccucuuugcaccacuaauacaaaggaaggcuccaacauaugucugacccgaacggaccgugggugguacugcgauaaugccggaagcgugucguucuuuccacaagcugagaccuguaagguuugcucuaacagaguguucugcgacacaaugaacuccuugacucuacccucagaagucaaucuguguaauguggauaucuuuaacccuaaauaugacugcaagauuaugaccaguaaaacagauguaagcuccucuguuaucacuagccucggugccauagugucauguuacggcaagaccaaaugcacagcaaguaauaagaacaaggggauuaucaaaaccuucuccaauggaugugacuaugucagcaacaagggcguggacacugucucuguggguaauacgcuguacuauguuaacaaacaggaggggcagucacuuuacgugaagggagagccaaucauuaacuuuuaugauccgcugguauuccccagugacgaauuugaugcuagcaucucccaagucaaugagaaaauuaaccagucuuuggccuucauaaggaagucggacgaacuccugcacaaugugaacgcgggcaagagcacaaccaauaucaugauuacuaccaucaucauuguuauaaucgugauuuuacugucccuaaucgccgucggccuccugcuuuacugcaaagcacggucaacaccugugaccuugaguaaggaucagcugucugggauuaacaauaucgcuuucagcaacugaggacuaguggaagcauuuuccuggcugauuaaaagaaauuacucagcuauggucaucuguuccuguuagaaggcuaugcagcauauuauauacuaugcgcauguuaugaaaugcauaauaaaaaauuuuaaaaaaucuaaaagaucuaaaaaaaaaaaaaaaaaaaaaaaaaaaaaaaaaaaaaaaaaaaaaaaaaaaaaaaaaaaaaaaaugcaucccccccccccccccccccccccccccccccaaaggcucuuuucagagccaccagaauu

SEQ ID NO: 6381 - RNA, 1982 nt, Artificial Sequence
  mRNA product Design h-3 comprising derived and/or modified sequence from HRSV(A2)__F_DSCav1_mut6 (opt4)
gggagacccgugacccggaaguuguacggcuacgcgacuuucccucccacaaacccucgcgcccuuccuuuccuacuugggcccggcagaaagcuuaccauggagcugcugauccugaaggccaacgccaucaccaccauccugaccgccgugaccuucugcuucgccagcggccagaacaucaccgaggaguucuaccagagcaccugcagcgccgugagcaagggcuaccugggcgcccugagaaccggcugguacaccagcgugaucaccaucgagcugagcaacaucaaggagaacaagugcaacggcaccgacgccaaggugaagcugaucaagcaggagcuggacaaguacaagaacgccgugaccgaccugcagaugcugaugugcagcacccccgccaccggcagcggcagcgccaucgccagcggcguggccgugugcaaggugcugcaccuggagggcgaggugaacaagaucaagagcgcccugcugagcaccaacaaggccguggugagccugagcaacggcgugagcgugcugaccuucaaggugcuggaccugaagaacuacaucgacaagcagcugcugcccauccugaacaagcagagcugcagcauccccaaccccgagaccgugauggaguuccagcagaagaacaacagacugcuggagaucaccagagaguucagcgugaacgccggcgugaccacccccgugagcaccuacaugcugaccaacagcgagcugcugagccugaucaacgacaugcccaucaccaacgaccagaagaagcugaugagcaacaacgugcagaucgugagacagcagagcuacagcaucaugugcaucaucaaggaggaggugcuggccuacguggugcagcugccccuguacggcgugaucgacacccccugcuggaagcugcacaccagcccccugugcaccaccaacaccaaggagggcagcaacaucugccugaccagaaccgacagaggcugguacugcgacaacgccggcagcgugagcuucuucccccaggccgagaccugcaaggugugcagcaacagaguguucugcgacaccaugaacagccugacccugcccagcgaggugaaccugugcaacguggacaucuucaaccccaaguacgacugcaagaucaugaccagcaagaccgacgugagcagcagcgugaucaccagccugggcgccaucgugagcugcuacggcaagaccaagugcaccgccagcaacaagaacaagggcaucaucaagaccuucagcaacggcugcgacuacgugagcaacaagggcguggacaccgugagcgugggcaacacccuguacuacgugaacaagcaggagggccagagccuguacgugaagggcgagcccaucaucaacuucuacgacccccugguguuccccagcgacgaguucgacgccagcaucagccaggugaacgagaagaucaaccagagccuggccuucaucagaaagagcgacgagcugcugcacaacgugaacgccggcaagagcaccaccaacaucaugaucaccaccaucaucaucgugaucaucgugauccugcugagccugaucgccgugggccugcugcuguacugcaaggccagaagcacccccgugacccugagcaaggaccagcugagcggcaucaacaacaucgccuucagcaacugaggacuaguggaagcauuuuccuggcugauuaaaagaaauuacucagcuauggucaucuguuccuguuagaaggcuaugcagcauauuauauacuaugcgcauguuaugaaaugcauaauaaaaaauuuuaaaaaaucuaaaagaucuaaaaaaaaaaaaaaaaaaaaaaaaaaaaaaaaaaaaaaaaaaaaaaaaaaaaaaaaaaaaaaaaugcaucccccccccccccccccccccccccccccccaaaggcucuuuucagagccaccagaauu

SEQ ID NO: 6382 - RNA, 1982 nt, Artificial Sequence
  mRNA product Design h-3 comprising derived and/or modified sequence from HRSV(A2)__F_DSCav1_mut6 (opt5)
gggagacccgugacccggaaguuguacggcuacgcgacuuucccucccacaaacccucgcgcccuuccuuuccuacuugggcccggcagaaagcuuaccauggagcugcucauccugaaggccaacgcuauuaccacaauccuuacggccgugaccuucugcuuugcgagcggccagaauauuacagaagaguucuaccaauccaccuguucugcugucagcaaaggguaucugggagcccucagaacaggcugguacaccuccguuaucacaauugaacugucuaacaucaaggagaauaaaugcaacgggaccgacgccaaggugaaacuuaucaagcaggaacuggauaaguauaaaaaugcugugacggaccuccagaugcugauguguagcacccccgccacaggauccggcucugcuauugccagcggggucgcggugugcaagguucugcaccucgagggagaggugaacaaaaucaaguccgcccugcuuagcaccaauaaagcugucgugucucuguccaacggcguuagcgugcucacauuuaagguccuggaucuuaagaauuacauugacaaacagcugcucccuauccugaacaagcaaucuuguuccauuccgaaucccgaaaccgugauggaguuccagcagaaaaacaaucggcugcucgaaaucacgcgcgaguuuagcgugaacgccggcgucacaaccccuguuucuacauauaugcugaccaauuccgagcuucugagccucauuaacgauaugcccaucaccaacgaccagaagaaacugauguccaauaacgugcaaaucgugagacagcagucuuacagcauuaugugcaucauuaaggaagagguccuugcuuaugugguucagcugccucucuacggggugaucgauacacccuguuggaaacugcauacguccccucugugcaccacaaauaccaaggaaggaagcaacauuugucucacacggaccgaccgcggcugguacugcgauaaugccgggucugucuccuucuuuccgcaagcggagacguguaaggugugcagcaacagaguuuucugcgacacaaugaacucucugacccuucccagcgaagugaaucuguguaaugucgauaucuuuaacccuaaauaugacugcaagaucaugaccuccaaaacagaugugucuagcuccgucauuaccagccucggagccaucgugucuuguuacggcaagacaaaaugcacggcuuccaauaagaacaaggggauuaucaaaaccuucagcaauggaugugacuauguuucuaacaagggcguggacacagucuccgugggcaauacccuguacuauguuaacaaacaggaggggcagagccuuuacgugaagggagagcccauuaucaacuuuuaugauccucuggucuuccccuccgacgaauuugaugccucuaucagccaagugaaugagaaaauuaaccagucccucgcuuucauccggaagucugacgaacugcugcacaaugugaacgccggcaagagcacaaccaauauuaugaucacgaccauuaucauuguuaucaucgucauucuccugucccuuaucgccguggggcugcuccuguacugcaaagcucgcagcacaccggugacccugucuaaggaucagcuuuccggaauuaacaauaucgcguucagcaacugaggacuaguggaagcauuuuccuggcugauuaaaagaaauuacucagcuauggucaucuguuccuguuagaaggcuaugcagcauauuauauacuaugcgcauguuaugaaaugcauaauaaaaaauuuuaaaaaaucuaaaagaucuaaaaaaaaaaaaaaaaaaaaaaaaaaaaaaaaaaaaaaaaaaaaaaaaaaaaaaaaaaaaaaaaugcaucccccccccccccccccccccccccccccccaaaggcucuuuucagagccaccagaauu

SEQ ID NO: 6383 - RNA, 1982 nt, Artificial Sequence
  mRNA product Design h-3 comprising derived and/or modified sequence from HRSV(A2)__F_DSCav1_mut6 (opt6)
gggagacccgugacccggaaguuguacggcuacgcgacuuucccucccacaaacccucgcgcccuuccuuuccuacuugggcccggcagaaagcuuaccauggaacuauuaaucuuaaaagcaaaugcuauaaccacaauauuaacagcaguaacauucuguuuugccuccggacaaaacauaacagaagaauuuuaucaaucaacaugcucugcaguauccaaagguuacuuaggcgcacuacgcacuggaugguauacaucaguaauaacaauagaacuaucaaacauaaaagaaaauaaauguaacgguacugacgcaaaagugaaacuaauuaaacaagaacucgacaaauacaaaaaugcuguaacagaccuacaaaugcuaaugugcucaacacccgcaaccggaucaggaucagccauagccuccggagucgcaguaugcaaaguauuacaucuugaaggagaaguaaauaaaauaaaaucagcauuacuauccacaaauaaagccguaguaucacuaucaaacgguguauccguccuuacauucaaaguauuagaucuaaaaaacuacauagauaaacaacuacuacccaucuuaaacaaacaaucaugcucaauucccaacccagaaacagucauggaauuucaacaaaaaaacaacagacucuuagaaauaacacgagaauuuucaguaaacgcaggaguaaccacaccaguaaguacauacaugcucaccaacucagaauuauuaucacuuauuaacgacaugccaauuacaaacgaccaaaaaaaauuaaugucaaacaauguccaaauuguuagacaacaaucauacucuauaauguguauaauaaaagaagaaguacuagcuuacguaguucaauuaccacuauauggcguaauagauacaccuugcuggaaacuacauacaucuccauuauguacaacuaacacaaaagaaggaucuaacauaugccuaacacgcacagaucgaggaugguacugcgauaaugcagguuccguaucauucuuuccacaagcagaaacauguaaaguaugcucaaacagaguauucugugacacuaugaacuccuuaacccuacccucagaagucaaucuaugcaacguugacauauuuaacccaaaauacgacuguaaaaucaugacaucuaaaacagacguaucaucaucaguuauuacaucccuaggagcaauaguaucuugcuacggaaaaacaaaauguacagcauccaacaaaaacaaaggaauaaucaaaacauucucaaacggcugcgacuacguaucaaacaaagguguagacacaguaucaguaggaaauacuuuauauuacguaaauaaacaagaaggacaaucucuauacguuaaaggcgaaccuauuauaaacuucuacgacccacucguauucccuucagacgaauuugacgcaucuauaucccaaguuaacgaaaaaaucaaccaaucauuagccuuuauaagaaaauccgacgaauuauuacauaacgucaacgcuggaaaaucaacaacuaacauaaugauaaccacaauaauaauagucaucauaguuauauuacuaagucuaauagccguaggccuccuacuuuauugcaaagcaagaucaacaccaguaacauuauccaaagaccaacucagcggcauaaacaauauagcuuuuucaaacuagggacuaguggaagcauuuuccuggcugauuaaaagaaauuacucagcuauggucaucuguuccuguuagaaggcuaugcagcauauuauauacuaugcgcauguuaugaaaugcauaauaaaaaauuuuaaaaaaucuaaaagaucuaaaaaaaaaaaaaaaaaaaaaaaaaaaaaaaaaaaaaaaaaaaaaaaaaaaaaaaaaaaaaaaaugcaucccccccccccccccccccccccccccccccaaaggcucuuuucagagccaccagaauu

SEQ ID NO: 6384 - RNA, 1982 nt, Artificial Sequence
  mRNA product Design h-3 comprising derived and/or modified sequence from HRSV(A2)__F_DSCav1_mut6 (opt11)
gggagacccgugacccggaaguuguacggcuacgcgacuuucccucccacaaacccucgcgcccuuccuuuccuacuugggcccggcagaaagcuuaccauggaacuccucauccucaaagccaacgcaaucacaaccauacuaacugcaguuacuuucugcuucgcauccggccaaaacaucaccgaagaguucuaccaaucaaccugcuccgcagucuccaaaggauaccucggagcccuucgcaccggcugguacaccuccgucauaaccaucgaacucucaaacauaaaagaaaacaaaugcaacggcacagacgcgaaagucaaacuuaucaaacaagaacucgacaaauacaaaaacgccgucaccgaccugcagaugcucaugugcucaacccccgccacaggaagcggcucugcuaucgcuuccggcgucgccgucugcaaaguccuccaccucgaaggcgaaguaaacaaaaucaagucagcccuccucuccaccaacaaagccgucgucucucucucaaacggcguauccguccucacauucaaaguccucgaccucaaaaacuacaucgacaaacaacuucuccccauccuaaacaaacaaucaugcuccauccccaaccccgaaacagucauggaauuucaacaaaagaacaaccgccucuuagaaaucacccgagaauuuuccgucaacgcgggagucacaacccccguuucuacguauaugcucaccaacuccgaacuccuuucccucauaaacgacaugccaaucaccaacgaccaaaagaaacucaugucaaacaacguccaaaucguccgacaacaauccuacucuauuaugugcaucaucaaagaagaaguucucgccuacgucguccaacuaccccucuacggcgugaucgacacccccugcuggaaacuacacaccucaccccucugcaccaccaacaccaaggaaggcuccaacaucugccucacccgcaccgaccgcggcugguacugcgacaacgcuggcuccgucucauucuucccgcaagccgaaacuugcaaaguaugcuccaacagaguauucugcgacaccaugaacucacuaacccucccuuccgaagucaaccuuugcaacguugacauauucaacccaaaguacgauugcaaaauuaugacauccaaaacagaugucuccuccuccgucaucacaucccucggugccauuguaucaugcuacggaaaaaccaaaugcaccgcauccaacaaaaacaaaggaaucaucaaaaccuucucaaacggcugcgauuacgucucaaacaaaggagucgacacagucuccgucggaaacacccuauacuacgucaacaaacaagaaggccaaucccuguacgucaaaggagaacccaucaucaacuucuacgacccccucgucuucccgagcgacgaguucgacgccuccaucucacaagucaaugaaaagaucaaccaaucccuugccuucauccggaaaucggacgaacuccuacacaacgugaacgcuggaaaaucaaccaccaacaucaugaucacaaccaucauuaucgucaucaucgucauacuccucucccuaaucgccgucggccuccuccuguauugcaaagcucgcuccacccccgucacccuguccaaagaccaacucuccggaaucaacaacaucgccuucucaaacuaaggacuaguggaagcauuuuccuggcugauuaaaagaaauuacucagcuauggucaucuguuccuguuagaaggcuaugcagcauauuauauacuaugcgcauguuaugaaaugcauaauaaaaaauuuuaaaaaaucuaaaagaucuaaaaaaaaaaaaaaaaaaaaaaaaaaaaaaaaaaaaaaaaaaaaaaaaaaaaaaaaaaaaaaaaugcaucccccccccccccccccccccccccccccccaaaggcucuuuucagagccaccagaauu

SEQ ID NO: 6385 - RNA, 2045 nt, Artificial Sequence
  mRNA product Design h-4 comprising derived and/or modified sequence from HRSV(A2)__F_DSCav1_mut6 (opt1)
gggagagggcgcuuggcuugcaaggacccugagcugcggcauugaagcacacccaacccaacucgacugaagucagccucacugaaccggaucugagaaucuucucucucugggcuugccagggcucuccgaaccuagcuagcauccucuucaauuccaacuagaaagcuuaccauggagcugcucauccugaaggccaacgccaucaccaccauccugacggcggugaccuucugcuucgccagcggccagaacaucaccgaggaguucuaccaguccacgugcagcgccgucuccaagggguaccucggcgcccugcggaccggcugguacaccuccgugaucaccaucgagcugagcaacaucaaggagaacaagugcaacgggaccgacgccaaggugaagcucaucaagcaggagcuggacaaguacaagaacgcggucacggaccugcagaugcugaugugcuccaccccggcaaccggcuccggcuccgccaucgcgagcggcgucgccgugugcaaggugcugcaccucgagggggaggucaacaagaucaagagcgcccugcuguccaccaacaaggccguggugagccucuccaacggcgucagcgugcugaccuucaaggugcuggaccucaagaacuacaucgacaagcagcugcugcccauccugaacaagcagagcugcuccauccccaaccccgagacggugauggaguuccagcagaagaacaaccggcuccuggagaucacccgcgaguucagcgugaacgccggggucaccacccccguguccacguacaugcugaccaacagcgagcuccugucccugaucaacgacaugccgaucaccaacgaccagaagaagcucaugagcaacaacgugcagaucguccggcagcaguccuacagcaucaugugcaucaucaaggaggaggugcuggcguacgugguccagcugccccucuacggcgugaucgacacccccugcuggaagcugcacacgagcccccugugcaccaccaacaccaaggagggguccaacaucugccucacgcgcaccgaccggggcugguacugcgacaacgccggcagcgucuccuucuucccgcaggccgagaccugcaaggugugcagcaaccgcguguucugcgacaccaugaacucccugacgcugcccagcgagguaaaccucugcaacgucgacaucuucaaccccaaguacgacugcaagaucaugaccuccaagaccgacgugagcuccagcgugaucaccucccugggggccaucgucagcugcuacggcaagacgaagugcaccgccagcaacaagaacaaggggaucaucaagaccuucuccaacggcugcgacuacgugagcaacaagggcguggacaccguguccgucgggaacacccuguacuacgugaacaagcaggagggccagagccucuacgugaagggggagcccaucaucaacuucuacgacccgcuggucuuccccuccgacgaguucgacgcgagcaucucccaggugaacgagaagaucaaccagagccuggccuucauccgcaaguccgacgagcugcuccacaacgugaacgccggcaagagcacgaccaacaucaugaucaccaccaucaucaucgucaucaucgugauccugcugucccucaucgccguggggcugcugcucuacugcaaggcccggagcacgcccgucacccuguccaaggaccagcugagcggcaucaacaacaucgcguucuccaacugaggacuaguaauaaggaaacuguaugaaugucugugggcaggaagugaagagauccuucuguaaagguuuuuggaauuaugucugcugaauaauaaacuuuuuugaaauaauaaaucugguagaaaaaugagaucuaaaaaaaaaaaaaaaaaaaaaaaaaaaaaaaaaaaaaaaaaaaaaaaaaaaaaaaaaaaaaaaaugcaucccccccccccccccccccccccccccccccaaaggcucuuuucagagccaccagaauu

SEQ ID NO: 6386 - RNA, 2045 nt, Artificial Sequence
  mRNA product Design h-4 comprising derived and/or modified sequence from HRSV(A2)__F_DSCav1_mut6 (opt1)
gggagagggcgcuuggcuugcaaggacccugagcugcggcauugaagcacacccaacccaacucgacugaagucagccucacugaaccggaucugagaaucuucucucucugggcuugccagggcucuccgaaccuagcuagcauccucuucaauuccaacuagaaagcuuaccauggagcugcucauccugaaggccaacgccaucaccaccauccugacggcggugaccuucugcuucgccagcggccagaacaucaccgaggaguucuaccaguccacgugcagcgccgucuccaagggguaccucggcgcccugcgcaccgggugguacaccagcgugaucaccaucgagcuguccaacaucaaggagaacaagugcaacggcaccgacgccaaggugaagcucaucaagcaggagcuggacaaguacaagaacgcggucacggaccugcagaugcucaugugcagcacccccgccaccggguccggcagcgccaucgccuccggcguggcggugugcaagguccugcaccuggagggggaggugaacaagaucaagagcgcccuccuguccaccaacaaggccguggucagccuguccaacggcgugagcgugcucacguucaagguccuggaccugaagaacuacaucgacaagcagcuccugccgauccugaacaagcaguccugcagcauccccaaccccgagaccgugauggaguuccagcagaagaacaaccggcuccuggagaucacccgcgaguucuccgugaacgccggggucaccacgcccgugagcaccuacaugcugaccaacuccgagcuccugagccugaucaacgacaugccgaucaccaacgaccagaagaagcucaugagcaacaacgugcagaucguccggcagcaguccuacagcaucaugugcaucaucaaggaggaggugcuggccuacgugguccagcugccccucuacggcgugaucgacacgcccugcuggaagcugcacaccagcccccugugcaccaccaacacgaaggaggggagcaacaucugccucacccgcaccgaccggggcugguacugcgacaacgcgggcuccgugagcuucuucccgcaggccgagaccugcaaggucugcuccaaccgcguguucugcgacacgaugaacagccugacccugcccuccgaggucaaccucugcaacguggacaucuucaaccccaaguacgacugcaagaucaugaccagcaagaccgacguguccagcuccgucaucacgagccugggggccaucguguccugcuacggcaagaccaagugcaccgccagcaacaagaacaaggggaucaucaagaccuucuccaacggcugcgacuacgugagcaacaagggcgucgacacgguguccguggggaacacccuguacuacgucaacaagcaggagggccagagccucuacgugaagggggagcccaucaucaacuucuacgacccgcugguguuccccagcgacgaguucgacgccuccaucagccaggucaacgagaagaucaaccagucccuggcguucauccggaaguccgacgagcuccugcacaacgugaacgccggcaaguccaccaccaacaucaugaucaccacgaucaucaucgugaucaucgucauccugcucagccugaucgccguggggcugcuccuguacugcaaggcccgcuccacccccgugacccugagcaaggaccagcuguccggcaucaacaacaucgccuucagcaacugaggacuaguaauaaggaaacuguaugaaugucugugggcaggaagugaagagauccuucuguaaagguuuuuggaauuaugucugcugaauaauaaacuuuuuugaaauaauaaaucugguagaaaaaugagaucuaaaaaaaaaaaaaaaaaaaaaaaaaaaaaaaaaaaaaaaaaaaaaaaaaaaaaaaaaaaaaaaaugcaucccccccccccccccccccccccccccccccaaaggcucuuuucagagccaccagaauu

SEQ ID NO: 6387 - RNA, 2045 nt, Artificial Sequence
  mRNA product Design h-4 comprising derived and/or modified sequence from HRSV(A2)__F_DSCav1_mut6 (opt2)
gggagagggcgcuuggcuugcaaggacccugagcugcggcauugaagcacacccaacccaacucgacugaagucagccucacugaaccggaucugagaaucuucucucucugggcuugccagggcucuccgaaccuagcuagcauccucuucaauuccaacuagaaagcuuaccauggagcuccucauccucaaggccaacgccaucaccaccauccucaccgccgucaccuucugcuucgccuccggccagaacaucaccgaggaguucuaccaguccaccugcuccgccgucuccaagggcuaccucggcgcccuccgcaccggcugguacaccuccgucaucaccaucgagcucuccaacaucaaggagaacaagugcaacggcaccgacgccaaggucaagcucaucaagcaggagcucgacaaguacaagaacgccgucaccgaccuccagaugcucaugugcuccacccccgccaccggcuccggcuccgccaucgccuccggcgucgccgucugcaagguccuccaccucgagggcgaggucaacaagaucaaguccgcccuccucuccaccaacaaggccgucgucucccucuccaacggcgucuccguccucaccuucaagguccucgaccucaagaacuacaucgacaagcagcuccuccccauccucaacaagcaguccugcuccauccccaaccccgagaccgucauggaguuccagcagaagaacaaccgccuccucgagaucacccgcgaguucuccgucaacgccggcgucaccacccccgucuccaccuacaugcucaccaacuccgagcuccucucccucaucaacgacaugcccaucaccaacgaccagaagaagcucauguccaacaacguccagaucguccgccagcaguccuacuccaucaugugcaucaucaaggaggagguccucgccuacgucguccagcucccccucuacggcgucaucgacacccccugcuggaagcuccacaccuccccccucugcaccaccaacaccaaggagggcuccaacaucugccucacccgcaccgaccgcggcugguacugcgacaacgccggcuccgucuccuucuucccccaggccgagaccugcaaggucugcuccaaccgcgucuucugcgacaccaugaacucccucacccuccccuccgaggucaaccucugcaacgucgacaucuucaaccccaaguacgacugcaagaucaugaccuccaagaccgacgucuccuccuccgucaucaccucccucggcgccaucgucuccugcuacggcaagaccaagugcaccgccuccaacaagaacaagggcaucaucaagaccuucuccaacggcugcgacuacgucuccaacaagggcgucgacaccgucuccgucggcaacacccucuacuacgucaacaagcaggagggccagucccucuacgucaagggcgagcccaucaucaacuucuacgacccccucgucuuccccuccgacgaguucgacgccuccaucucccaggucaacgagaagaucaaccagucccucgccuucauccgcaaguccgacgagcuccuccacaacgucaacgccggcaaguccaccaccaacaucaugaucaccaccaucaucaucgucaucaucgucauccuccucucccucaucgccgucggccuccuccucuacugcaaggcccgcuccacccccgucacccucuccaaggaccagcucuccggcaucaacaacaucgccuucuccaacugaggacuaguaauaaggaaacuguaugaaugucugugggcaggaagugaagagauccuucuguaaagguuuuuggaauuaugucugcugaauaauaaacuuuuuugaaauaauaaaucugguagaaaaaugagaucuaaaaaaaaaaaaaaaaaaaaaaaaaaaaaaaaaaaaaaaaaaaaaaaaaaaaaaaaaaaaaaaaugcaucccccccccccccccccccccccccccccccaaaggcucuuuucagagccaccagaauu

SEQ ID NO: 6388 - RNA, 2045 nt, Artificial Sequence
  mRNA product Design h-4 comprising derived and/or modified sequence from HRSV(A2)__F_DSCav1_mut6 (opt3)
gggagagggcgcuuggcuugcaaggacccugagcugcggcauugaagcacacccaacccaacucgacugaagucagccucacugaaccggaucugagaaucuucucucucugggcuugccagggcucuccgaaccuagcuagcauccucuucaauuccaacuagaaagcuuaccauggagcugcucauccuuaaggccaacgcuauuaccacaauacugacugcagugacguucugcuuugccagcggccagaauaucaccgaagaguucuaccaauccacauguucugcggucucaaaaggguauuugggagcuuuaagaacugguugguacaccaguguuauuacaaucgaacugagcaacauuaaggagaauaaaugcaacggcaccgacgccaaggugaaacuaaucaagcaggaacucgauaaguauaaaaaugcaguaacugaccugcagaugcuuauguguuccacacccgccaccgggucuggaucggcuauagcaucaggcguggccgucugcaaggugcugcacuuggagggugagguuaacaaaaucaagagcgcucuccugaguacgaauaaagccguggucucccugucuaacggggugagcguacucacuuuuaagguuuuagaucugaagaauuacauugacaaacagcuuuugccuauccugaacaagcaauccuguucaauuccaaauccggaaaccgugauggaguuccagcagaaaaacaauaggcuacucgaaaucacacgggaguuuagugucaacgcgggagugacuacccccgugagcacauauaugcugaccaauucugagcuucuguccuugauaaacgauaugccuauuacgaacgaccagaagaaacucaugucaaauaacguccaaaucguucgccagcagagcuacaguauuaugugcaucaucaaggaagaggugcuggcauauguagugcaguuaccacuguacggcgucauugauacucccuguuggaaacuccauacaucuccucuuugcaccacuaauacaaaggaaggcuccaacauaugucugacccgaacggaccgugggugguacugcgauaaugccggaagcgugucguucuuuccacaagcugagaccuguaagguuugcucuaacagaguguucugcgacacaaugaacuccuugacucuacccucagaagucaaucuguguaauguggauaucuuuaacccuaaauaugacugcaagauuaugaccaguaaaacagauguaagcuccucuguuaucacuagccucggugccauagugucauguuacggcaagaccaaaugcacagcaaguaauaagaacaaggggauuaucaaaaccuucuccaauggaugugacuaugucagcaacaagggcguggacacugucucuguggguaauacgcuguacuauguuaacaaacaggaggggcagucacuuuacgugaagggagagccaaucauuaacuuuuaugauccgcugguauuccccagugacgaauuugaugcuagcaucucccaagucaaugagaaaauuaaccagucuuuggccuucauaaggaagucggacgaacuccugcacaaugugaacgcgggcaagagcacaaccaauaucaugauuacuaccaucaucauuguuauaaucgugauuuuacugucccuaaucgccgucggccuccugcuuuacugcaaagcacggucaacaccugugaccuugaguaaggaucagcugucugggauuaacaauaucgcuuucagcaacugaggacuaguaauaaggaaacuguaugaaugucugugggcaggaagugaagagauccuucuguaaagguuuuuggaauuaugucugcugaauaauaaacuuuuuugaaauaauaaaucugguagaaaaaugagaucuaaaaaaaaaaaaaaaaaaaaaaaaaaaaaaaaaaaaaaaaaaaaaaaaaaaaaaaaaaaaaaaaugcaucccccccccccccccccccccccccccccccaaaggcucuuuucagagccaccagaauu

SEQ ID NO: 6389 - RNA, 2045 nt, Artificial Sequence
  mRNA product Design h-4 comprising derived and/or modified sequence from HRSV(A2)__F_DSCav1_mut6 (opt4)
gggagagggcgcuuggcuugcaaggacccugagcugcggcauugaagcacacccaacccaacucgacugaagucagccucacugaaccggaucugagaaucuucucucucugggcuugccagggcucuccgaaccuagcuagcauccucuucaauuccaacuagaaagcuuaccauggagcugcugauccugaaggccaacgccaucaccaccauccugaccgccgugaccuucugcuucgccagcggccagaacaucaccgaggaguucuaccagagcaccugcagcgccgugagcaagggcuaccugggcgcccugagaaccggcugguacaccagcgugaucaccaucgagcugagcaacaucaaggagaacaagugcaacggcaccgacgccaaggugaagcugaucaagcaggagcuggacaaguacaagaacgccgugaccgaccugcagaugcugaugugcagcacccccgccaccggcagcggcagcgccaucgccagcggcguggccgugugcaaggugcugcaccuggagggcgaggugaacaagaucaagagcgcccugcugagcaccaacaaggccguggugagccugagcaacggcgugagcgugcugaccuucaaggugcuggaccugaagaacuacaucgacaagcagcugcugcccauccugaacaagcagagcugcagcauccccaaccccgagaccgugauggaguuccagcagaagaacaacagacugcuggagaucaccagagaguucagcgugaacgccggcgugaccacccccgugagcaccuacaugcugaccaacagcgagcugcugagccugaucaacgacaugcccaucaccaacgaccagaagaagcugaugagcaacaacgugcagaucgugagacagcagagcuacagcaucaugugcaucaucaaggaggaggugcuggccuacguggugcagcugccccuguacggcgugaucgacacccccugcuggaagcugcacaccagcccccugugcaccaccaacaccaaggagggcagcaacaucugccugaccagaaccgacagaggcugguacugcgacaacgccggcagcgugagcuucuucccccaggccgagaccugcaaggugugcagcaacagaguguucugcgacaccaugaacagccugacccugcccagcgaggugaaccugugcaacguggacaucuucaaccccaaguacgacugcaagaucaugaccagcaagaccgacgugagcagcagcgugaucaccagccugggcgccaucgugagcugcuacggcaagaccaagugcaccgccagcaacaagaacaagggcaucaucaagaccuucagcaacggcugcgacuacgugagcaacaagggcguggacaccgugagcgugggcaacacccuguacuacgugaacaagcaggagggccagagccuguacgugaagggcgagcccaucaucaacuucuacgacccccugguguuccccagcgacgaguucgacgccagcaucagccaggugaacgagaagaucaaccagagccuggccuucaucagaaagagcgacgagcugcugcacaacgugaacgccggcaagagcaccaccaacaucaugaucaccaccaucaucaucgugaucaucgugauccugcugagccugaucgccgugggccugcugcuguacugcaaggccagaagcacccccgugacccugagcaaggaccagcugagcggcaucaacaacaucgccuucagcaacugaggacuaguaauaaggaaacuguaugaaugucugugggcaggaagugaagagauccuucuguaaagguuuuuggaauuaugucugcugaauaauaaacuuuuuugaaauaauaaaucugguagaaaaaugagaucuaaaaaaaaaaaaaaaaaaaaaaaaaaaaaaaaaaaaaaaaaaaaaaaaaaaaaaaaaaaaaaaaugcaucccccccccccccccccccccccccccccccaaaggcucuuuucagagccaccagaauu

SEQ ID NO: 6390 - RNA, 2045 nt, Artificial Sequence
  mRNA product Design h-4 comprising derived and/or modified sequence from HRSV(A2)__F_DSCav1_mut6 (opt5)
gggagagggcgcuuggcuugcaaggacccugagcugcggcauugaagcacacccaacccaacucgacugaagucagccucacugaaccggaucugagaaucuucucucucugggcuugccagggcucuccgaaccuagcuagcauccucuucaauuccaacuagaaagcuuaccauggagcugcucauccugaaggccaacgcuauuaccacaauccuuacggccgugaccuucugcuuugcgagcggccagaauauuacagaagaguucuaccaauccaccuguucugcugucagcaaaggguaucugggagcccucagaacaggcugguacaccuccguuaucacaauugaacugucuaacaucaaggagaauaaaugcaacgggaccgacgccaaggugaaacuuaucaagcaggaacuggauaaguauaaaaaugcugugacggaccuccagaugcugauguguagcacccccgccacaggauccggcucugcuauugccagcggggucgcggugugcaagguucugcaccucgagggagaggugaacaaaaucaaguccgcccugcuuagcaccaauaaagcugucgugucucuguccaacggcguuagcgugcucacauuuaagguccuggaucuuaagaauuacauugacaaacagcugcucccuauccugaacaagcaaucuuguuccauuccgaaucccgaaaccgugauggaguuccagcagaaaaacaaucggcugcucgaaaucacgcgcgaguuuagcgugaacgccggcgucacaaccccuguuucuacauauaugcugaccaauuccgagcuucugagccucauuaacgauaugcccaucaccaacgaccagaagaaacugauguccaauaacgugcaaaucgugagacagcagucuuacagcauuaugugcaucauuaaggaagagguccuugcuuaugugguucagcugccucucuacggggugaucgauacacccuguuggaaacugcauacguccccucugugcaccacaaauaccaaggaaggaagcaacauuugucucacacggaccgaccgcggcugguacugcgauaaugccgggucugucuccuucuuuccgcaagcggagacguguaaggugugcagcaacagaguuuucugcgacacaaugaacucucugacccuucccagcgaagugaaucuguguaaugucgauaucuuuaacccuaaauaugacugcaagaucaugaccuccaaaacagaugugucuagcuccgucauuaccagccucggagccaucgugucuuguuacggcaagacaaaaugcacggcuuccaauaagaacaaggggauuaucaaaaccuucagcaauggaugugacuauguuucuaacaagggcguggacacagucuccgugggcaauacccuguacuauguuaacaaacaggaggggcagagccuuuacgugaagggagagcccauuaucaacuuuuaugauccucuggucuuccccuccgacgaauuugaugccucuaucagccaagugaaugagaaaauuaaccagucccucgcuuucauccggaagucugacgaacugcugcacaaugugaacgccggcaagagcacaaccaauauuaugaucacgaccauuaucauuguuaucaucgucauucuccugucccuuaucgccguggggcugcuccuguacugcaaagcucgcagcacaccggugacccugucuaaggaucagcuuuccggaauuaacaauaucgcguucagcaacugaggacuaguaauaaggaaacuguaugaaugucugugggcaggaagugaagagauccuucuguaaagguuuuuggaauuaugucugcugaauaauaaacuuuuuugaaauaauaaaucugguagaaaaaugagaucuaaaaaaaaaaaaaaaaaaaaaaaaaaaaaaaaaaaaaaaaaaaaaaaaaaaaaaaaaaaaaaaaugcaucccccccccccccccccccccccccccccccaaaggcucuuuucagagccaccagaauu

SEQ ID NO: 6391 - RNA, 2045 nt, Artificial Sequence
  mRNA product Design h-4 comprising derived and/or modified sequence from HRSV(A2)__F_DSCav1_mut6 (opt6)
gggagagggcgcuuggcuugcaaggacccugagcugcggcauugaagcacacccaacccaacucgacugaagucagccucacugaaccggaucugagaaucuucucucucugggcuugccagggcucuccgaaccuagcuagcauccucuucaauuccaacuagaaagcuuaccauggaacuauuaaucuuaaaagcaaaugcuauaaccacaauauuaacagcaguaacauucuguuuugccuccggacaaaacauaacagaagaauuuuaucaaucaacaugcucugcaguauccaaagguuacuuaggcgcacuacgcacuggaugguauacaucaguaauaacaauagaacuaucaaacauaaaagaaaauaaauguaacgguacugacgcaaaagugaaacuaauuaaacaagaacucgacaaauacaaaaaugcuguaacagaccuacaaaugcuaaugugcucaacacccgcaaccggaucaggaucagccauagccuccggagucgcaguaugcaaaguauuacaucuugaaggagaaguaaauaaaauaaaaucagcauuacuauccacaaauaaagccguaguaucacuaucaaacgguguauccguccuuacauucaaaguauuagaucuaaaaaacuacauagauaaacaacuacuacccaucuuaaacaaacaaucaugcucaauucccaacccagaaacagucauggaauuucaacaaaaaaacaacagacucuuagaaauaacacgagaauuuucaguaaacgcaggaguaaccacaccaguaaguacauacaugcucaccaacucagaauuauuaucacuuauuaacgacaugccaauuacaaacgaccaaaaaaaauuaaugucaaacaauguccaaauuguuagacaacaaucauacucuauaauguguauaauaaaagaagaaguacuagcuuacguaguucaauuaccacuauauggcguaauagauacaccuugcuggaaacuacauacaucuccauuauguacaacuaacacaaaagaaggaucuaacauaugccuaacacgcacagaucgaggaugguacugcgauaaugcagguuccguaucauucuuuccacaagcagaaacauguaaaguaugcucaaacagaguauucugugacacuaugaacuccuuaacccuacccucagaagucaaucuaugcaacguugacauauuuaacccaaaauacgacuguaaaaucaugacaucuaaaacagacguaucaucaucaguuauuacaucccuaggagcaauaguaucuugcuacggaaaaacaaaauguacagcauccaacaaaaacaaaggaauaaucaaaacauucucaaacggcugcgacuacguaucaaacaaagguguagacacaguaucaguaggaaauacuuuauauuacguaaauaaacaagaaggacaaucucuauacguuaaaggcgaaccuauuauaaacuucuacgacccacucguauucccuucagacgaauuugacgcaucuauaucccaaguuaacgaaaaaaucaaccaaucauuagccuuuauaagaaaauccgacgaauuauuacauaacgucaacgcuggaaaaucaacaacuaacauaaugauaaccacaauaauaauagucaucauaguuauauuacuaagucuaauagccguaggccuccuacuuuauugcaaagcaagaucaacaccaguaacauuauccaaagaccaacucagcggcauaaacaauauagcuuuuucaaacuagggacuaguaauaaggaaacuguaugaaugucugugggcaggaagugaagagauccuucuguaaagguuuuuggaauuaugucugcugaauaauaaacuuuuuugaaauaauaaaucugguagaaaaaugagaucuaaaaaaaaaaaaaaaaaaaaaaaaaaaaaaaaaaaaaaaaaaaaaaaaaaaaaaaaaaaaaaaaugcaucccccccccccccccccccccccccccccccaaaggcucuuuucagagccaccagaauu

SEQ ID NO: 6392 - RNA, 2045 nt, Artificial Sequence
  mRNA product Design h-4 comprising derived and/or modified sequence from HRSV(A2)__F_DSCav1_mut6 (opt11)
gggagagggcgcuuggcuugcaaggacccugagcugcggcauugaagcacacccaacccaacucgacugaagucagccucacugaaccggaucugagaaucuucucucucugggcuugccagggcucuccgaaccuagcuagcauccucuucaauuccaacuagaaagcuuaccauggaacuccucauccucaaagccaacgcaaucacaaccauacuaacugcaguuacuuucugcuucgcauccggccaaaacaucaccgaagaguucuaccaaucaaccugcuccgcagucuccaaaggauaccucggagcccuucgcaccggcugguacaccuccgucauaaccaucgaacucucaaacauaaaagaaaacaaaugcaacggcacagacgcgaaagucaaacuuaucaaacaagaacucgacaaauacaaaaacgccgucaccgaccugcagaugcucaugugcucaacccccgccacaggaagcggcucugcuaucgcuuccggcgucgccgucugcaaaguccuccaccucgaaggcgaaguaaacaaaaucaagucagcccuccucuccaccaacaaagccgucgucucucucucaaacggcguauccguccucacauucaaaguccucgaccucaaaaacuacaucgacaaacaacuucuccccauccuaaacaaacaaucaugcuccauccccaaccccgaaacagucauggaauuucaacaaaagaacaaccgccucuuagaaaucacccgagaauuuuccgucaacgcgggagucacaacccccguuucuacguauaugcucaccaacuccgaacuccuuucccucauaaacgacaugccaaucaccaacgaccaaaagaaacucaugucaaacaacguccaaaucguccgacaacaauccuacucuauuaugugcaucaucaaagaagaaguucucgccuacgucguccaacuaccccucuacggcgugaucgacacccccugcuggaaacuacacaccucaccccucugcaccaccaacaccaaggaaggcuccaacaucugccucacccgcaccgaccgcggcugguacugcgacaacgcuggcuccgucucauucuucccgcaagccgaaacuugcaaaguaugcuccaacagaguauucugcgacaccaugaacucacuaacccucccuuccgaagucaaccuuugcaacguugacauauucaacccaaaguacgauugcaaaauuaugacauccaaaacagaugucuccuccuccgucaucacaucccucggugccauuguaucaugcuacggaaaaaccaaaugcaccgcauccaacaaaaacaaaggaaucaucaaaaccuucucaaacggcugcgauuacgucucaaacaaaggagucgacacagucuccgucggaaacacccuauacuacgucaacaaacaagaaggccaaucccuguacgucaaaggagaacccaucaucaacuucuacgacccccucgucuucccgagcgacgaguucgacgccuccaucucacaagucaaugaaaagaucaaccaaucccuugccuucauccggaaaucggacgaacuccuacacaacgugaacgcuggaaaaucaaccaccaacaucaugaucacaaccaucauuaucgucaucaucgucauacuccucucccuaaucgccgucggccuccuccuguauugcaaagcucgcuccacccccgucacccuguccaaagaccaacucuccggaaucaacaacaucgccuucucaaacuaaggacuaguaauaaggaaacuguaugaaugucugugggcaggaagugaagagauccuucuguaaagguuuuuggaauuaugucugcugaauaauaaacuuuuuugaaauaauaaaucugguagaaaaaugagaucuaaaaaaaaaaaaaaaaaaaaaaaaaaaaaaaaaaaaaaaaaaaaaaaaaaaaaaaaaaaaaaaaugcaucccccccccccccccccccccccccccccccaaaggcucuuuucagagccaccagaauu

SEQ ID NO: 6393 - RNA, 2061 nt, Artificial Sequence
  mRNA product Design h-5 comprising derived and/or modified sequence from HRSV(A2)__F_DSCav1_mut6 (opt1)
gggagagggcgcuuggcuugcaaggacccugagcugcggcauugaagcacacccaacccaacucgacugaagucagccucacugaaccggaucugagaaucuucucucucugggcuugccagggcucuccgaaccuagcuagcauccucuucaauuccaacuagaaagcuuaccauggagcugcucauccugaaggccaacgccaucaccaccauccugacggcggugaccuucugcuucgccagcggccagaacaucaccgaggaguucuaccaguccacgugcagcgccgucuccaagggguaccucggcgcccugcggaccggcugguacaccuccgugaucaccaucgagcugagcaacaucaaggagaacaagugcaacgggaccgacgccaaggugaagcucaucaagcaggagcuggacaaguacaagaacgcggucacggaccugcagaugcugaugugcuccaccccggcaaccggcuccggcuccgccaucgcgagcggcgucgccgugugcaaggugcugcaccucgagggggaggucaacaagaucaagagcgcccugcuguccaccaacaaggccguggugagccucuccaacggcgucagcgugcugaccuucaaggugcuggaccucaagaacuacaucgacaagcagcugcugcccauccugaacaagcagagcugcuccauccccaaccccgagacggugauggaguuccagcagaagaacaaccggcuccuggagaucacccgcgaguucagcgugaacgccggggucaccacccccguguccacguacaugcugaccaacagcgagcuccugucccugaucaacgacaugccgaucaccaacgaccagaagaagcucaugagcaacaacgugcagaucguccggcagcaguccuacagcaucaugugcaucaucaaggaggaggugcuggcguacgugguccagcugccccucuacggcgugaucgacacccccugcuggaagcugcacacgagcccccugugcaccaccaacaccaaggagggguccaacaucugccucacgcgcaccgaccggggcugguacugcgacaacgccggcagcgucuccuucuucccgcaggccgagaccugcaaggugugcagcaaccgcguguucugcgacaccaugaacucccugacgcugcccagcgagguaaaccucugcaacgucgacaucuucaaccccaaguacgacugcaagaucaugaccuccaagaccgacgugagcuccagcgugaucaccucccugggggccaucgucagcugcuacggcaagacgaagugcaccgccagcaacaagaacaaggggaucaucaagaccuucuccaacggcugcgacuacgugagcaacaagggcguggacaccguguccgucgggaacacccuguacuacgugaacaagcaggagggccagagccucuacgugaagggggagcccaucaucaacuucuacgacccgcuggucuuccccuccgacgaguucgacgcgagcaucucccaggugaacgagaagaucaaccagagccuggccuucauccgcaaguccgacgagcugcuccacaacgugaacgccggcaagagcacgaccaacaucaugaucaccaccaucaucaucgucaucaucgugauccugcugucccucaucgccguggggcugcugcucuacugcaaggcccggagcacgcccgucacccuguccaaggaccagcugagcggcaucaacaacaucgcguucuccaacugaggacuaguacuggcugcaucucccuuuccucuguccuccauccuucucccaggauggugaagggggaccugguacccagugauccccaccccaggauccuaaaucaugacuuaccugcuaauaaaaacucauuggaaaagugagaagaucuaaaaaaaaaaaaaaaaaaaaaaaaaaaaaaaaaaaaaaaaaaaaaaaaaaaaaaaaaaaaaaaaugcaucccccccccccccccccccccccccccccccaaaggcucuuuucagagccaccagaauu

SEQ ID NO: 6394 - RNA, 2061 nt, Artificial Sequence
  mRNA product Design h-5 comprising derived and/or modified sequence from HRSV(A2)__F_DSCav1_mut6 (opt1)
gggagagggcgcuuggcuugcaaggacccugagcugcggcauugaagcacacccaacccaacucgacugaagucagccucacugaaccggaucugagaaucuucucucucugggcuugccagggcucuccgaaccuagcuagcauccucuucaauuccaacuagaaagcuuaccauggagcugcucauccugaaggccaacgccaucaccaccauccugacggcggugaccuucugcuucgccagcggccagaacaucaccgaggaguucuaccaguccacgugcagcgccgucuccaagggguaccucggcgcccugcgcaccgggugguacaccagcgugaucaccaucgagcuguccaacaucaaggagaacaagugcaacggcaccgacgccaaggugaagcucaucaagcaggagcuggacaaguacaagaacgcggucacggaccugcagaugcucaugugcagcacccccgccaccggguccggcagcgccaucgccuccggcguggcggugugcaagguccugcaccuggagggggaggugaacaagaucaagagcgcccuccuguccaccaacaaggccguggucagccuguccaacggcgugagcgugcucacguucaagguccuggaccugaagaacuacaucgacaagcagcuccugccgauccugaacaagcaguccugcagcauccccaaccccgagaccgugauggaguuccagcagaagaacaaccggcuccuggagaucacccgcgaguucuccgugaacgccggggucaccacgcccgugagcaccuacaugcugaccaacuccgagcuccugagccugaucaacgacaugccgaucaccaacgaccagaagaagcucaugagcaacaacgugcagaucguccggcagcaguccuacagcaucaugugcaucaucaaggaggaggugcuggccuacgugguccagcugccccucuacggcgugaucgacacgcccugcuggaagcugcacaccagcccccugugcaccaccaacacgaaggaggggagcaacaucugccucacccgcaccgaccggggcugguacugcgacaacgcgggcuccgugagcuucuucccgcaggccgagaccugcaaggucugcuccaaccgcguguucugcgacacgaugaacagccugacccugcccuccgaggucaaccucugcaacguggacaucuucaaccccaaguacgacugcaagaucaugaccagcaagaccgacguguccagcuccgucaucacgagccugggggccaucguguccugcuacggcaagaccaagugcaccgccagcaacaagaacaaggggaucaucaagaccuucuccaacggcugcgacuacgugagcaacaagggcgucgacacgguguccguggggaacacccuguacuacgucaacaagcaggagggccagagccucuacgugaagggggagcccaucaucaacuucuacgacccgcugguguuccccagcgacgaguucgacgccuccaucagccaggucaacgagaagaucaaccagucccuggcguucauccggaaguccgacgagcuccugcacaacgugaacgccggcaaguccaccaccaacaucaugaucaccacgaucaucaucgugaucaucgucauccugcucagccugaucgccguggggcugcuccuguacugcaaggcccgcuccacccccgugacccugagcaaggaccagcuguccggcaucaacaacaucgccuucagcaacugaggacuaguacuggcugcaucucccuuuccucuguccuccauccuucucccaggauggugaagggggaccugguacccagugauccccaccccaggauccuaaaucaugacuuaccugcuaauaaaaacucauuggaaaagugagaagaucuaaaaaaaaaaaaaaaaaaaaaaaaaaaaaaaaaaaaaaaaaaaaaaaaaaaaaaaaaaaaaaaaugcaucccccccccccccccccccccccccccccccaaaggcucuuuucagagccaccagaauu

SEQ ID NO: 6395 - RNA, 2061 nt, Artificial Sequence
  mRNA product Design h-5 comprising derived and/or modified sequence from HRSV(A2)__F_DSCav1_mut6 (opt2)
gggagagggcgcuuggcuugcaaggacccugagcugcggcauugaagcacacccaacccaacucgacugaagucagccucacugaaccggaucugagaaucuucucucucugggcuugccagggcucuccgaaccuagcuagcauccucuucaauuccaacuagaaagcuuaccauggagcuccucauccucaaggccaacgccaucaccaccauccucaccgccgucaccuucugcuucgccuccggccagaacaucaccgaggaguucuaccaguccaccugcuccgccgucuccaagggcuaccucggcgcccuccgcaccggcugguacaccuccgucaucaccaucgagcucuccaacaucaaggagaacaagugcaacggcaccgacgccaaggucaagcucaucaagcaggagcucgacaaguacaagaacgccgucaccgaccuccagaugcucaugugcuccacccccgccaccggcuccggcuccgccaucgccuccggcgucgccgucugcaagguccuccaccucgagggcgaggucaacaagaucaaguccgcccuccucuccaccaacaaggccgucgucucccucuccaacggcgucuccguccucaccuucaagguccucgaccucaagaacuacaucgacaagcagcuccuccccauccucaacaagcaguccugcuccauccccaaccccgagaccgucauggaguuccagcagaagaacaaccgccuccucgagaucacccgcgaguucuccgucaacgccggcgucaccacccccgucuccaccuacaugcucaccaacuccgagcuccucucccucaucaacgacaugcccaucaccaacgaccagaagaagcucauguccaacaacguccagaucguccgccagcaguccuacuccaucaugugcaucaucaaggaggagguccucgccuacgucguccagcucccccucuacggcgucaucgacacccccugcuggaagcuccacaccuccccccucugcaccaccaacaccaaggagggcuccaacaucugccucacccgcaccgaccgcggcugguacugcgacaacgccggcuccgucuccuucuucccccaggccgagaccugcaaggucugcuccaaccgcgucuucugcgacaccaugaacucccucacccuccccuccgaggucaaccucugcaacgucgacaucuucaaccccaaguacgacugcaagaucaugaccuccaagaccgacgucuccuccuccgucaucaccucccucggcgccaucgucuccugcuacggcaagaccaagugcaccgccuccaacaagaacaagggcaucaucaagaccuucuccaacggcugcgacuacgucuccaacaagggcgucgacaccgucuccgucggcaacacccucuacuacgucaacaagcaggagggccagucccucuacgucaagggcgagcccaucaucaacuucuacgacccccucgucuuccccuccgacgaguucgacgccuccaucucccaggucaacgagaagaucaaccagucccucgccuucauccgcaaguccgacgagcuccuccacaacgucaacgccggcaaguccaccaccaacaucaugaucaccaccaucaucaucgucaucaucgucauccuccucucccucaucgccgucggccuccuccucuacugcaaggcccgcuccacccccgucacccucuccaaggaccagcucuccggcaucaacaacaucgccuucuccaacugaggacuaguacuggcugcaucucccuuuccucuguccuccauccuucucccaggauggugaagggggaccugguacccagugauccccaccccaggauccuaaaucaugacuuaccugcuaauaaaaacucauuggaaaagugagaagaucuaaaaaaaaaaaaaaaaaaaaaaaaaaaaaaaaaaaaaaaaaaaaaaaaaaaaaaaaaaaaaaaaugcaucccccccccccccccccccccccccccccccaaaggcucuuuucagagccaccagaauu

SEQ ID NO: 6396 - RNA, 2061 nt, Artificial Sequence
  mRNA product Design h-5 comprising derived and/or modified sequence from HRSV(A2)__F_DSCav1_mut6 (opt3)
gggagagggcgcuuggcuugcaaggacccugagcugcggcauugaagcacacccaacccaacucgacugaagucagccucacugaaccggaucugagaaucuucucucucugggcuugccagggcucuccgaaccuagcuagcauccucuucaauuccaacuagaaagcuuaccauggagcugcucauccuuaaggccaacgcuauuaccacaauacugacugcagugacguucugcuuugccagcggccagaauaucaccgaagaguucuaccaauccacauguucugcggucucaaaaggguauuugggagcuuuaagaacugguugguacaccaguguuauuacaaucgaacugagcaacauuaaggagaauaaaugcaacggcaccgacgccaaggugaaacuaaucaagcaggaacucgauaaguauaaaaaugcaguaacugaccugcagaugcuuauguguuccacacccgccaccgggucuggaucggcuauagcaucaggcguggccgucugcaaggugcugcacuuggagggugagguuaacaaaaucaagagcgcucuccugaguacgaauaaagccguggucucccugucuaacggggugagcguacucacuuuuaagguuuuagaucugaagaauuacauugacaaacagcuuuugccuauccugaacaagcaauccuguucaauuccaaauccggaaaccgugauggaguuccagcagaaaaacaauaggcuacucgaaaucacacgggaguuuagugucaacgcgggagugacuacccccgugagcacauauaugcugaccaauucugagcuucuguccuugauaaacgauaugccuauuacgaacgaccagaagaaacucaugucaaauaacguccaaaucguucgccagcagagcuacaguauuaugugcaucaucaaggaagaggugcuggcauauguagugcaguuaccacuguacggcgucauugauacucccuguuggaaacuccauacaucuccucuuugcaccacuaauacaaaggaaggcuccaacauaugucugacccgaacggaccgugggugguacugcgauaaugccggaagcgugucguucuuuccacaagcugagaccuguaagguuugcucuaacagaguguucugcgacacaaugaacuccuugacucuacccucagaagucaaucuguguaauguggauaucuuuaacccuaaauaugacugcaagauuaugaccaguaaaacagauguaagcuccucuguuaucacuagccucggugccauagugucauguuacggcaagaccaaaugcacagcaaguaauaagaacaaggggauuaucaaaaccuucuccaauggaugugacuaugucagcaacaagggcguggacacugucucuguggguaauacgcuguacuauguuaacaaacaggaggggcagucacuuuacgugaagggagagccaaucauuaacuuuuaugauccgcugguauuccccagugacgaauuugaugcuagcaucucccaagucaaugagaaaauuaaccagucuuuggccuucauaaggaagucggacgaacuccugcacaaugugaacgcgggcaagagcacaaccaauaucaugauuacuaccaucaucauuguuauaaucgugauuuuacugucccuaaucgccgucggccuccugcuuuacugcaaagcacggucaacaccugugaccuugaguaaggaucagcugucugggauuaacaauaucgcuuucagcaacugaggacuaguacuggcugcaucucccuuuccucuguccuccauccuucucccaggauggugaagggggaccugguacccagugauccccaccccaggauccuaaaucaugacuuaccugcuaauaaaaacucauuggaaaagugagaagaucuaaaaaaaaaaaaaaaaaaaaaaaaaaaaaaaaaaaaaaaaaaaaaaaaaaaaaaaaaaaaaaaaugcaucccccccccccccccccccccccccccccccaaaggcucuuuucagagccaccagaauu

SEQ ID NO: 6397 - RNA, 2061 nt, Artificial Sequence
  mRNA product Design h-5 comprising derived and/or modified sequence from HRSV(A2)__F_DSCav1_mut6 (opt4)
gggagagggcgcuuggcuugcaaggacccugagcugcggcauugaagcacacccaacccaacucgacugaagucagccucacugaaccggaucugagaaucuucucucucugggcuugccagggcucuccgaaccuagcuagcauccucuucaauuccaacuagaaagcuuaccauggagcugcugauccugaaggccaacgccaucaccaccauccugaccgccgugaccuucugcuucgccagcggccagaacaucaccgaggaguucuaccagagcaccugcagcgccgugagcaagggcuaccugggcgcccugagaaccggcugguacaccagcgugaucaccaucgagcugagcaacaucaaggagaacaagugcaacggcaccgacgccaaggugaagcugaucaagcaggagcuggacaaguacaagaacgccgugaccgaccugcagaugcugaugugcagcacccccgccaccggcagcggcagcgccaucgccagcggcguggccgugugcaaggugcugcaccuggagggcgaggugaacaagaucaagagcgcccugcugagcaccaacaaggccguggugagccugagcaacggcgugagcgugcugaccuucaaggugcuggaccugaagaacuacaucgacaagcagcugcugcccauccugaacaagcagagcugcagcauccccaaccccgagaccgugauggaguuccagcagaagaacaacagacugcuggagaucaccagagaguucagcgugaacgccggcgugaccacccccgugagcaccuacaugcugaccaacagcgagcugcugagccugaucaacgacaugcccaucaccaacgaccagaagaagcugaugagcaacaacgugcagaucgugagacagcagagcuacagcaucaugugcaucaucaaggaggaggugcuggccuacguggugcagcugccccuguacggcgugaucgacacccccugcuggaagcugcacaccagcccccugugcaccaccaacaccaaggagggcagcaacaucugccugaccagaaccgacagaggcugguacugcgacaacgccggcagcgugagcuucuucccccaggccgagaccugcaaggugugcagcaacagaguguucugcgacaccaugaacagccugacccugcccagcgaggugaaccugugcaacguggacaucuucaaccccaaguacgacugcaagaucaugaccagcaagaccgacgugagcagcagcgugaucaccagccugggcgccaucgugagcugcuacggcaagaccaagugcaccgccagcaacaagaacaagggcaucaucaagaccuucagcaacggcugcgacuacgugagcaacaagggcguggacaccgugagcgugggcaacacccuguacuacgugaacaagcaggagggccagagccuguacgugaagggcgagcccaucaucaacuucuacgacccccugguguuccccagcgacgaguucgacgccagcaucagccaggugaacgagaagaucaaccagagccuggccuucaucagaaagagcgacgagcugcugcacaacgugaacgccggcaagagcaccaccaacaucaugaucaccaccaucaucaucgugaucaucgugauccugcugagccugaucgccgugggccugcugcuguacugcaaggccagaagcacccccgugacccugagcaaggaccagcugagcggcaucaacaacaucgccuucagcaacugaggacuaguacuggcugcaucucccuuuccucuguccuccauccuucucccaggauggugaagggggaccugguacccagugauccccaccccaggauccuaaaucaugacuuaccugcuaauaaaaacucauuggaaaagugagaagaucuaaaaaaaaaaaaaaaaaaaaaaaaaaaaaaaaaaaaaaaaaaaaaaaaaaaaaaaaaaaaaaaaugcaucccccccccccccccccccccccccccccccaaaggcucuuuucagagccaccagaauu

SEQ ID NO: 6398 - RNA, 2061 nt, Artificial Sequence
  mRNA product Design h-5 comprising derived and/or modified sequence from HRSV(A2)__F_DSCav1_mut6 (opt5)
gggagagggcgcuuggcuugcaaggacccugagcugcggcauugaagcacacccaacccaacucgacugaagucagccucacugaaccggaucugagaaucuucucucucugggcuugccagggcucuccgaaccuagcuagcauccucuucaauuccaacuagaaagcuuaccauggagcugcucauccugaaggccaacgcuauuaccacaauccuuacggccgugaccuucugcuuugcgagcggccagaauauuacagaagaguucuaccaauccaccuguucugcugucagcaaaggguaucugggagcccucagaacaggcugguacaccuccguuaucacaauugaacugucuaacaucaaggagaauaaaugcaacgggaccgacgccaaggugaaacuuaucaagcaggaacuggauaaguauaaaaaugcugugacggaccuccagaugcugauguguagcacccccgccacaggauccggcucugcuauugccagcggggucgcggugugcaagguucugcaccucgagggagaggugaacaaaaucaaguccgcccugcuuagcaccaauaaagcugucgugucucuguccaacggcguuagcgugcucacauuuaagguccuggaucuuaagaauuacauugacaaacagcugcucccuauccugaacaagcaaucuuguuccauuccgaaucccgaaaccgugauggaguuccagcagaaaaacaaucggcugcucgaaaucacgcgcgaguuuagcgugaacgccggcgucacaaccccuguuucuacauauaugcugaccaauuccgagcuucugagccucauuaacgauaugcccaucaccaacgaccagaagaaacugauguccaauaacgugcaaaucgugagacagcagucuuacagcauuaugugcaucauuaaggaagagguccuugcuuaugugguucagcugccucucuacggggugaucgauacacccuguuggaaacugcauacguccccucugugcaccacaaauaccaaggaaggaagcaacauuugucucacacggaccgaccgcggcugguacugcgauaaugccgggucugucuccuucuuuccgcaagcggagacguguaaggugugcagcaacagaguuuucugcgacacaaugaacucucugacccuucccagcgaagugaaucuguguaaugucgauaucuuuaacccuaaauaugacugcaagaucaugaccuccaaaacagaugugucuagcuccgucauuaccagccucggagccaucgugucuuguuacggcaagacaaaaugcacggcuuccaauaagaacaaggggauuaucaaaaccuucagcaauggaugugacuauguuucuaacaagggcguggacacagucuccgugggcaauacccuguacuauguuaacaaacaggaggggcagagccuuuacgugaagggagagcccauuaucaacuuuuaugauccucuggucuuccccuccgacgaauuugaugccucuaucagccaagugaaugagaaaauuaaccagucccucgcuuucauccggaagucugacgaacugcugcacaaugugaacgccggcaagagcacaaccaauauuaugaucacgaccauuaucauuguuaucaucgucauucuccugucccuuaucgccguggggcugcuccuguacugcaaagcucgcagcacaccggugacccugucuaaggaucagcuuuccggaauuaacaauaucgcguucagcaacugaggacuaguacuggcugcaucucccuuuccucuguccuccauccuucucccaggauggugaagggggaccugguacccagugauccccaccccaggauccuaaaucaugacuuaccugcuaauaaaaacucauuggaaaagugagaagaucuaaaaaaaaaaaaaaaaaaaaaaaaaaaaaaaaaaaaaaaaaaaaaaaaaaaaaaaaaaaaaaaaugcaucccccccccccccccccccccccccccccccaaaggcucuuuucagagccaccagaauu

SEQ ID NO: 6399 - RNA, 2061 nt, Artificial Sequence
  mRNA product Design h-5 comprising derived and/or modified sequence from HRSV(A2)__F_DSCav1_mut6 (opt6)
gggagagggcgcuuggcuugcaaggacccugagcugcggcauugaagcacacccaacccaacucgacugaagucagccucacugaaccggaucugagaaucuucucucucugggcuugccagggcucuccgaaccuagcuagcauccucuucaauuccaacuagaaagcuuaccauggaacuauuaaucuuaaaagcaaaugcuauaaccacaauauuaacagcaguaacauucuguuuugccuccggacaaaacauaacagaagaauuuuaucaaucaacaugcucugcaguauccaaagguuacuuaggcgcacuacgcacuggaugguauacaucaguaauaacaauagaacuaucaaacauaaaagaaaauaaauguaacgguacugacgcaaaagugaaacuaauuaaacaagaacucgacaaauacaaaaaugcuguaacagaccuacaaaugcuaaugugcucaacacccgcaaccggaucaggaucagccauagccuccggagucgcaguaugcaaaguauuacaucuugaaggagaaguaaauaaaauaaaaucagcauuacuauccacaaauaaagccguaguaucacuaucaaacgguguauccguccuuacauucaaaguauuagaucuaaaaaacuacauagauaaacaacuacuacccaucuuaaacaaacaaucaugcucaauucccaacccagaaacagucauggaauuucaacaaaaaaacaacagacucuuagaaauaacacgagaauuuucaguaaacgcaggaguaaccacaccaguaaguacauacaugcucaccaacucagaauuauuaucacuuauuaacgacaugccaauuacaaacgaccaaaaaaaauuaaugucaaacaauguccaaauuguuagacaacaaucauacucuauaauguguauaauaaaagaagaaguacuagcuuacguaguucaauuaccacuauauggcguaauagauacaccuugcuggaaacuacauacaucuccauuauguacaacuaacacaaaagaaggaucuaacauaugccuaacacgcacagaucgaggaugguacugcgauaaugcagguuccguaucauucuuuccacaagcagaaacauguaaaguaugcucaaacagaguauucugugacacuaugaacuccuuaacccuacccucagaagucaaucuaugcaacguugacauauuuaacccaaaauacgacuguaaaaucaugacaucuaaaacagacguaucaucaucaguuauuacaucccuaggagcaauaguaucuugcuacggaaaaacaaaauguacagcauccaacaaaaacaaaggaauaaucaaaacauucucaaacggcugcgacuacguaucaaacaaagguguagacacaguaucaguaggaaauacuuuauauuacguaaauaaacaagaaggacaaucucuauacguuaaaggcgaaccuauuauaaacuucuacgacccacucguauucccuucagacgaauuugacgcaucuauaucccaaguuaacgaaaaaaucaaccaaucauuagccuuuauaagaaaauccgacgaauuauuacauaacgucaacgcuggaaaaucaacaacuaacauaaugauaaccacaauaauaauagucaucauaguuauauuacuaagucuaauagccguaggccuccuacuuuauugcaaagcaagaucaacaccaguaacauuauccaaagaccaacucagcggcauaaacaauauagcuuuuucaaacuagggacuaguacuggcugcaucucccuuuccucuguccuccauccuucucccaggauggugaagggggaccugguacccagugauccccaccccaggauccuaaaucaugacuuaccugcuaauaaaaacucauuggaaaagugagaagaucuaaaaaaaaaaaaaaaaaaaaaaaaaaaaaaaaaaaaaaaaaaaaaaaaaaaaaaaaaaaaaaaaugcaucccccccccccccccccccccccccccccccaaaggcucuuuucagagccaccagaauu

SEQ ID NO: 6400 - RNA, 2061 nt, Artificial Sequence
  mRNA product Design h-5 comprising derived and/or modified sequence from HRSV(A2)__F_DSCav1_mut6 (opt11)
gggagagggcgcuuggcuugcaaggacccugagcugcggcauugaagcacacccaacccaacucgacugaagucagccucacugaaccggaucugagaaucuucucucucugggcuugccagggcucuccgaaccuagcuagcauccucuucaauuccaacuagaaagcuuaccauggaacuccucauccucaaagccaacgcaaucacaaccauacuaacugcaguuacuuucugcuucgcauccggccaaaacaucaccgaagaguucuaccaaucaaccugcuccgcagucuccaaaggauaccucggagcccuucgcaccggcugguacaccuccgucauaaccaucgaacucucaaacauaaaagaaaacaaaugcaacggcacagacgcgaaagucaaacuuaucaaacaagaacucgacaaauacaaaaacgccgucaccgaccugcagaugcucaugugcucaacccccgccacaggaagcggcucugcuaucgcuuccggcgucgccgucugcaaaguccuccaccucgaaggcgaaguaaacaaaaucaagucagcccuccucuccaccaacaaagccgucgucucucucucaaacggcguauccguccucacauucaaaguccucgaccucaaaaacuacaucgacaaacaacuucuccccauccuaaacaaacaaucaugcuccauccccaaccccgaaacagucauggaauuucaacaaaagaacaaccgccucuuagaaaucacccgagaauuuuccgucaacgcgggagucacaacccccguuucuacguauaugcucaccaacuccgaacuccuuucccucauaaacgacaugccaaucaccaacgaccaaaagaaacucaugucaaacaacguccaaaucguccgacaacaauccuacucuauuaugugcaucaucaaagaagaaguucucgccuacgucguccaacuaccccucuacggcgugaucgacacccccugcuggaaacuacacaccucaccccucugcaccaccaacaccaaggaaggcuccaacaucugccucacccgcaccgaccgcggcugguacugcgacaacgcuggcuccgucucauucuucccgcaagccgaaacuugcaaaguaugcuccaacagaguauucugcgacaccaugaacucacuaacccucccuuccgaagucaaccuuugcaacguugacauauucaacccaaaguacgauugcaaaauuaugacauccaaaacagaugucuccuccuccgucaucacaucccucggugccauuguaucaugcuacggaaaaaccaaaugcaccgcauccaacaaaaacaaaggaaucaucaaaaccuucucaaacggcugcgauuacgucucaaacaaaggagucgacacagucuccgucggaaacacccuauacuacgucaacaaacaagaaggccaaucccuguacgucaaaggagaacccaucaucaacuucuacgacccccucgucuucccgagcgacgaguucgacgccuccaucucacaagucaaugaaaagaucaaccaaucccuugccuucauccggaaaucggacgaacuccuacacaacgugaacgcuggaaaaucaaccaccaacaucaugaucacaaccaucauuaucgucaucaucgucauacuccucucccuaaucgccgucggccuccuccuguauugcaaagcucgcuccacccccgucacccuguccaaagaccaacucuccggaaucaacaacaucgccuucucaaacuaaggacuaguacuggcugcaucucccuuuccucuguccuccauccuucucccaggauggugaagggggaccugguacccagugauccccaccccaggauccuaaaucaugacuuaccugcuaauaaaaacucauuggaaaagugagaagaucuaaaaaaaaaaaaaaaaaaaaaaaaaaaaaaaaaaaaaaaaaaaaaaaaaaaaaaaaaaaaaaaaugcaucccccccccccccccccccccccccccccccaaaggcucuuuucagagccaccagaauu

SEQ ID NO: 6401 - RNA, 1994 nt, Artificial Sequence
  mRNA product Design i-1 comprising derived and/or modified sequence from HRSV(A2)__F_DSCav1_mut6 (opt1)
gggagagggcgcuuggcuugcaaggacccugagcugcggcauugaagcacacccaacccaacucgacugaagucagccucacugaaccggaucugagaaucuucucucucugggcuugccagggcucuccgaaccuagcuagcauccucuucaauuccaacuagaaagcuuaccauggagcugcucauccugaaggccaacgccaucaccaccauccugacggcggugaccuucugcuucgccagcggccagaacaucaccgaggaguucuaccaguccacgugcagcgccgucuccaagggguaccucggcgcccugcggaccggcugguacaccuccgugaucaccaucgagcugagcaacaucaaggagaacaagugcaacgggaccgacgccaaggugaagcucaucaagcaggagcuggacaaguacaagaacgcggucacggaccugcagaugcugaugugcuccaccccggcaaccggcuccggcuccgccaucgcgagcggcgucgccgugugcaaggugcugcaccucgagggggaggucaacaagaucaagagcgcccugcuguccaccaacaaggccguggugagccucuccaacggcgucagcgugcugaccuucaaggugcuggaccucaagaacuacaucgacaagcagcugcugcccauccugaacaagcagagcugcuccauccccaaccccgagacggugauggaguuccagcagaagaacaaccggcuccuggagaucacccgcgaguucagcgugaacgccggggucaccacccccguguccacguacaugcugaccaacagcgagcuccugucccugaucaacgacaugccgaucaccaacgaccagaagaagcucaugagcaacaacgugcagaucguccggcagcaguccuacagcaucaugugcaucaucaaggaggaggugcuggcguacgugguccagcugccccucuacggcgugaucgacacccccugcuggaagcugcacacgagcccccugugcaccaccaacaccaaggagggguccaacaucugccucacgcgcaccgaccggggcugguacugcgacaacgccggcagcgucuccuucuucccgcaggccgagaccugcaaggugugcagcaaccgcguguucugcgacaccaugaacucccugacgcugcccagcgagguaaaccucugcaacgucgacaucuucaaccccaaguacgacugcaagaucaugaccuccaagaccgacgugagcuccagcgugaucaccucccugggggccaucgucagcugcuacggcaagacgaagugcaccgccagcaacaagaacaaggggaucaucaagaccuucuccaacggcugcgacuacgugagcaacaagggcguggacaccguguccgucgggaacacccuguacuacgugaacaagcaggagggccagagccucuacgugaagggggagcccaucaucaacuucuacgacccgcuggucuuccccuccgacgaguucgacgcgagcaucucccaggugaacgagaagaucaaccagagccuggccuucauccgcaaguccgacgagcugcuccacaacgugaacgccggcaagagcacgaccaacaucaugaucaccaccaucaucaucgucaucaucgugauccugcugucccucaucgccguggggcugcugcucuacugcaaggcccggagcacgcccgucacccuguccaaggaccagcugagcggcaucaacaacaucgcguucuccaacugaggacuaguguccaccugucccuccugggcugcuggauugucucguuuuccugccaaauaaacaggaucagcgcuuuacagaucuaaaaaaaaaaaaaaaaaaaaaaaaaaaaaaaaaaaaaaaaaaaaaaaaaaaaaaaaaaaaaaaaugcaucccccccccccccccccccccccccccccccaaaggcucuuuucagagccaccagaauu

SEQ ID NO: 6402 - RNA, 1994 nt, Artificial Sequence
  mRNA product Design i-1 comprising derived and/or modified sequence from HRSV(A2)__F_DSCav1_mut6 (opt1)
gggagagggcgcuuggcuugcaaggacccugagcugcggcauugaagcacacccaacccaacucgacugaagucagccucacugaaccggaucugagaaucuucucucucugggcuugccagggcucuccgaaccuagcuagcauccucuucaauuccaacuagaaagcuuaccauggagcugcucauccugaaggccaacgccaucaccaccauccugacggcggugaccuucugcuucgccagcggccagaacaucaccgaggaguucuaccaguccacgugcagcgccgucuccaagggguaccucggcgcccugcgcaccgggugguacaccagcgugaucaccaucgagcuguccaacaucaaggagaacaagugcaacggcaccgacgccaaggugaagcucaucaagcaggagcuggacaaguacaagaacgcggucacggaccugcagaugcucaugugcagcacccccgccaccggguccggcagcgccaucgccuccggcguggcggugugcaagguccugcaccuggagggggaggugaacaagaucaagagcgcccuccuguccaccaacaaggccguggucagccuguccaacggcgugagcgugcucacguucaagguccuggaccugaagaacuacaucgacaagcagcuccugccgauccugaacaagcaguccugcagcauccccaaccccgagaccgugauggaguuccagcagaagaacaaccggcuccuggagaucacccgcgaguucuccgugaacgccggggucaccacgcccgugagcaccuacaugcugaccaacuccgagcuccugagccugaucaacgacaugccgaucaccaacgaccagaagaagcucaugagcaacaacgugcagaucguccggcagcaguccuacagcaucaugugcaucaucaaggaggaggugcuggccuacgugguccagcugccccucuacggcgugaucgacacgcccugcuggaagcugcacaccagcccccugugcaccaccaacacgaaggaggggagcaacaucugccucacccgcaccgaccggggcugguacugcgacaacgcgggcuccgugagcuucuucccgcaggccgagaccugcaaggucugcuccaaccgcguguucugcgacacgaugaacagccugacccugcccuccgaggucaaccucugcaacguggacaucuucaaccccaaguacgacugcaagaucaugaccagcaagaccgacguguccagcuccgucaucacgagccugggggccaucguguccugcuacggcaagaccaagugcaccgccagcaacaagaacaaggggaucaucaagaccuucuccaacggcugcgacuacgugagcaacaagggcgucgacacgguguccguggggaacacccuguacuacgucaacaagcaggagggccagagccucuacgugaagggggagcccaucaucaacuucuacgacccgcugguguuccccagcgacgaguucgacgccuccaucagccaggucaacgagaagaucaaccagucccuggcguucauccggaaguccgacgagcuccugcacaacgugaacgccggcaaguccaccaccaacaucaugaucaccacgaucaucaucgugaucaucgucauccugcucagccugaucgccguggggcugcuccuguacugcaaggcccgcuccacccccgugacccugagcaaggaccagcuguccggcaucaacaacaucgccuucagcaacugaggacuaguguccaccugucccuccugggcugcuggauugucucguuuuccugccaaauaaacaggaucagcgcuuuacagaucuaaaaaaaaaaaaaaaaaaaaaaaaaaaaaaaaaaaaaaaaaaaaaaaaaaaaaaaaaaaaaaaaugcaucccccccccccccccccccccccccccccccaaaggcucuuuucagagccaccagaauu

SEQ ID NO: 6403 - RNA, 1994 nt, Artificial Sequence
  mRNA product Design i-1 comprising derived and/or modified sequence from HRSV(A2)__F_DSCav1_mut6 (opt2)
gggagagggcgcuuggcuugcaaggacccugagcugcggcauugaagcacacccaacccaacucgacugaagucagccucacugaaccggaucugagaaucuucucucucugggcuugccagggcucuccgaaccuagcuagcauccucuucaauuccaacuagaaagcuuaccauggagcuccucauccucaaggccaacgccaucaccaccauccucaccgccgucaccuucugcuucgccuccggccagaacaucaccgaggaguucuaccaguccaccugcuccgccgucuccaagggcuaccucggcgcccuccgcaccggcugguacaccuccgucaucaccaucgagcucuccaacaucaaggagaacaagugcaacggcaccgacgccaaggucaagcucaucaagcaggagcucgacaaguacaagaacgccgucaccgaccuccagaugcucaugugcuccacccccgccaccggcuccggcuccgccaucgccuccggcgucgccgucugcaagguccuccaccucgagggcgaggucaacaagaucaaguccgcccuccucuccaccaacaaggccgucgucucccucuccaacggcgucuccguccucaccuucaagguccucgaccucaagaacuacaucgacaagcagcuccuccccauccucaacaagcaguccugcuccauccccaaccccgagaccgucauggaguuccagcagaagaacaaccgccuccucgagaucacccgcgaguucuccgucaacgccggcgucaccacccccgucuccaccuacaugcucaccaacuccgagcuccucucccucaucaacgacaugcccaucaccaacgaccagaagaagcucauguccaacaacguccagaucguccgccagcaguccuacuccaucaugugcaucaucaaggaggagguccucgccuacgucguccagcucccccucuacggcgucaucgacacccccugcuggaagcuccacaccuccccccucugcaccaccaacaccaaggagggcuccaacaucugccucacccgcaccgaccgcggcugguacugcgacaacgccggcuccgucuccuucuucccccaggccgagaccugcaaggucugcuccaaccgcgucuucugcgacaccaugaacucccucacccuccccuccgaggucaaccucugcaacgucgacaucuucaaccccaaguacgacugcaagaucaugaccuccaagaccgacgucuccuccuccgucaucaccucccucggcgccaucgucuccugcuacggcaagaccaagugcaccgccuccaacaagaacaagggcaucaucaagaccuucuccaacggcugcgacuacgucuccaacaagggcgucgacaccgucuccgucggcaacacccucuacuacgucaacaagcaggagggccagucccucuacgucaagggcgagcccaucaucaacuucuacgacccccucgucuuccccuccgacgaguucgacgccuccaucucccaggucaacgagaagaucaaccagucccucgccuucauccgcaaguccgacgagcuccuccacaacgucaacgccggcaaguccaccaccaacaucaugaucaccaccaucaucaucgucaucaucgucauccuccucucccucaucgccgucggccuccuccucuacugcaaggcccgcuccacccccgucacccucuccaaggaccagcucuccggcaucaacaacaucgccuucuccaacugaggacuaguguccaccugucccuccugggcugcuggauugucucguuuuccugccaaauaaacaggaucagcgcuuuacagaucuaaaaaaaaaaaaaaaaaaaaaaaaaaaaaaaaaaaaaaaaaaaaaaaaaaaaaaaaaaaaaaaaugcaucccccccccccccccccccccccccccccccaaaggcucuuuucagagccaccagaauu

SEQ ID NO: 6404 - RNA, 1994 nt, Artificial Sequence
  mRNA product Design i-1 comprising derived and/or modified sequence from HRSV(A2)__F_DSCav1_mut6 (opt3)
gggagagggcgcuuggcuugcaaggacccugagcugcggcauugaagcacacccaacccaacucgacugaagucagccucacugaaccggaucugagaaucuucucucucugggcuugccagggcucuccgaaccuagcuagcauccucuucaauuccaacuagaaagcuuaccauggagcugcucauccuuaaggccaacgcuauuaccacaauacugacugcagugacguucugcuuugccagcggccagaauaucaccgaagaguucuaccaauccacauguucugcggucucaaaaggguauuugggagcuuuaagaacugguugguacaccaguguuauuacaaucgaacugagcaacauuaaggagaauaaaugcaacggcaccgacgccaaggugaaacuaaucaagcaggaacucgauaaguauaaaaaugcaguaacugaccugcagaugcuuauguguuccacacccgccaccgggucuggaucggcuauagcaucaggcguggccgucugcaaggugcugcacuuggagggugagguuaacaaaaucaagagcgcucuccugaguacgaauaaagccguggucucccugucuaacggggugagcguacucacuuuuaagguuuuagaucugaagaauuacauugacaaacagcuuuugccuauccugaacaagcaauccuguucaauuccaaauccggaaaccgugauggaguuccagcagaaaaacaauaggcuacucgaaaucacacgggaguuuagugucaacgcgggagugacuacccccgugagcacauauaugcugaccaauucugagcuucuguccuugauaaacgauaugccuauuacgaacgaccagaagaaacucaugucaaauaacguccaaaucguucgccagcagagcuacaguauuaugugcaucaucaaggaagaggugcuggcauauguagugcaguuaccacuguacggcgucauugauacucccuguuggaaacuccauacaucuccucuuugcaccacuaauacaaaggaaggcuccaacauaugucugacccgaacggaccgugggugguacugcgauaaugccggaagcgugucguucuuuccacaagcugagaccuguaagguuugcucuaacagaguguucugcgacacaaugaacuccuugacucuacccucagaagucaaucuguguaauguggauaucuuuaacccuaaauaugacugcaagauuaugaccaguaaaacagauguaagcuccucuguuaucacuagccucggugccauagugucauguuacggcaagaccaaaugcacagcaaguaauaagaacaaggggauuaucaaaaccuucuccaauggaugugacuaugucagcaacaagggcguggacacugucucuguggguaauacgcuguacuauguuaacaaacaggaggggcagucacuuuacgugaagggagagccaaucauuaacuuuuaugauccgcugguauuccccagugacgaauuugaugcuagcaucucccaagucaaugagaaaauuaaccagucuuuggccuucauaaggaagucggacgaacuccugcacaaugugaacgcgggcaagagcacaaccaauaucaugauuacuaccaucaucauuguuauaaucgugauuuuacugucccuaaucgccgucggccuccugcuuuacugcaaagcacggucaacaccugugaccuugaguaaggaucagcugucugggauuaacaauaucgcuuucagcaacugaggacuaguguccaccugucccuccugggcugcuggauugucucguuuuccugccaaauaaacaggaucagcgcuuuacagaucuaaaaaaaaaaaaaaaaaaaaaaaaaaaaaaaaaaaaaaaaaaaaaaaaaaaaaaaaaaaaaaaaugcaucccccccccccccccccccccccccccccccaaaggcucuuuucagagccaccagaauu

SEQ ID NO: 6405 - RNA, 1994 nt, Artificial Sequence
  mRNA product Design i-1 comprising derived and/or modified sequence from HRSV(A2)__F_DSCav1_mut6 (opt4)
gggagagggcgcuuggcuugcaaggacccugagcugcggcauugaagcacacccaacccaacucgacugaagucagccucacugaaccggaucugagaaucuucucucucugggcuugccagggcucuccgaaccuagcuagcauccucuucaauuccaacuagaaagcuuaccauggagcugcugauccugaaggccaacgccaucaccaccauccugaccgccgugaccuucugcuucgccagcggccagaacaucaccgaggaguucuaccagagcaccugcagcgccgugagcaagggcuaccugggcgcccugagaaccggcugguacaccagcgugaucaccaucgagcugagcaacaucaaggagaacaagugcaacggcaccgacgccaaggugaagcugaucaagcaggagcuggacaaguacaagaacgccgugaccgaccugcagaugcugaugugcagcacccccgccaccggcagcggcagcgccaucgccagcggcguggccgugugcaaggugcugcaccuggagggcgaggugaacaagaucaagagcgcccugcugagcaccaacaaggccguggugagccugagcaacggcgugagcgugcugaccuucaaggugcuggaccugaagaacuacaucgacaagcagcugcugcccauccugaacaagcagagcugcagcauccccaaccccgagaccgugauggaguuccagcagaagaacaacagacugcuggagaucaccagagaguucagcgugaacgccggcgugaccacccccgugagcaccuacaugcugaccaacagcgagcugcugagccugaucaacgacaugcccaucaccaacgaccagaagaagcugaugagcaacaacgugcagaucgugagacagcagagcuacagcaucaugugcaucaucaaggaggaggugcuggccuacguggugcagcugccccuguacggcgugaucgacacccccugcuggaagcugcacaccagcccccugugcaccaccaacaccaaggagggcagcaacaucugccugaccagaaccgacagaggcugguacugcgacaacgccggcagcgugagcuucuucccccaggccgagaccugcaaggugugcagcaacagaguguucugcgacaccaugaacagccugacccugcccagcgaggugaaccugugcaacguggacaucuucaaccccaaguacgacugcaagaucaugaccagcaagaccgacgugagcagcagcgugaucaccagccugggcgccaucgugagcugcuacggcaagaccaagugcaccgccagcaacaagaacaagggcaucaucaagaccuucagcaacggcugcgacuacgugagcaacaagggcguggacaccgugagcgugggcaacacccuguacuacgugaacaagcaggagggccagagccuguacgugaagggcgagcccaucaucaacuucuacgacccccugguguuccccagcgacgaguucgacgccagcaucagccaggugaacgagaagaucaaccagagccuggccuucaucagaaagagcgacgagcugcugcacaacgugaacgccggcaagagcaccaccaacaucaugaucaccaccaucaucaucgugaucaucgugauccugcugagccugaucgccgugggccugcugcuguacugcaaggccagaagcacccccgugacccugagcaaggaccagcugagcggcaucaacaacaucgccuucagcaacugaggacuaguguccaccugucccuccugggcugcuggauugucucguuuuccugccaaauaaacaggaucagcgcuuuacagaucuaaaaaaaaaaaaaaaaaaaaaaaaaaaaaaaaaaaaaaaaaaaaaaaaaaaaaaaaaaaaaaaaugcaucccccccccccccccccccccccccccccccaaaggcucuuuucagagccaccagaauu

SEQ ID NO: 6406 - RNA, 1994 nt, Artificial Sequence
  mRNA product Design i-1 comprising derived and/or modified sequence from HRSV(A2)__F_DSCav1_mut6 (opt5)
gggagagggcgcuuggcuugcaaggacccugagcugcggcauugaagcacacccaacccaacucgacugaagucagccucacugaaccggaucugagaaucuucucucucugggcuugccagggcucuccgaaccuagcuagcauccucuucaauuccaacuagaaagcuuaccauggagcugcucauccugaaggccaacgcuauuaccacaauccuuacggccgugaccuucugcuuugcgagcggccagaauauuacagaagaguucuaccaauccaccuguucugcugucagcaaaggguaucugggagcccucagaacaggcugguacaccuccguuaucacaauugaacugucuaacaucaaggagaauaaaugcaacgggaccgacgccaaggugaaacuuaucaagcaggaacuggauaaguauaaaaaugcugugacggaccuccagaugcugauguguagcacccccgccacaggauccggcucugcuauugccagcggggucgcggugugcaagguucugcaccucgagggagaggugaacaaaaucaaguccgcccugcuuagcaccaauaaagcugucgugucucuguccaacggcguuagcgugcucacauuuaagguccuggaucuuaagaauuacauugacaaacagcugcucccuauccugaacaagcaaucuuguuccauuccgaaucccgaaaccgugauggaguuccagcagaaaaacaaucggcugcucgaaaucacgcgcgaguuuagcgugaacgccggcgucacaaccccuguuucuacauauaugcugaccaauuccgagcuucugagccucauuaacgauaugcccaucaccaacgaccagaagaaacugauguccaauaacgugcaaaucgugagacagcagucuuacagcauuaugugcaucauuaaggaagagguccuugcuuaugugguucagcugccucucuacggggugaucgauacacccuguuggaaacugcauacguccccucugugcaccacaaauaccaaggaaggaagcaacauuugucucacacggaccgaccgcggcugguacugcgauaaugccgggucugucuccuucuuuccgcaagcggagacguguaaggugugcagcaacagaguuuucugcgacacaaugaacucucugacccuucccagcgaagugaaucuguguaaugucgauaucuuuaacccuaaauaugacugcaagaucaugaccuccaaaacagaugugucuagcuccgucauuaccagccucggagccaucgugucuuguuacggcaagacaaaaugcacggcuuccaauaagaacaaggggauuaucaaaaccuucagcaauggaugugacuauguuucuaacaagggcguggacacagucuccgugggcaauacccuguacuauguuaacaaacaggaggggcagagccuuuacgugaagggagagcccauuaucaacuuuuaugauccucuggucuuccccuccgacgaauuugaugccucuaucagccaagugaaugagaaaauuaaccagucccucgcuuucauccggaagucugacgaacugcugcacaaugugaacgccggcaagagcacaaccaauauuaugaucacgaccauuaucauuguuaucaucgucauucuccugucccuuaucgccguggggcugcuccuguacugcaaagcucgcagcacaccggugacccugucuaaggaucagcuuuccggaauuaacaauaucgcguucagcaacugaggacuaguguccaccugucccuccugggcugcuggauugucucguuuuccugccaaauaaacaggaucagcgcuuuacagaucuaaaaaaaaaaaaaaaaaaaaaaaaaaaaaaaaaaaaaaaaaaaaaaaaaaaaaaaaaaaaaaaaugcaucccccccccccccccccccccccccccccccaaaggcucuuuucagagccaccagaauu

SEQ ID NO: 6407 - RNA, 1994 nt, Artificial Sequence
  mRNA product Design i-1 comprising derived and/or modified sequence from HRSV(A2)__F_DSCav1_mut6 (opt6)
gggagagggcgcuuggcuugcaaggacccugagcugcggcauugaagcacacccaacccaacucgacugaagucagccucacugaaccggaucugagaaucuucucucucugggcuugccagggcucuccgaaccuagcuagcauccucuucaauuccaacuagaaagcuuaccauggaacuauuaaucuuaaaagcaaaugcuauaaccacaauauuaacagcaguaacauucuguuuugccuccggacaaaacauaacagaagaauuuuaucaaucaacaugcucugcaguauccaaagguuacuuaggcgcacuacgcacuggaugguauacaucaguaauaacaauagaacuaucaaacauaaaagaaaauaaauguaacgguacugacgcaaaagugaaacuaauuaaacaagaacucgacaaauacaaaaaugcuguaacagaccuacaaaugcuaaugugcucaacacccgcaaccggaucaggaucagccauagccuccggagucgcaguaugcaaaguauuacaucuugaaggagaaguaaauaaaauaaaaucagcauuacuauccacaaauaaagccguaguaucacuaucaaacgguguauccguccuuacauucaaaguauuagaucuaaaaaacuacauagauaaacaacuacuacccaucuuaaacaaacaaucaugcucaauucccaacccagaaacagucauggaauuucaacaaaaaaacaacagacucuuagaaauaacacgagaauuuucaguaaacgcaggaguaaccacaccaguaaguacauacaugcucaccaacucagaauuauuaucacuuauuaacgacaugccaauuacaaacgaccaaaaaaaauuaaugucaaacaauguccaaauuguuagacaacaaucauacucuauaauguguauaauaaaagaagaaguacuagcuuacguaguucaauuaccacuauauggcguaauagauacaccuugcuggaaacuacauacaucuccauuauguacaacuaacacaaaagaaggaucuaacauaugccuaacacgcacagaucgaggaugguacugcgauaaugcagguuccguaucauucuuuccacaagcagaaacauguaaaguaugcucaaacagaguauucugugacacuaugaacuccuuaacccuacccucagaagucaaucuaugcaacguugacauauuuaacccaaaauacgacuguaaaaucaugacaucuaaaacagacguaucaucaucaguuauuacaucccuaggagcaauaguaucuugcuacggaaaaacaaaauguacagcauccaacaaaaacaaaggaauaaucaaaacauucucaaacggcugcgacuacguaucaaacaaagguguagacacaguaucaguaggaaauacuuuauauuacguaaauaaacaagaaggacaaucucuauacguuaaaggcgaaccuauuauaaacuucuacgacccacucguauucccuucagacgaauuugacgcaucuauaucccaaguuaacgaaaaaaucaaccaaucauuagccuuuauaagaaaauccgacgaauuauuacauaacgucaacgcuggaaaaucaacaacuaacauaaugauaaccacaauaauaauagucaucauaguuauauuacuaagucuaauagccguaggccuccuacuuuauugcaaagcaagaucaacaccaguaacauuauccaaagaccaacucagcggcauaaacaauauagcuuuuucaaacuagggacuaguguccaccugucccuccugggcugcuggauugucucguuuuccugccaaauaaacaggaucagcgcuuuacagaucuaaaaaaaaaaaaaaaaaaaaaaaaaaaaaaaaaaaaaaaaaaaaaaaaaaaaaaaaaaaaaaaaugcaucccccccccccccccccccccccccccccccaaaggcucuuuucagagccaccagaauu

SEQ ID NO: 6408 - RNA, 1994 nt, Artificial Sequence
  mRNA product Design i-1 comprising derived and/or modified sequence from HRSV(A2)__F_DSCav1_mut6 (opt11)
gggagagggcgcuuggcuugcaaggacccugagcugcggcauugaagcacacccaacccaacucgacugaagucagccucacugaaccggaucugagaaucuucucucucugggcuugccagggcucuccgaaccuagcuagcauccucuucaauuccaacuagaaagcuuaccauggaacuccucauccucaaagccaacgcaaucacaaccauacuaacugcaguuacuuucugcuucgcauccggccaaaacaucaccgaagaguucuaccaaucaaccugcuccgcagucuccaaaggauaccucggagcccuucgcaccggcugguacaccuccgucauaaccaucgaacucucaaacauaaaagaaaacaaaugcaacggcacagacgcgaaagucaaacuuaucaaacaagaacucgacaaauacaaaaacgccgucaccgaccugcagaugcucaugugcucaacccccgccacaggaagcggcucugcuaucgcuuccggcgucgccgucugcaaaguccuccaccucgaaggcgaaguaaacaaaaucaagucagcccuccucuccaccaacaaagccgucgucucucucucaaacggcguauccguccucacauucaaaguccucgaccucaaaaacuacaucgacaaacaacuucuccccauccuaaacaaacaaucaugcuccauccccaaccccgaaacagucauggaauuucaacaaaagaacaaccgccucuuagaaaucacccgagaauuuuccgucaacgcgggagucacaacccccguuucuacguauaugcucaccaacuccgaacuccuuucccucauaaacgacaugccaaucaccaacgaccaaaagaaacucaugucaaacaacguccaaaucguccgacaacaauccuacucuauuaugugcaucaucaaagaagaaguucucgccuacgucguccaacuaccccucuacggcgugaucgacacccccugcuggaaacuacacaccucaccccucugcaccaccaacaccaaggaaggcuccaacaucugccucacccgcaccgaccgcggcugguacugcgacaacgcuggcuccgucucauucuucccgcaagccgaaacuugcaaaguaugcuccaacagaguauucugcgacaccaugaacucacuaacccucccuuccgaagucaaccuuugcaacguugacauauucaacccaaaguacgauugcaaaauuaugacauccaaaacagaugucuccuccuccgucaucacaucccucggugccauuguaucaugcuacggaaaaaccaaaugcaccgcauccaacaaaaacaaaggaaucaucaaaaccuucucaaacggcugcgauuacgucucaaacaaaggagucgacacagucuccgucggaaacacccuauacuacgucaacaaacaagaaggccaaucccuguacgucaaaggagaacccaucaucaacuucuacgacccccucgucuucccgagcgacgaguucgacgccuccaucucacaagucaaugaaaagaucaaccaaucccuugccuucauccggaaaucggacgaacuccuacacaacgugaacgcuggaaaaucaaccaccaacaucaugaucacaaccaucauuaucgucaucaucgucauacuccucucccuaaucgccgucggccuccuccuguauugcaaagcucgcuccacccccgucacccuguccaaagaccaacucuccggaaucaacaacaucgccuucucaaacuaaggacuaguguccaccugucccuccugggcugcuggauugucucguuuuccugccaaauaaacaggaucagcgcuuuacagaucuaaaaaaaaaaaaaaaaaaaaaaaaaaaaaaaaaaaaaaaaaaaaaaaaaaaaaaaaaaaaaaaaugcaucccccccccccccccccccccccccccccccaaaggcucuuuucagagccaccagaauu

SEQ ID NO: 6409 - RNA, 1994 nt, Artificial Sequence
  mRNA product Design i-2 comprising derived and/or modified sequence from HRSV(A2)__F_DSCav1_mut6 (opt1)
gggagaggcgcugccuacggagguggcagccaucuccuucucggcaucaagcuuaccauggagcugcucauccugaaggccaacgccaucaccaccauccugacggcggugaccuucugcuucgccagcggccagaacaucaccgaggaguucuaccaguccacgugcagcgccgucuccaagggguaccucggcgcccugcggaccggcugguacaccuccgugaucaccaucgagcugagcaacaucaaggagaacaagugcaacgggaccgacgccaaggugaagcucaucaagcaggagcuggacaaguacaagaacgcggucacggaccugcagaugcugaugugcuccaccccggcaaccggcuccggcuccgccaucgcgagcggcgucgccgugugcaaggugcugcaccucgagggggaggucaacaagaucaagagcgcccugcuguccaccaacaaggccguggugagccucuccaacggcgucagcgugcugaccuucaaggugcuggaccucaagaacuacaucgacaagcagcugcugcccauccugaacaagcagagcugcuccauccccaaccccgagacggugauggaguuccagcagaagaacaaccggcuccuggagaucacccgcgaguucagcgugaacgccggggucaccacccccguguccacguacaugcugaccaacagcgagcuccugucccugaucaacgacaugccgaucaccaacgaccagaagaagcucaugagcaacaacgugcagaucguccggcagcaguccuacagcaucaugugcaucaucaaggaggaggugcuggcguacgugguccagcugccccucuacggcgugaucgacacccccugcuggaagcugcacacgagcccccugugcaccaccaacaccaaggagggguccaacaucugccucacgcgcaccgaccggggcugguacugcgacaacgccggcagcgucuccuucuucccgcaggccgagaccugcaaggugugcagcaaccgcguguucugcgacaccaugaacucccugacgcugcccagcgagguaaaccucugcaacgucgacaucuucaaccccaaguacgacugcaagaucaugaccuccaagaccgacgugagcuccagcgugaucaccucccugggggccaucgucagcugcuacggcaagacgaagugcaccgccagcaacaagaacaaggggaucaucaagaccuucuccaacggcugcgacuacgugagcaacaagggcguggacaccguguccgucgggaacacccuguacuacgugaacaagcaggagggccagagccucuacgugaagggggagcccaucaucaacuucuacgacccgcuggucuuccccuccgacgaguucgacgcgagcaucucccaggugaacgagaagaucaaccagagccuggccuucauccgcaaguccgacgagcugcuccacaacgugaacgccggcaagagcacgaccaacaucaugaucaccaccaucaucaucgucaucaucgugauccugcugucccucaucgccguggggcugcugcucuacugcaaggcccggagcacgcccgucacccuguccaaggaccagcugagcggcaucaacaacaucgcguucuccaacugaggacuagugcaucacauuuaaaagcaucucagccuaccaugagaauaagagaaagaaaaugaagaucaauagcuuauucaucucuuuuucuuuuucguugguguaaagccaacacccugucuaaaaaacauaaauuucuuuaaucauuuugccucuuuucucugugcuucaauuaauaaaaaauggaaagaaccuagaucuaaaaaaaaaaaaaaaaaaaaaaaaaaaaaaaaaaaaaaaaaaaaaaaaaaaaaaaaaaaaaaaaugcaucccccccccccccccccccccccccccccccaaaggcucuuuucagagccaccagaauu

SEQ ID NO: 6410 - RNA, 1994 nt, Artificial Sequence
  mRNA product Design i-2 comprising derived and/or modified sequence from HRSV(A2)__F_DSCav1_mut6 (opt1)
gggagaggcgcugccuacggagguggcagccaucuccuucucggcaucaagcuuaccauggagcugcucauccugaaggccaacgccaucaccaccauccugacggcggugaccuucugcuucgccagcggccagaacaucaccgaggaguucuaccaguccacgugcagcgccgucuccaagggguaccucggcgcccugcgcaccgggugguacaccagcgugaucaccaucgagcuguccaacaucaaggagaacaagugcaacggcaccgacgccaaggugaagcucaucaagcaggagcuggacaaguacaagaacgcggucacggaccugcagaugcucaugugcagcacccccgccaccggguccggcagcgccaucgccuccggcguggcggugugcaagguccugcaccuggagggggaggugaacaagaucaagagcgcccuccuguccaccaacaaggccguggucagccuguccaacggcgugagcgugcucacguucaagguccuggaccugaagaacuacaucgacaagcagcuccugccgauccugaacaagcaguccugcagcauccccaaccccgagaccgugauggaguuccagcagaagaacaaccggcuccuggagaucacccgcgaguucuccgugaacgccggggucaccacgcccgugagcaccuacaugcugaccaacuccgagcuccugagccugaucaacgacaugccgaucaccaacgaccagaagaagcucaugagcaacaacgugcagaucguccggcagcaguccuacagcaucaugugcaucaucaaggaggaggugcuggccuacgugguccagcugccccucuacggcgugaucgacacgcccugcuggaagcugcacaccagcccccugugcaccaccaacacgaaggaggggagcaacaucugccucacccgcaccgaccggggcugguacugcgacaacgcgggcuccgugagcuucuucccgcaggccgagaccugcaaggucugcuccaaccgcguguucugcgacacgaugaacagccugacccugcccuccgaggucaaccucugcaacguggacaucuucaaccccaaguacgacugcaagaucaugaccagcaagaccgacguguccagcuccgucaucacgagccugggggccaucguguccugcuacggcaagaccaagugcaccgccagcaacaagaacaaggggaucaucaagaccuucuccaacggcugcgacuacgugagcaacaagggcgucgacacgguguccguggggaacacccuguacuacgucaacaagcaggagggccagagccucuacgugaagggggagcccaucaucaacuucuacgacccgcugguguuccccagcgacgaguucgacgccuccaucagccaggucaacgagaagaucaaccagucccuggcguucauccggaaguccgacgagcuccugcacaacgugaacgccggcaaguccaccaccaacaucaugaucaccacgaucaucaucgugaucaucgucauccugcucagccugaucgccguggggcugcuccuguacugcaaggcccgcuccacccccgugacccugagcaaggaccagcuguccggcaucaacaacaucgccuucagcaacugaggacuagugcaucacauuuaaaagcaucucagccuaccaugagaauaagagaaagaaaaugaagaucaauagcuuauucaucucuuuuucuuuuucguugguguaaagccaacacccugucuaaaaaacauaaauuucuuuaaucauuuugccucuuuucucugugcuucaauuaauaaaaaauggaaagaaccuagaucuaaaaaaaaaaaaaaaaaaaaaaaaaaaaaaaaaaaaaaaaaaaaaaaaaaaaaaaaaaaaaaaaugcaucccccccccccccccccccccccccccccccaaaggcucuuuucagagccaccagaauu

SEQ ID NO: 6411 - RNA, 1994 nt, Artificial Sequence
  mRNA product Design i-2 comprising derived and/or modified sequence from HRSV(A2)__F_DSCav1_mut6 (opt2)
gggagaggcgcugccuacggagguggcagccaucuccuucucggcaucaagcuuaccauggagcuccucauccucaaggccaacgccaucaccaccauccucaccgccgucaccuucugcuucgccuccggccagaacaucaccgaggaguucuaccaguccaccugcuccgccgucuccaagggcuaccucggcgcccuccgcaccggcugguacaccuccgucaucaccaucgagcucuccaacaucaaggagaacaagugcaacggcaccgacgccaaggucaagcucaucaagcaggagcucgacaaguacaagaacgccgucaccgaccuccagaugcucaugugcuccacccccgccaccggcuccggcuccgccaucgccuccggcgucgccgucugcaagguccuccaccucgagggcgaggucaacaagaucaaguccgcccuccucuccaccaacaaggccgucgucucccucuccaacggcgucuccguccucaccuucaagguccucgaccucaagaacuacaucgacaagcagcuccuccccauccucaacaagcaguccugcuccauccccaaccccgagaccgucauggaguuccagcagaagaacaaccgccuccucgagaucacccgcgaguucuccgucaacgccggcgucaccacccccgucuccaccuacaugcucaccaacuccgagcuccucucccucaucaacgacaugcccaucaccaacgaccagaagaagcucauguccaacaacguccagaucguccgccagcaguccuacuccaucaugugcaucaucaaggaggagguccucgccuacgucguccagcucccccucuacggcgucaucgacacccccugcuggaagcuccacaccuccccccucugcaccaccaacaccaaggagggcuccaacaucugccucacccgcaccgaccgcggcugguacugcgacaacgccggcuccgucuccuucuucccccaggccgagaccugcaaggucugcuccaaccgcgucuucugcgacaccaugaacucccucacccuccccuccgaggucaaccucugcaacgucgacaucuucaaccccaaguacgacugcaagaucaugaccuccaagaccgacgucuccuccuccgucaucaccucccucggcgccaucgucuccugcuacggcaagaccaagugcaccgccuccaacaagaacaagggcaucaucaagaccuucuccaacggcugcgacuacgucuccaacaagggcgucgacaccgucuccgucggcaacacccucuacuacgucaacaagcaggagggccagucccucuacgucaagggcgagcccaucaucaacuucuacgacccccucgucuuccccuccgacgaguucgacgccuccaucucccaggucaacgagaagaucaaccagucccucgccuucauccgcaaguccgacgagcuccuccacaacgucaacgccggcaaguccaccaccaacaucaugaucaccaccaucaucaucgucaucaucgucauccuccucucccucaucgccgucggccuccuccucuacugcaaggcccgcuccacccccgucacccucuccaaggaccagcucuccggcaucaacaacaucgccuucuccaacugaggacuagugcaucacauuuaaaagcaucucagccuaccaugagaauaagagaaagaaaaugaagaucaauagcuuauucaucucuuuuucuuuuucguugguguaaagccaacacccugucuaaaaaacauaaauuucuuuaaucauuuugccucuuuucucugugcuucaauuaauaaaaaauggaaagaaccuagaucuaaaaaaaaaaaaaaaaaaaaaaaaaaaaaaaaaaaaaaaaaaaaaaaaaaaaaaaaaaaaaaaaugcaucccccccccccccccccccccccccccccccaaaggcucuuuucagagccaccagaauu

SEQ ID NO: 6412 - RNA, 1994 nt, Artificial Sequence
  mRNA product Design i-2 comprising derived and/or modified sequence from HRSV(A2)__F_DSCav1_mut6 (opt3)
gggagaggcgcugccuacggagguggcagccaucuccuucucggcaucaagcuuaccauggagcugcucauccuuaaggccaacgcuauuaccacaauacugacugcagugacguucugcuuugccagcggccagaauaucaccgaagaguucuaccaauccacauguucugcggucucaaaaggguauuugggagcuuuaagaacugguugguacaccaguguuauuacaaucgaacugagcaacauuaaggagaauaaaugcaacggcaccgacgccaaggugaaacuaaucaagcaggaacucgauaaguauaaaaaugcaguaacugaccugcagaugcuuauguguuccacacccgccaccgggucuggaucggcuauagcaucaggcguggccgucugcaaggugcugcacuuggagggugagguuaacaaaaucaagagcgcucuccugaguacgaauaaagccguggucucccugucuaacggggugagcguacucacuuuuaagguuuuagaucugaagaauuacauugacaaacagcuuuugccuauccugaacaagcaauccuguucaauuccaaauccggaaaccgugauggaguuccagcagaaaaacaauaggcuacucgaaaucacacgggaguuuagugucaacgcgggagugacuacccccgugagcacauauaugcugaccaauucugagcuucuguccuugauaaacgauaugccuauuacgaacgaccagaagaaacucaugucaaauaacguccaaaucguucgccagcagagcuacaguauuaugugcaucaucaaggaagaggugcuggcauauguagugcaguuaccacuguacggcgucauugauacucccuguuggaaacuccauacaucuccucuuugcaccacuaauacaaaggaaggcuccaacauaugucugacccgaacggaccgugggugguacugcgauaaugccggaagcgugucguucuuuccacaagcugagaccuguaagguuugcucuaacagaguguucugcgacacaaugaacuccuugacucuacccucagaagucaaucuguguaauguggauaucuuuaacccuaaauaugacugcaagauuaugaccaguaaaacagauguaagcuccucuguuaucacuagccucggugccauagugucauguuacggcaagaccaaaugcacagcaaguaauaagaacaaggggauuaucaaaaccuucuccaauggaugugacuaugucagcaacaagggcguggacacugucucuguggguaauacgcuguacuauguuaacaaacaggaggggcagucacuuuacgugaagggagagccaaucauuaacuuuuaugauccgcugguauuccccagugacgaauuugaugcuagcaucucccaagucaaugagaaaauuaaccagucuuuggccuucauaaggaagucggacgaacuccugcacaaugugaacgcgggcaagagcacaaccaauaucaugauuacuaccaucaucauuguuauaaucgugauuuuacugucccuaaucgccgucggccuccugcuuuacugcaaagcacggucaacaccugugaccuugaguaaggaucagcugucugggauuaacaauaucgcuuucagcaacugaggacuagugcaucacauuuaaaagcaucucagccuaccaugagaauaagagaaagaaaaugaagaucaauagcuuauucaucucuuuuucuuuuucguugguguaaagccaacacccugucuaaaaaacauaaauuucuuuaaucauuuugccucuuuucucugugcuucaauuaauaaaaaauggaaagaaccuagaucuaaaaaaaaaaaaaaaaaaaaaaaaaaaaaaaaaaaaaaaaaaaaaaaaaaaaaaaaaaaaaaaaugcaucccccccccccccccccccccccccccccccaaaggcucuuuucagagccaccagaauu

SEQ ID NO: 6413 - RNA, 1994 nt, Artificial Sequence
  mRNA product Design i-2 comprising derived and/or modified sequence from HRSV(A2)__F_DSCav1_mut6 (opt4)
gggagaggcgcugccuacggagguggcagccaucuccuucucggcaucaagcuuaccauggagcugcugauccugaaggccaacgccaucaccaccauccugaccgccgugaccuucugcuucgccagcggccagaacaucaccgaggaguucuaccagagcaccugcagcgccgugagcaagggcuaccugggcgcccugagaaccggcugguacaccagcgugaucaccaucgagcugagcaacaucaaggagaacaagugcaacggcaccgacgccaaggugaagcugaucaagcaggagcuggacaaguacaagaacgccgugaccgaccugcagaugcugaugugcagcacccccgccaccggcagcggcagcgccaucgccagcggcguggccgugugcaaggugcugcaccuggagggcgaggugaacaagaucaagagcgcccugcugagcaccaacaaggccguggugagccugagcaacggcgugagcgugcugaccuucaaggugcuggaccugaagaacuacaucgacaagcagcugcugcccauccugaacaagcagagcugcagcauccccaaccccgagaccgugauggaguuccagcagaagaacaacagacugcuggagaucaccagagaguucagcgugaacgccggcgugaccacccccgugagcaccuacaugcugaccaacagcgagcugcugagccugaucaacgacaugcccaucaccaacgaccagaagaagcugaugagcaacaacgugcagaucgugagacagcagagcuacagcaucaugugcaucaucaaggaggaggugcuggccuacguggugcagcugccccuguacggcgugaucgacacccccugcuggaagcugcacaccagcccccugugcaccaccaacaccaaggagggcagcaacaucugccugaccagaaccgacagaggcugguacugcgacaacgccggcagcgugagcuucuucccccaggccgagaccugcaaggugugcagcaacagaguguucugcgacaccaugaacagccugacccugcccagcgaggugaaccugugcaacguggacaucuucaaccccaaguacgacugcaagaucaugaccagcaagaccgacgugagcagcagcgugaucaccagccugggcgccaucgugagcugcuacggcaagaccaagugcaccgccagcaacaagaacaagggcaucaucaagaccuucagcaacggcugcgacuacgugagcaacaagggcguggacaccgugagcgugggcaacacccuguacuacgugaacaagcaggagggccagagccuguacgugaagggcgagcccaucaucaacuucuacgacccccugguguuccccagcgacgaguucgacgccagcaucagccaggugaacgagaagaucaaccagagccuggccuucaucagaaagagcgacgagcugcugcacaacgugaacgccggcaagagcaccaccaacaucaugaucaccaccaucaucaucgugaucaucgugauccugcugagccugaucgccgugggccugcugcuguacugcaaggccagaagcacccccgugacccugagcaaggaccagcugagcggcaucaacaacaucgccuucagcaacugaggacuagugcaucacauuuaaaagcaucucagccuaccaugagaauaagagaaagaaaaugaagaucaauagcuuauucaucucuuuuucuuuuucguugguguaaagccaacacccugucuaaaaaacauaaauuucuuuaaucauuuugccucuuuucucugugcuucaauuaauaaaaaauggaaagaaccuagaucuaaaaaaaaaaaaaaaaaaaaaaaaaaaaaaaaaaaaaaaaaaaaaaaaaaaaaaaaaaaaaaaaugcaucccccccccccccccccccccccccccccccaaaggcucuuuucagagccaccagaauu

SEQ ID NO: 6414 - RNA, 1994 nt, Artificial Sequence
  mRNA product Design i-2 comprising derived and/or modified sequence from HRSV(A2)__F_DSCav1_mut6 (opt5)
gggagaggcgcugccuacggagguggcagccaucuccuucucggcaucaagcuuaccauggagcugcucauccugaaggccaacgcuauuaccacaauccuuacggccgugaccuucugcuuugcgagcggccagaauauuacagaagaguucuaccaauccaccuguucugcugucagcaaaggguaucugggagcccucagaacaggcugguacaccuccguuaucacaauugaacugucuaacaucaaggagaauaaaugcaacgggaccgacgccaaggugaaacuuaucaagcaggaacuggauaaguauaaaaaugcugugacggaccuccagaugcugauguguagcacccccgccacaggauccggcucugcuauugccagcggggucgcggugugcaagguucugcaccucgagggagaggugaacaaaaucaaguccgcccugcuuagcaccaauaaagcugucgugucucuguccaacggcguuagcgugcucacauuuaagguccuggaucuuaagaauuacauugacaaacagcugcucccuauccugaacaagcaaucuuguuccauuccgaaucccgaaaccgugauggaguuccagcagaaaaacaaucggcugcucgaaaucacgcgcgaguuuagcgugaacgccggcgucacaaccccuguuucuacauauaugcugaccaauuccgagcuucugagccucauuaacgauaugcccaucaccaacgaccagaagaaacugauguccaauaacgugcaaaucgugagacagcagucuuacagcauuaugugcaucauuaaggaagagguccuugcuuaugugguucagcugccucucuacggggugaucgauacacccuguuggaaacugcauacguccccucugugcaccacaaauaccaaggaaggaagcaacauuugucucacacggaccgaccgcggcugguacugcgauaaugccgggucugucuccuucuuuccgcaagcggagacguguaaggugugcagcaacagaguuuucugcgacacaaugaacucucugacccuucccagcgaagugaaucuguguaaugucgauaucuuuaacccuaaauaugacugcaagaucaugaccuccaaaacagaugugucuagcuccgucauuaccagccucggagccaucgugucuuguuacggcaagacaaaaugcacggcuuccaauaagaacaaggggauuaucaaaaccuucagcaauggaugugacuauguuucuaacaagggcguggacacagucuccgugggcaauacccuguacuauguuaacaaacaggaggggcagagccuuuacgugaagggagagcccauuaucaacuuuuaugauccucuggucuuccccuccgacgaauuugaugccucuaucagccaagugaaugagaaaauuaaccagucccucgcuuucauccggaagucugacgaacugcugcacaaugugaacgccggcaagagcacaaccaauauuaugaucacgaccauuaucauuguuaucaucgucauucuccugucccuuaucgccguggggcugcuccuguacugcaaagcucgcagcacaccggugacccugucuaaggaucagcuuuccggaauuaacaauaucgcguucagcaacugaggacuagugcaucacauuuaaaagcaucucagccuaccaugagaauaagagaaagaaaaugaagaucaauagcuuauucaucucuuuuucuuuuucguugguguaaagccaacacccugucuaaaaaacauaaauuucuuuaaucauuuugccucuuuucucugugcuucaauuaauaaaaaauggaaagaaccuagaucuaaaaaaaaaaaaaaaaaaaaaaaaaaaaaaaaaaaaaaaaaaaaaaaaaaaaaaaaaaaaaaaaugcaucccccccccccccccccccccccccccccccaaaggcucuuuucagagccaccagaauu

SEQ ID NO: 6415 - RNA, 1994 nt, Artificial Sequence
  mRNA product Design i-2 comprising derived and/or modified sequence from HRSV(A2)__F_DSCav1_mut6 (opt6)
gggagaggcgcugccuacggagguggcagccaucuccuucucggcaucaagcuuaccauggaacuauuaaucuuaaaagcaaaugcuauaaccacaauauuaacagcaguaacauucuguuuugccuccggacaaaacauaacagaagaauuuuaucaaucaacaugcucugcaguauccaaagguuacuuaggcgcacuacgcacuggaugguauacaucaguaauaacaauagaacuaucaaacauaaaagaaaauaaauguaacgguacugacgcaaaagugaaacuaauuaaacaagaacucgacaaauacaaaaaugcuguaacagaccuacaaaugcuaaugugcucaacacccgcaaccggaucaggaucagccauagccuccggagucgcaguaugcaaaguauuacaucuugaaggagaaguaaauaaaauaaaaucagcauuacuauccacaaauaaagccguaguaucacuaucaaacgguguauccguccuuacauucaaaguauuagaucuaaaaaacuacauagauaaacaacuacuacccaucuuaaacaaacaaucaugcucaauucccaacccagaaacagucauggaauuucaacaaaaaaacaacagacucuuagaaauaacacgagaauuuucaguaaacgcaggaguaaccacaccaguaaguacauacaugcucaccaacucagaauuauuaucacuuauuaacgacaugccaauuacaaacgaccaaaaaaaauuaaugucaaacaauguccaaauuguuagacaacaaucauacucuauaauguguauaauaaaagaagaaguacuagcuuacguaguucaauuaccacuauauggcguaauagauacaccuugcuggaaacuacauacaucuccauuauguacaacuaacacaaaagaaggaucuaacauaugccuaacacgcacagaucgaggaugguacugcgauaaugcagguuccguaucauucuuuccacaagcagaaacauguaaaguaugcucaaacagaguauucugugacacuaugaacuccuuaacccuacccucagaagucaaucuaugcaacguugacauauuuaacccaaaauacgacuguaaaaucaugacaucuaaaacagacguaucaucaucaguuauuacaucccuaggagcaauaguaucuugcuacggaaaaacaaaauguacagcauccaacaaaaacaaaggaauaaucaaaacauucucaaacggcugcgacuacguaucaaacaaagguguagacacaguaucaguaggaaauacuuuauauuacguaaauaaacaagaaggacaaucucuauacguuaaaggcgaaccuauuauaaacuucuacgacccacucguauucccuucagacgaauuugacgcaucuauaucccaaguuaacgaaaaaaucaaccaaucauuagccuuuauaagaaaauccgacgaauuauuacauaacgucaacgcuggaaaaucaacaacuaacauaaugauaaccacaauaauaauagucaucauaguuauauuacuaagucuaauagccguaggccuccuacuuuauugcaaagcaagaucaacaccaguaacauuauccaaagaccaacucagcggcauaaacaauauagcuuuuucaaacuagggacuagugcaucacauuuaaaagcaucucagccuaccaugagaauaagagaaagaaaaugaagaucaauagcuuauucaucucuuuuucuuuuucguugguguaaagccaacacccugucuaaaaaacauaaauuucuuuaaucauuuugccucuuuucucugugcuucaauuaauaaaaaauggaaagaaccuagaucuaaaaaaaaaaaaaaaaaaaaaaaaaaaaaaaaaaaaaaaaaaaaaaaaaaaaaaaaaaaaaaaaugcaucccccccccccccccccccccccccccccccaaaggcucuuuucagagccaccagaauu

SEQ ID NO: 6416 - RNA, 1994 nt, Artificial Sequence
  mRNA product Design i-2 comprising derived and/or modified sequence from HRSV(A2)__F_DSCav1_mut6 (opt11)
gggagaggcgcugccuacggagguggcagccaucuccuucucggcaucaagcuuaccauggaacuccucauccucaaagccaacgcaaucacaaccauacuaacugcaguuacuuucugcuucgcauccggccaaaacaucaccgaagaguucuaccaaucaaccugcuccgcagucuccaaaggauaccucggagcccuucgcaccggcugguacaccuccgucauaaccaucgaacucucaaacauaaaagaaaacaaaugcaacggcacagacgcgaaagucaaacuuaucaaacaagaacucgacaaauacaaaaacgccgucaccgaccugcagaugcucaugugcucaacccccgccacaggaagcggcucugcuaucgcuuccggcgucgccgucugcaaaguccuccaccucgaaggcgaaguaaacaaaaucaagucagcccuccucuccaccaacaaagccgucgucucucucucaaacggcguauccguccucacauucaaaguccucgaccucaaaaacuacaucgacaaacaacuucuccccauccuaaacaaacaaucaugcuccauccccaaccccgaaacagucauggaauuucaacaaaagaacaaccgccucuuagaaaucacccgagaauuuuccgucaacgcgggagucacaacccccguuucuacguauaugcucaccaacuccgaacuccuuucccucauaaacgacaugccaaucaccaacgaccaaaagaaacucaugucaaacaacguccaaaucguccgacaacaauccuacucuauuaugugcaucaucaaagaagaaguucucgccuacgucguccaacuaccccucuacggcgugaucgacacccccugcuggaaacuacacaccucaccccucugcaccaccaacaccaaggaaggcuccaacaucugccucacccgcaccgaccgcggcugguacugcgacaacgcuggcuccgucucauucuucccgcaagccgaaacuugcaaaguaugcuccaacagaguauucugcgacaccaugaacucacuaacccucccuuccgaagucaaccuuugcaacguugacauauucaacccaaaguacgauugcaaaauuaugacauccaaaacagaugucuccuccuccgucaucacaucccucggugccauuguaucaugcuacggaaaaaccaaaugcaccgcauccaacaaaaacaaaggaaucaucaaaaccuucucaaacggcugcgauuacgucucaaacaaaggagucgacacagucuccgucggaaacacccuauacuacgucaacaaacaagaaggccaaucccuguacgucaaaggagaacccaucaucaacuucuacgacccccucgucuucccgagcgacgaguucgacgccuccaucucacaagucaaugaaaagaucaaccaaucccuugccuucauccggaaaucggacgaacuccuacacaacgugaacgcuggaaaaucaaccaccaacaucaugaucacaaccaucauuaucgucaucaucgucauacuccucucccuaaucgccgucggccuccuccuguauugcaaagcucgcuccacccccgucacccuguccaaagaccaacucuccggaaucaacaacaucgccuucucaaacuaaggacuagugcaucacauuuaaaagcaucucagccuaccaugagaauaagagaaagaaaaugaagaucaauagcuuauucaucucuuuuucuuuuucguugguguaaagccaacacccugucuaaaaaacauaaauuucuuuaaucauuuugccucuuuucucugugcuucaauuaauaaaaaauggaaagaaccuagaucuaaaaaaaaaaaaaaaaaaaaaaaaaaaaaaaaaaaaaaaaaaaaaaaaaaaaaaaaaaaaaaaaugcaucccccccccccccccccccccccccccccccaaaggcucuuuucagagccaccagaauu

SEQ ID NO: 6417 - RNA, 1990 nt, Artificial Sequence
  mRNA product Design i-2 comprising derived and/or modified sequence from HRSV(A2)__F_DSCav1_mut6 (opt1)
ggggcgcugccuacggagguggcagccaucuccuucucggcaucaagcuuaccauggagcugcucauccugaaggccaacgccaucaccaccauccugacggcggugaccuucugcuucgccagcggccagaacaucaccgaggaguucuaccaguccacgugcagcgccgucuccaagggguaccucggcgcccugcggaccggcugguacaccuccgugaucaccaucgagcugagcaacaucaaggagaacaagugcaacgggaccgacgccaaggugaagcucaucaagcaggagcuggacaaguacaagaacgcggucacggaccugcagaugcugaugugcuccaccccggcaaccggcuccggcuccgccaucgcgagcggcgucgccgugugcaaggugcugcaccucgagggggaggucaacaagaucaagagcgcccugcuguccaccaacaaggccguggugagccucuccaacggcgucagcgugcugaccuucaaggugcuggaccucaagaacuacaucgacaagcagcugcugcccauccugaacaagcagagcugcuccauccccaaccccgagacggugauggaguuccagcagaagaacaaccggcuccuggagaucacccgcgaguucagcgugaacgccggggucaccacccccguguccacguacaugcugaccaacagcgagcuccugucccugaucaacgacaugccgaucaccaacgaccagaagaagcucaugagcaacaacgugcagaucguccggcagcaguccuacagcaucaugugcaucaucaaggaggaggugcuggcguacgugguccagcugccccucuacggcgugaucgacacccccugcuggaagcugcacacgagcccccugugcaccaccaacaccaaggagggguccaacaucugccucacgcgcaccgaccggggcugguacugcgacaacgccggcagcgucuccuucuucccgcaggccgagaccugcaaggugugcagcaaccgcguguucugcgacaccaugaacucccugacgcugcccagcgagguaaaccucugcaacgucgacaucuucaaccccaaguacgacugcaagaucaugaccuccaagaccgacgugagcuccagcgugaucaccucccugggggccaucgucagcugcuacggcaagacgaagugcaccgccagcaacaagaacaaggggaucaucaagaccuucuccaacggcugcgacuacgugagcaacaagggcguggacaccguguccgucgggaacacccuguacuacgugaacaagcaggagggccagagccucuacgugaagggggagcccaucaucaacuucuacgacccgcuggucuuccccuccgacgaguucgacgcgagcaucucccaggugaacgagaagaucaaccagagccuggccuucauccgcaaguccgacgagcugcuccacaacgugaacgccggcaagagcacgaccaacaucaugaucaccaccaucaucaucgucaucaucgugauccugcugucccucaucgccguggggcugcugcucuacugcaaggcccggagcacgcccgucacccuguccaaggaccagcugagcggcaucaacaacaucgcguucuccaacugaggacuagugcaucacauuuaaaagcaucucagccuaccaugagaauaagagaaagaaaaugaagaucaauagcuuauucaucucuuuuucuuuuucguugguguaaagccaacacccugucuaaaaaacauaaauuucuuuaaucauuuugccucuuuucucugugcuucaauuaauaaaaaauggaaagaaccuagaucuaaaaaaaaaaaaaaaaaaaaaaaaaaaaaaaaaaaaaaaaaaaaaaaaaaaaaaaaaaaaaaaaugcaucccccccccccccccccccccccccccccccaaaggcucuuuucagagccaccagaauu

SEQ ID NO: 6418 - RNA, 1990 nt, Artificial Sequence
  mRNA product Design i-2 comprising derived and/or modified sequence from HRSV(A2)__F_DSCav1_mut6 (opt1)
ggggcgcugccuacggagguggcagccaucuccuucucggcaucaagcuuaccauggagcugcucauccugaaggccaacgccaucaccaccauccugacggcggugaccuucugcuucgccagcggccagaacaucaccgaggaguucuaccaguccacgugcagcgccgucuccaagggguaccucggcgcccugcgcaccgggugguacaccagcgugaucaccaucgagcuguccaacaucaaggagaacaagugcaacggcaccgacgccaaggugaagcucaucaagcaggagcuggacaaguacaagaacgcggucacggaccugcagaugcucaugugcagcacccccgccaccggguccggcagcgccaucgccuccggcguggcggugugcaagguccugcaccuggagggggaggugaacaagaucaagagcgcccuccuguccaccaacaaggccguggucagccuguccaacggcgugagcgugcucacguucaagguccuggaccugaagaacuacaucgacaagcagcuccugccgauccugaacaagcaguccugcagcauccccaaccccgagaccgugauggaguuccagcagaagaacaaccggcuccuggagaucacccgcgaguucuccgugaacgccggggucaccacgcccgugagcaccuacaugcugaccaacuccgagcuccugagccugaucaacgacaugccgaucaccaacgaccagaagaagcucaugagcaacaacgugcagaucguccggcagcaguccuacagcaucaugugcaucaucaaggaggaggugcuggccuacgugguccagcugccccucuacggcgugaucgacacgcccugcuggaagcugcacaccagcccccugugcaccaccaacacgaaggaggggagcaacaucugccucacccgcaccgaccggggcugguacugcgacaacgcgggcuccgugagcuucuucccgcaggccgagaccugcaaggucugcuccaaccgcguguucugcgacacgaugaacagccugacccugcccuccgaggucaaccucugcaacguggacaucuucaaccccaaguacgacugcaagaucaugaccagcaagaccgacguguccagcuccgucaucacgagccugggggccaucguguccugcuacggcaagaccaagugcaccgccagcaacaagaacaaggggaucaucaagaccuucuccaacggcugcgacuacgugagcaacaagggcgucgacacgguguccguggggaacacccuguacuacgucaacaagcaggagggccagagccucuacgugaagggggagcccaucaucaacuucuacgacccgcugguguuccccagcgacgaguucgacgccuccaucagccaggucaacgagaagaucaaccagucccuggcguucauccggaaguccgacgagcuccugcacaacgugaacgccggcaaguccaccaccaacaucaugaucaccacgaucaucaucgugaucaucgucauccugcucagccugaucgccguggggcugcuccuguacugcaaggcccgcuccacccccgugacccugagcaaggaccagcuguccggcaucaacaacaucgccuucagcaacugaggacuagugcaucacauuuaaaagcaucucagccuaccaugagaauaagagaaagaaaaugaagaucaauagcuuauucaucucuuuuucuuuuucguugguguaaagccaacacccugucuaaaaaacauaaauuucuuuaaucauuuugccucuuuucucugugcuucaauuaauaaaaaauggaaagaaccuagaucuaaaaaaaaaaaaaaaaaaaaaaaaaaaaaaaaaaaaaaaaaaaaaaaaaaaaaaaaaaaaaaaaugcaucccccccccccccccccccccccccccccccaaaggcucuuuucagagccaccagaauu

SEQ ID NO: 6419 - RNA, 1990 nt, Artificial Sequence
  mRNA product Design i-2 comprising derived and/or modified sequence from HRSV(A2)__F_DSCav1_mut6 (opt2)
ggggcgcugccuacggagguggcagccaucuccuucucggcaucaagcuuaccauggagcuccucauccucaaggccaacgccaucaccaccauccucaccgccgucaccuucugcuucgccuccggccagaacaucaccgaggaguucuaccaguccaccugcuccgccgucuccaagggcuaccucggcgcccuccgcaccggcugguacaccuccgucaucaccaucgagcucuccaacaucaaggagaacaagugcaacggcaccgacgccaaggucaagcucaucaagcaggagcucgacaaguacaagaacgccgucaccgaccuccagaugcucaugugcuccacccccgccaccggcuccggcuccgccaucgccuccggcgucgccgucugcaagguccuccaccucgagggcgaggucaacaagaucaaguccgcccuccucuccaccaacaaggccgucgucucccucuccaacggcgucuccguccucaccuucaagguccucgaccucaagaacuacaucgacaagcagcuccuccccauccucaacaagcaguccugcuccauccccaaccccgagaccgucauggaguuccagcagaagaacaaccgccuccucgagaucacccgcgaguucuccgucaacgccggcgucaccacccccgucuccaccuacaugcucaccaacuccgagcuccucucccucaucaacgacaugcccaucaccaacgaccagaagaagcucauguccaacaacguccagaucguccgccagcaguccuacuccaucaugugcaucaucaaggaggagguccucgccuacgucguccagcucccccucuacggcgucaucgacacccccugcuggaagcuccacaccuccccccucugcaccaccaacaccaaggagggcuccaacaucugccucacccgcaccgaccgcggcugguacugcgacaacgccggcuccgucuccuucuucccccaggccgagaccugcaaggucugcuccaaccgcgucuucugcgacaccaugaacucccucacccuccccuccgaggucaaccucugcaacgucgacaucuucaaccccaaguacgacugcaagaucaugaccuccaagaccgacgucuccuccuccgucaucaccucccucggcgccaucgucuccugcuacggcaagaccaagugcaccgccuccaacaagaacaagggcaucaucaagaccuucuccaacggcugcgacuacgucuccaacaagggcgucgacaccgucuccgucggcaacacccucuacuacgucaacaagcaggagggccagucccucuacgucaagggcgagcccaucaucaacuucuacgacccccucgucuuccccuccgacgaguucgacgccuccaucucccaggucaacgagaagaucaaccagucccucgccuucauccgcaaguccgacgagcuccuccacaacgucaacgccggcaaguccaccaccaacaucaugaucaccaccaucaucaucgucaucaucgucauccuccucucccucaucgccgucggccuccuccucuacugcaaggcccgcuccacccccgucacccucuccaaggaccagcucuccggcaucaacaacaucgccuucuccaacugaggacuagugcaucacauuuaaaagcaucucagccuaccaugagaauaagagaaagaaaaugaagaucaauagcuuauucaucucuuuuucuuuuucguugguguaaagccaacacccugucuaaaaaacauaaauuucuuuaaucauuuugccucuuuucucugugcuucaauuaauaaaaaauggaaagaaccuagaucuaaaaaaaaaaaaaaaaaaaaaaaaaaaaaaaaaaaaaaaaaaaaaaaaaaaaaaaaaaaaaaaaugcaucccccccccccccccccccccccccccccccaaaggcucuuuucagagccaccagaauu

SEQ ID NO: 6420 - RNA, 1990 nt, Artificial Sequence
  mRNA product Design i-2 comprising derived and/or modified sequence from HRSV(A2)__F_DSCav1_mut6 (opt3)
ggggcgcugccuacggagguggcagccaucuccuucucggcaucaagcuuaccauggagcugcucauccuuaaggccaacgcuauuaccacaauacugacugcagugacguucugcuuugccagcggccagaauaucaccgaagaguucuaccaauccacauguucugcggucucaaaaggguauuugggagcuuuaagaacugguugguacaccaguguuauuacaaucgaacugagcaacauuaaggagaauaaaugcaacggcaccgacgccaaggugaaacuaaucaagcaggaacucgauaaguauaaaaaugcaguaacugaccugcagaugcuuauguguuccacacccgccaccgggucuggaucggcuauagcaucaggcguggccgucugcaaggugcugcacuuggagggugagguuaacaaaaucaagagcgcucuccugaguacgaauaaagccguggucucccugucuaacggggugagcguacucacuuuuaagguuuuagaucugaagaauuacauugacaaacagcuuuugccuauccugaacaagcaauccuguucaauuccaaauccggaaaccgugauggaguuccagcagaaaaacaauaggcuacucgaaaucacacgggaguuuagugucaacgcgggagugacuacccccgugagcacauauaugcugaccaauucugagcuucuguccuugauaaacgauaugccuauuacgaacgaccagaagaaacucaugucaaauaacguccaaaucguucgccagcagagcuacaguauuaugugcaucaucaaggaagaggugcuggcauauguagugcaguuaccacuguacggcgucauugauacucccuguuggaaacuccauacaucuccucuuugcaccacuaauacaaaggaaggcuccaacauaugucugacccgaacggaccgugggugguacugcgauaaugccggaagcgugucguucuuuccacaagcugagaccuguaagguuugcucuaacagaguguucugcgacacaaugaacuccuugacucuacccucagaagucaaucuguguaauguggauaucuuuaacccuaaauaugacugcaagauuaugaccaguaaaacagauguaagcuccucuguuaucacuagccucggugccauagugucauguuacggcaagaccaaaugcacagcaaguaauaagaacaaggggauuaucaaaaccuucuccaauggaugugacuaugucagcaacaagggcguggacacugucucuguggguaauacgcuguacuauguuaacaaacaggaggggcagucacuuuacgugaagggagagccaaucauuaacuuuuaugauccgcugguauuccccagugacgaauuugaugcuagcaucucccaagucaaugagaaaauuaaccagucuuuggccuucauaaggaagucggacgaacuccugcacaaugugaacgcgggcaagagcacaaccaauaucaugauuacuaccaucaucauuguuauaaucgugauuuuacugucccuaaucgccgucggccuccugcuuuacugcaaagcacggucaacaccugugaccuugaguaaggaucagcugucugggauuaacaauaucgcuuucagcaacugaggacuagugcaucacauuuaaaagcaucucagccuaccaugagaauaagagaaagaaaaugaagaucaauagcuuauucaucucuuuuucuuuuucguugguguaaagccaacacccugucuaaaaaacauaaauuucuuuaaucauuuugccucuuuucucugugcuucaauuaauaaaaaauggaaagaaccuagaucuaaaaaaaaaaaaaaaaaaaaaaaaaaaaaaaaaaaaaaaaaaaaaaaaaaaaaaaaaaaaaaaaugcaucccccccccccccccccccccccccccccccaaaggcucuuuucagagccaccagaauu

SEQ ID NO: 6421 - RNA, 1990 nt, Artificial Sequence
  mRNA product Design i-2 comprising derived and/or modified sequence from HRSV(A2)__F_DSCav1_mut6 (opt4)
ggggcgcugccuacggagguggcagccaucuccuucucggcaucaagcuuaccauggagcugcugauccugaaggccaacgccaucaccaccauccugaccgccgugaccuucugcuucgccagcggccagaacaucaccgaggaguucuaccagagcaccugcagcgccgugagcaagggcuaccugggcgcccugagaaccggcugguacaccagcgugaucaccaucgagcugagcaacaucaaggagaacaagugcaacggcaccgacgccaaggugaagcugaucaagcaggagcuggacaaguacaagaacgccgugaccgaccugcagaugcugaugugcagcacccccgccaccggcagcggcagcgccaucgccagcggcguggccgugugcaaggugcugcaccuggagggcgaggugaacaagaucaagagcgcccugcugagcaccaacaaggccguggugagccugagcaacggcgugagcgugcugaccuucaaggugcuggaccugaagaacuacaucgacaagcagcugcugcccauccugaacaagcagagcugcagcauccccaaccccgagaccgugauggaguuccagcagaagaacaacagacugcuggagaucaccagagaguucagcgugaacgccggcgugaccacccccgugagcaccuacaugcugaccaacagcgagcugcugagccugaucaacgacaugcccaucaccaacgaccagaagaagcugaugagcaacaacgugcagaucgugagacagcagagcuacagcaucaugugcaucaucaaggaggaggugcuggccuacguggugcagcugccccuguacggcgugaucgacacccccugcuggaagcugcacaccagcccccugugcaccaccaacaccaaggagggcagcaacaucugccugaccagaaccgacagaggcugguacugcgacaacgccggcagcgugagcuucuucccccaggccgagaccugcaaggugugcagcaacagaguguucugcgacaccaugaacagccugacccugcccagcgaggugaaccugugcaacguggacaucuucaaccccaaguacgacugcaagaucaugaccagcaagaccgacgugagcagcagcgugaucaccagccugggcgccaucgugagcugcuacggcaagaccaagugcaccgccagcaacaagaacaagggcaucaucaagaccuucagcaacggcugcgacuacgugagcaacaagggcguggacaccgugagcgugggcaacacccuguacuacgugaacaagcaggagggccagagccuguacgugaagggcgagcccaucaucaacuucuacgacccccugguguuccccagcgacgaguucgacgccagcaucagccaggugaacgagaagaucaaccagagccuggccuucaucagaaagagcgacgagcugcugcacaacgugaacgccggcaagagcaccaccaacaucaugaucaccaccaucaucaucgugaucaucgugauccugcugagccugaucgccgugggccugcugcuguacugcaaggccagaagcacccccgugacccugagcaaggaccagcugagcggcaucaacaacaucgccuucagcaacugaggacuagugcaucacauuuaaaagcaucucagccuaccaugagaauaagagaaagaaaaugaagaucaauagcuuauucaucucuuuuucuuuuucguugguguaaagccaacacccugucuaaaaaacauaaauuucuuuaaucauuuugccucuuuucucugugcuucaauuaauaaaaaauggaaagaaccuagaucuaaaaaaaaaaaaaaaaaaaaaaaaaaaaaaaaaaaaaaaaaaaaaaaaaaaaaaaaaaaaaaaaugcaucccccccccccccccccccccccccccccccaaaggcucuuuucagagccaccagaauu

SEQ ID NO: 6422 - RNA, 1990 nt, Artificial Sequence
  mRNA product Design i-2 comprising derived and/or modified sequence from HRSV(A2)__F_DSCav1_mut6 (opt5)
ggggcgcugccuacggagguggcagccaucuccuucucggcaucaagcuuaccauggagcugcucauccugaaggccaacgcuauuaccacaauccuuacggccgugaccuucugcuuugcgagcggccagaauauuacagaagaguucuaccaauccaccuguucugcugucagcaaaggguaucugggagcccucagaacaggcugguacaccuccguuaucacaauugaacugucuaacaucaaggagaauaaaugcaacgggaccgacgccaaggugaaacuuaucaagcaggaacuggauaaguauaaaaaugcugugacggaccuccagaugcugauguguagcacccccgccacaggauccggcucugcuauugccagcggggucgcggugugcaagguucugcaccucgagggagaggugaacaaaaucaaguccgcccugcuuagcaccaauaaagcugucgugucucuguccaacggcguuagcgugcucacauuuaagguccuggaucuuaagaauuacauugacaaacagcugcucccuauccugaacaagcaaucuuguuccauuccgaaucccgaaaccgugauggaguuccagcagaaaaacaaucggcugcucgaaaucacgcgcgaguuuagcgugaacgccggcgucacaaccccuguuucuacauauaugcugaccaauuccgagcuucugagccucauuaacgauaugcccaucaccaacgaccagaagaaacugauguccaauaacgugcaaaucgugagacagcagucuuacagcauuaugugcaucauuaaggaagagguccuugcuuaugugguucagcugccucucuacggggugaucgauacacccuguuggaaacugcauacguccccucugugcaccacaaauaccaaggaaggaagcaacauuugucucacacggaccgaccgcggcugguacugcgauaaugccgggucugucuccuucuuuccgcaagcggagacguguaaggugugcagcaacagaguuuucugcgacacaaugaacucucugacccuucccagcgaagugaaucuguguaaugucgauaucuuuaacccuaaauaugacugcaagaucaugaccuccaaaacagaugugucuagcuccgucauuaccagccucggagccaucgugucuuguuacggcaagacaaaaugcacggcuuccaauaagaacaaggggauuaucaaaaccuucagcaauggaugugacuauguuucuaacaagggcguggacacagucuccgugggcaauacccuguacuauguuaacaaacaggaggggcagagccuuuacgugaagggagagcccauuaucaacuuuuaugauccucuggucuuccccuccgacgaauuugaugccucuaucagccaagugaaugagaaaauuaaccagucccucgcuuucauccggaagucugacgaacugcugcacaaugugaacgccggcaagagcacaaccaauauuaugaucacgaccauuaucauuguuaucaucgucauucuccugucccuuaucgccguggggcugcuccuguacugcaaagcucgcagcacaccggugacccugucuaaggaucagcuuuccggaauuaacaauaucgcguucagcaacugaggacuagugcaucacauuuaaaagcaucucagccuaccaugagaauaagagaaagaaaaugaagaucaauagcuuauucaucucuuuuucuuuuucguugguguaaagccaacacccugucuaaaaaacauaaauuucuuuaaucauuuugccucuuuucucugugcuucaauuaauaaaaaauggaaagaaccuagaucuaaaaaaaaaaaaaaaaaaaaaaaaaaaaaaaaaaaaaaaaaaaaaaaaaaaaaaaaaaaaaaaaugcaucccccccccccccccccccccccccccccccaaaggcucuuuucagagccaccagaauu

SEQ ID NO: 6423 - RNA, 1990 nt, Artificial Sequence
  mRNA product Design i-2 comprising derived and/or modified sequence from HRSV(A2)__F_DSCav1_mut6 (opt6)
ggggcgcugccuacggagguggcagccaucuccuucucggcaucaagcuuaccauggaacuauuaaucuuaaaagcaaaugcuauaaccacaauauuaacagcaguaacauucuguuuugccuccggacaaaacauaacagaagaauuuuaucaaucaacaugcucugcaguauccaaagguuacuuaggcgcacuacgcacuggaugguauacaucaguaauaacaauagaacuaucaaacauaaaagaaaauaaauguaacgguacugacgcaaaagugaaacuaauuaaacaagaacucgacaaauacaaaaaugcuguaacagaccuacaaaugcuaaugugcucaacacccgcaaccggaucaggaucagccauagccuccggagucgcaguaugcaaaguauuacaucuugaaggagaaguaaauaaaauaaaaucagcauuacuauccacaaauaaagccguaguaucacuaucaaacgguguauccguccuuacauucaaaguauuagaucuaaaaaacuacauagauaaacaacuacuacccaucuuaaacaaacaaucaugcucaauucccaacccagaaacagucauggaauuucaacaaaaaaacaacagacucuuagaaauaacacgagaauuuucaguaaacgcaggaguaaccacaccaguaaguacauacaugcucaccaacucagaauuauuaucacuuauuaacgacaugccaauuacaaacgaccaaaaaaaauuaaugucaaacaauguccaaauuguuagacaacaaucauacucuauaauguguauaauaaaagaagaaguacuagcuuacguaguucaauuaccacuauauggcguaauagauacaccuugcuggaaacuacauacaucuccauuauguacaacuaacacaaaagaaggaucuaacauaugccuaacacgcacagaucgaggaugguacugcgauaaugcagguuccguaucauucuuuccacaagcagaaacauguaaaguaugcucaaacagaguauucugugacacuaugaacuccuuaacccuacccucagaagucaaucuaugcaacguugacauauuuaacccaaaauacgacuguaaaaucaugacaucuaaaacagacguaucaucaucaguuauuacaucccuaggagcaauaguaucuugcuacggaaaaacaaaauguacagcauccaacaaaaacaaaggaauaaucaaaacauucucaaacggcugcgacuacguaucaaacaaagguguagacacaguaucaguaggaaauacuuuauauuacguaaauaaacaagaaggacaaucucuauacguuaaaggcgaaccuauuauaaacuucuacgacccacucguauucccuucagacgaauuugacgcaucuauaucccaaguuaacgaaaaaaucaaccaaucauuagccuuuauaagaaaauccgacgaauuauuacauaacgucaacgcuggaaaaucaacaacuaacauaaugauaaccacaauaauaauagucaucauaguuauauuacuaagucuaauagccguaggccuccuacuuuauugcaaagcaagaucaacaccaguaacauuauccaaagaccaacucagcggcauaaacaauauagcuuuuucaaacuagggacuagugcaucacauuuaaaagcaucucagccuaccaugagaauaagagaaagaaaaugaagaucaauagcuuauucaucucuuuuucuuuuucguugguguaaagccaacacccugucuaaaaaacauaaauuucuuuaaucauuuugccucuuuucucugugcuucaauuaauaaaaaauggaaagaaccuagaucuaaaaaaaaaaaaaaaaaaaaaaaaaaaaaaaaaaaaaaaaaaaaaaaaaaaaaaaaaaaaaaaaugcaucccccccccccccccccccccccccccccccaaaggcucuuuucagagccaccagaauu

SEQ ID NO: 6424 - RNA, 1990 nt, Artificial Sequence
  mRNA product Design i-2 comprising derived and/or modified sequence from HRSV(A2)__F_DSCav1_mut6 (opt11)
ggggcgcugccuacggagguggcagccaucuccuucucggcaucaagcuuaccauggaacuccucauccucaaagccaacgcaaucacaaccauacuaacugcaguuacuuucugcuucgcauccggccaaaacaucaccgaagaguucuaccaaucaaccugcuccgcagucuccaaaggauaccucggagcccuucgcaccggcugguacaccuccgucauaaccaucgaacucucaaacauaaaagaaaacaaaugcaacggcacagacgcgaaagucaaacuuaucaaacaagaacucgacaaauacaaaaacgccgucaccgaccugcagaugcucaugugcucaacccccgccacaggaagcggcucugcuaucgcuuccggcgucgccgucugcaaaguccuccaccucgaaggcgaaguaaacaaaaucaagucagcccuccucuccaccaacaaagccgucgucucucucucaaacggcguauccguccucacauucaaaguccucgaccucaaaaacuacaucgacaaacaacuucuccccauccuaaacaaacaaucaugcuccauccccaaccccgaaacagucauggaauuucaacaaaagaacaaccgccucuuagaaaucacccgagaauuuuccgucaacgcgggagucacaacccccguuucuacguauaugcucaccaacuccgaacuccuuucccucauaaacgacaugccaaucaccaacgaccaaaagaaacucaugucaaacaacguccaaaucguccgacaacaauccuacucuauuaugugcaucaucaaagaagaaguucucgccuacgucguccaacuaccccucuacggcgugaucgacacccccugcuggaaacuacacaccucaccccucugcaccaccaacaccaaggaaggcuccaacaucugccucacccgcaccgaccgcggcugguacugcgacaacgcuggcuccgucucauucuucccgcaagccgaaacuugcaaaguaugcuccaacagaguauucugcgacaccaugaacucacuaacccucccuuccgaagucaaccuuugcaacguugacauauucaacccaaaguacgauugcaaaauuaugacauccaaaacagaugucuccuccuccgucaucacaucccucggugccauuguaucaugcuacggaaaaaccaaaugcaccgcauccaacaaaaacaaaggaaucaucaaaaccuucucaaacggcugcgauuacgucucaaacaaaggagucgacacagucuccgucggaaacacccuauacuacgucaacaaacaagaaggccaaucccuguacgucaaaggagaacccaucaucaacuucuacgacccccucgucuucccgagcgacgaguucgacgccuccaucucacaagucaaugaaaagaucaaccaaucccuugccuucauccggaaaucggacgaacuccuacacaacgugaacgcuggaaaaucaaccaccaacaucaugaucacaaccaucauuaucgucaucaucgucauacuccucucccuaaucgccgucggccuccuccuguauugcaaagcucgcuccacccccgucacccuguccaaagaccaacucuccggaaucaacaacaucgccuucucaaacuaaggacuagugcaucacauuuaaaagcaucucagccuaccaugagaauaagagaaagaaaaugaagaucaauagcuuauucaucucuuuuucuuuuucguugguguaaagccaacacccugucuaaaaaacauaaauuucuuuaaucauuuugccucuuuucucugugcuucaauuaauaaaaaauggaaagaaccuagaucuaaaaaaaaaaaaaaaaaaaaaaaaaaaaaaaaaaaaaaaaaaaaaaaaaaaaaaaaaaaaaaaaugcaucccccccccccccccccccccccccccccccaaaggcucuuuucagagccaccagaauu

SEQ ID NO: 6425 - RNA, 1825 nt, Artificial Sequence
  mRNA product Design i-3 comprising derived and/or modified sequence from HRSV(A2)__F_DSCav1_mut6 (opt1)
gggagaaagcuuaccauggagcugcucauccugaaggccaacgccaucaccaccauccugacggcggugaccuucugcuucgccagcggccagaacaucaccgaggaguucuaccaguccacgugcagcgccgucuccaagggguaccucggcgcccugcggaccggcugguacaccuccgugaucaccaucgagcugagcaacaucaaggagaacaagugcaacgggaccgacgccaaggugaagcucaucaagcaggagcuggacaaguacaagaacgcggucacggaccugcagaugcugaugugcuccaccccggcaaccggcuccggcuccgccaucgcgagcggcgucgccgugugcaaggugcugcaccucgagggggaggucaacaagaucaagagcgcccugcuguccaccaacaaggccguggugagccucuccaacggcgucagcgugcugaccuucaaggugcuggaccucaagaacuacaucgacaagcagcugcugcccauccugaacaagcagagcugcuccauccccaaccccgagacggugauggaguuccagcagaagaacaaccggcuccuggagaucacccgcgaguucagcgugaacgccggggucaccacccccguguccacguacaugcugaccaacagcgagcuccugucccugaucaacgacaugccgaucaccaacgaccagaagaagcucaugagcaacaacgugcagaucguccggcagcaguccuacagcaucaugugcaucaucaaggaggaggugcuggcguacgugguccagcugccccucuacggcgugaucgacacccccugcuggaagcugcacacgagcccccugugcaccaccaacaccaaggagggguccaacaucugccucacgcgcaccgaccggggcugguacugcgacaacgccggcagcgucuccuucuucccgcaggccgagaccugcaaggugugcagcaaccgcguguucugcgacaccaugaacucccugacgcugcccagcgagguaaaccucugcaacgucgacaucuucaaccccaaguacgacugcaagaucaugaccuccaagaccgacgugagcuccagcgugaucaccucccugggggccaucgucagcugcuacggcaagacgaagugcaccgccagcaacaagaacaaggggaucaucaagaccuucuccaacggcugcgacuacgugagcaacaagggcguggacaccguguccgucgggaacacccuguacuacgugaacaagcaggagggccagagccucuacgugaagggggagcccaucaucaacuucuacgacccgcuggucuuccccuccgacgaguucgacgcgagcaucucccaggugaacgagaagaucaaccagagccuggccuucauccgcaaguccgacgagcugcuccacaacgugaacgccggcaagagcacgaccaacaucaugaucaccaccaucaucaucgucaucaucgugauccugcugucccucaucgccguggggcugcugcucuacugcaaggcccggagcacgcccgucacccuguccaaggaccagcugagcggcaucaacaacaucgcguucuccaacugaggacuaguuauaagacugacuagcccgaugggccucccaacgggcccuccuccccuccuugcaccgagauuaauaaaaaaaaaaaaaaaaaaaaaaaaaaaaaaaaaaaaaaaaaaaaaaaaaaaaaaaaaaaaaaaaugcaucccccccccccccccccccccccccccccccaaaggcucuuuucagagccaccagaauu

SEQ ID NO: 6426 - RNA, 1825 nt, Artificial Sequence
  mRNA product Design i-3 comprising derived and/or modified sequence from HRSV(A2)__F_DSCav1_mut6 (opt1)
gggagaaagcuuaccauggagcugcucauccugaaggccaacgccaucaccaccauccugacggcggugaccuucugcuucgccagcggccagaacaucaccgaggaguucuaccaguccacgugcagcgccgucuccaagggguaccucggcgcccugcgcaccgggugguacaccagcgugaucaccaucgagcuguccaacaucaaggagaacaagugcaacggcaccgacgccaaggugaagcucaucaagcaggagcuggacaaguacaagaacgcggucacggaccugcagaugcucaugugcagcacccccgccaccggguccggcagcgccaucgccuccggcguggcggugugcaagguccugcaccuggagggggaggugaacaagaucaagagcgcccuccuguccaccaacaaggccguggucagccuguccaacggcgugagcgugcucacguucaagguccuggaccugaagaacuacaucgacaagcagcuccugccgauccugaacaagcaguccugcagcauccccaaccccgagaccgugauggaguuccagcagaagaacaaccggcuccuggagaucacccgcgaguucuccgugaacgccggggucaccacgcccgugagcaccuacaugcugaccaacuccgagcuccugagccugaucaacgacaugccgaucaccaacgaccagaagaagcucaugagcaacaacgugcagaucguccggcagcaguccuacagcaucaugugcaucaucaaggaggaggugcuggccuacgugguccagcugccccucuacggcgugaucgacacgcccugcuggaagcugcacaccagcccccugugcaccaccaacacgaaggaggggagcaacaucugccucacccgcaccgaccggggcugguacugcgacaacgcgggcuccgugagcuucuucccgcaggccgagaccugcaaggucugcuccaaccgcguguucugcgacacgaugaacagccugacccugcccuccgaggucaaccucugcaacguggacaucuucaaccccaaguacgacugcaagaucaugaccagcaagaccgacguguccagcuccgucaucacgagccugggggccaucguguccugcuacggcaagaccaagugcaccgccagcaacaagaacaaggggaucaucaagaccuucuccaacggcugcgacuacgugagcaacaagggcgucgacacgguguccguggggaacacccuguacuacgucaacaagcaggagggccagagccucuacgugaagggggagcccaucaucaacuucuacgacccgcugguguuccccagcgacgaguucgacgccuccaucagccaggucaacgagaagaucaaccagucccuggcguucauccggaaguccgacgagcuccugcacaacgugaacgccggcaaguccaccaccaacaucaugaucaccacgaucaucaucgugaucaucgucauccugcucagccugaucgccguggggcugcuccuguacugcaaggcccgcuccacccccgugacccugagcaaggaccagcuguccggcaucaacaacaucgccuucagcaacugaggacuaguuauaagacugacuagcccgaugggccucccaacgggcccuccuccccuccuugcaccgagauuaauaaaaaaaaaaaaaaaaaaaaaaaaaaaaaaaaaaaaaaaaaaaaaaaaaaaaaaaaaaaaaaaaugcaucccccccccccccccccccccccccccccccaaaggcucuuuucagagccaccagaauu

SEQ ID NO: 6427 - RNA, 1825 nt, Artificial Sequence
  mRNA product Design i-3 comprising derived and/or modified sequence from HRSV(A2)__F_DSCav1_mut6 (opt2)
gggagaaagcuuaccauggagcuccucauccucaaggccaacgccaucaccaccauccucaccgccgucaccuucugcuucgccuccggccagaacaucaccgaggaguucuaccaguccaccugcuccgccgucuccaagggcuaccucggcgcccuccgcaccggcugguacaccuccgucaucaccaucgagcucuccaacaucaaggagaacaagugcaacggcaccgacgccaaggucaagcucaucaagcaggagcucgacaaguacaagaacgccgucaccgaccuccagaugcucaugugcuccacccccgccaccggcuccggcuccgccaucgccuccggcgucgccgucugcaagguccuccaccucgagggcgaggucaacaagaucaaguccgcccuccucuccaccaacaaggccgucgucucccucuccaacggcgucuccguccucaccuucaagguccucgaccucaagaacuacaucgacaagcagcuccuccccauccucaacaagcaguccugcuccauccccaaccccgagaccgucauggaguuccagcagaagaacaaccgccuccucgagaucacccgcgaguucuccgucaacgccggcgucaccacccccgucuccaccuacaugcucaccaacuccgagcuccucucccucaucaacgacaugcccaucaccaacgaccagaagaagcucauguccaacaacguccagaucguccgccagcaguccuacuccaucaugugcaucaucaaggaggagguccucgccuacgucguccagcucccccucuacggcgucaucgacacccccugcuggaagcuccacaccuccccccucugcaccaccaacaccaaggagggcuccaacaucugccucacccgcaccgaccgcggcugguacugcgacaacgccggcuccgucuccuucuucccccaggccgagaccugcaaggucugcuccaaccgcgucuucugcgacaccaugaacucccucacccuccccuccgaggucaaccucugcaacgucgacaucuucaaccccaaguacgacugcaagaucaugaccuccaagaccgacgucuccuccuccgucaucaccucccucggcgccaucgucuccugcuacggcaagaccaagugcaccgccuccaacaagaacaagggcaucaucaagaccuucuccaacggcugcgacuacgucuccaacaagggcgucgacaccgucuccgucggcaacacccucuacuacgucaacaagcaggagggccagucccucuacgucaagggcgagcccaucaucaacuucuacgacccccucgucuuccccuccgacgaguucgacgccuccaucucccaggucaacgagaagaucaaccagucccucgccuucauccgcaaguccgacgagcuccuccacaacgucaacgccggcaaguccaccaccaacaucaugaucaccaccaucaucaucgucaucaucgucauccuccucucccucaucgccgucggccuccuccucuacugcaaggcccgcuccacccccgucacccucuccaaggaccagcucuccggcaucaacaacaucgccuucuccaacugaggacuaguuauaagacugacuagcccgaugggccucccaacgggcccuccuccccuccuugcaccgagauuaauaaaaaaaaaaaaaaaaaaaaaaaaaaaaaaaaaaaaaaaaaaaaaaaaaaaaaaaaaaaaaaaaugcaucccccccccccccccccccccccccccccccaaaggcucuuuucagagccaccagaauu

SEQ ID NO: 6428 - RNA, 1825 nt, Artificial Sequence
  mRNA product Design i-3 comprising derived and/or modified sequence from HRSV(A2)__F_DSCav1_mut6 (opt3)
gggagaaagcuuaccauggagcugcucauccuuaaggccaacgcuauuaccacaauacugacugcagugacguucugcuuugccagcggccagaauaucaccgaagaguucuaccaauccacauguucugcggucucaaaaggguauuugggagcuuuaagaacugguugguacaccaguguuauuacaaucgaacugagcaacauuaaggagaauaaaugcaacggcaccgacgccaaggugaaacuaaucaagcaggaacucgauaaguauaaaaaugcaguaacugaccugcagaugcuuauguguuccacacccgccaccgggucuggaucggcuauagcaucaggcguggccgucugcaaggugcugcacuuggagggugagguuaacaaaaucaagagcgcucuccugaguacgaauaaagccguggucucccugucuaacggggugagcguacucacuuuuaagguuuuagaucugaagaauuacauugacaaacagcuuuugccuauccugaacaagcaauccuguucaauuccaaauccggaaaccgugauggaguuccagcagaaaaacaauaggcuacucgaaaucacacgggaguuuagugucaacgcgggagugacuacccccgugagcacauauaugcugaccaauucugagcuucuguccuugauaaacgauaugccuauuacgaacgaccagaagaaacucaugucaaauaacguccaaaucguucgccagcagagcuacaguauuaugugcaucaucaaggaagaggugcuggcauauguagugcaguuaccacuguacggcgucauugauacucccuguuggaaacuccauacaucuccucuuugcaccacuaauacaaaggaaggcuccaacauaugucugacccgaacggaccgugggugguacugcgauaaugccggaagcgugucguucuuuccacaagcugagaccuguaagguuugcucuaacagaguguucugcgacacaaugaacuccuugacucuacccucagaagucaaucuguguaauguggauaucuuuaacccuaaauaugacugcaagauuaugaccaguaaaacagauguaagcuccucuguuaucacuagccucggugccauagugucauguuacggcaagaccaaaugcacagcaaguaauaagaacaaggggauuaucaaaaccuucuccaauggaugugacuaugucagcaacaagggcguggacacugucucuguggguaauacgcuguacuauguuaacaaacaggaggggcagucacuuuacgugaagggagagccaaucauuaacuuuuaugauccgcugguauuccccagugacgaauuugaugcuagcaucucccaagucaaugagaaaauuaaccagucuuuggccuucauaaggaagucggacgaacuccugcacaaugugaacgcgggcaagagcacaaccaauaucaugauuacuaccaucaucauuguuauaaucgugauuuuacugucccuaaucgccgucggccuccugcuuuacugcaaagcacggucaacaccugugaccuugaguaaggaucagcugucugggauuaacaauaucgcuuucagcaacugaggacuaguuauaagacugacuagcccgaugggccucccaacgggcccuccuccccuccuugcaccgagauuaauaaaaaaaaaaaaaaaaaaaaaaaaaaaaaaaaaaaaaaaaaaaaaaaaaaaaaaaaaaaaaaaaugcaucccccccccccccccccccccccccccccccaaaggcucuuuucagagccaccagaauu

SEQ ID NO: 6429 - RNA, 1825 nt, Artificial Sequence
  mRNA product Design i-3 comprising derived and/or modified sequence from HRSV(A2)__F_DSCav1_mut6 (opt4)
gggagaaagcuuaccauggagcugcugauccugaaggccaacgccaucaccaccauccugaccgccgugaccuucugcuucgccagcggccagaacaucaccgaggaguucuaccagagcaccugcagcgccgugagcaagggcuaccugggcgcccugagaaccggcugguacaccagcgugaucaccaucgagcugagcaacaucaaggagaacaagugcaacggcaccgacgccaaggugaagcugaucaagcaggagcuggacaaguacaagaacgccgugaccgaccugcagaugcugaugugcagcacccccgccaccggcagcggcagcgccaucgccagcggcguggccgugugcaaggugcugcaccuggagggcgaggugaacaagaucaagagcgcccugcugagcaccaacaaggccguggugagccugagcaacggcgugagcgugcugaccuucaaggugcuggaccugaagaacuacaucgacaagcagcugcugcccauccugaacaagcagagcugcagcauccccaaccccgagaccgugauggaguuccagcagaagaacaacagacugcuggagaucaccagagaguucagcgugaacgccggcgugaccacccccgugagcaccuacaugcugaccaacagcgagcugcugagccugaucaacgacaugcccaucaccaacgaccagaagaagcugaugagcaacaacgugcagaucgugagacagcagagcuacagcaucaugugcaucaucaaggaggaggugcuggccuacguggugcagcugccccuguacggcgugaucgacacccccugcuggaagcugcacaccagcccccugugcaccaccaacaccaaggagggcagcaacaucugccugaccagaaccgacagaggcugguacugcgacaacgccggcagcgugagcuucuucccccaggccgagaccugcaaggugugcagcaacagaguguucugcgacaccaugaacagccugacccugcccagcgaggugaaccugugcaacguggacaucuucaaccccaaguacgacugcaagaucaugaccagcaagaccgacgugagcagcagcgugaucaccagccugggcgccaucgugagcugcuacggcaagaccaagugcaccgccagcaacaagaacaagggcaucaucaagaccuucagcaacggcugcgacuacgugagcaacaagggcguggacaccgugagcgugggcaacacccuguacuacgugaacaagcaggagggccagagccuguacgugaagggcgagcccaucaucaacuucuacgacccccugguguuccccagcgacgaguucgacgccagcaucagccaggugaacgagaagaucaaccagagccuggccuucaucagaaagagcgacgagcugcugcacaacgugaacgccggcaagagcaccaccaacaucaugaucaccaccaucaucaucgugaucaucgugauccugcugagccugaucgccgugggccugcugcuguacugcaaggccagaagcacccccgugacccugagcaaggaccagcugagcggcaucaacaacaucgccuucagcaacugaggacuaguuauaagacugacuagcccgaugggccucccaacgggcccuccuccccuccuugcaccgagauuaauaaaaaaaaaaaaaaaaaaaaaaaaaaaaaaaaaaaaaaaaaaaaaaaaaaaaaaaaaaaaaaaaugcaucccccccccccccccccccccccccccccccaaaggcucuuuucagagccaccagaauu

SEQ ID NO: 6430 - RNA, 1825 nt, Artificial Sequence
  mRNA product Design i-3 comprising derived and/or modified sequence from HRSV(A2)__F_DSCav1_mut6 (opt5)
gggagaaagcuuaccauggagcugcucauccugaaggccaacgcuauuaccacaauccuuacggccgugaccuucugcuuugcgagcggccagaauauuacagaagaguucuaccaauccaccuguucugcugucagcaaaggguaucugggagcccucagaacaggcugguacaccuccguuaucacaauugaacugucuaacaucaaggagaauaaaugcaacgggaccgacgccaaggugaaacuuaucaagcaggaacuggauaaguauaaaaaugcugugacggaccuccagaugcugauguguagcacccccgccacaggauccggcucugcuauugccagcggggucgcggugugcaagguucugcaccucgagggagaggugaacaaaaucaaguccgcccugcuuagcaccaauaaagcugucgugucucuguccaacggcguuagcgugcucacauuuaagguccuggaucuuaagaauuacauugacaaacagcugcucccuauccugaacaagcaaucuuguuccauuccgaaucccgaaaccgugauggaguuccagcagaaaaacaaucggcugcucgaaaucacgcgcgaguuuagcgugaacgccggcgucacaaccccuguuucuacauauaugcugaccaauuccgagcuucugagccucauuaacgauaugcccaucaccaacgaccagaagaaacugauguccaauaacgugcaaaucgugagacagcagucuuacagcauuaugugcaucauuaaggaagagguccuugcuuaugugguucagcugccucucuacggggugaucgauacacccuguuggaaacugcauacguccccucugugcaccacaaauaccaaggaaggaagcaacauuugucucacacggaccgaccgcggcugguacugcgauaaugccgggucugucuccuucuuuccgcaagcggagacguguaaggugugcagcaacagaguuuucugcgacacaaugaacucucugacccuucccagcgaagugaaucuguguaaugucgauaucuuuaacccuaaauaugacugcaagaucaugaccuccaaaacagaugugucuagcuccgucauuaccagccucggagccaucgugucuuguuacggcaagacaaaaugcacggcuuccaauaagaacaaggggauuaucaaaaccuucagcaauggaugugacuauguuucuaacaagggcguggacacagucuccgugggcaauacccuguacuauguuaacaaacaggaggggcagagccuuuacgugaagggagagcccauuaucaacuuuuaugauccucuggucuuccccuccgacgaauuugaugccucuaucagccaagugaaugagaaaauuaaccagucccucgcuuucauccggaagucugacgaacugcugcacaaugugaacgccggcaagagcacaaccaauauuaugaucacgaccauuaucauuguuaucaucgucauucuccugucccuuaucgccguggggcugcuccuguacugcaaagcucgcagcacaccggugacccugucuaaggaucagcuuuccggaauuaacaauaucgcguucagcaacugaggacuaguuauaagacugacuagcccgaugggccucccaacgggcccuccuccccuccuugcaccgagauuaauaaaaaaaaaaaaaaaaaaaaaaaaaaaaaaaaaaaaaaaaaaaaaaaaaaaaaaaaaaaaaaaaugcaucccccccccccccccccccccccccccccccaaaggcucuuuucagagccaccagaauu

SEQ ID NO: 6431 - RNA, 1825 nt, Artificial Sequence
  mRNA product Design i-3 comprising derived and/or modified sequence from HRSV(A2)__F_DSCav1_mut6 (opt6)
gggagaaagcuuaccauggaacuauuaaucuuaaaagcaaaugcuauaaccacaauauuaacagcaguaacauucuguuuugccuccggacaaaacauaacagaagaauuuuaucaaucaacaugcucugcaguauccaaagguuacuuaggcgcacuacgcacuggaugguauacaucaguaauaacaauagaacuaucaaacauaaaagaaaauaaauguaacgguacugacgcaaaagugaaacuaauuaaacaagaacucgacaaauacaaaaaugcuguaacagaccuacaaaugcuaaugugcucaacacccgcaaccggaucaggaucagccauagccuccggagucgcaguaugcaaaguauuacaucuugaaggagaaguaaauaaaauaaaaucagcauuacuauccacaaauaaagccguaguaucacuaucaaacgguguauccguccuuacauucaaaguauuagaucuaaaaaacuacauagauaaacaacuacuacccaucuuaaacaaacaaucaugcucaauucccaacccagaaacagucauggaauuucaacaaaaaaacaacagacucuuagaaauaacacgagaauuuucaguaaacgcaggaguaaccacaccaguaaguacauacaugcucaccaacucagaauuauuaucacuuauuaacgacaugccaauuacaaacgaccaaaaaaaauuaaugucaaacaauguccaaauuguuagacaacaaucauacucuauaauguguauaauaaaagaagaaguacuagcuuacguaguucaauuaccacuauauggcguaauagauacaccuugcuggaaacuacauacaucuccauuauguacaacuaacacaaaagaaggaucuaacauaugccuaacacgcacagaucgaggaugguacugcgauaaugcagguuccguaucauucuuuccacaagcagaaacauguaaaguaugcucaaacagaguauucugugacacuaugaacuccuuaacccuacccucagaagucaaucuaugcaacguugacauauuuaacccaaaauacgacuguaaaaucaugacaucuaaaacagacguaucaucaucaguuauuacaucccuaggagcaauaguaucuugcuacggaaaaacaaaauguacagcauccaacaaaaacaaaggaauaaucaaaacauucucaaacggcugcgacuacguaucaaacaaagguguagacacaguaucaguaggaaauacuuuauauuacguaaauaaacaagaaggacaaucucuauacguuaaaggcgaaccuauuauaaacuucuacgacccacucguauucccuucagacgaauuugacgcaucuauaucccaaguuaacgaaaaaaucaaccaaucauuagccuuuauaagaaaauccgacgaauuauuacauaacgucaacgcuggaaaaucaacaacuaacauaaugauaaccacaauaauaauagucaucauaguuauauuacuaagucuaauagccguaggccuccuacuuuauugcaaagcaagaucaacaccaguaacauuauccaaagaccaacucagcggcauaaacaauauagcuuuuucaaacuagggacuaguuauaagacugacuagcccgaugggccucccaacgggcccuccuccccuccuugcaccgagauuaauaaaaaaaaaaaaaaaaaaaaaaaaaaaaaaaaaaaaaaaaaaaaaaaaaaaaaaaaaaaaaaaaugcaucccccccccccccccccccccccccccccccaaaggcucuuuucagagccaccagaauu

SEQ ID NO: 6432 - RNA, 1825 nt, Artificial Sequence
  mRNA product Design i-3 comprising derived and/or modified sequence from HRSV(A2)__F_DSCav1_mut6 (opt11)
gggagaaagcuuaccauggaacuccucauccucaaagccaacgcaaucacaaccauacuaacugcaguuacuuucugcuucgcauccggccaaaacaucaccgaagaguucuaccaaucaaccugcuccgcagucuccaaaggauaccucggagcccuucgcaccggcugguacaccuccgucauaaccaucgaacucucaaacauaaaagaaaacaaaugcaacggcacagacgcgaaagucaaacuuaucaaacaagaacucgacaaauacaaaaacgccgucaccgaccugcagaugcucaugugcucaacccccgccacaggaagcggcucugcuaucgcuuccggcgucgccgucugcaaaguccuccaccucgaaggcgaaguaaacaaaaucaagucagcccuccucuccaccaacaaagccgucgucucucucucaaacggcguauccguccucacauucaaaguccucgaccucaaaaacuacaucgacaaacaacuucuccccauccuaaacaaacaaucaugcuccauccccaaccccgaaacagucauggaauuucaacaaaagaacaaccgccucuuagaaaucacccgagaauuuuccgucaacgcgggagucacaacccccguuucuacguauaugcucaccaacuccgaacuccuuucccucauaaacgacaugccaaucaccaacgaccaaaagaaacucaugucaaacaacguccaaaucguccgacaacaauccuacucuauuaugugcaucaucaaagaagaaguucucgccuacgucguccaacuaccccucuacggcgugaucgacacccccugcuggaaacuacacaccucaccccucugcaccaccaacaccaaggaaggcuccaacaucugccucacccgcaccgaccgcggcugguacugcgacaacgcuggcuccgucucauucuucccgcaagccgaaacuugcaaaguaugcuccaacagaguauucugcgacaccaugaacucacuaacccucccuuccgaagucaaccuuugcaacguugacauauucaacccaaaguacgauugcaaaauuaugacauccaaaacagaugucuccuccuccgucaucacaucccucggugccauuguaucaugcuacggaaaaaccaaaugcaccgcauccaacaaaaacaaaggaaucaucaaaaccuucucaaacggcugcgauuacgucucaaacaaaggagucgacacagucuccgucggaaacacccuauacuacgucaacaaacaagaaggccaaucccuguacgucaaaggagaacccaucaucaacuucuacgacccccucgucuucccgagcgacgaguucgacgccuccaucucacaagucaaugaaaagaucaaccaaucccuugccuucauccggaaaucggacgaacuccuacacaacgugaacgcuggaaaaucaaccaccaacaucaugaucacaaccaucauuaucgucaucaucgucauacuccucucccuaaucgccgucggccuccuccuguauugcaaagcucgcuccacccccgucacccuguccaaagaccaacucuccggaaucaacaacaucgccuucucaaacuaaggacuaguuauaagacugacuagcccgaugggccucccaacgggcccuccuccccuccuugcaccgagauuaauaaaaaaaaaaaaaaaaaaaaaaaaaaaaaaaaaaaaaaaaaaaaaaaaaaaaaaaaaaaaaaaaugcaucccccccccccccccccccccccccccccccaaaggcucuuuucagagccaccagaauu

SEQ ID NO: 6433 - protein, 514 aa, Artificial Sequence
  derived and/or modified protein sequence (artificial) from HRSV(A2)__F-del_DSCav1_mut6
MELLILKANAITTILTAVTFCFASGQNITEEFYQSTCSAVSKGYLGALRTGWYTSVITIELSNIKENKCNGTDAKVKLIKQELDKYKNAVTDLQMLMCSTPATGSGSAIASGVAVCKVLHLEGEVNKIKSALLSTNKAVVSLSNGVSVLTFKVLDLKNYIDKQLLPILNKQSCSIPNPETVMEFQQKNNRLLEITREFSVNAGVTTPVSTYMLTNSELLSLINDMPITNDQKKLMSNNVQIVRQQSYSIMCIIKEEVLAYVVQLPLYGVIDTPCWKLHTSPLCTTNTKEGSNICLTRTDRGWYCDNAGSVSFFPQAETCKVCSNRVFCDTMNSLTLPSEVNLCNVDIFNPKYDCKIMTSKTDVSSSVITSLGAIVSCYGKTKCTASNKNKGIIKTFSNGCDYVSNKGVDTVSVGNTLYYVNKQEGQSLYVKGEPIINFYDPLVFPSDEFDASISQVNEKINQSLAFIRKSDELLHNVNAGKSTTNIMITTIIIVIIVILLSLIAVGLLLYCKAR

SEQ ID NO: 6434 - RNA, 1545 nt, Artificial Sequence
  derived and/or modified CDS sequence (opt1) from HRSV(A2)__F-del_DSCav1_mut6
auggagcugcucauccugaaggccaacgccaucaccaccauccugacggcggugaccuucugcuucgccagcggccagaacaucaccgaggaguucuaccaguccacgugcagcgccgucuccaagggguaccucggcgcccugcggaccggcugguacaccuccgugaucaccaucgagcugagcaacaucaaggagaacaagugcaacgggaccgacgccaaggugaagcucaucaagcaggagcuggacaaguacaagaacgcggucacggaccugcagaugcugaugugcuccaccccggcaaccggcuccggcuccgccaucgcgagcggcgucgccgugugcaaggugcugcaccucgagggggaggucaacaagaucaagagcgcccugcuguccaccaacaaggccguggugagccucuccaacggcgucagcgugcugaccuucaaggugcuggaccucaagaacuacaucgacaagcagcugcugcccauccugaacaagcagagcugcuccauccccaaccccgagacggugauggaguuccagcagaagaacaaccggcuccuggagaucacccgcgaguucagcgugaacgccggggucaccacccccguguccacguacaugcugaccaacagcgagcuccugucccugaucaacgacaugccgaucaccaacgaccagaagaagcucaugagcaacaacgugcagaucguccggcagcaguccuacagcaucaugugcaucaucaaggaggaggugcuggcguacgugguccagcugccccucuacggcgugaucgacacccccugcuggaagcugcacacgagcccccugugcaccaccaacaccaaggagggguccaacaucugccucacgcgcaccgaccggggcugguacugcgacaacgccggcagcgucuccuucuucccgcaggccgagaccugcaaggugugcagcaaccgcguguucugcgacaccaugaacucccugacgcugcccagcgagguaaaccucugcaacgucgacaucuucaaccccaaguacgacugcaagaucaugaccuccaagaccgacgugagcuccagcgugaucaccucccugggggccaucgucagcugcuacggcaagacgaagugcaccgccagcaacaagaacaaggggaucaucaagaccuucuccaacggcugcgacuacgugagcaacaagggcguggacaccguguccgucgggaacacccuguacuacgugaacaagcaggagggccagagccucuacgugaagggggagcccaucaucaacuucuacgacccgcuggucuuccccuccgacgaguucgacgcgagcaucucccaggugaacgagaagaucaaccagagccuggccuucauccgcaaguccgacgagcugcuccacaacgugaacgccggcaagagcacgaccaacaucaugaucaccaccaucaucaucgucaucaucgugauccugcugucccucaucgccguggggcugcugcucuacugcaaggcccgguga

SEQ ID NO: 6435 - RNA, 1545 nt, Artificial Sequence
  derived and/or modified CDS sequence (opt1) from HRSV(A2)__F-del_DSCav1_mut6
auggagcugcucauccugaaggccaacgccaucaccaccauccugacggcggugaccuucugcuucgccagcggccagaacaucaccgaggaguucuaccaguccacgugcagcgccgucuccaagggguaccucggcgcccugcgcaccgggugguacaccagcgugaucaccaucgagcuguccaacaucaaggagaacaagugcaacggcaccgacgccaaggugaagcucaucaagcaggagcuggacaaguacaagaacgcggucacggaccugcagaugcucaugugcagcacccccgccaccggguccggcagcgccaucgccuccggcguggcggugugcaagguccugcaccuggagggggaggugaacaagaucaagagcgcccuccuguccaccaacaaggccguggucagccuguccaacggcgugagcgugcucacguucaagguccuggaccugaagaacuacaucgacaagcagcuccugccgauccugaacaagcaguccugcagcauccccaaccccgagaccgugauggaguuccagcagaagaacaaccggcuccuggagaucacccgcgaguucuccgugaacgccggggucaccacgcccgugagcaccuacaugcugaccaacuccgagcuccugagccugaucaacgacaugccgaucaccaacgaccagaagaagcucaugagcaacaacgugcagaucguccggcagcaguccuacagcaucaugugcaucaucaaggaggaggugcuggccuacgugguccagcugccccucuacggcgugaucgacacgcccugcuggaagcugcacaccagcccccugugcaccaccaacacgaaggaggggagcaacaucugccucacccgcaccgaccggggcugguacugcgacaacgcgggcuccgugagcuucuucccgcaggccgagaccugcaaggucugcuccaaccgcguguucugcgacacgaugaacagccugacccugcccuccgaggucaaccucugcaacguggacaucuucaaccccaaguacgacugcaagaucaugaccagcaagaccgacguguccagcuccgucaucacgagccugggggccaucguguccugcuacggcaagaccaagugcaccgccagcaacaagaacaaggggaucaucaagaccuucuccaacggcugcgacuacgugagcaacaagggcgucgacacgguguccguggggaacacccuguacuacgucaacaagcaggagggccagagccucuacgugaagggggagcccaucaucaacuucuacgacccgcugguguuccccagcgacgaguucgacgccuccaucagccaggucaacgagaagaucaaccagucccuggcguucauccggaaguccgacgagcuccugcacaacgugaacgccggcaaguccaccaccaacaucaugaucaccacgaucaucaucgugaucaucgucauccugcucagccugaucgccguggggcugcuccuguacugcaaggcccgcuga

SEQ ID NO: 6436 - RNA, 1545 nt, Artificial Sequence
  derived and/or modified CDS sequence (opt2) from HRSV(A2)__F-del_DSCav1_mut6
auggagcuccucauccucaaggccaacgccaucaccaccauccucaccgccgucaccuucugcuucgccuccggccagaacaucaccgaggaguucuaccaguccaccugcuccgccgucuccaagggcuaccucggcgcccuccgcaccggcugguacaccuccgucaucaccaucgagcucuccaacaucaaggagaacaagugcaacggcaccgacgccaaggucaagcucaucaagcaggagcucgacaaguacaagaacgccgucaccgaccuccagaugcucaugugcuccacccccgccaccggcuccggcuccgccaucgccuccggcgucgccgucugcaagguccuccaccucgagggcgaggucaacaagaucaaguccgcccuccucuccaccaacaaggccgucgucucccucuccaacggcgucuccguccucaccuucaagguccucgaccucaagaacuacaucgacaagcagcuccuccccauccucaacaagcaguccugcuccauccccaaccccgagaccgucauggaguuccagcagaagaacaaccgccuccucgagaucacccgcgaguucuccgucaacgccggcgucaccacccccgucuccaccuacaugcucaccaacuccgagcuccucucccucaucaacgacaugcccaucaccaacgaccagaagaagcucauguccaacaacguccagaucguccgccagcaguccuacuccaucaugugcaucaucaaggaggagguccucgccuacgucguccagcucccccucuacggcgucaucgacacccccugcuggaagcuccacaccuccccccucugcaccaccaacaccaaggagggcuccaacaucugccucacccgcaccgaccgcggcugguacugcgacaacgccggcuccgucuccuucuucccccaggccgagaccugcaaggucugcuccaaccgcgucuucugcgacaccaugaacucccucacccuccccuccgaggucaaccucugcaacgucgacaucuucaaccccaaguacgacugcaagaucaugaccuccaagaccgacgucuccuccuccgucaucaccucccucggcgccaucgucuccugcuacggcaagaccaagugcaccgccuccaacaagaacaagggcaucaucaagaccuucuccaacggcugcgacuacgucuccaacaagggcgucgacaccgucuccgucggcaacacccucuacuacgucaacaagcaggagggccagucccucuacgucaagggcgagcccaucaucaacuucuacgacccccucgucuuccccuccgacgaguucgacgccuccaucucccaggucaacgagaagaucaaccagucccucgccuucauccgcaaguccgacgagcuccuccacaacgucaacgccggcaaguccaccaccaacaucaugaucaccaccaucaucaucgucaucaucgucauccuccucucccucaucgccgucggccuccuccucuacugcaaggcccgcuga

SEQ ID NO: 6437 - RNA, 1545 nt, Artificial Sequence
  derived and/or modified CDS sequence (opt3) from HRSV(A2)__F-del_DSCav1_mut6
auggagcugcucauccuuaaggccaacgcuauuaccacaauacugacugcagugacguucugcuuugccagcggccagaauaucaccgaagaguucuaccaauccacauguucugcggucucaaaaggguauuugggagcuuuaagaacugguugguacaccaguguuauuacaaucgaacugagcaacauuaaggagaauaaaugcaacggcaccgacgccaaggugaaacuaaucaagcaggaacucgauaaguauaaaaaugcaguaacugaccugcagaugcuuauguguuccacacccgccaccgggucuggaucggcuauagcaucaggcguggccgucugcaaggugcugcacuuggagggugagguuaacaaaaucaagagcgcucuccugaguacgaauaaagccguggucucccugucuaacggggugagcguacucacuuuuaagguuuuagaucugaagaauuacauugacaaacagcuuuugccuauccugaacaagcaauccuguucaauuccaaauccggaaaccgugauggaguuccagcagaaaaacaauaggcuacucgaaaucacacgggaguuuagugucaacgcgggagugacuacccccgugagcacauauaugcugaccaauucugagcuucuguccuugauaaacgauaugccuauuacgaacgaccagaagaaacucaugucaaauaacguccaaaucguucgccagcagagcuacaguauuaugugcaucaucaaggaagaggugcuggcauauguagugcaguuaccacuguacggcgucauugauacucccuguuggaaacuccauacaucuccucuuugcaccacuaauacaaaggaaggcuccaacauaugucugacccgaacggaccgugggugguacugcgauaaugccggaagcgugucguucuuuccacaagcugagaccuguaagguuugcucuaacagaguguucugcgacacaaugaacuccuugacucuacccucagaagucaaucuguguaauguggauaucuuuaacccuaaauaugacugcaagauuaugaccaguaaaacagauguaagcuccucuguuaucacuagccucggugccauagugucauguuacggcaagaccaaaugcacagcaaguaauaagaacaaggggauuaucaaaaccuucuccaauggaugugacuaugucagcaacaagggcguggacacugucucuguggguaauacgcuguacuauguuaacaaacaggaggggcagucacuuuacgugaagggagagccaaucauuaacuuuuaugauccgcugguauuccccagugacgaauuugaugcuagcaucucccaagucaaugagaaaauuaaccagucuuuggccuucauaaggaagucggacgaacuccugcacaaugugaacgcgggcaagagcacaaccaauaucaugauuacuaccaucaucauuguuauaaucgugauuuuacugucccuaaucgccgucggccuccugcuuuacugcaaagcacgguga

SEQ ID NO: 6438 - RNA, 1545 nt, Artificial Sequence
  derived and/or modified CDS sequence (opt4) from HRSV(A2)__F-del_DSCav1_mut6
auggagcugcugauccugaaggccaacgccaucaccaccauccugaccgccgugaccuucugcuucgccagcggccagaacaucaccgaggaguucuaccagagcaccugcagcgccgugagcaagggcuaccugggcgcccugagaaccggcugguacaccagcgugaucaccaucgagcugagcaacaucaaggagaacaagugcaacggcaccgacgccaaggugaagcugaucaagcaggagcuggacaaguacaagaacgccgugaccgaccugcagaugcugaugugcagcacccccgccaccggcagcggcagcgccaucgccagcggcguggccgugugcaaggugcugcaccuggagggcgaggugaacaagaucaagagcgcccugcugagcaccaacaaggccguggugagccugagcaacggcgugagcgugcugaccuucaaggugcuggaccugaagaacuacaucgacaagcagcugcugcccauccugaacaagcagagcugcagcauccccaaccccgagaccgugauggaguuccagcagaagaacaacagacugcuggagaucaccagagaguucagcgugaacgccggcgugaccacccccgugagcaccuacaugcugaccaacagcgagcugcugagccugaucaacgacaugcccaucaccaacgaccagaagaagcugaugagcaacaacgugcagaucgugagacagcagagcuacagcaucaugugcaucaucaaggaggaggugcuggccuacguggugcagcugccccuguacggcgugaucgacacccccugcuggaagcugcacaccagcccccugugcaccaccaacaccaaggagggcagcaacaucugccugaccagaaccgacagaggcugguacugcgacaacgccggcagcgugagcuucuucccccaggccgagaccugcaaggugugcagcaacagaguguucugcgacaccaugaacagccugacccugcccagcgaggugaaccugugcaacguggacaucuucaaccccaaguacgacugcaagaucaugaccagcaagaccgacgugagcagcagcgugaucaccagccugggcgccaucgugagcugcuacggcaagaccaagugcaccgccagcaacaagaacaagggcaucaucaagaccuucagcaacggcugcgacuacgugagcaacaagggcguggacaccgugagcgugggcaacacccuguacuacgugaacaagcaggagggccagagccuguacgugaagggcgagcccaucaucaacuucuacgacccccugguguuccccagcgacgaguucgacgccagcaucagccaggugaacgagaagaucaaccagagccuggccuucaucagaaagagcgacgagcugcugcacaacgugaacgccggcaagagcaccaccaacaucaugaucaccaccaucaucaucgugaucaucgugauccugcugagccugaucgccgugggccugcugcuguacugcaaggccagauga

SEQ ID NO: 6439 - RNA, 1545 nt, Artificial Sequence
  derived and/or modified CDS sequence (opt5) from HRSV(A2)__F-del_DSCav1_mut6
auggagcugcucauccugaaggccaacgcuauuaccacaauccuuacggccgugaccuucugcuuugcgagcggccagaauauuacagaagaguucuaccaauccaccuguucugcugucagcaaaggguaucugggagcccucagaacaggcugguacaccuccguuaucacaauugaacugucuaacaucaaggagaauaaaugcaacgggaccgacgccaaggugaaacuuaucaagcaggaacuggauaaguauaaaaaugcugugacggaccuccagaugcugauguguagcacccccgccacaggauccggcucugcuauugccagcggggucgcggugugcaagguucugcaccucgagggagaggugaacaaaaucaaguccgcccugcuuagcaccaauaaagcugucgugucucuguccaacggcguuagcgugcucacauuuaagguccuggaucuuaagaauuacauugacaaacagcugcucccuauccugaacaagcaaucuuguuccauuccgaaucccgaaaccgugauggaguuccagcagaaaaacaaucggcugcucgaaaucacgcgcgaguuuagcgugaacgccggcgucacaaccccuguuucuacauauaugcugaccaauuccgagcuucugagccucauuaacgauaugcccaucaccaacgaccagaagaaacugauguccaauaacgugcaaaucgugagacagcagucuuacagcauuaugugcaucauuaaggaagagguccuugcuuaugugguucagcugccucucuacggggugaucgauacacccuguuggaaacugcauacguccccucugugcaccacaaauaccaaggaaggaagcaacauuugucucacacggaccgaccgcggcugguacugcgauaaugccgggucugucuccuucuuuccgcaagcggagacguguaaggugugcagcaacagaguuuucugcgacacaaugaacucucugacccuucccagcgaagugaaucuguguaaugucgauaucuuuaacccuaaauaugacugcaagaucaugaccuccaaaacagaugugucuagcuccgucauuaccagccucggagccaucgugucuuguuacggcaagacaaaaugcacggcuuccaauaagaacaaggggauuaucaaaaccuucagcaauggaugugacuauguuucuaacaagggcguggacacagucuccgugggcaauacccuguacuauguuaacaaacaggaggggcagagccuuuacgugaagggagagcccauuaucaacuuuuaugauccucuggucuuccccuccgacgaauuugaugccucuaucagccaagugaaugagaaaauuaaccagucccucgcuuucauccggaagucugacgaacugcugcacaaugugaacgccggcaagagcacaaccaauauuaugaucacgaccauuaucauuguuaucaucgucauucuccugucccuuaucgccguggggcugcuccuguacugcaaagcucgcuga

SEQ ID NO: 6440 - RNA, 1545 nt, Artificial Sequence
  derived and/or modified CDS sequence (opt6) from HRSV(A2)__F-del_DSCav1_mut6
auggaacuacucauauuaaaagcaaacgcaauaacaacgauauuaacagcuguaacauucugcuuugcaucaggccaaaauaucaccgaagaauuuuaucaaagcacaugcucugcaguauccaaaggauacuuaggagcauuaagaacaggcugguacacauccguaauaacaauagaacuaucaaacaucaaagaaaacaaaugcaacggcacagacgccaaaguaaaacucauaaaacaagaacuagacaaauauaaaaacgcaguaacagaucuacaaaugcucaugugcuccacaccagcaaccggaucugguucagccauagcauccggcguagccgucugcaaaguauuacaccucgaaggagaaguaaacaaaauaaaaucugcccuauuaucuacaaauaaagccguaguaagucuaaguaacggaguaucaguacuaacauuuaaaguccuagaccugaaaaacuauaucgacaaacaacuauuaccaauacuaaacaaacaauccuguuccaucccuaacccagaaacaguuauggaauuucaacaaaaaaauaaccgccuuuuagaaauaacuagagaauuuucaguaaacgcaggaguuacaacaccaguaucaacauacaugcuaacaaauucagaauuauuaucccuuauaaaugacaugccuaucacaaacgaucaaaaaaaauuaauguccaacaacguacaaauaguaagacaacaaucauauuccaucaugugcaucauaaaagaagaaguccucgcauacguagugcaacuaccacuauacggagucauagauacacccuguuggaaacuucacacaucuccacuaugcacaacaaacacgaaagaaggauccaacauaugccuaacacgaacagacagaggaugguauugcgacaacgcuggaagugugagcuucuucccucaagcagaaacuugcaaaguaugcagcaaucguguauucugcgacacaaugaacucauuaacacucccaagcgaaguaaaccucugcaauguagacaucuuuaauccaaaauacgauuguaaaauaaugacuucaaaaacagacgucucaucaucuguaauaacaucuuuaggagcaauaguuucuugcuacgguaaaacaaaaugcaccgcauccaacaaaaacaaaggaauaauaaaaacauucucuaacggcugcgauuacguaucuaacaaaggaguugacacagucucaguaggaaacacacuauacuacguaaacaaacaagaaggacaaagccuauacguaaaaggagaaccaauaauaaacuucuaugacccauuaguauuuccaagcgaugaauuugacgcuucaauaucacaagucaaugaaaaaauaaaucagagcuuagcauucauaagaaaaucugaugaacuacuacacaauguaaaugcaggaaaauccacuaccaacauaaugauuaccacaauuauaauaguuaucauaguaauacuauuaucacuaauagccguuggauuacuacuauacugcaaagcaagauaa

SEQ ID NO: 6441 - RNA, 1545 nt, Artificial Sequence
  derived and/or modified CDS sequence (opt11) from HRSV(A2)__F-del_DSCav1_mut6
auggaacuacucauccuaaaagcaaacgccaucaccaccauacuaaccgccgucaccuucugcuucgccucgggacaaaacaucaccgaagaguucuaccagucaacgugcuccgccgucucaaaaggcuaccuaggcgcccuccgcaccgggugguauaccuccgucauaacuaucgaacucucuaacaucaaagaaaacaaauguaacggcaccgacgccaaagucaaacuaaucaaacaagaacuggacaaauacaaaaacgccgucaccgaccuacaaaugcucaugugcuccacuccagccaccggcuccgguagcgcaaucgccucaggcguagcuguaugcaaaguccuccaccuagaaggcgaaguaaacaaaauaaaauccgcccuccucucaaccaacaaggccgucgucucacucucaaacggcgucuccguacucaccuuuaaaguccuagaccuuaaaaacuacaucgacaaacaacugcuaccaauccucaacaaacaaucaugcagcaucccaaacccggaaacagucauggaguuccaacagaaaaacaaccgacuccucgaaaucacccgcgaguucuccgucaacgccggagucaccacaccuguaagcacauacaugcuuacuaauuccgaacuccuuucacuaauaaacgacaugccaauaaccaacgaccaaaagaaacucauguccaacaacguacaaaucguacgccaacaauccuacuccaucaugugcaucaucaaagaagaaguccuggccuaugucguacaacucccccuuuacggugucaucgacacacccugcuggaaacuacacaccagcccccucugcacaacaaacaccaaagaaggcuccaacaucugccucacccguaccgaccgaggcugguacugcgacaacgccggcuccgucuccuucuucccccaagccgaaaccugcaaagucugcagcaaccgcgucuucugcgauaccaugaacucccucacacucccaucugaagucaaccucugcaacgucgauauuuucaauccaaaauacgacugcaaaaucaugacuagcaaaaccgacguuagcuccuccgucaucaccucccucggcgccauaguuucaugcuacggcaaaaccaaaugcaccgccuccaacaaaaacaaaggcaucauaaaaaccuucuccaacgggugcgacuacguaucuaauaaaggagucgacaccgucucaguaggaaacacccucuacuaugucaacaaacaagaaggccaaucacuauacguuaaaggcgaaccaaucaucaacuucuacgacccacucgucuuccccagcgacgaguuugacgccucaaucucgcaagucaaugaaaagauuaaccaaucccuagccuucauccgaaaaagugacgaacuccuccacaacguuaacgccggcaaaucuacaaccaacaucaugaucaccacuauaaucaucgucaucauagucauacuucucagccucaucgcagucggacuccuccuuuauugcaaggcacgauaa

SEQ ID NO: 6442 - RNA, 1821 nt, Artificial Sequence
  mRNA product Design a-1 comprising derived and/or modified sequence from HRSV(A2)__F-del_DSCav1_mut6 (opt1)
gggagagucccgcagucggcguccagcggcucugcuuguucgugugugugucguugcaggccuuauucaagcuuaccauggagcugcucauccugaaggccaacgccaucaccaccauccugacggcggugaccuucugcuucgccagcggccagaacaucaccgaggaguucuaccaguccacgugcagcgccgucuccaagggguaccucggcgcccugcggaccggcugguacaccuccgugaucaccaucgagcugagcaacaucaaggagaacaagugcaacgggaccgacgccaaggugaagcucaucaagcaggagcuggacaaguacaagaacgcggucacggaccugcagaugcugaugugcuccaccccggcaaccggcuccggcuccgccaucgcgagcggcgucgccgugugcaaggugcugcaccucgagggggaggucaacaagaucaagagcgcccugcuguccaccaacaaggccguggugagccucuccaacggcgucagcgugcugaccuucaaggugcuggaccucaagaacuacaucgacaagcagcugcugcccauccugaacaagcagagcugcuccauccccaaccccgagacggugauggaguuccagcagaagaacaaccggcuccuggagaucacccgcgaguucagcgugaacgccggggucaccacccccguguccacguacaugcugaccaacagcgagcuccugucccugaucaacgacaugccgaucaccaacgaccagaagaagcucaugagcaacaacgugcagaucguccggcagcaguccuacagcaucaugugcaucaucaaggaggaggugcuggcguacgugguccagcugccccucuacggcgugaucgacacccccugcuggaagcugcacacgagcccccugugcaccaccaacaccaaggagggguccaacaucugccucacgcgcaccgaccggggcugguacugcgacaacgccggcagcgucuccuucuucccgcaggccgagaccugcaaggugugcagcaaccgcguguucugcgacaccaugaacucccugacgcugcccagcgagguaaaccucugcaacgucgacaucuucaaccccaaguacgacugcaagaucaugaccuccaagaccgacgugagcuccagcgugaucaccucccugggggccaucgucagcugcuacggcaagacgaagugcaccgccagcaacaagaacaaggggaucaucaagaccuucuccaacggcugcgacuacgugagcaacaagggcguggacaccguguccgucgggaacacccuguacuacgugaacaagcaggagggccagagccucuacgugaagggggagcccaucaucaacuucuacgacccgcuggucuuccccuccgacgaguucgacgcgagcaucucccaggugaacgagaagaucaaccagagccuggccuucauccgcaaguccgacgagcugcuccacaacgugaacgccggcaagagcacgaccaacaucaugaucaccaccaucaucaucgucaucaucgugauccugcugucccucaucgccguggggcugcugcucuacugcaaggcccggugaggacuagucccuguucccagagcccacuuuuuuuucuuuuuuugaaauaaaauagccugucuuucagaucuaaaaaaaaaaaaaaaaaaaaaaaaaaaaaaaaaaaaaaaaaaaaaaaaaaaaaaaaaaaaaaaaugcaucccccccccccccccccccccccccccccccaaaggcucuuuucagagccaccagaauu

SEQ ID NO: 6443 - RNA, 1821 nt, Artificial Sequence
  mRNA product Design a-1 comprising derived and/or modified sequence from HRSV(A2)__F-del_DSCav1_mut6 (opt1)
gggagagucccgcagucggcguccagcggcucugcuuguucgugugugugucguugcaggccuuauucaagcuuaccauggagcugcucauccugaaggccaacgccaucaccaccauccugacggcggugaccuucugcuucgccagcggccagaacaucaccgaggaguucuaccaguccacgugcagcgccgucuccaagggguaccucggcgcccugcgcaccgggugguacaccagcgugaucaccaucgagcuguccaacaucaaggagaacaagugcaacggcaccgacgccaaggugaagcucaucaagcaggagcuggacaaguacaagaacgcggucacggaccugcagaugcucaugugcagcacccccgccaccggguccggcagcgccaucgccuccggcguggcggugugcaagguccugcaccuggagggggaggugaacaagaucaagagcgcccuccuguccaccaacaaggccguggucagccuguccaacggcgugagcgugcucacguucaagguccuggaccugaagaacuacaucgacaagcagcuccugccgauccugaacaagcaguccugcagcauccccaaccccgagaccgugauggaguuccagcagaagaacaaccggcuccuggagaucacccgcgaguucuccgugaacgccggggucaccacgcccgugagcaccuacaugcugaccaacuccgagcuccugagccugaucaacgacaugccgaucaccaacgaccagaagaagcucaugagcaacaacgugcagaucguccggcagcaguccuacagcaucaugugcaucaucaaggaggaggugcuggccuacgugguccagcugccccucuacggcgugaucgacacgcccugcuggaagcugcacaccagcccccugugcaccaccaacacgaaggaggggagcaacaucugccucacccgcaccgaccggggcugguacugcgacaacgcgggcuccgugagcuucuucccgcaggccgagaccugcaaggucugcuccaaccgcguguucugcgacacgaugaacagccugacccugcccuccgaggucaaccucugcaacguggacaucuucaaccccaaguacgacugcaagaucaugaccagcaagaccgacguguccagcuccgucaucacgagccugggggccaucguguccugcuacggcaagaccaagugcaccgccagcaacaagaacaaggggaucaucaagaccuucuccaacggcugcgacuacgugagcaacaagggcgucgacacgguguccguggggaacacccuguacuacgucaacaagcaggagggccagagccucuacgugaagggggagcccaucaucaacuucuacgacccgcugguguuccccagcgacgaguucgacgccuccaucagccaggucaacgagaagaucaaccagucccuggcguucauccggaaguccgacgagcuccugcacaacgugaacgccggcaaguccaccaccaacaucaugaucaccacgaucaucaucgugaucaucgucauccugcucagccugaucgccguggggcugcuccuguacugcaaggcccgcugaggacuagucccuguucccagagcccacuuuuuuuucuuuuuuugaaauaaaauagccugucuuucagaucuaaaaaaaaaaaaaaaaaaaaaaaaaaaaaaaaaaaaaaaaaaaaaaaaaaaaaaaaaaaaaaaaugcaucccccccccccccccccccccccccccccccaaaggcucuuuucagagccaccagaauu

SEQ ID NO: 6444 - RNA, 1821 nt, Artificial Sequence
  mRNA product Design a-1 comprising derived and/or modified sequence from HRSV(A2)__F-del_DSCav1_mut6 (opt2)
gggagagucccgcagucggcguccagcggcucugcuuguucgugugugugucguugcaggccuuauucaagcuuaccauggagcuccucauccucaaggccaacgccaucaccaccauccucaccgccgucaccuucugcuucgccuccggccagaacaucaccgaggaguucuaccaguccaccugcuccgccgucuccaagggcuaccucggcgcccuccgcaccggcugguacaccuccgucaucaccaucgagcucuccaacaucaaggagaacaagugcaacggcaccgacgccaaggucaagcucaucaagcaggagcucgacaaguacaagaacgccgucaccgaccuccagaugcucaugugcuccacccccgccaccggcuccggcuccgccaucgccuccggcgucgccgucugcaagguccuccaccucgagggcgaggucaacaagaucaaguccgcccuccucuccaccaacaaggccgucgucucccucuccaacggcgucuccguccucaccuucaagguccucgaccucaagaacuacaucgacaagcagcuccuccccauccucaacaagcaguccugcuccauccccaaccccgagaccgucauggaguuccagcagaagaacaaccgccuccucgagaucacccgcgaguucuccgucaacgccggcgucaccacccccgucuccaccuacaugcucaccaacuccgagcuccucucccucaucaacgacaugcccaucaccaacgaccagaagaagcucauguccaacaacguccagaucguccgccagcaguccuacuccaucaugugcaucaucaaggaggagguccucgccuacgucguccagcucccccucuacggcgucaucgacacccccugcuggaagcuccacaccuccccccucugcaccaccaacaccaaggagggcuccaacaucugccucacccgcaccgaccgcggcugguacugcgacaacgccggcuccgucuccuucuucccccaggccgagaccugcaaggucugcuccaaccgcgucuucugcgacaccaugaacucccucacccuccccuccgaggucaaccucugcaacgucgacaucuucaaccccaaguacgacugcaagaucaugaccuccaagaccgacgucuccuccuccgucaucaccucccucggcgccaucgucuccugcuacggcaagaccaagugcaccgccuccaacaagaacaagggcaucaucaagaccuucuccaacggcugcgacuacgucuccaacaagggcgucgacaccgucuccgucggcaacacccucuacuacgucaacaagcaggagggccagucccucuacgucaagggcgagcccaucaucaacuucuacgacccccucgucuuccccuccgacgaguucgacgccuccaucucccaggucaacgagaagaucaaccagucccucgccuucauccgcaaguccgacgagcuccuccacaacgucaacgccggcaaguccaccaccaacaucaugaucaccaccaucaucaucgucaucaucgucauccuccucucccucaucgccgucggccuccuccucuacugcaaggcccgcugaggacuagucccuguucccagagcccacuuuuuuuucuuuuuuugaaauaaaauagccugucuuucagaucuaaaaaaaaaaaaaaaaaaaaaaaaaaaaaaaaaaaaaaaaaaaaaaaaaaaaaaaaaaaaaaaaugcaucccccccccccccccccccccccccccccccaaaggcucuuuucagagccaccagaauu

SEQ ID NO: 6445 - RNA, 1821 nt, Artificial Sequence
  mRNA product Design a-1 comprising derived and/or modified sequence from HRSV(A2)__F-del_DSCav1_mut6 (opt3)
gggagagucccgcagucggcguccagcggcucugcuuguucgugugugugucguugcaggccuuauucaagcuuaccauggagcugcucauccuuaaggccaacgcuauuaccacaauacugacugcagugacguucugcuuugccagcggccagaauaucaccgaagaguucuaccaauccacauguucugcggucucaaaaggguauuugggagcuuuaagaacugguugguacaccaguguuauuacaaucgaacugagcaacauuaaggagaauaaaugcaacggcaccgacgccaaggugaaacuaaucaagcaggaacucgauaaguauaaaaaugcaguaacugaccugcagaugcuuauguguuccacacccgccaccgggucuggaucggcuauagcaucaggcguggccgucugcaaggugcugcacuuggagggugagguuaacaaaaucaagagcgcucuccugaguacgaauaaagccguggucucccugucuaacggggugagcguacucacuuuuaagguuuuagaucugaagaauuacauugacaaacagcuuuugccuauccugaacaagcaauccuguucaauuccaaauccggaaaccgugauggaguuccagcagaaaaacaauaggcuacucgaaaucacacgggaguuuagugucaacgcgggagugacuacccccgugagcacauauaugcugaccaauucugagcuucuguccuugauaaacgauaugccuauuacgaacgaccagaagaaacucaugucaaauaacguccaaaucguucgccagcagagcuacaguauuaugugcaucaucaaggaagaggugcuggcauauguagugcaguuaccacuguacggcgucauugauacucccuguuggaaacuccauacaucuccucuuugcaccacuaauacaaaggaaggcuccaacauaugucugacccgaacggaccgugggugguacugcgauaaugccggaagcgugucguucuuuccacaagcugagaccuguaagguuugcucuaacagaguguucugcgacacaaugaacuccuugacucuacccucagaagucaaucuguguaauguggauaucuuuaacccuaaauaugacugcaagauuaugaccaguaaaacagauguaagcuccucuguuaucacuagccucggugccauagugucauguuacggcaagaccaaaugcacagcaaguaauaagaacaaggggauuaucaaaaccuucuccaauggaugugacuaugucagcaacaagggcguggacacugucucuguggguaauacgcuguacuauguuaacaaacaggaggggcagucacuuuacgugaagggagagccaaucauuaacuuuuaugauccgcugguauuccccagugacgaauuugaugcuagcaucucccaagucaaugagaaaauuaaccagucuuuggccuucauaaggaagucggacgaacuccugcacaaugugaacgcgggcaagagcacaaccaauaucaugauuacuaccaucaucauuguuauaaucgugauuuuacugucccuaaucgccgucggccuccugcuuuacugcaaagcacggugaggacuagucccuguucccagagcccacuuuuuuuucuuuuuuugaaauaaaauagccugucuuucagaucuaaaaaaaaaaaaaaaaaaaaaaaaaaaaaaaaaaaaaaaaaaaaaaaaaaaaaaaaaaaaaaaaugcaucccccccccccccccccccccccccccccccaaaggcucuuuucagagccaccagaauu

SEQ ID NO: 6446 - RNA, 1821 nt, Artificial Sequence
  mRNA product Design a-1 comprising derived and/or modified sequence from HRSV(A2)__F-del_DSCav1_mut6 (opt4)
gggagagucccgcagucggcguccagcggcucugcuuguucgugugugugucguugcaggccuuauucaagcuuaccauggagcugcugauccugaaggccaacgccaucaccaccauccugaccgccgugaccuucugcuucgccagcggccagaacaucaccgaggaguucuaccagagcaccugcagcgccgugagcaagggcuaccugggcgcccugagaaccggcugguacaccagcgugaucaccaucgagcugagcaacaucaaggagaacaagugcaacggcaccgacgccaaggugaagcugaucaagcaggagcuggacaaguacaagaacgccgugaccgaccugcagaugcugaugugcagcacccccgccaccggcagcggcagcgccaucgccagcggcguggccgugugcaaggugcugcaccuggagggcgaggugaacaagaucaagagcgcccugcugagcaccaacaaggccguggugagccugagcaacggcgugagcgugcugaccuucaaggugcuggaccugaagaacuacaucgacaagcagcugcugcccauccugaacaagcagagcugcagcauccccaaccccgagaccgugauggaguuccagcagaagaacaacagacugcuggagaucaccagagaguucagcgugaacgccggcgugaccacccccgugagcaccuacaugcugaccaacagcgagcugcugagccugaucaacgacaugcccaucaccaacgaccagaagaagcugaugagcaacaacgugcagaucgugagacagcagagcuacagcaucaugugcaucaucaaggaggaggugcuggccuacguggugcagcugccccuguacggcgugaucgacacccccugcuggaagcugcacaccagcccccugugcaccaccaacaccaaggagggcagcaacaucugccugaccagaaccgacagaggcugguacugcgacaacgccggcagcgugagcuucuucccccaggccgagaccugcaaggugugcagcaacagaguguucugcgacaccaugaacagccugacccugcccagcgaggugaaccugugcaacguggacaucuucaaccccaaguacgacugcaagaucaugaccagcaagaccgacgugagcagcagcgugaucaccagccugggcgccaucgugagcugcuacggcaagaccaagugcaccgccagcaacaagaacaagggcaucaucaagaccuucagcaacggcugcgacuacgugagcaacaagggcguggacaccgugagcgugggcaacacccuguacuacgugaacaagcaggagggccagagccuguacgugaagggcgagcccaucaucaacuucuacgacccccugguguuccccagcgacgaguucgacgccagcaucagccaggugaacgagaagaucaaccagagccuggccuucaucagaaagagcgacgagcugcugcacaacgugaacgccggcaagagcaccaccaacaucaugaucaccaccaucaucaucgugaucaucgugauccugcugagccugaucgccgugggccugcugcuguacugcaaggccagaugaggacuagucccuguucccagagcccacuuuuuuuucuuuuuuugaaauaaaauagccugucuuucagaucuaaaaaaaaaaaaaaaaaaaaaaaaaaaaaaaaaaaaaaaaaaaaaaaaaaaaaaaaaaaaaaaaugcaucccccccccccccccccccccccccccccccaaaggcucuuuucagagccaccagaauu

SEQ ID NO: 6447 - RNA, 1821 nt, Artificial Sequence
  mRNA product Design a-1 comprising derived and/or modified sequence from HRSV(A2)__F-del_DSCav1_mut6 (opt5)
gggagagucccgcagucggcguccagcggcucugcuuguucgugugugugucguugcaggccuuauucaagcuuaccauggagcugcucauccugaaggccaacgcuauuaccacaauccuuacggccgugaccuucugcuuugcgagcggccagaauauuacagaagaguucuaccaauccaccuguucugcugucagcaaaggguaucugggagcccucagaacaggcugguacaccuccguuaucacaauugaacugucuaacaucaaggagaauaaaugcaacgggaccgacgccaaggugaaacuuaucaagcaggaacuggauaaguauaaaaaugcugugacggaccuccagaugcugauguguagcacccccgccacaggauccggcucugcuauugccagcggggucgcggugugcaagguucugcaccucgagggagaggugaacaaaaucaaguccgcccugcuuagcaccaauaaagcugucgugucucuguccaacggcguuagcgugcucacauuuaagguccuggaucuuaagaauuacauugacaaacagcugcucccuauccugaacaagcaaucuuguuccauuccgaaucccgaaaccgugauggaguuccagcagaaaaacaaucggcugcucgaaaucacgcgcgaguuuagcgugaacgccggcgucacaaccccuguuucuacauauaugcugaccaauuccgagcuucugagccucauuaacgauaugcccaucaccaacgaccagaagaaacugauguccaauaacgugcaaaucgugagacagcagucuuacagcauuaugugcaucauuaaggaagagguccuugcuuaugugguucagcugccucucuacggggugaucgauacacccuguuggaaacugcauacguccccucugugcaccacaaauaccaaggaaggaagcaacauuugucucacacggaccgaccgcggcugguacugcgauaaugccgggucugucuccuucuuuccgcaagcggagacguguaaggugugcagcaacagaguuuucugcgacacaaugaacucucugacccuucccagcgaagugaaucuguguaaugucgauaucuuuaacccuaaauaugacugcaagaucaugaccuccaaaacagaugugucuagcuccgucauuaccagccucggagccaucgugucuuguuacggcaagacaaaaugcacggcuuccaauaagaacaaggggauuaucaaaaccuucagcaauggaugugacuauguuucuaacaagggcguggacacagucuccgugggcaauacccuguacuauguuaacaaacaggaggggcagagccuuuacgugaagggagagcccauuaucaacuuuuaugauccucuggucuuccccuccgacgaauuugaugccucuaucagccaagugaaugagaaaauuaaccagucccucgcuuucauccggaagucugacgaacugcugcacaaugugaacgccggcaagagcacaaccaauauuaugaucacgaccauuaucauuguuaucaucgucauucuccugucccuuaucgccguggggcugcuccuguacugcaaagcucgcugaggacuagucccuguucccagagcccacuuuuuuuucuuuuuuugaaauaaaauagccugucuuucagaucuaaaaaaaaaaaaaaaaaaaaaaaaaaaaaaaaaaaaaaaaaaaaaaaaaaaaaaaaaaaaaaaaugcaucccccccccccccccccccccccccccccccaaaggcucuuuucagagccaccagaauu

SEQ ID NO: 6448 - RNA, 1821 nt, Artificial Sequence
  mRNA product Design a-1 comprising derived and/or modified sequence from HRSV(A2)__F-del_DSCav1_mut6 (opt6)
gggagagucccgcagucggcguccagcggcucugcuuguucgugugugugucguugcaggccuuauucaagcuuaccauggaacuacucauauuaaaagcaaacgcaauaacaacgauauuaacagcuguaacauucugcuuugcaucaggccaaaauaucaccgaagaauuuuaucaaagcacaugcucugcaguauccaaaggauacuuaggagcauuaagaacaggcugguacacauccguaauaacaauagaacuaucaaacaucaaagaaaacaaaugcaacggcacagacgccaaaguaaaacucauaaaacaagaacuagacaaauauaaaaacgcaguaacagaucuacaaaugcucaugugcuccacaccagcaaccggaucugguucagccauagcauccggcguagccgucugcaaaguauuacaccucgaaggagaaguaaacaaaauaaaaucugcccuauuaucuacaaauaaagccguaguaagucuaaguaacggaguaucaguacuaacauuuaaaguccuagaccugaaaaacuauaucgacaaacaacuauuaccaauacuaaacaaacaauccuguuccaucccuaacccagaaacaguuauggaauuucaacaaaaaaauaaccgccuuuuagaaauaacuagagaauuuucaguaaacgcaggaguuacaacaccaguaucaacauacaugcuaacaaauucagaauuauuaucccuuauaaaugacaugccuaucacaaacgaucaaaaaaaauuaauguccaacaacguacaaauaguaagacaacaaucauauuccaucaugugcaucauaaaagaagaaguccucgcauacguagugcaacuaccacuauacggagucauagauacacccuguuggaaacuucacacaucuccacuaugcacaacaaacacgaaagaaggauccaacauaugccuaacacgaacagacagaggaugguauugcgacaacgcuggaagugugagcuucuucccucaagcagaaacuugcaaaguaugcagcaaucguguauucugcgacacaaugaacucauuaacacucccaagcgaaguaaaccucugcaauguagacaucuuuaauccaaaauacgauuguaaaauaaugacuucaaaaacagacgucucaucaucuguaauaacaucuuuaggagcaauaguuucuugcuacgguaaaacaaaaugcaccgcauccaacaaaaacaaaggaauaauaaaaacauucucuaacggcugcgauuacguaucuaacaaaggaguugacacagucucaguaggaaacacacuauacuacguaaacaaacaagaaggacaaagccuauacguaaaaggagaaccaauaauaaacuucuaugacccauuaguauuuccaagcgaugaauuugacgcuucaauaucacaagucaaugaaaaaauaaaucagagcuuagcauucauaagaaaaucugaugaacuacuacacaauguaaaugcaggaaaauccacuaccaacauaaugauuaccacaauuauaauaguuaucauaguaauacuauuaucacuaauagccguuggauuacuacuauacugcaaagcaagauaaggacuagucccuguucccagagcccacuuuuuuuucuuuuuuugaaauaaaauagccugucuuucagaucuaaaaaaaaaaaaaaaaaaaaaaaaaaaaaaaaaaaaaaaaaaaaaaaaaaaaaaaaaaaaaaaaugcaucccccccccccccccccccccccccccccccaaaggcucuuuucagagccaccagaauu

SEQ ID NO: 6449 - RNA, 1821 nt, Artificial Sequence
  mRNA product Design a-1 comprising derived and/or modified sequence from HRSV(A2)__F-del_DSCav1_mut6 (opt11)
gggagagucccgcagucggcguccagcggcucugcuuguucgugugugugucguugcaggccuuauucaagcuuaccauggaacuacucauccuaaaagcaaacgccaucaccaccauacuaaccgccgucaccuucugcuucgccucgggacaaaacaucaccgaagaguucuaccagucaacgugcuccgccgucucaaaaggcuaccuaggcgcccuccgcaccgggugguauaccuccgucauaacuaucgaacucucuaacaucaaagaaaacaaauguaacggcaccgacgccaaagucaaacuaaucaaacaagaacuggacaaauacaaaaacgccgucaccgaccuacaaaugcucaugugcuccacuccagccaccggcuccgguagcgcaaucgccucaggcguagcuguaugcaaaguccuccaccuagaaggcgaaguaaacaaaauaaaauccgcccuccucucaaccaacaaggccgucgucucacucucaaacggcgucuccguacucaccuuuaaaguccuagaccuuaaaaacuacaucgacaaacaacugcuaccaauccucaacaaacaaucaugcagcaucccaaacccggaaacagucauggaguuccaacagaaaaacaaccgacuccucgaaaucacccgcgaguucuccgucaacgccggagucaccacaccuguaagcacauacaugcuuacuaauuccgaacuccuuucacuaauaaacgacaugccaauaaccaacgaccaaaagaaacucauguccaacaacguacaaaucguacgccaacaauccuacuccaucaugugcaucaucaaagaagaaguccuggccuaugucguacaacucccccuuuacggugucaucgacacacccugcuggaaacuacacaccagcccccucugcacaacaaacaccaaagaaggcuccaacaucugccucacccguaccgaccgaggcugguacugcgacaacgccggcuccgucuccuucuucccccaagccgaaaccugcaaagucugcagcaaccgcgucuucugcgauaccaugaacucccucacacucccaucugaagucaaccucugcaacgucgauauuuucaauccaaaauacgacugcaaaaucaugacuagcaaaaccgacguuagcuccuccgucaucaccucccucggcgccauaguuucaugcuacggcaaaaccaaaugcaccgccuccaacaaaaacaaaggcaucauaaaaaccuucuccaacgggugcgacuacguaucuaauaaaggagucgacaccgucucaguaggaaacacccucuacuaugucaacaaacaagaaggccaaucacuauacguuaaaggcgaaccaaucaucaacuucuacgacccacucgucuuccccagcgacgaguuugacgccucaaucucgcaagucaaugaaaagauuaaccaaucccuagccuucauccgaaaaagugacgaacuccuccacaacguuaacgccggcaaaucuacaaccaacaucaugaucaccacuauaaucaucgucaucauagucauacuucucagccucaucgcagucggacuccuccuuuauugcaaggcacgauaaggacuagucccuguucccagagcccacuuuuuuuucuuuuuuugaaauaaaauagccugucuuucagaucuaaaaaaaaaaaaaaaaaaaaaaaaaaaaaaaaaaaaaaaaaaaaaaaaaaaaaaaaaaaaaaaaugcaucccccccccccccccccccccccccccccccaaaggcucuuuucagagccaccagaauu

SEQ ID NO: 6450 - RNA, 1840 nt, Artificial Sequence
  mRNA product Design a-2 comprising derived and/or modified sequence from HRSV(A2)__F-del_DSCav1_mut6 (opt1)
gggagaguccgcucagccagguugcagaagcggcuuagcguguguccuaaucuucucucugcguguagguaggccugugccgcaaacaagcuuaccauggagcugcucauccugaaggccaacgccaucaccaccauccugacggcggugaccuucugcuucgccagcggccagaacaucaccgaggaguucuaccaguccacgugcagcgccgucuccaagggguaccucggcgcccugcggaccggcugguacaccuccgugaucaccaucgagcugagcaacaucaaggagaacaagugcaacgggaccgacgccaaggugaagcucaucaagcaggagcuggacaaguacaagaacgcggucacggaccugcagaugcugaugugcuccaccccggcaaccggcuccggcuccgccaucgcgagcggcgucgccgugugcaaggugcugcaccucgagggggaggucaacaagaucaagagcgcccugcuguccaccaacaaggccguggugagccucuccaacggcgucagcgugcugaccuucaaggugcuggaccucaagaacuacaucgacaagcagcugcugcccauccugaacaagcagagcugcuccauccccaaccccgagacggugauggaguuccagcagaagaacaaccggcuccuggagaucacccgcgaguucagcgugaacgccggggucaccacccccguguccacguacaugcugaccaacagcgagcuccugucccugaucaacgacaugccgaucaccaacgaccagaagaagcucaugagcaacaacgugcagaucguccggcagcaguccuacagcaucaugugcaucaucaaggaggaggugcuggcguacgugguccagcugccccucuacggcgugaucgacacccccugcuggaagcugcacacgagcccccugugcaccaccaacaccaaggagggguccaacaucugccucacgcgcaccgaccggggcugguacugcgacaacgccggcagcgucuccuucuucccgcaggccgagaccugcaaggugugcagcaaccgcguguucugcgacaccaugaacucccugacgcugcccagcgagguaaaccucugcaacgucgacaucuucaaccccaaguacgacugcaagaucaugaccuccaagaccgacgugagcuccagcgugaucaccucccugggggccaucgucagcugcuacggcaagacgaagugcaccgccagcaacaagaacaaggggaucaucaagaccuucuccaacggcugcgacuacgugagcaacaagggcguggacaccguguccgucgggaacacccuguacuacgugaacaagcaggagggccagagccucuacgugaagggggagcccaucaucaacuucuacgacccgcuggucuuccccuccgacgaguucgacgcgagcaucucccaggugaacgagaagaucaaccagagccuggccuucauccgcaaguccgacgagcugcuccacaacgugaacgccggcaagagcacgaccaacaucaugaucaccaccaucaucaucgucaucaucgugauccugcugucccucaucgccguggggcugcugcucuacugcaaggcccggugaggacuagucccuguucccagagcccacuuuuuuuucuuuuuuugaaauaaaauagccugucuuucagaucuaaaaaaaaaaaaaaaaaaaaaaaaaaaaaaaaaaaaaaaaaaaaaaaaaaaaaaaaaaaaaaaaugcaucccccccccccccccccccccccccccccccaaaggcucuuuucagagccaccagaauu

SEQ ID NO: 6451 - RNA, 1840 nt, Artificial Sequence
  mRNA product Design a-2 comprising derived and/or modified sequence from HRSV(A2)__F-del_DSCav1_mut6 (opt1)
gggagaguccgcucagccagguugcagaagcggcuuagcguguguccuaaucuucucucugcguguagguaggccugugccgcaaacaagcuuaccauggagcugcucauccugaaggccaacgccaucaccaccauccugacggcggugaccuucugcuucgccagcggccagaacaucaccgaggaguucuaccaguccacgugcagcgccgucuccaagggguaccucggcgcccugcgcaccgggugguacaccagcgugaucaccaucgagcuguccaacaucaaggagaacaagugcaacggcaccgacgccaaggugaagcucaucaagcaggagcuggacaaguacaagaacgcggucacggaccugcagaugcucaugugcagcacccccgccaccggguccggcagcgccaucgccuccggcguggcggugugcaagguccugcaccuggagggggaggugaacaagaucaagagcgcccuccuguccaccaacaaggccguggucagccuguccaacggcgugagcgugcucacguucaagguccuggaccugaagaacuacaucgacaagcagcuccugccgauccugaacaagcaguccugcagcauccccaaccccgagaccgugauggaguuccagcagaagaacaaccggcuccuggagaucacccgcgaguucuccgugaacgccggggucaccacgcccgugagcaccuacaugcugaccaacuccgagcuccugagccugaucaacgacaugccgaucaccaacgaccagaagaagcucaugagcaacaacgugcagaucguccggcagcaguccuacagcaucaugugcaucaucaaggaggaggugcuggccuacgugguccagcugccccucuacggcgugaucgacacgcccugcuggaagcugcacaccagcccccugugcaccaccaacacgaaggaggggagcaacaucugccucacccgcaccgaccggggcugguacugcgacaacgcgggcuccgugagcuucuucccgcaggccgagaccugcaaggucugcuccaaccgcguguucugcgacacgaugaacagccugacccugcccuccgaggucaaccucugcaacguggacaucuucaaccccaaguacgacugcaagaucaugaccagcaagaccgacguguccagcuccgucaucacgagccugggggccaucguguccugcuacggcaagaccaagugcaccgccagcaacaagaacaaggggaucaucaagaccuucuccaacggcugcgacuacgugagcaacaagggcgucgacacgguguccguggggaacacccuguacuacgucaacaagcaggagggccagagccucuacgugaagggggagcccaucaucaacuucuacgacccgcugguguuccccagcgacgaguucgacgccuccaucagccaggucaacgagaagaucaaccagucccuggcguucauccggaaguccgacgagcuccugcacaacgugaacgccggcaaguccaccaccaacaucaugaucaccacgaucaucaucgugaucaucgucauccugcucagccugaucgccguggggcugcuccuguacugcaaggcccgcugaggacuagucccuguucccagagcccacuuuuuuuucuuuuuuugaaauaaaauagccugucuuucagaucuaaaaaaaaaaaaaaaaaaaaaaaaaaaaaaaaaaaaaaaaaaaaaaaaaaaaaaaaaaaaaaaaugcaucccccccccccccccccccccccccccccccaaaggcucuuuucagagccaccagaauu

SEQ ID NO: 6452 - RNA, 1840 nt, Artificial Sequence
  mRNA product Design a-2 comprising derived and/or modified sequence from HRSV(A2)__F-del_DSCav1_mut6 (opt2)
gggagaguccgcucagccagguugcagaagcggcuuagcguguguccuaaucuucucucugcguguagguaggccugugccgcaaacaagcuuaccauggagcuccucauccucaaggccaacgccaucaccaccauccucaccgccgucaccuucugcuucgccuccggccagaacaucaccgaggaguucuaccaguccaccugcuccgccgucuccaagggcuaccucggcgcccuccgcaccggcugguacaccuccgucaucaccaucgagcucuccaacaucaaggagaacaagugcaacggcaccgacgccaaggucaagcucaucaagcaggagcucgacaaguacaagaacgccgucaccgaccuccagaugcucaugugcuccacccccgccaccggcuccggcuccgccaucgccuccggcgucgccgucugcaagguccuccaccucgagggcgaggucaacaagaucaaguccgcccuccucuccaccaacaaggccgucgucucccucuccaacggcgucuccguccucaccuucaagguccucgaccucaagaacuacaucgacaagcagcuccuccccauccucaacaagcaguccugcuccauccccaaccccgagaccgucauggaguuccagcagaagaacaaccgccuccucgagaucacccgcgaguucuccgucaacgccggcgucaccacccccgucuccaccuacaugcucaccaacuccgagcuccucucccucaucaacgacaugcccaucaccaacgaccagaagaagcucauguccaacaacguccagaucguccgccagcaguccuacuccaucaugugcaucaucaaggaggagguccucgccuacgucguccagcucccccucuacggcgucaucgacacccccugcuggaagcuccacaccuccccccucugcaccaccaacaccaaggagggcuccaacaucugccucacccgcaccgaccgcggcugguacugcgacaacgccggcuccgucuccuucuucccccaggccgagaccugcaaggucugcuccaaccgcgucuucugcgacaccaugaacucccucacccuccccuccgaggucaaccucugcaacgucgacaucuucaaccccaaguacgacugcaagaucaugaccuccaagaccgacgucuccuccuccgucaucaccucccucggcgccaucgucuccugcuacggcaagaccaagugcaccgccuccaacaagaacaagggcaucaucaagaccuucuccaacggcugcgacuacgucuccaacaagggcgucgacaccgucuccgucggcaacacccucuacuacgucaacaagcaggagggccagucccucuacgucaagggcgagcccaucaucaacuucuacgacccccucgucuuccccuccgacgaguucgacgccuccaucucccaggucaacgagaagaucaaccagucccucgccuucauccgcaaguccgacgagcuccuccacaacgucaacgccggcaaguccaccaccaacaucaugaucaccaccaucaucaucgucaucaucgucauccuccucucccucaucgccgucggccuccuccucuacugcaaggcccgcugaggacuagucccuguucccagagcccacuuuuuuuucuuuuuuugaaauaaaauagccugucuuucagaucuaaaaaaaaaaaaaaaaaaaaaaaaaaaaaaaaaaaaaaaaaaaaaaaaaaaaaaaaaaaaaaaaugcaucccccccccccccccccccccccccccccccaaaggcucuuuucagagccaccagaauu

SEQ ID NO: 6453 - RNA, 1840 nt, Artificial Sequence
  mRNA product Design a-2 comprising derived and/or modified sequence from HRSV(A2)__F-del_DSCav1_mut6 (opt3)
gggagaguccgcucagccagguugcagaagcggcuuagcguguguccuaaucuucucucugcguguagguaggccugugccgcaaacaagcuuaccauggagcugcucauccuuaaggccaacgcuauuaccacaauacugacugcagugacguucugcuuugccagcggccagaauaucaccgaagaguucuaccaauccacauguucugcggucucaaaaggguauuugggagcuuuaagaacugguugguacaccaguguuauuacaaucgaacugagcaacauuaaggagaauaaaugcaacggcaccgacgccaaggugaaacuaaucaagcaggaacucgauaaguauaaaaaugcaguaacugaccugcagaugcuuauguguuccacacccgccaccgggucuggaucggcuauagcaucaggcguggccgucugcaaggugcugcacuuggagggugagguuaacaaaaucaagagcgcucuccugaguacgaauaaagccguggucucccugucuaacggggugagcguacucacuuuuaagguuuuagaucugaagaauuacauugacaaacagcuuuugccuauccugaacaagcaauccuguucaauuccaaauccggaaaccgugauggaguuccagcagaaaaacaauaggcuacucgaaaucacacgggaguuuagugucaacgcgggagugacuacccccgugagcacauauaugcugaccaauucugagcuucuguccuugauaaacgauaugccuauuacgaacgaccagaagaaacucaugucaaauaacguccaaaucguucgccagcagagcuacaguauuaugugcaucaucaaggaagaggugcuggcauauguagugcaguuaccacuguacggcgucauugauacucccuguuggaaacuccauacaucuccucuuugcaccacuaauacaaaggaaggcuccaacauaugucugacccgaacggaccgugggugguacugcgauaaugccggaagcgugucguucuuuccacaagcugagaccuguaagguuugcucuaacagaguguucugcgacacaaugaacuccuugacucuacccucagaagucaaucuguguaauguggauaucuuuaacccuaaauaugacugcaagauuaugaccaguaaaacagauguaagcuccucuguuaucacuagccucggugccauagugucauguuacggcaagaccaaaugcacagcaaguaauaagaacaaggggauuaucaaaaccuucuccaauggaugugacuaugucagcaacaagggcguggacacugucucuguggguaauacgcuguacuauguuaacaaacaggaggggcagucacuuuacgugaagggagagccaaucauuaacuuuuaugauccgcugguauuccccagugacgaauuugaugcuagcaucucccaagucaaugagaaaauuaaccagucuuuggccuucauaaggaagucggacgaacuccugcacaaugugaacgcgggcaagagcacaaccaauaucaugauuacuaccaucaucauuguuauaaucgugauuuuacugucccuaaucgccgucggccuccugcuuuacugcaaagcacggugaggacuagucccuguucccagagcccacuuuuuuuucuuuuuuugaaauaaaauagccugucuuucagaucuaaaaaaaaaaaaaaaaaaaaaaaaaaaaaaaaaaaaaaaaaaaaaaaaaaaaaaaaaaaaaaaaugcaucccccccccccccccccccccccccccccccaaaggcucuuuucagagccaccagaauu

SEQ ID NO: 6454 - RNA, 1840 nt, Artificial Sequence
  mRNA product Design a-2 comprising derived and/or modified sequence from HRSV(A2)__F-del_DSCav1_mut6 (opt4)
gggagaguccgcucagccagguugcagaagcggcuuagcguguguccuaaucuucucucugcguguagguaggccugugccgcaaacaagcuuaccauggagcugcugauccugaaggccaacgccaucaccaccauccugaccgccgugaccuucugcuucgccagcggccagaacaucaccgaggaguucuaccagagcaccugcagcgccgugagcaagggcuaccugggcgcccugagaaccggcugguacaccagcgugaucaccaucgagcugagcaacaucaaggagaacaagugcaacggcaccgacgccaaggugaagcugaucaagcaggagcuggacaaguacaagaacgccgugaccgaccugcagaugcugaugugcagcacccccgccaccggcagcggcagcgccaucgccagcggcguggccgugugcaaggugcugcaccuggagggcgaggugaacaagaucaagagcgcccugcugagcaccaacaaggccguggugagccugagcaacggcgugagcgugcugaccuucaaggugcuggaccugaagaacuacaucgacaagcagcugcugcccauccugaacaagcagagcugcagcauccccaaccccgagaccgugauggaguuccagcagaagaacaacagacugcuggagaucaccagagaguucagcgugaacgccggcgugaccacccccgugagcaccuacaugcugaccaacagcgagcugcugagccugaucaacgacaugcccaucaccaacgaccagaagaagcugaugagcaacaacgugcagaucgugagacagcagagcuacagcaucaugugcaucaucaaggaggaggugcuggccuacguggugcagcugccccuguacggcgugaucgacacccccugcuggaagcugcacaccagcccccugugcaccaccaacaccaaggagggcagcaacaucugccugaccagaaccgacagaggcugguacugcgacaacgccggcagcgugagcuucuucccccaggccgagaccugcaaggugugcagcaacagaguguucugcgacaccaugaacagccugacccugcccagcgaggugaaccugugcaacguggacaucuucaaccccaaguacgacugcaagaucaugaccagcaagaccgacgugagcagcagcgugaucaccagccugggcgccaucgugagcugcuacggcaagaccaagugcaccgccagcaacaagaacaagggcaucaucaagaccuucagcaacggcugcgacuacgugagcaacaagggcguggacaccgugagcgugggcaacacccuguacuacgugaacaagcaggagggccagagccuguacgugaagggcgagcccaucaucaacuucuacgacccccugguguuccccagcgacgaguucgacgccagcaucagccaggugaacgagaagaucaaccagagccuggccuucaucagaaagagcgacgagcugcugcacaacgugaacgccggcaagagcaccaccaacaucaugaucaccaccaucaucaucgugaucaucgugauccugcugagccugaucgccgugggccugcugcuguacugcaaggccagaugaggacuagucccuguucccagagcccacuuuuuuuucuuuuuuugaaauaaaauagccugucuuucagaucuaaaaaaaaaaaaaaaaaaaaaaaaaaaaaaaaaaaaaaaaaaaaaaaaaaaaaaaaaaaaaaaaugcaucccccccccccccccccccccccccccccccaaaggcucuuuucagagccaccagaauu

SEQ ID NO: 6455 - RNA, 1840 nt, Artificial Sequence
  mRNA product Design a-2 comprising derived and/or modified sequence from HRSV(A2)__F-del_DSCav1_mut6 (opt5)
gggagaguccgcucagccagguugcagaagcggcuuagcguguguccuaaucuucucucugcguguagguaggccugugccgcaaacaagcuuaccauggagcugcucauccugaaggccaacgcuauuaccacaauccuuacggccgugaccuucugcuuugcgagcggccagaauauuacagaagaguucuaccaauccaccuguucugcugucagcaaaggguaucugggagcccucagaacaggcugguacaccuccguuaucacaauugaacugucuaacaucaaggagaauaaaugcaacgggaccgacgccaaggugaaacuuaucaagcaggaacuggauaaguauaaaaaugcugugacggaccuccagaugcugauguguagcacccccgccacaggauccggcucugcuauugccagcggggucgcggugugcaagguucugcaccucgagggagaggugaacaaaaucaaguccgcccugcuuagcaccaauaaagcugucgugucucuguccaacggcguuagcgugcucacauuuaagguccuggaucuuaagaauuacauugacaaacagcugcucccuauccugaacaagcaaucuuguuccauuccgaaucccgaaaccgugauggaguuccagcagaaaaacaaucggcugcucgaaaucacgcgcgaguuuagcgugaacgccggcgucacaaccccuguuucuacauauaugcugaccaauuccgagcuucugagccucauuaacgauaugcccaucaccaacgaccagaagaaacugauguccaauaacgugcaaaucgugagacagcagucuuacagcauuaugugcaucauuaaggaagagguccuugcuuaugugguucagcugccucucuacggggugaucgauacacccuguuggaaacugcauacguccccucugugcaccacaaauaccaaggaaggaagcaacauuugucucacacggaccgaccgcggcugguacugcgauaaugccgggucugucuccuucuuuccgcaagcggagacguguaaggugugcagcaacagaguuuucugcgacacaaugaacucucugacccuucccagcgaagugaaucuguguaaugucgauaucuuuaacccuaaauaugacugcaagaucaugaccuccaaaacagaugugucuagcuccgucauuaccagccucggagccaucgugucuuguuacggcaagacaaaaugcacggcuuccaauaagaacaaggggauuaucaaaaccuucagcaauggaugugacuauguuucuaacaagggcguggacacagucuccgugggcaauacccuguacuauguuaacaaacaggaggggcagagccuuuacgugaagggagagcccauuaucaacuuuuaugauccucuggucuuccccuccgacgaauuugaugccucuaucagccaagugaaugagaaaauuaaccagucccucgcuuucauccggaagucugacgaacugcugcacaaugugaacgccggcaagagcacaaccaauauuaugaucacgaccauuaucauuguuaucaucgucauucuccugucccuuaucgccguggggcugcuccuguacugcaaagcucgcugaggacuagucccuguucccagagcccacuuuuuuuucuuuuuuugaaauaaaauagccugucuuucagaucuaaaaaaaaaaaaaaaaaaaaaaaaaaaaaaaaaaaaaaaaaaaaaaaaaaaaaaaaaaaaaaaaugcaucccccccccccccccccccccccccccccccaaaggcucuuuucagagccaccagaauu

SEQ ID NO: 6456 - RNA, 1840 nt, Artificial Sequence
  mRNA product Design a-2 comprising derived and/or modified sequence from HRSV(A2)__F-del_DSCav1_mut6 (opt6)
gggagaguccgcucagccagguugcagaagcggcuuagcguguguccuaaucuucucucugcguguagguaggccugugccgcaaacaagcuuaccauggaacuacucauauuaaaagcaaacgcaauaacaacgauauuaacagcuguaacauucugcuuugcaucaggccaaaauaucaccgaagaauuuuaucaaagcacaugcucugcaguauccaaaggauacuuaggagcauuaagaacaggcugguacacauccguaauaacaauagaacuaucaaacaucaaagaaaacaaaugcaacggcacagacgccaaaguaaaacucauaaaacaagaacuagacaaauauaaaaacgcaguaacagaucuacaaaugcucaugugcuccacaccagcaaccggaucugguucagccauagcauccggcguagccgucugcaaaguauuacaccucgaaggagaaguaaacaaaauaaaaucugcccuauuaucuacaaauaaagccguaguaagucuaaguaacggaguaucaguacuaacauuuaaaguccuagaccugaaaaacuauaucgacaaacaacuauuaccaauacuaaacaaacaauccuguuccaucccuaacccagaaacaguuauggaauuucaacaaaaaaauaaccgccuuuuagaaauaacuagagaauuuucaguaaacgcaggaguuacaacaccaguaucaacauacaugcuaacaaauucagaauuauuaucccuuauaaaugacaugccuaucacaaacgaucaaaaaaaauuaauguccaacaacguacaaauaguaagacaacaaucauauuccaucaugugcaucauaaaagaagaaguccucgcauacguagugcaacuaccacuauacggagucauagauacacccuguuggaaacuucacacaucuccacuaugcacaacaaacacgaaagaaggauccaacauaugccuaacacgaacagacagaggaugguauugcgacaacgcuggaagugugagcuucuucccucaagcagaaacuugcaaaguaugcagcaaucguguauucugcgacacaaugaacucauuaacacucccaagcgaaguaaaccucugcaauguagacaucuuuaauccaaaauacgauuguaaaauaaugacuucaaaaacagacgucucaucaucuguaauaacaucuuuaggagcaauaguuucuugcuacgguaaaacaaaaugcaccgcauccaacaaaaacaaaggaauaauaaaaacauucucuaacggcugcgauuacguaucuaacaaaggaguugacacagucucaguaggaaacacacuauacuacguaaacaaacaagaaggacaaagccuauacguaaaaggagaaccaauaauaaacuucuaugacccauuaguauuuccaagcgaugaauuugacgcuucaauaucacaagucaaugaaaaaauaaaucagagcuuagcauucauaagaaaaucugaugaacuacuacacaauguaaaugcaggaaaauccacuaccaacauaaugauuaccacaauuauaauaguuaucauaguaauacuauuaucacuaauagccguuggauuacuacuauacugcaaagcaagauaaggacuagucccuguucccagagcccacuuuuuuuucuuuuuuugaaauaaaauagccugucuuucagaucuaaaaaaaaaaaaaaaaaaaaaaaaaaaaaaaaaaaaaaaaaaaaaaaaaaaaaaaaaaaaaaaaugcaucccccccccccccccccccccccccccccccaaaggcucuuuucagagccaccagaauu

SEQ ID NO: 6457 - RNA, 1840 nt, Artificial Sequence
  mRNA product Design a-2 comprising derived and/or modified sequence from HRSV(A2)__F-del_DSCav1_mut6 (opt11)
gggagaguccgcucagccagguugcagaagcggcuuagcguguguccuaaucuucucucugcguguagguaggccugugccgcaaacaagcuuaccauggaacuacucauccuaaaagcaaacgccaucaccaccauacuaaccgccgucaccuucugcuucgccucgggacaaaacaucaccgaagaguucuaccagucaacgugcuccgccgucucaaaaggcuaccuaggcgcccuccgcaccgggugguauaccuccgucauaacuaucgaacucucuaacaucaaagaaaacaaauguaacggcaccgacgccaaagucaaacuaaucaaacaagaacuggacaaauacaaaaacgccgucaccgaccuacaaaugcucaugugcuccacuccagccaccggcuccgguagcgcaaucgccucaggcguagcuguaugcaaaguccuccaccuagaaggcgaaguaaacaaaauaaaauccgcccuccucucaaccaacaaggccgucgucucacucucaaacggcgucuccguacucaccuuuaaaguccuagaccuuaaaaacuacaucgacaaacaacugcuaccaauccucaacaaacaaucaugcagcaucccaaacccggaaacagucauggaguuccaacagaaaaacaaccgacuccucgaaaucacccgcgaguucuccgucaacgccggagucaccacaccuguaagcacauacaugcuuacuaauuccgaacuccuuucacuaauaaacgacaugccaauaaccaacgaccaaaagaaacucauguccaacaacguacaaaucguacgccaacaauccuacuccaucaugugcaucaucaaagaagaaguccuggccuaugucguacaacucccccuuuacggugucaucgacacacccugcuggaaacuacacaccagcccccucugcacaacaaacaccaaagaaggcuccaacaucugccucacccguaccgaccgaggcugguacugcgacaacgccggcuccgucuccuucuucccccaagccgaaaccugcaaagucugcagcaaccgcgucuucugcgauaccaugaacucccucacacucccaucugaagucaaccucugcaacgucgauauuuucaauccaaaauacgacugcaaaaucaugacuagcaaaaccgacguuagcuccuccgucaucaccucccucggcgccauaguuucaugcuacggcaaaaccaaaugcaccgccuccaacaaaaacaaaggcaucauaaaaaccuucuccaacgggugcgacuacguaucuaauaaaggagucgacaccgucucaguaggaaacacccucuacuaugucaacaaacaagaaggccaaucacuauacguuaaaggcgaaccaaucaucaacuucuacgacccacucgucuuccccagcgacgaguuugacgccucaaucucgcaagucaaugaaaagauuaaccaaucccuagccuucauccgaaaaagugacgaacuccuccacaacguuaacgccggcaaaucuacaaccaacaucaugaucaccacuauaaucaucgucaucauagucauacuucucagccucaucgcagucggacuccuccuuuauugcaaggcacgauaaggacuagucccuguucccagagcccacuuuuuuuucuuuuuuugaaauaaaauagccugucuuucagaucuaaaaaaaaaaaaaaaaaaaaaaaaaaaaaaaaaaaaaaaaaaaaaaaaaaaaaaaaaaaaaaaaugcaucccccccccccccccccccccccccccccccaaaggcucuuuucagagccaccagaauu

SEQ ID NO: 6458 - RNA, 1918 nt, Artificial Sequence
  mRNA product Design a-3 comprising derived and/or modified sequence from HRSV(A2)__F-del_DSCav1_mut6 (opt1)
gggagagggcgcuuggcuugcaaggacccugagcugcggcauugaagcacacccaacccaacucgacugaagucagccucacugaaccggaucugagaaucuucucucucugggcuugccagggcucuccgaaccuagcuagcauccucuucaauuccaacuagaaagcuuaccauggagcugcucauccugaaggccaacgccaucaccaccauccugacggcggugaccuucugcuucgccagcggccagaacaucaccgaggaguucuaccaguccacgugcagcgccgucuccaagggguaccucggcgcccugcggaccggcugguacaccuccgugaucaccaucgagcugagcaacaucaaggagaacaagugcaacgggaccgacgccaaggugaagcucaucaagcaggagcuggacaaguacaagaacgcggucacggaccugcagaugcugaugugcuccaccccggcaaccggcuccggcuccgccaucgcgagcggcgucgccgugugcaaggugcugcaccucgagggggaggucaacaagaucaagagcgcccugcuguccaccaacaaggccguggugagccucuccaacggcgucagcgugcugaccuucaaggugcuggaccucaagaacuacaucgacaagcagcugcugcccauccugaacaagcagagcugcuccauccccaaccccgagacggugauggaguuccagcagaagaacaaccggcuccuggagaucacccgcgaguucagcgugaacgccggggucaccacccccguguccacguacaugcugaccaacagcgagcuccugucccugaucaacgacaugccgaucaccaacgaccagaagaagcucaugagcaacaacgugcagaucguccggcagcaguccuacagcaucaugugcaucaucaaggaggaggugcuggcguacgugguccagcugccccucuacggcgugaucgacacccccugcuggaagcugcacacgagcccccugugcaccaccaacaccaaggagggguccaacaucugccucacgcgcaccgaccggggcugguacugcgacaacgccggcagcgucuccuucuucccgcaggccgagaccugcaaggugugcagcaaccgcguguucugcgacaccaugaacucccugacgcugcccagcgagguaaaccucugcaacgucgacaucuucaaccccaaguacgacugcaagaucaugaccuccaagaccgacgugagcuccagcgugaucaccucccugggggccaucgucagcugcuacggcaagacgaagugcaccgccagcaacaagaacaaggggaucaucaagaccuucuccaacggcugcgacuacgugagcaacaagggcguggacaccguguccgucgggaacacccuguacuacgugaacaagcaggagggccagagccucuacgugaagggggagcccaucaucaacuucuacgacccgcuggucuuccccuccgacgaguucgacgcgagcaucucccaggugaacgagaagaucaaccagagccuggccuucauccgcaaguccgacgagcugcuccacaacgugaacgccggcaagagcacgaccaacaucaugaucaccaccaucaucaucgucaucaucgugauccugcugucccucaucgccguggggcugcugcucuacugcaaggcccggugaggacuagucccuguucccagagcccacuuuuuuuucuuuuuuugaaauaaaauagccugucuuucagaucuaaaaaaaaaaaaaaaaaaaaaaaaaaaaaaaaaaaaaaaaaaaaaaaaaaaaaaaaaaaaaaaaugcaucccccccccccccccccccccccccccccccaaaggcucuuuucagagccaccagaauu

SEQ ID NO: 6459 - RNA, 1918 nt, Artificial Sequence
  mRNA product Design a-3 comprising derived and/or modified sequence from HRSV(A2)__F-del_DSCav1_mut6 (opt1)
gggagagggcgcuuggcuugcaaggacccugagcugcggcauugaagcacacccaacccaacucgacugaagucagccucacugaaccggaucugagaaucuucucucucugggcuugccagggcucuccgaaccuagcuagcauccucuucaauuccaacuagaaagcuuaccauggagcugcucauccugaaggccaacgccaucaccaccauccugacggcggugaccuucugcuucgccagcggccagaacaucaccgaggaguucuaccaguccacgugcagcgccgucuccaagggguaccucggcgcccugcgcaccgggugguacaccagcgugaucaccaucgagcuguccaacaucaaggagaacaagugcaacggcaccgacgccaaggugaagcucaucaagcaggagcuggacaaguacaagaacgcggucacggaccugcagaugcucaugugcagcacccccgccaccggguccggcagcgccaucgccuccggcguggcggugugcaagguccugcaccuggagggggaggugaacaagaucaagagcgcccuccuguccaccaacaaggccguggucagccuguccaacggcgugagcgugcucacguucaagguccuggaccugaagaacuacaucgacaagcagcuccugccgauccugaacaagcaguccugcagcauccccaaccccgagaccgugauggaguuccagcagaagaacaaccggcuccuggagaucacccgcgaguucuccgugaacgccggggucaccacgcccgugagcaccuacaugcugaccaacuccgagcuccugagccugaucaacgacaugccgaucaccaacgaccagaagaagcucaugagcaacaacgugcagaucguccggcagcaguccuacagcaucaugugcaucaucaaggaggaggugcuggccuacgugguccagcugccccucuacggcgugaucgacacgcccugcuggaagcugcacaccagcccccugugcaccaccaacacgaaggaggggagcaacaucugccucacccgcaccgaccggggcugguacugcgacaacgcgggcuccgugagcuucuucccgcaggccgagaccugcaaggucugcuccaaccgcguguucugcgacacgaugaacagccugacccugcccuccgaggucaaccucugcaacguggacaucuucaaccccaaguacgacugcaagaucaugaccagcaagaccgacguguccagcuccgucaucacgagccugggggccaucguguccugcuacggcaagaccaagugcaccgccagcaacaagaacaaggggaucaucaagaccuucuccaacggcugcgacuacgugagcaacaagggcgucgacacgguguccguggggaacacccuguacuacgucaacaagcaggagggccagagccucuacgugaagggggagcccaucaucaacuucuacgacccgcugguguuccccagcgacgaguucgacgccuccaucagccaggucaacgagaagaucaaccagucccuggcguucauccggaaguccgacgagcuccugcacaacgugaacgccggcaaguccaccaccaacaucaugaucaccacgaucaucaucgugaucaucgucauccugcucagccugaucgccguggggcugcuccuguacugcaaggcccgcugaggacuagucccuguucccagagcccacuuuuuuuucuuuuuuugaaauaaaauagccugucuuucagaucuaaaaaaaaaaaaaaaaaaaaaaaaaaaaaaaaaaaaaaaaaaaaaaaaaaaaaaaaaaaaaaaaugcaucccccccccccccccccccccccccccccccaaaggcucuuuucagagccaccagaauu

SEQ ID NO: 6460 - RNA, 1918 nt, Artificial Sequence
  mRNA product Design a-3 comprising derived and/or modified sequence from HRSV(A2)__F-del_DSCav1_mut6 (opt2)
gggagagggcgcuuggcuugcaaggacccugagcugcggcauugaagcacacccaacccaacucgacugaagucagccucacugaaccggaucugagaaucuucucucucugggcuugccagggcucuccgaaccuagcuagcauccucuucaauuccaacuagaaagcuuaccauggagcuccucauccucaaggccaacgccaucaccaccauccucaccgccgucaccuucugcuucgccuccggccagaacaucaccgaggaguucuaccaguccaccugcuccgccgucuccaagggcuaccucggcgcccuccgcaccggcugguacaccuccgucaucaccaucgagcucuccaacaucaaggagaacaagugcaacggcaccgacgccaaggucaagcucaucaagcaggagcucgacaaguacaagaacgccgucaccgaccuccagaugcucaugugcuccacccccgccaccggcuccggcuccgccaucgccuccggcgucgccgucugcaagguccuccaccucgagggcgaggucaacaagaucaaguccgcccuccucuccaccaacaaggccgucgucucccucuccaacggcgucuccguccucaccuucaagguccucgaccucaagaacuacaucgacaagcagcuccuccccauccucaacaagcaguccugcuccauccccaaccccgagaccgucauggaguuccagcagaagaacaaccgccuccucgagaucacccgcgaguucuccgucaacgccggcgucaccacccccgucuccaccuacaugcucaccaacuccgagcuccucucccucaucaacgacaugcccaucaccaacgaccagaagaagcucauguccaacaacguccagaucguccgccagcaguccuacuccaucaugugcaucaucaaggaggagguccucgccuacgucguccagcucccccucuacggcgucaucgacacccccugcuggaagcuccacaccuccccccucugcaccaccaacaccaaggagggcuccaacaucugccucacccgcaccgaccgcggcugguacugcgacaacgccggcuccgucuccuucuucccccaggccgagaccugcaaggucugcuccaaccgcgucuucugcgacaccaugaacucccucacccuccccuccgaggucaaccucugcaacgucgacaucuucaaccccaaguacgacugcaagaucaugaccuccaagaccgacgucuccuccuccgucaucaccucccucggcgccaucgucuccugcuacggcaagaccaagugcaccgccuccaacaagaacaagggcaucaucaagaccuucuccaacggcugcgacuacgucuccaacaagggcgucgacaccgucuccgucggcaacacccucuacuacgucaacaagcaggagggccagucccucuacgucaagggcgagcccaucaucaacuucuacgacccccucgucuuccccuccgacgaguucgacgccuccaucucccaggucaacgagaagaucaaccagucccucgccuucauccgcaaguccgacgagcuccuccacaacgucaacgccggcaaguccaccaccaacaucaugaucaccaccaucaucaucgucaucaucgucauccuccucucccucaucgccgucggccuccuccucuacugcaaggcccgcugaggacuagucccuguucccagagcccacuuuuuuuucuuuuuuugaaauaaaauagccugucuuucagaucuaaaaaaaaaaaaaaaaaaaaaaaaaaaaaaaaaaaaaaaaaaaaaaaaaaaaaaaaaaaaaaaaugcaucccccccccccccccccccccccccccccccaaaggcucuuuucagagccaccagaauu

SEQ ID NO: 6461 - RNA, 1918 nt, Artificial Sequence
  mRNA product Design a-3 comprising derived and/or modified sequence from HRSV(A2)__F-del_DSCav1_mut6 (opt3)
gggagagggcgcuuggcuugcaaggacccugagcugcggcauugaagcacacccaacccaacucgacugaagucagccucacugaaccggaucugagaaucuucucucucugggcuugccagggcucuccgaaccuagcuagcauccucuucaauuccaacuagaaagcuuaccauggagcugcucauccuuaaggccaacgcuauuaccacaauacugacugcagugacguucugcuuugccagcggccagaauaucaccgaagaguucuaccaauccacauguucugcggucucaaaaggguauuugggagcuuuaagaacugguugguacaccaguguuauuacaaucgaacugagcaacauuaaggagaauaaaugcaacggcaccgacgccaaggugaaacuaaucaagcaggaacucgauaaguauaaaaaugcaguaacugaccugcagaugcuuauguguuccacacccgccaccgggucuggaucggcuauagcaucaggcguggccgucugcaaggugcugcacuuggagggugagguuaacaaaaucaagagcgcucuccugaguacgaauaaagccguggucucccugucuaacggggugagcguacucacuuuuaagguuuuagaucugaagaauuacauugacaaacagcuuuugccuauccugaacaagcaauccuguucaauuccaaauccggaaaccgugauggaguuccagcagaaaaacaauaggcuacucgaaaucacacgggaguuuagugucaacgcgggagugacuacccccgugagcacauauaugcugaccaauucugagcuucuguccuugauaaacgauaugccuauuacgaacgaccagaagaaacucaugucaaauaacguccaaaucguucgccagcagagcuacaguauuaugugcaucaucaaggaagaggugcuggcauauguagugcaguuaccacuguacggcgucauugauacucccuguuggaaacuccauacaucuccucuuugcaccacuaauacaaaggaaggcuccaacauaugucugacccgaacggaccgugggugguacugcgauaaugccggaagcgugucguucuuuccacaagcugagaccuguaagguuugcucuaacagaguguucugcgacacaaugaacuccuugacucuacccucagaagucaaucuguguaauguggauaucuuuaacccuaaauaugacugcaagauuaugaccaguaaaacagauguaagcuccucuguuaucacuagccucggugccauagugucauguuacggcaagaccaaaugcacagcaaguaauaagaacaaggggauuaucaaaaccuucuccaauggaugugacuaugucagcaacaagggcguggacacugucucuguggguaauacgcuguacuauguuaacaaacaggaggggcagucacuuuacgugaagggagagccaaucauuaacuuuuaugauccgcugguauuccccagugacgaauuugaugcuagcaucucccaagucaaugagaaaauuaaccagucuuuggccuucauaaggaagucggacgaacuccugcacaaugugaacgcgggcaagagcacaaccaauaucaugauuacuaccaucaucauuguuauaaucgugauuuuacugucccuaaucgccgucggccuccugcuuuacugcaaagcacggugaggacuagucccuguucccagagcccacuuuuuuuucuuuuuuugaaauaaaauagccugucuuucagaucuaaaaaaaaaaaaaaaaaaaaaaaaaaaaaaaaaaaaaaaaaaaaaaaaaaaaaaaaaaaaaaaaugcaucccccccccccccccccccccccccccccccaaaggcucuuuucagagccaccagaauu

SEQ ID NO: 6462 - RNA, 1918 nt, Artificial Sequence
  mRNA product Design a-3 comprising derived and/or modified sequence from HRSV(A2)__F-del_DSCav1_mut6 (opt4)
gggagagggcgcuuggcuugcaaggacccugagcugcggcauugaagcacacccaacccaacucgacugaagucagccucacugaaccggaucugagaaucuucucucucugggcuugccagggcucuccgaaccuagcuagcauccucuucaauuccaacuagaaagcuuaccauggagcugcugauccugaaggccaacgccaucaccaccauccugaccgccgugaccuucugcuucgccagcggccagaacaucaccgaggaguucuaccagagcaccugcagcgccgugagcaagggcuaccugggcgcccugagaaccggcugguacaccagcgugaucaccaucgagcugagcaacaucaaggagaacaagugcaacggcaccgacgccaaggugaagcugaucaagcaggagcuggacaaguacaagaacgccgugaccgaccugcagaugcugaugugcagcacccccgccaccggcagcggcagcgccaucgccagcggcguggccgugugcaaggugcugcaccuggagggcgaggugaacaagaucaagagcgcccugcugagcaccaacaaggccguggugagccugagcaacggcgugagcgugcugaccuucaaggugcuggaccugaagaacuacaucgacaagcagcugcugcccauccugaacaagcagagcugcagcauccccaaccccgagaccgugauggaguuccagcagaagaacaacagacugcuggagaucaccagagaguucagcgugaacgccggcgugaccacccccgugagcaccuacaugcugaccaacagcgagcugcugagccugaucaacgacaugcccaucaccaacgaccagaagaagcugaugagcaacaacgugcagaucgugagacagcagagcuacagcaucaugugcaucaucaaggaggaggugcuggccuacguggugcagcugccccuguacggcgugaucgacacccccugcuggaagcugcacaccagcccccugugcaccaccaacaccaaggagggcagcaacaucugccugaccagaaccgacagaggcugguacugcgacaacgccggcagcgugagcuucuucccccaggccgagaccugcaaggugugcagcaacagaguguucugcgacaccaugaacagccugacccugcccagcgaggugaaccugugcaacguggacaucuucaaccccaaguacgacugcaagaucaugaccagcaagaccgacgugagcagcagcgugaucaccagccugggcgccaucgugagcugcuacggcaagaccaagugcaccgccagcaacaagaacaagggcaucaucaagaccuucagcaacggcugcgacuacgugagcaacaagggcguggacaccgugagcgugggcaacacccuguacuacgugaacaagcaggagggccagagccuguacgugaagggcgagcccaucaucaacuucuacgacccccugguguuccccagcgacgaguucgacgccagcaucagccaggugaacgagaagaucaaccagagccuggccuucaucagaaagagcgacgagcugcugcacaacgugaacgccggcaagagcaccaccaacaucaugaucaccaccaucaucaucgugaucaucgugauccugcugagccugaucgccgugggccugcugcuguacugcaaggccagaugaggacuagucccuguucccagagcccacuuuuuuuucuuuuuuugaaauaaaauagccugucuuucagaucuaaaaaaaaaaaaaaaaaaaaaaaaaaaaaaaaaaaaaaaaaaaaaaaaaaaaaaaaaaaaaaaaugcaucccccccccccccccccccccccccccccccaaaggcucuuuucagagccaccagaauu

SEQ ID NO: 6463 - RNA, 1918 nt, Artificial Sequence
  mRNA product Design a-3 comprising derived and/or modified sequence from HRSV(A2)__F-del_DSCav1_mut6 (opt5)
gggagagggcgcuuggcuugcaaggacccugagcugcggcauugaagcacacccaacccaacucgacugaagucagccucacugaaccggaucugagaaucuucucucucugggcuugccagggcucuccgaaccuagcuagcauccucuucaauuccaacuagaaagcuuaccauggagcugcucauccugaaggccaacgcuauuaccacaauccuuacggccgugaccuucugcuuugcgagcggccagaauauuacagaagaguucuaccaauccaccuguucugcugucagcaaaggguaucugggagcccucagaacaggcugguacaccuccguuaucacaauugaacugucuaacaucaaggagaauaaaugcaacgggaccgacgccaaggugaaacuuaucaagcaggaacuggauaaguauaaaaaugcugugacggaccuccagaugcugauguguagcacccccgccacaggauccggcucugcuauugccagcggggucgcggugugcaagguucugcaccucgagggagaggugaacaaaaucaaguccgcccugcuuagcaccaauaaagcugucgugucucuguccaacggcguuagcgugcucacauuuaagguccuggaucuuaagaauuacauugacaaacagcugcucccuauccugaacaagcaaucuuguuccauuccgaaucccgaaaccgugauggaguuccagcagaaaaacaaucggcugcucgaaaucacgcgcgaguuuagcgugaacgccggcgucacaaccccuguuucuacauauaugcugaccaauuccgagcuucugagccucauuaacgauaugcccaucaccaacgaccagaagaaacugauguccaauaacgugcaaaucgugagacagcagucuuacagcauuaugugcaucauuaaggaagagguccuugcuuaugugguucagcugccucucuacggggugaucgauacacccuguuggaaacugcauacguccccucugugcaccacaaauaccaaggaaggaagcaacauuugucucacacggaccgaccgcggcugguacugcgauaaugccgggucugucuccuucuuuccgcaagcggagacguguaaggugugcagcaacagaguuuucugcgacacaaugaacucucugacccuucccagcgaagugaaucuguguaaugucgauaucuuuaacccuaaauaugacugcaagaucaugaccuccaaaacagaugugucuagcuccgucauuaccagccucggagccaucgugucuuguuacggcaagacaaaaugcacggcuuccaauaagaacaaggggauuaucaaaaccuucagcaauggaugugacuauguuucuaacaagggcguggacacagucuccgugggcaauacccuguacuauguuaacaaacaggaggggcagagccuuuacgugaagggagagcccauuaucaacuuuuaugauccucuggucuuccccuccgacgaauuugaugccucuaucagccaagugaaugagaaaauuaaccagucccucgcuuucauccggaagucugacgaacugcugcacaaugugaacgccggcaagagcacaaccaauauuaugaucacgaccauuaucauuguuaucaucgucauucuccugucccuuaucgccguggggcugcuccuguacugcaaagcucgcugaggacuagucccuguucccagagcccacuuuuuuuucuuuuuuugaaauaaaauagccugucuuucagaucuaaaaaaaaaaaaaaaaaaaaaaaaaaaaaaaaaaaaaaaaaaaaaaaaaaaaaaaaaaaaaaaaugcaucccccccccccccccccccccccccccccccaaaggcucuuuucagagccaccagaauu

SEQ ID NO: 6464 - RNA, 1918 nt, Artificial Sequence
  mRNA product Design a-3 comprising derived and/or modified sequence from HRSV(A2)__F-del_DSCav1_mut6 (opt6)
gggagagggcgcuuggcuugcaaggacccugagcugcggcauugaagcacacccaacccaacucgacugaagucagccucacugaaccggaucugagaaucuucucucucugggcuugccagggcucuccgaaccuagcuagcauccucuucaauuccaacuagaaagcuuaccauggaacuacucauauuaaaagcaaacgcaauaacaacgauauuaacagcuguaacauucugcuuugcaucaggccaaaauaucaccgaagaauuuuaucaaagcacaugcucugcaguauccaaaggauacuuaggagcauuaagaacaggcugguacacauccguaauaacaauagaacuaucaaacaucaaagaaaacaaaugcaacggcacagacgccaaaguaaaacucauaaaacaagaacuagacaaauauaaaaacgcaguaacagaucuacaaaugcucaugugcuccacaccagcaaccggaucugguucagccauagcauccggcguagccgucugcaaaguauuacaccucgaaggagaaguaaacaaaauaaaaucugcccuauuaucuacaaauaaagccguaguaagucuaaguaacggaguaucaguacuaacauuuaaaguccuagaccugaaaaacuauaucgacaaacaacuauuaccaauacuaaacaaacaauccuguuccaucccuaacccagaaacaguuauggaauuucaacaaaaaaauaaccgccuuuuagaaauaacuagagaauuuucaguaaacgcaggaguuacaacaccaguaucaacauacaugcuaacaaauucagaauuauuaucccuuauaaaugacaugccuaucacaaacgaucaaaaaaaauuaauguccaacaacguacaaauaguaagacaacaaucauauuccaucaugugcaucauaaaagaagaaguccucgcauacguagugcaacuaccacuauacggagucauagauacacccuguuggaaacuucacacaucuccacuaugcacaacaaacacgaaagaaggauccaacauaugccuaacacgaacagacagaggaugguauugcgacaacgcuggaagugugagcuucuucccucaagcagaaacuugcaaaguaugcagcaaucguguauucugcgacacaaugaacucauuaacacucccaagcgaaguaaaccucugcaauguagacaucuuuaauccaaaauacgauuguaaaauaaugacuucaaaaacagacgucucaucaucuguaauaacaucuuuaggagcaauaguuucuugcuacgguaaaacaaaaugcaccgcauccaacaaaaacaaaggaauaauaaaaacauucucuaacggcugcgauuacguaucuaacaaaggaguugacacagucucaguaggaaacacacuauacuacguaaacaaacaagaaggacaaagccuauacguaaaaggagaaccaauaauaaacuucuaugacccauuaguauuuccaagcgaugaauuugacgcuucaauaucacaagucaaugaaaaaauaaaucagagcuuagcauucauaagaaaaucugaugaacuacuacacaauguaaaugcaggaaaauccacuaccaacauaaugauuaccacaauuauaauaguuaucauaguaauacuauuaucacuaauagccguuggauuacuacuauacugcaaagcaagauaaggacuagucccuguucccagagcccacuuuuuuuucuuuuuuugaaauaaaauagccugucuuucagaucuaaaaaaaaaaaaaaaaaaaaaaaaaaaaaaaaaaaaaaaaaaaaaaaaaaaaaaaaaaaaaaaaugcaucccccccccccccccccccccccccccccccaaaggcucuuuucagagccaccagaauu

SEQ ID NO: 6465 - RNA, 1918 nt, Artificial Sequence
  mRNA product Design a-3 comprising derived and/or modified sequence from HRSV(A2)__F-del_DSCav1_mut6 (opt11)
gggagagggcgcuuggcuugcaaggacccugagcugcggcauugaagcacacccaacccaacucgacugaagucagccucacugaaccggaucugagaaucuucucucucugggcuugccagggcucuccgaaccuagcuagcauccucuucaauuccaacuagaaagcuuaccauggaacuacucauccuaaaagcaaacgccaucaccaccauacuaaccgccgucaccuucugcuucgccucgggacaaaacaucaccgaagaguucuaccagucaacgugcuccgccgucucaaaaggcuaccuaggcgcccuccgcaccgggugguauaccuccgucauaacuaucgaacucucuaacaucaaagaaaacaaauguaacggcaccgacgccaaagucaaacuaaucaaacaagaacuggacaaauacaaaaacgccgucaccgaccuacaaaugcucaugugcuccacuccagccaccggcuccgguagcgcaaucgccucaggcguagcuguaugcaaaguccuccaccuagaaggcgaaguaaacaaaauaaaauccgcccuccucucaaccaacaaggccgucgucucacucucaaacggcgucuccguacucaccuuuaaaguccuagaccuuaaaaacuacaucgacaaacaacugcuaccaauccucaacaaacaaucaugcagcaucccaaacccggaaacagucauggaguuccaacagaaaaacaaccgacuccucgaaaucacccgcgaguucuccgucaacgccggagucaccacaccuguaagcacauacaugcuuacuaauuccgaacuccuuucacuaauaaacgacaugccaauaaccaacgaccaaaagaaacucauguccaacaacguacaaaucguacgccaacaauccuacuccaucaugugcaucaucaaagaagaaguccuggccuaugucguacaacucccccuuuacggugucaucgacacacccugcuggaaacuacacaccagcccccucugcacaacaaacaccaaagaaggcuccaacaucugccucacccguaccgaccgaggcugguacugcgacaacgccggcuccgucuccuucuucccccaagccgaaaccugcaaagucugcagcaaccgcgucuucugcgauaccaugaacucccucacacucccaucugaagucaaccucugcaacgucgauauuuucaauccaaaauacgacugcaaaaucaugacuagcaaaaccgacguuagcuccuccgucaucaccucccucggcgccauaguuucaugcuacggcaaaaccaaaugcaccgccuccaacaaaaacaaaggcaucauaaaaaccuucuccaacgggugcgacuacguaucuaauaaaggagucgacaccgucucaguaggaaacacccucuacuaugucaacaaacaagaaggccaaucacuauacguuaaaggcgaaccaaucaucaacuucuacgacccacucgucuuccccagcgacgaguuugacgccucaaucucgcaagucaaugaaaagauuaaccaaucccuagccuucauccgaaaaagugacgaacuccuccacaacguuaacgccggcaaaucuacaaccaacaucaugaucaccacuauaaucaucgucaucauagucauacuucucagccucaucgcagucggacuccuccuuuauugcaaggcacgauaaggacuagucccuguucccagagcccacuuuuuuuucuuuuuuugaaauaaaauagccugucuuucagaucuaaaaaaaaaaaaaaaaaaaaaaaaaaaaaaaaaaaaaaaaaaaaaaaaaaaaaaaaaaaaaaaaugcaucccccccccccccccccccccccccccccccaaaggcucuuuucagagccaccagaauu

SEQ ID NO: 6466 - RNA, 1867 nt, Artificial Sequence
  mRNA product Design a-4 comprising derived and/or modified sequence from HRSV(A2)__F-del_DSCav1_mut6 (opt1)
gggagacuccugucgggcggaaguaggaggaguagaguuuaaaaacaguacucuuuuuccgguucgggacguaguugaagcaacgacaagccggauaaccgcucuugagacaggaagcuuaccauggagcugcucauccugaaggccaacgccaucaccaccauccugacggcggugaccuucugcuucgccagcggccagaacaucaccgaggaguucuaccaguccacgugcagcgccgucuccaagggguaccucggcgcccugcggaccggcugguacaccuccgugaucaccaucgagcugagcaacaucaaggagaacaagugcaacgggaccgacgccaaggugaagcucaucaagcaggagcuggacaaguacaagaacgcggucacggaccugcagaugcugaugugcuccaccccggcaaccggcuccggcuccgccaucgcgagcggcgucgccgugugcaaggugcugcaccucgagggggaggucaacaagaucaagagcgcccugcuguccaccaacaaggccguggugagccucuccaacggcgucagcgugcugaccuucaaggugcuggaccucaagaacuacaucgacaagcagcugcugcccauccugaacaagcagagcugcuccauccccaaccccgagacggugauggaguuccagcagaagaacaaccggcuccuggagaucacccgcgaguucagcgugaacgccggggucaccacccccguguccacguacaugcugaccaacagcgagcuccugucccugaucaacgacaugccgaucaccaacgaccagaagaagcucaugagcaacaacgugcagaucguccggcagcaguccuacagcaucaugugcaucaucaaggaggaggugcuggcguacgugguccagcugccccucuacggcgugaucgacacccccugcuggaagcugcacacgagcccccugugcaccaccaacaccaaggagggguccaacaucugccucacgcgcaccgaccggggcugguacugcgacaacgccggcagcgucuccuucuucccgcaggccgagaccugcaaggugugcagcaaccgcguguucugcgacaccaugaacucccugacgcugcccagcgagguaaaccucugcaacgucgacaucuucaaccccaaguacgacugcaagaucaugaccuccaagaccgacgugagcuccagcgugaucaccucccugggggccaucgucagcugcuacggcaagacgaagugcaccgccagcaacaagaacaaggggaucaucaagaccuucuccaacggcugcgacuacgugagcaacaagggcguggacaccguguccgucgggaacacccuguacuacgugaacaagcaggagggccagagccucuacgugaagggggagcccaucaucaacuucuacgacccgcuggucuuccccuccgacgaguucgacgcgagcaucucccaggugaacgagaagaucaaccagagccuggccuucauccgcaaguccgacgagcugcuccacaacgugaacgccggcaagagcacgaccaacaucaugaucaccaccaucaucaucgucaucaucgugauccugcugucccucaucgccguggggcugcugcucuacugcaaggcccggugaggacuagucccuguucccagagcccacuuuuuuuucuuuuuuugaaauaaaauagccugucuuucagaucuaaaaaaaaaaaaaaaaaaaaaaaaaaaaaaaaaaaaaaaaaaaaaaaaaaaaaaaaaaaaaaaaugcaucccccccccccccccccccccccccccccccaaaggcucuuuucagagccaccagaauu

SEQ ID NO: 6467 - RNA, 1867 nt, Artificial Sequence
  mRNA product Design a-4 comprising derived and/or modified sequence from HRSV(A2)__F-del_DSCav1_mut6 (opt1)
gggagacuccugucgggcggaaguaggaggaguagaguuuaaaaacaguacucuuuuuccgguucgggacguaguugaagcaacgacaagccggauaaccgcucuugagacaggaagcuuaccauggagcugcucauccugaaggccaacgccaucaccaccauccugacggcggugaccuucugcuucgccagcggccagaacaucaccgaggaguucuaccaguccacgugcagcgccgucuccaagggguaccucggcgcccugcgcaccgggugguacaccagcgugaucaccaucgagcuguccaacaucaaggagaacaagugcaacggcaccgacgccaaggugaagcucaucaagcaggagcuggacaaguacaagaacgcggucacggaccugcagaugcucaugugcagcacccccgccaccggguccggcagcgccaucgccuccggcguggcggugugcaagguccugcaccuggagggggaggugaacaagaucaagagcgcccuccuguccaccaacaaggccguggucagccuguccaacggcgugagcgugcucacguucaagguccuggaccugaagaacuacaucgacaagcagcuccugccgauccugaacaagcaguccugcagcauccccaaccccgagaccgugauggaguuccagcagaagaacaaccggcuccuggagaucacccgcgaguucuccgugaacgccggggucaccacgcccgugagcaccuacaugcugaccaacuccgagcuccugagccugaucaacgacaugccgaucaccaacgaccagaagaagcucaugagcaacaacgugcagaucguccggcagcaguccuacagcaucaugugcaucaucaaggaggaggugcuggccuacgugguccagcugccccucuacggcgugaucgacacgcccugcuggaagcugcacaccagcccccugugcaccaccaacacgaaggaggggagcaacaucugccucacccgcaccgaccggggcugguacugcgacaacgcgggcuccgugagcuucuucccgcaggccgagaccugcaaggucugcuccaaccgcguguucugcgacacgaugaacagccugacccugcccuccgaggucaaccucugcaacguggacaucuucaaccccaaguacgacugcaagaucaugaccagcaagaccgacguguccagcuccgucaucacgagccugggggccaucguguccugcuacggcaagaccaagugcaccgccagcaacaagaacaaggggaucaucaagaccuucuccaacggcugcgacuacgugagcaacaagggcgucgacacgguguccguggggaacacccuguacuacgucaacaagcaggagggccagagccucuacgugaagggggagcccaucaucaacuucuacgacccgcugguguuccccagcgacgaguucgacgccuccaucagccaggucaacgagaagaucaaccagucccuggcguucauccggaaguccgacgagcuccugcacaacgugaacgccggcaaguccaccaccaacaucaugaucaccacgaucaucaucgugaucaucgucauccugcucagccugaucgccguggggcugcuccuguacugcaaggcccgcugaggacuagucccuguucccagagcccacuuuuuuuucuuuuuuugaaauaaaauagccugucuuucagaucuaaaaaaaaaaaaaaaaaaaaaaaaaaaaaaaaaaaaaaaaaaaaaaaaaaaaaaaaaaaaaaaaugcaucccccccccccccccccccccccccccccccaaaggcucuuuucagagccaccagaauu

SEQ ID NO: 6468 - RNA, 1867 nt, Artificial Sequence
  mRNA product Design a-4 comprising derived and/or modified sequence from HRSV(A2)__F-del_DSCav1_mut6 (opt2)
gggagacuccugucgggcggaaguaggaggaguagaguuuaaaaacaguacucuuuuuccgguucgggacguaguugaagcaacgacaagccggauaaccgcucuugagacaggaagcuuaccauggagcuccucauccucaaggccaacgccaucaccaccauccucaccgccgucaccuucugcuucgccuccggccagaacaucaccgaggaguucuaccaguccaccugcuccgccgucuccaagggcuaccucggcgcccuccgcaccggcugguacaccuccgucaucaccaucgagcucuccaacaucaaggagaacaagugcaacggcaccgacgccaaggucaagcucaucaagcaggagcucgacaaguacaagaacgccgucaccgaccuccagaugcucaugugcuccacccccgccaccggcuccggcuccgccaucgccuccggcgucgccgucugcaagguccuccaccucgagggcgaggucaacaagaucaaguccgcccuccucuccaccaacaaggccgucgucucccucuccaacggcgucuccguccucaccuucaagguccucgaccucaagaacuacaucgacaagcagcuccuccccauccucaacaagcaguccugcuccauccccaaccccgagaccgucauggaguuccagcagaagaacaaccgccuccucgagaucacccgcgaguucuccgucaacgccggcgucaccacccccgucuccaccuacaugcucaccaacuccgagcuccucucccucaucaacgacaugcccaucaccaacgaccagaagaagcucauguccaacaacguccagaucguccgccagcaguccuacuccaucaugugcaucaucaaggaggagguccucgccuacgucguccagcucccccucuacggcgucaucgacacccccugcuggaagcuccacaccuccccccucugcaccaccaacaccaaggagggcuccaacaucugccucacccgcaccgaccgcggcugguacugcgacaacgccggcuccgucuccuucuucccccaggccgagaccugcaaggucugcuccaaccgcgucuucugcgacaccaugaacucccucacccuccccuccgaggucaaccucugcaacgucgacaucuucaaccccaaguacgacugcaagaucaugaccuccaagaccgacgucuccuccuccgucaucaccucccucggcgccaucgucuccugcuacggcaagaccaagugcaccgccuccaacaagaacaagggcaucaucaagaccuucuccaacggcugcgacuacgucuccaacaagggcgucgacaccgucuccgucggcaacacccucuacuacgucaacaagcaggagggccagucccucuacgucaagggcgagcccaucaucaacuucuacgacccccucgucuuccccuccgacgaguucgacgccuccaucucccaggucaacgagaagaucaaccagucccucgccuucauccgcaaguccgacgagcuccuccacaacgucaacgccggcaaguccaccaccaacaucaugaucaccaccaucaucaucgucaucaucgucauccuccucucccucaucgccgucggccuccuccucuacugcaaggcccgcugaggacuagucccuguucccagagcccacuuuuuuuucuuuuuuugaaauaaaauagccugucuuucagaucuaaaaaaaaaaaaaaaaaaaaaaaaaaaaaaaaaaaaaaaaaaaaaaaaaaaaaaaaaaaaaaaaugcaucccccccccccccccccccccccccccccccaaaggcucuuuucagagccaccagaauu

SEQ ID NO: 6469 - RNA, 1867 nt, Artificial Sequence
  mRNA product Design a-4 comprising derived and/or modified sequence from HRSV(A2)__F-del_DSCav1_mut6 (opt3)
gggagacuccugucgggcggaaguaggaggaguagaguuuaaaaacaguacucuuuuuccgguucgggacguaguugaagcaacgacaagccggauaaccgcucuugagacaggaagcuuaccauggagcugcucauccuuaaggccaacgcuauuaccacaauacugacugcagugacguucugcuuugccagcggccagaauaucaccgaagaguucuaccaauccacauguucugcggucucaaaaggguauuugggagcuuuaagaacugguugguacaccaguguuauuacaaucgaacugagcaacauuaaggagaauaaaugcaacggcaccgacgccaaggugaaacuaaucaagcaggaacucgauaaguauaaaaaugcaguaacugaccugcagaugcuuauguguuccacacccgccaccgggucuggaucggcuauagcaucaggcguggccgucugcaaggugcugcacuuggagggugagguuaacaaaaucaagagcgcucuccugaguacgaauaaagccguggucucccugucuaacggggugagcguacucacuuuuaagguuuuagaucugaagaauuacauugacaaacagcuuuugccuauccugaacaagcaauccuguucaauuccaaauccggaaaccgugauggaguuccagcagaaaaacaauaggcuacucgaaaucacacgggaguuuagugucaacgcgggagugacuacccccgugagcacauauaugcugaccaauucugagcuucuguccuugauaaacgauaugccuauuacgaacgaccagaagaaacucaugucaaauaacguccaaaucguucgccagcagagcuacaguauuaugugcaucaucaaggaagaggugcuggcauauguagugcaguuaccacuguacggcgucauugauacucccuguuggaaacuccauacaucuccucuuugcaccacuaauacaaaggaaggcuccaacauaugucugacccgaacggaccgugggugguacugcgauaaugccggaagcgugucguucuuuccacaagcugagaccuguaagguuugcucuaacagaguguucugcgacacaaugaacuccuugacucuacccucagaagucaaucuguguaauguggauaucuuuaacccuaaauaugacugcaagauuaugaccaguaaaacagauguaagcuccucuguuaucacuagccucggugccauagugucauguuacggcaagaccaaaugcacagcaaguaauaagaacaaggggauuaucaaaaccuucuccaauggaugugacuaugucagcaacaagggcguggacacugucucuguggguaauacgcuguacuauguuaacaaacaggaggggcagucacuuuacgugaagggagagccaaucauuaacuuuuaugauccgcugguauuccccagugacgaauuugaugcuagcaucucccaagucaaugagaaaauuaaccagucuuuggccuucauaaggaagucggacgaacuccugcacaaugugaacgcgggcaagagcacaaccaauaucaugauuacuaccaucaucauuguuauaaucgugauuuuacugucccuaaucgccgucggccuccugcuuuacugcaaagcacggugaggacuagucccuguucccagagcccacuuuuuuuucuuuuuuugaaauaaaauagccugucuuucagaucuaaaaaaaaaaaaaaaaaaaaaaaaaaaaaaaaaaaaaaaaaaaaaaaaaaaaaaaaaaaaaaaaugcaucccccccccccccccccccccccccccccccaaaggcucuuuucagagccaccagaauu

SEQ ID NO: 6470 - RNA, 1867 nt, Artificial Sequence
  mRNA product Design a-4 comprising derived and/or modified sequence from HRSV(A2)__F-del_DSCav1_mut6 (opt4)
gggagacuccugucgggcggaaguaggaggaguagaguuuaaaaacaguacucuuuuuccgguucgggacguaguugaagcaacgacaagccggauaaccgcucuugagacaggaagcuuaccauggagcugcugauccugaaggccaacgccaucaccaccauccugaccgccgugaccuucugcuucgccagcggccagaacaucaccgaggaguucuaccagagcaccugcagcgccgugagcaagggcuaccugggcgcccugagaaccggcugguacaccagcgugaucaccaucgagcugagcaacaucaaggagaacaagugcaacggcaccgacgccaaggugaagcugaucaagcaggagcuggacaaguacaagaacgccgugaccgaccugcagaugcugaugugcagcacccccgccaccggcagcggcagcgccaucgccagcggcguggccgugugcaaggugcugcaccuggagggcgaggugaacaagaucaagagcgcccugcugagcaccaacaaggccguggugagccugagcaacggcgugagcgugcugaccuucaaggugcuggaccugaagaacuacaucgacaagcagcugcugcccauccugaacaagcagagcugcagcauccccaaccccgagaccgugauggaguuccagcagaagaacaacagacugcuggagaucaccagagaguucagcgugaacgccggcgugaccacccccgugagcaccuacaugcugaccaacagcgagcugcugagccugaucaacgacaugcccaucaccaacgaccagaagaagcugaugagcaacaacgugcagaucgugagacagcagagcuacagcaucaugugcaucaucaaggaggaggugcuggccuacguggugcagcugccccuguacggcgugaucgacacccccugcuggaagcugcacaccagcccccugugcaccaccaacaccaaggagggcagcaacaucugccugaccagaaccgacagaggcugguacugcgacaacgccggcagcgugagcuucuucccccaggccgagaccugcaaggugugcagcaacagaguguucugcgacaccaugaacagccugacccugcccagcgaggugaaccugugcaacguggacaucuucaaccccaaguacgacugcaagaucaugaccagcaagaccgacgugagcagcagcgugaucaccagccugggcgccaucgugagcugcuacggcaagaccaagugcaccgccagcaacaagaacaagggcaucaucaagaccuucagcaacggcugcgacuacgugagcaacaagggcguggacaccgugagcgugggcaacacccuguacuacgugaacaagcaggagggccagagccuguacgugaagggcgagcccaucaucaacuucuacgacccccugguguuccccagcgacgaguucgacgccagcaucagccaggugaacgagaagaucaaccagagccuggccuucaucagaaagagcgacgagcugcugcacaacgugaacgccggcaagagcaccaccaacaucaugaucaccaccaucaucaucgugaucaucgugauccugcugagccugaucgccgugggccugcugcuguacugcaaggccagaugaggacuagucccuguucccagagcccacuuuuuuuucuuuuuuugaaauaaaauagccugucuuucagaucuaaaaaaaaaaaaaaaaaaaaaaaaaaaaaaaaaaaaaaaaaaaaaaaaaaaaaaaaaaaaaaaaugcaucccccccccccccccccccccccccccccccaaaggcucuuuucagagccaccagaauu

SEQ ID NO: 6471 - RNA, 1867 nt, Artificial Sequence
  mRNA product Design a-4 comprising derived and/or modified sequence from HRSV(A2)__F-del_DSCav1_mut6 (opt5)
gggagacuccugucgggcggaaguaggaggaguagaguuuaaaaacaguacucuuuuuccgguucgggacguaguugaagcaacgacaagccggauaaccgcucuugagacaggaagcuuaccauggagcugcucauccugaaggccaacgcuauuaccacaauccuuacggccgugaccuucugcuuugcgagcggccagaauauuacagaagaguucuaccaauccaccuguucugcugucagcaaaggguaucugggagcccucagaacaggcugguacaccuccguuaucacaauugaacugucuaacaucaaggagaauaaaugcaacgggaccgacgccaaggugaaacuuaucaagcaggaacuggauaaguauaaaaaugcugugacggaccuccagaugcugauguguagcacccccgccacaggauccggcucugcuauugccagcggggucgcggugugcaagguucugcaccucgagggagaggugaacaaaaucaaguccgcccugcuuagcaccaauaaagcugucgugucucuguccaacggcguuagcgugcucacauuuaagguccuggaucuuaagaauuacauugacaaacagcugcucccuauccugaacaagcaaucuuguuccauuccgaaucccgaaaccgugauggaguuccagcagaaaaacaaucggcugcucgaaaucacgcgcgaguuuagcgugaacgccggcgucacaaccccuguuucuacauauaugcugaccaauuccgagcuucugagccucauuaacgauaugcccaucaccaacgaccagaagaaacugauguccaauaacgugcaaaucgugagacagcagucuuacagcauuaugugcaucauuaaggaagagguccuugcuuaugugguucagcugccucucuacggggugaucgauacacccuguuggaaacugcauacguccccucugugcaccacaaauaccaaggaaggaagcaacauuugucucacacggaccgaccgcggcugguacugcgauaaugccgggucugucuccuucuuuccgcaagcggagacguguaaggugugcagcaacagaguuuucugcgacacaaugaacucucugacccuucccagcgaagugaaucuguguaaugucgauaucuuuaacccuaaauaugacugcaagaucaugaccuccaaaacagaugugucuagcuccgucauuaccagccucggagccaucgugucuuguuacggcaagacaaaaugcacggcuuccaauaagaacaaggggauuaucaaaaccuucagcaauggaugugacuauguuucuaacaagggcguggacacagucuccgugggcaauacccuguacuauguuaacaaacaggaggggcagagccuuuacgugaagggagagcccauuaucaacuuuuaugauccucuggucuuccccuccgacgaauuugaugccucuaucagccaagugaaugagaaaauuaaccagucccucgcuuucauccggaagucugacgaacugcugcacaaugugaacgccggcaagagcacaaccaauauuaugaucacgaccauuaucauuguuaucaucgucauucuccugucccuuaucgccguggggcugcuccuguacugcaaagcucgcugaggacuagucccuguucccagagcccacuuuuuuuucuuuuuuugaaauaaaauagccugucuuucagaucuaaaaaaaaaaaaaaaaaaaaaaaaaaaaaaaaaaaaaaaaaaaaaaaaaaaaaaaaaaaaaaaaugcaucccccccccccccccccccccccccccccccaaaggcucuuuucagagccaccagaauu

SEQ ID NO: 6472 - RNA, 1867 nt, Artificial Sequence
  mRNA product Design a-4 comprising derived and/or modified sequence from HRSV(A2)__F-del_DSCav1_mut6 (opt6)
gggagacuccugucgggcggaaguaggaggaguagaguuuaaaaacaguacucuuuuuccgguucgggacguaguugaagcaacgacaagccggauaaccgcucuugagacaggaagcuuaccauggaacuacucauauuaaaagcaaacgcaauaacaacgauauuaacagcuguaacauucugcuuugcaucaggccaaaauaucaccgaagaauuuuaucaaagcacaugcucugcaguauccaaaggauacuuaggagcauuaagaacaggcugguacacauccguaauaacaauagaacuaucaaacaucaaagaaaacaaaugcaacggcacagacgccaaaguaaaacucauaaaacaagaacuagacaaauauaaaaacgcaguaacagaucuacaaaugcucaugugcuccacaccagcaaccggaucugguucagccauagcauccggcguagccgucugcaaaguauuacaccucgaaggagaaguaaacaaaauaaaaucugcccuauuaucuacaaauaaagccguaguaagucuaaguaacggaguaucaguacuaacauuuaaaguccuagaccugaaaaacuauaucgacaaacaacuauuaccaauacuaaacaaacaauccuguuccaucccuaacccagaaacaguuauggaauuucaacaaaaaaauaaccgccuuuuagaaauaacuagagaauuuucaguaaacgcaggaguuacaacaccaguaucaacauacaugcuaacaaauucagaauuauuaucccuuauaaaugacaugccuaucacaaacgaucaaaaaaaauuaauguccaacaacguacaaauaguaagacaacaaucauauuccaucaugugcaucauaaaagaagaaguccucgcauacguagugcaacuaccacuauacggagucauagauacacccuguuggaaacuucacacaucuccacuaugcacaacaaacacgaaagaaggauccaacauaugccuaacacgaacagacagaggaugguauugcgacaacgcuggaagugugagcuucuucccucaagcagaaacuugcaaaguaugcagcaaucguguauucugcgacacaaugaacucauuaacacucccaagcgaaguaaaccucugcaauguagacaucuuuaauccaaaauacgauuguaaaauaaugacuucaaaaacagacgucucaucaucuguaauaacaucuuuaggagcaauaguuucuugcuacgguaaaacaaaaugcaccgcauccaacaaaaacaaaggaauaauaaaaacauucucuaacggcugcgauuacguaucuaacaaaggaguugacacagucucaguaggaaacacacuauacuacguaaacaaacaagaaggacaaagccuauacguaaaaggagaaccaauaauaaacuucuaugacccauuaguauuuccaagcgaugaauuugacgcuucaauaucacaagucaaugaaaaaauaaaucagagcuuagcauucauaagaaaaucugaugaacuacuacacaauguaaaugcaggaaaauccacuaccaacauaaugauuaccacaauuauaauaguuaucauaguaauacuauuaucacuaauagccguuggauuacuacuauacugcaaagcaagauaaggacuagucccuguucccagagcccacuuuuuuuucuuuuuuugaaauaaaauagccugucuuucagaucuaaaaaaaaaaaaaaaaaaaaaaaaaaaaaaaaaaaaaaaaaaaaaaaaaaaaaaaaaaaaaaaaugcaucccccccccccccccccccccccccccccccaaaggcucuuuucagagccaccagaauu

SEQ ID NO: 6473 - RNA, 1867 nt, Artificial Sequence
  mRNA product Design a-4 comprising derived and/or modified sequence from HRSV(A2)__F-del_DSCav1_mut6 (opt11)
gggagacuccugucgggcggaaguaggaggaguagaguuuaaaaacaguacucuuuuuccgguucgggacguaguugaagcaacgacaagccggauaaccgcucuugagacaggaagcuuaccauggaacuacucauccuaaaagcaaacgccaucaccaccauacuaaccgccgucaccuucugcuucgccucgggacaaaacaucaccgaagaguucuaccagucaacgugcuccgccgucucaaaaggcuaccuaggcgcccuccgcaccgggugguauaccuccgucauaacuaucgaacucucuaacaucaaagaaaacaaauguaacggcaccgacgccaaagucaaacuaaucaaacaagaacuggacaaauacaaaaacgccgucaccgaccuacaaaugcucaugugcuccacuccagccaccggcuccgguagcgcaaucgccucaggcguagcuguaugcaaaguccuccaccuagaaggcgaaguaaacaaaauaaaauccgcccuccucucaaccaacaaggccgucgucucacucucaaacggcgucuccguacucaccuuuaaaguccuagaccuuaaaaacuacaucgacaaacaacugcuaccaauccucaacaaacaaucaugcagcaucccaaacccggaaacagucauggaguuccaacagaaaaacaaccgacuccucgaaaucacccgcgaguucuccgucaacgccggagucaccacaccuguaagcacauacaugcuuacuaauuccgaacuccuuucacuaauaaacgacaugccaauaaccaacgaccaaaagaaacucauguccaacaacguacaaaucguacgccaacaauccuacuccaucaugugcaucaucaaagaagaaguccuggccuaugucguacaacucccccuuuacggugucaucgacacacccugcuggaaacuacacaccagcccccucugcacaacaaacaccaaagaaggcuccaacaucugccucacccguaccgaccgaggcugguacugcgacaacgccggcuccgucuccuucuucccccaagccgaaaccugcaaagucugcagcaaccgcgucuucugcgauaccaugaacucccucacacucccaucugaagucaaccucugcaacgucgauauuuucaauccaaaauacgacugcaaaaucaugacuagcaaaaccgacguuagcuccuccgucaucaccucccucggcgccauaguuucaugcuacggcaaaaccaaaugcaccgccuccaacaaaaacaaaggcaucauaaaaaccuucuccaacgggugcgacuacguaucuaauaaaggagucgacaccgucucaguaggaaacacccucuacuaugucaacaaacaagaaggccaaucacuauacguuaaaggcgaaccaaucaucaacuucuacgacccacucgucuuccccagcgacgaguuugacgccucaaucucgcaagucaaugaaaagauuaaccaaucccuagccuucauccgaaaaagugacgaacuccuccacaacguuaacgccggcaaaucuacaaccaacaucaugaucaccacuauaaucaucgucaucauagucauacuucucagccucaucgcagucggacuccuccuuuauugcaaggcacgauaaggacuagucccuguucccagagcccacuuuuuuuucuuuuuuugaaauaaaauagccugucuuucagaucuaaaaaaaaaaaaaaaaaaaaaaaaaaaaaaaaaaaaaaaaaaaaaaaaaaaaaaaaaaaaaaaaugcaucccccccccccccccccccccccccccccccaaaggcucuuuucagagccaccagaauu

SEQ ID NO: 6474 - RNA, 1813 nt, Artificial Sequence
  mRNA product Design a-5 comprising derived and/or modified sequence from HRSV(A2)__F-del_DSCav1_mut6 (opt1)
gggagacuuucccauucuguagcagaauuugguguugccuguggucuuggucccgcggagaagcuuaccauggagcugcucauccugaaggccaacgccaucaccaccauccugacggcggugaccuucugcuucgccagcggccagaacaucaccgaggaguucuaccaguccacgugcagcgccgucuccaagggguaccucggcgcccugcggaccggcugguacaccuccgugaucaccaucgagcugagcaacaucaaggagaacaagugcaacgggaccgacgccaaggugaagcucaucaagcaggagcuggacaaguacaagaacgcggucacggaccugcagaugcugaugugcuccaccccggcaaccggcuccggcuccgccaucgcgagcggcgucgccgugugcaaggugcugcaccucgagggggaggucaacaagaucaagagcgcccugcuguccaccaacaaggccguggugagccucuccaacggcgucagcgugcugaccuucaaggugcuggaccucaagaacuacaucgacaagcagcugcugcccauccugaacaagcagagcugcuccauccccaaccccgagacggugauggaguuccagcagaagaacaaccggcuccuggagaucacccgcgaguucagcgugaacgccggggucaccacccccguguccacguacaugcugaccaacagcgagcuccugucccugaucaacgacaugccgaucaccaacgaccagaagaagcucaugagcaacaacgugcagaucguccggcagcaguccuacagcaucaugugcaucaucaaggaggaggugcuggcguacgugguccagcugccccucuacggcgugaucgacacccccugcuggaagcugcacacgagcccccugugcaccaccaacaccaaggagggguccaacaucugccucacgcgcaccgaccggggcugguacugcgacaacgccggcagcgucuccuucuucccgcaggccgagaccugcaaggugugcagcaaccgcguguucugcgacaccaugaacucccugacgcugcccagcgagguaaaccucugcaacgucgacaucuucaaccccaaguacgacugcaagaucaugaccuccaagaccgacgugagcuccagcgugaucaccucccugggggccaucgucagcugcuacggcaagacgaagugcaccgccagcaacaagaacaaggggaucaucaagaccuucuccaacggcugcgacuacgugagcaacaagggcguggacaccguguccgucgggaacacccuguacuacgugaacaagcaggagggccagagccucuacgugaagggggagcccaucaucaacuucuacgacccgcuggucuuccccuccgacgaguucgacgcgagcaucucccaggugaacgagaagaucaaccagagccuggccuucauccgcaaguccgacgagcugcuccacaacgugaacgccggcaagagcacgaccaacaucaugaucaccaccaucaucaucgucaucaucgugauccugcugucccucaucgccguggggcugcugcucuacugcaaggcccggugaggacuagucccuguucccagagcccacuuuuuuuucuuuuuuugaaauaaaauagccugucuuucagaucuaaaaaaaaaaaaaaaaaaaaaaaaaaaaaaaaaaaaaaaaaaaaaaaaaaaaaaaaaaaaaaaaugcaucccccccccccccccccccccccccccccccaaaggcucuuuucagagccaccagaauu

SEQ ID NO: 6475 - RNA, 1813 nt, Artificial Sequence
  mRNA product Design a-5 comprising derived and/or modified sequence from HRSV(A2)__F-del_DSCav1_mut6 (opt1)
gggagacuuucccauucuguagcagaauuugguguugccuguggucuuggucccgcggagaagcuuaccauggagcugcucauccugaaggccaacgccaucaccaccauccugacggcggugaccuucugcuucgccagcggccagaacaucaccgaggaguucuaccaguccacgugcagcgccgucuccaagggguaccucggcgcccugcgcaccgggugguacaccagcgugaucaccaucgagcuguccaacaucaaggagaacaagugcaacggcaccgacgccaaggugaagcucaucaagcaggagcuggacaaguacaagaacgcggucacggaccugcagaugcucaugugcagcacccccgccaccggguccggcagcgccaucgccuccggcguggcggugugcaagguccugcaccuggagggggaggugaacaagaucaagagcgcccuccuguccaccaacaaggccguggucagccuguccaacggcgugagcgugcucacguucaagguccuggaccugaagaacuacaucgacaagcagcuccugccgauccugaacaagcaguccugcagcauccccaaccccgagaccgugauggaguuccagcagaagaacaaccggcuccuggagaucacccgcgaguucuccgugaacgccggggucaccacgcccgugagcaccuacaugcugaccaacuccgagcuccugagccugaucaacgacaugccgaucaccaacgaccagaagaagcucaugagcaacaacgugcagaucguccggcagcaguccuacagcaucaugugcaucaucaaggaggaggugcuggccuacgugguccagcugccccucuacggcgugaucgacacgcccugcuggaagcugcacaccagcccccugugcaccaccaacacgaaggaggggagcaacaucugccucacccgcaccgaccggggcugguacugcgacaacgcgggcuccgugagcuucuucccgcaggccgagaccugcaaggucugcuccaaccgcguguucugcgacacgaugaacagccugacccugcccuccgaggucaaccucugcaacguggacaucuucaaccccaaguacgacugcaagaucaugaccagcaagaccgacguguccagcuccgucaucacgagccugggggccaucguguccugcuacggcaagaccaagugcaccgccagcaacaagaacaaggggaucaucaagaccuucuccaacggcugcgacuacgugagcaacaagggcgucgacacgguguccguggggaacacccuguacuacgucaacaagcaggagggccagagccucuacgugaagggggagcccaucaucaacuucuacgacccgcugguguuccccagcgacgaguucgacgccuccaucagccaggucaacgagaagaucaaccagucccuggcguucauccggaaguccgacgagcuccugcacaacgugaacgccggcaaguccaccaccaacaucaugaucaccacgaucaucaucgugaucaucgucauccugcucagccugaucgccguggggcugcuccuguacugcaaggcccgcugaggacuagucccuguucccagagcccacuuuuuuuucuuuuuuugaaauaaaauagccugucuuucagaucuaaaaaaaaaaaaaaaaaaaaaaaaaaaaaaaaaaaaaaaaaaaaaaaaaaaaaaaaaaaaaaaaugcaucccccccccccccccccccccccccccccccaaaggcucuuuucagagccaccagaauu

SEQ ID NO: 6476 - RNA, 1813 nt, Artificial Sequence
  mRNA product Design a-5 comprising derived and/or modified sequence from HRSV(A2)__F-del_DSCav1_mut6 (opt2)
gggagacuuucccauucuguagcagaauuugguguugccuguggucuuggucccgcggagaagcuuaccauggagcuccucauccucaaggccaacgccaucaccaccauccucaccgccgucaccuucugcuucgccuccggccagaacaucaccgaggaguucuaccaguccaccugcuccgccgucuccaagggcuaccucggcgcccuccgcaccggcugguacaccuccgucaucaccaucgagcucuccaacaucaaggagaacaagugcaacggcaccgacgccaaggucaagcucaucaagcaggagcucgacaaguacaagaacgccgucaccgaccuccagaugcucaugugcuccacccccgccaccggcuccggcuccgccaucgccuccggcgucgccgucugcaagguccuccaccucgagggcgaggucaacaagaucaaguccgcccuccucuccaccaacaaggccgucgucucccucuccaacggcgucuccguccucaccuucaagguccucgaccucaagaacuacaucgacaagcagcuccuccccauccucaacaagcaguccugcuccauccccaaccccgagaccgucauggaguuccagcagaagaacaaccgccuccucgagaucacccgcgaguucuccgucaacgccggcgucaccacccccgucuccaccuacaugcucaccaacuccgagcuccucucccucaucaacgacaugcccaucaccaacgaccagaagaagcucauguccaacaacguccagaucguccgccagcaguccuacuccaucaugugcaucaucaaggaggagguccucgccuacgucguccagcucccccucuacggcgucaucgacacccccugcuggaagcuccacaccuccccccucugcaccaccaacaccaaggagggcuccaacaucugccucacccgcaccgaccgcggcugguacugcgacaacgccggcuccgucuccuucuucccccaggccgagaccugcaaggucugcuccaaccgcgucuucugcgacaccaugaacucccucacccuccccuccgaggucaaccucugcaacgucgacaucuucaaccccaaguacgacugcaagaucaugaccuccaagaccgacgucuccuccuccgucaucaccucccucggcgccaucgucuccugcuacggcaagaccaagugcaccgccuccaacaagaacaagggcaucaucaagaccuucuccaacggcugcgacuacgucuccaacaagggcgucgacaccgucuccgucggcaacacccucuacuacgucaacaagcaggagggccagucccucuacgucaagggcgagcccaucaucaacuucuacgacccccucgucuuccccuccgacgaguucgacgccuccaucucccaggucaacgagaagaucaaccagucccucgccuucauccgcaaguccgacgagcuccuccacaacgucaacgccggcaaguccaccaccaacaucaugaucaccaccaucaucaucgucaucaucgucauccuccucucccucaucgccgucggccuccuccucuacugcaaggcccgcugaggacuagucccuguucccagagcccacuuuuuuuucuuuuuuugaaauaaaauagccugucuuucagaucuaaaaaaaaaaaaaaaaaaaaaaaaaaaaaaaaaaaaaaaaaaaaaaaaaaaaaaaaaaaaaaaaugcaucccccccccccccccccccccccccccccccaaaggcucuuuucagagccaccagaauu

SEQ ID NO: 6477 - RNA, 1813 nt, Artificial Sequence
  mRNA product Design a-5 comprising derived and/or modified sequence from HRSV(A2)__F-del_DSCav1_mut6 (opt3)
gggagacuuucccauucuguagcagaauuugguguugccuguggucuuggucccgcggagaagcuuaccauggagcugcucauccuuaaggccaacgcuauuaccacaauacugacugcagugacguucugcuuugccagcggccagaauaucaccgaagaguucuaccaauccacauguucugcggucucaaaaggguauuugggagcuuuaagaacugguugguacaccaguguuauuacaaucgaacugagcaacauuaaggagaauaaaugcaacggcaccgacgccaaggugaaacuaaucaagcaggaacucgauaaguauaaaaaugcaguaacugaccugcagaugcuuauguguuccacacccgccaccgggucuggaucggcuauagcaucaggcguggccgucugcaaggugcugcacuuggagggugagguuaacaaaaucaagagcgcucuccugaguacgaauaaagccguggucucccugucuaacggggugagcguacucacuuuuaagguuuuagaucugaagaauuacauugacaaacagcuuuugccuauccugaacaagcaauccuguucaauuccaaauccggaaaccgugauggaguuccagcagaaaaacaauaggcuacucgaaaucacacgggaguuuagugucaacgcgggagugacuacccccgugagcacauauaugcugaccaauucugagcuucuguccuugauaaacgauaugccuauuacgaacgaccagaagaaacucaugucaaauaacguccaaaucguucgccagcagagcuacaguauuaugugcaucaucaaggaagaggugcuggcauauguagugcaguuaccacuguacggcgucauugauacucccuguuggaaacuccauacaucuccucuuugcaccacuaauacaaaggaaggcuccaacauaugucugacccgaacggaccgugggugguacugcgauaaugccggaagcgugucguucuuuccacaagcugagaccuguaagguuugcucuaacagaguguucugcgacacaaugaacuccuugacucuacccucagaagucaaucuguguaauguggauaucuuuaacccuaaauaugacugcaagauuaugaccaguaaaacagauguaagcuccucuguuaucacuagccucggugccauagugucauguuacggcaagaccaaaugcacagcaaguaauaagaacaaggggauuaucaaaaccuucuccaauggaugugacuaugucagcaacaagggcguggacacugucucuguggguaauacgcuguacuauguuaacaaacaggaggggcagucacuuuacgugaagggagagccaaucauuaacuuuuaugauccgcugguauuccccagugacgaauuugaugcuagcaucucccaagucaaugagaaaauuaaccagucuuuggccuucauaaggaagucggacgaacuccugcacaaugugaacgcgggcaagagcacaaccaauaucaugauuacuaccaucaucauuguuauaaucgugauuuuacugucccuaaucgccgucggccuccugcuuuacugcaaagcacggugaggacuagucccuguucccagagcccacuuuuuuuucuuuuuuugaaauaaaauagccugucuuucagaucuaaaaaaaaaaaaaaaaaaaaaaaaaaaaaaaaaaaaaaaaaaaaaaaaaaaaaaaaaaaaaaaaugcaucccccccccccccccccccccccccccccccaaaggcucuuuucagagccaccagaauu

SEQ ID NO: 6478 - RNA, 1813 nt, Artificial Sequence
  mRNA product Design a-5 comprising derived and/or modified sequence from HRSV(A2)__F-del_DSCav1_mut6 (opt4)
gggagacuuucccauucuguagcagaauuugguguugccuguggucuuggucccgcggagaagcuuaccauggagcugcugauccugaaggccaacgccaucaccaccauccugaccgccgugaccuucugcuucgccagcggccagaacaucaccgaggaguucuaccagagcaccugcagcgccgugagcaagggcuaccugggcgcccugagaaccggcugguacaccagcgugaucaccaucgagcugagcaacaucaaggagaacaagugcaacggcaccgacgccaaggugaagcugaucaagcaggagcuggacaaguacaagaacgccgugaccgaccugcagaugcugaugugcagcacccccgccaccggcagcggcagcgccaucgccagcggcguggccgugugcaaggugcugcaccuggagggcgaggugaacaagaucaagagcgcccugcugagcaccaacaaggccguggugagccugagcaacggcgugagcgugcugaccuucaaggugcuggaccugaagaacuacaucgacaagcagcugcugcccauccugaacaagcagagcugcagcauccccaaccccgagaccgugauggaguuccagcagaagaacaacagacugcuggagaucaccagagaguucagcgugaacgccggcgugaccacccccgugagcaccuacaugcugaccaacagcgagcugcugagccugaucaacgacaugcccaucaccaacgaccagaagaagcugaugagcaacaacgugcagaucgugagacagcagagcuacagcaucaugugcaucaucaaggaggaggugcuggccuacguggugcagcugccccuguacggcgugaucgacacccccugcuggaagcugcacaccagcccccugugcaccaccaacaccaaggagggcagcaacaucugccugaccagaaccgacagaggcugguacugcgacaacgccggcagcgugagcuucuucccccaggccgagaccugcaaggugugcagcaacagaguguucugcgacaccaugaacagccugacccugcccagcgaggugaaccugugcaacguggacaucuucaaccccaaguacgacugcaagaucaugaccagcaagaccgacgugagcagcagcgugaucaccagccugggcgccaucgugagcugcuacggcaagaccaagugcaccgccagcaacaagaacaagggcaucaucaagaccuucagcaacggcugcgacuacgugagcaacaagggcguggacaccgugagcgugggcaacacccuguacuacgugaacaagcaggagggccagagccuguacgugaagggcgagcccaucaucaacuucuacgacccccugguguuccccagcgacgaguucgacgccagcaucagccaggugaacgagaagaucaaccagagccuggccuucaucagaaagagcgacgagcugcugcacaacgugaacgccggcaagagcaccaccaacaucaugaucaccaccaucaucaucgugaucaucgugauccugcugagccugaucgccgugggccugcugcuguacugcaaggccagaugaggacuagucccuguucccagagcccacuuuuuuuucuuuuuuugaaauaaaauagccugucuuucagaucuaaaaaaaaaaaaaaaaaaaaaaaaaaaaaaaaaaaaaaaaaaaaaaaaaaaaaaaaaaaaaaaaugcaucccccccccccccccccccccccccccccccaaaggcucuuuucagagccaccagaauu

SEQ ID NO: 6479 - RNA, 1813 nt, Artificial Sequence
  mRNA product Design a-5 comprising derived and/or modified sequence from HRSV(A2)__F-del_DSCav1_mut6 (opt5)
gggagacuuucccauucuguagcagaauuugguguugccuguggucuuggucccgcggagaagcuuaccauggagcugcucauccugaaggccaacgcuauuaccacaauccuuacggccgugaccuucugcuuugcgagcggccagaauauuacagaagaguucuaccaauccaccuguucugcugucagcaaaggguaucugggagcccucagaacaggcugguacaccuccguuaucacaauugaacugucuaacaucaaggagaauaaaugcaacgggaccgacgccaaggugaaacuuaucaagcaggaacuggauaaguauaaaaaugcugugacggaccuccagaugcugauguguagcacccccgccacaggauccggcucugcuauugccagcggggucgcggugugcaagguucugcaccucgagggagaggugaacaaaaucaaguccgcccugcuuagcaccaauaaagcugucgugucucuguccaacggcguuagcgugcucacauuuaagguccuggaucuuaagaauuacauugacaaacagcugcucccuauccugaacaagcaaucuuguuccauuccgaaucccgaaaccgugauggaguuccagcagaaaaacaaucggcugcucgaaaucacgcgcgaguuuagcgugaacgccggcgucacaaccccuguuucuacauauaugcugaccaauuccgagcuucugagccucauuaacgauaugcccaucaccaacgaccagaagaaacugauguccaauaacgugcaaaucgugagacagcagucuuacagcauuaugugcaucauuaaggaagagguccuugcuuaugugguucagcugccucucuacggggugaucgauacacccuguuggaaacugcauacguccccucugugcaccacaaauaccaaggaaggaagcaacauuugucucacacggaccgaccgcggcugguacugcgauaaugccgggucugucuccuucuuuccgcaagcggagacguguaaggugugcagcaacagaguuuucugcgacacaaugaacucucugacccuucccagcgaagugaaucuguguaaugucgauaucuuuaacccuaaauaugacugcaagaucaugaccuccaaaacagaugugucuagcuccgucauuaccagccucggagccaucgugucuuguuacggcaagacaaaaugcacggcuuccaauaagaacaaggggauuaucaaaaccuucagcaauggaugugacuauguuucuaacaagggcguggacacagucuccgugggcaauacccuguacuauguuaacaaacaggaggggcagagccuuuacgugaagggagagcccauuaucaacuuuuaugauccucuggucuuccccuccgacgaauuugaugccucuaucagccaagugaaugagaaaauuaaccagucccucgcuuucauccggaagucugacgaacugcugcacaaugugaacgccggcaagagcacaaccaauauuaugaucacgaccauuaucauuguuaucaucgucauucuccugucccuuaucgccguggggcugcuccuguacugcaaagcucgcugaggacuagucccuguucccagagcccacuuuuuuuucuuuuuuugaaauaaaauagccugucuuucagaucuaaaaaaaaaaaaaaaaaaaaaaaaaaaaaaaaaaaaaaaaaaaaaaaaaaaaaaaaaaaaaaaaugcaucccccccccccccccccccccccccccccccaaaggcucuuuucagagccaccagaauu

SEQ ID NO: 6480 - RNA, 1813 nt, Artificial Sequence
  mRNA product Design a-5 comprising derived and/or modified sequence from HRSV(A2)__F-del_DSCav1_mut6 (opt6)
gggagacuuucccauucuguagcagaauuugguguugccuguggucuuggucccgcggagaagcuuaccauggaacuacucauauuaaaagcaaacgcaauaacaacgauauuaacagcuguaacauucugcuuugcaucaggccaaaauaucaccgaagaauuuuaucaaagcacaugcucugcaguauccaaaggauacuuaggagcauuaagaacaggcugguacacauccguaauaacaauagaacuaucaaacaucaaagaaaacaaaugcaacggcacagacgccaaaguaaaacucauaaaacaagaacuagacaaauauaaaaacgcaguaacagaucuacaaaugcucaugugcuccacaccagcaaccggaucugguucagccauagcauccggcguagccgucugcaaaguauuacaccucgaaggagaaguaaacaaaauaaaaucugcccuauuaucuacaaauaaagccguaguaagucuaaguaacggaguaucaguacuaacauuuaaaguccuagaccugaaaaacuauaucgacaaacaacuauuaccaauacuaaacaaacaauccuguuccaucccuaacccagaaacaguuauggaauuucaacaaaaaaauaaccgccuuuuagaaauaacuagagaauuuucaguaaacgcaggaguuacaacaccaguaucaacauacaugcuaacaaauucagaauuauuaucccuuauaaaugacaugccuaucacaaacgaucaaaaaaaauuaauguccaacaacguacaaauaguaagacaacaaucauauuccaucaugugcaucauaaaagaagaaguccucgcauacguagugcaacuaccacuauacggagucauagauacacccuguuggaaacuucacacaucuccacuaugcacaacaaacacgaaagaaggauccaacauaugccuaacacgaacagacagaggaugguauugcgacaacgcuggaagugugagcuucuucccucaagcagaaacuugcaaaguaugcagcaaucguguauucugcgacacaaugaacucauuaacacucccaagcgaaguaaaccucugcaauguagacaucuuuaauccaaaauacgauuguaaaauaaugacuucaaaaacagacgucucaucaucuguaauaacaucuuuaggagcaauaguuucuugcuacgguaaaacaaaaugcaccgcauccaacaaaaacaaaggaauaauaaaaacauucucuaacggcugcgauuacguaucuaacaaaggaguugacacagucucaguaggaaacacacuauacuacguaaacaaacaagaaggacaaagccuauacguaaaaggagaaccaauaauaaacuucuaugacccauuaguauuuccaagcgaugaauuugacgcuucaauaucacaagucaaugaaaaaauaaaucagagcuuagcauucauaagaaaaucugaugaacuacuacacaauguaaaugcaggaaaauccacuaccaacauaaugauuaccacaauuauaauaguuaucauaguaauacuauuaucacuaauagccguuggauuacuacuauacugcaaagcaagauaaggacuagucccuguucccagagcccacuuuuuuuucuuuuuuugaaauaaaauagccugucuuucagaucuaaaaaaaaaaaaaaaaaaaaaaaaaaaaaaaaaaaaaaaaaaaaaaaaaaaaaaaaaaaaaaaaugcaucccccccccccccccccccccccccccccccaaaggcucuuuucagagccaccagaauu

SEQ ID NO: 6481 - RNA, 1813 nt, Artificial Sequence
  mRNA product Design a-5 comprising derived and/or modified sequence from HRSV(A2)__F-del_DSCav1_mut6 (opt11)
gggagacuuucccauucuguagcagaauuugguguugccuguggucuuggucccgcggagaagcuuaccauggaacuacucauccuaaaagcaaacgccaucaccaccauacuaaccgccgucaccuucugcuucgccucgggacaaaacaucaccgaagaguucuaccagucaacgugcuccgccgucucaaaaggcuaccuaggcgcccuccgcaccgggugguauaccuccgucauaacuaucgaacucucuaacaucaaagaaaacaaauguaacggcaccgacgccaaagucaaacuaaucaaacaagaacuggacaaauacaaaaacgccgucaccgaccuacaaaugcucaugugcuccacuccagccaccggcuccgguagcgcaaucgccucaggcguagcuguaugcaaaguccuccaccuagaaggcgaaguaaacaaaauaaaauccgcccuccucucaaccaacaaggccgucgucucacucucaaacggcgucuccguacucaccuuuaaaguccuagaccuuaaaaacuacaucgacaaacaacugcuaccaauccucaacaaacaaucaugcagcaucccaaacccggaaacagucauggaguuccaacagaaaaacaaccgacuccucgaaaucacccgcgaguucuccgucaacgccggagucaccacaccuguaagcacauacaugcuuacuaauuccgaacuccuuucacuaauaaacgacaugccaauaaccaacgaccaaaagaaacucauguccaacaacguacaaaucguacgccaacaauccuacuccaucaugugcaucaucaaagaagaaguccuggccuaugucguacaacucccccuuuacggugucaucgacacacccugcuggaaacuacacaccagcccccucugcacaacaaacaccaaagaaggcuccaacaucugccucacccguaccgaccgaggcugguacugcgacaacgccggcuccgucuccuucuucccccaagccgaaaccugcaaagucugcagcaaccgcgucuucugcgauaccaugaacucccucacacucccaucugaagucaaccucugcaacgucgauauuuucaauccaaaauacgacugcaaaaucaugacuagcaaaaccgacguuagcuccuccgucaucaccucccucggcgccauaguuucaugcuacggcaaaaccaaaugcaccgccuccaacaaaaacaaaggcaucauaaaaaccuucuccaacgggugcgacuacguaucuaauaaaggagucgacaccgucucaguaggaaacacccucuacuaugucaacaaacaagaaggccaaucacuauacguuaaaggcgaaccaaucaucaacuucuacgacccacucgucuuccccagcgacgaguuugacgccucaaucucgcaagucaaugaaaagauuaaccaaucccuagccuucauccgaaaaagugacgaacuccuccacaacguuaacgccggcaaaucuacaaccaacaucaugaucaccacuauaaucaucgucaucauagucauacuucucagccucaucgcagucggacuccuccuuuauugcaaggcacgauaaggacuagucccuguucccagagcccacuuuuuuuucuuuuuuugaaauaaaauagccugucuuucagaucuaaaaaaaaaaaaaaaaaaaaaaaaaaaaaaaaaaaaaaaaaaaaaaaaaaaaaaaaaaaaaaaaugcaucccccccccccccccccccccccccccccccaaaggcucuuuucagagccaccagaauu

SEQ ID NO: 6482 - RNA, 1994 nt, Artificial Sequence
  mRNA product Design b-1 comprising derived and/or modified sequence from HRSV(A2)__F-del_DSCav1_mut6 (opt1)
gggagacggagacggccugcaggaccugcucucucagcccucagccgaggccuacgccgagccgagugcgcagccgacgaccgggaggagccgcagccuucaacucugagguacugugauccgcgcugcccgccgggccgccccaguccgcugcugcggcaccuccuucccucgcgcccucuucgcucgccagcgccuucccugugagccugcgucaccgcggccgccaagcuuaccauggagcugcucauccugaaggccaacgccaucaccaccauccugacggcggugaccuucugcuucgccagcggccagaacaucaccgaggaguucuaccaguccacgugcagcgccgucuccaagggguaccucggcgcccugcggaccggcugguacaccuccgugaucaccaucgagcugagcaacaucaaggagaacaagugcaacgggaccgacgccaaggugaagcucaucaagcaggagcuggacaaguacaagaacgcggucacggaccugcagaugcugaugugcuccaccccggcaaccggcuccggcuccgccaucgcgagcggcgucgccgugugcaaggugcugcaccucgagggggaggucaacaagaucaagagcgcccugcuguccaccaacaaggccguggugagccucuccaacggcgucagcgugcugaccuucaaggugcuggaccucaagaacuacaucgacaagcagcugcugcccauccugaacaagcagagcugcuccauccccaaccccgagacggugauggaguuccagcagaagaacaaccggcuccuggagaucacccgcgaguucagcgugaacgccggggucaccacccccguguccacguacaugcugaccaacagcgagcuccugucccugaucaacgacaugccgaucaccaacgaccagaagaagcucaugagcaacaacgugcagaucguccggcagcaguccuacagcaucaugugcaucaucaaggaggaggugcuggcguacgugguccagcugccccucuacggcgugaucgacacccccugcuggaagcugcacacgagcccccugugcaccaccaacaccaaggagggguccaacaucugccucacgcgcaccgaccggggcugguacugcgacaacgccggcagcgucuccuucuucccgcaggccgagaccugcaaggugugcagcaaccgcguguucugcgacaccaugaacucccugacgcugcccagcgagguaaaccucugcaacgucgacaucuucaaccccaaguacgacugcaagaucaugaccuccaagaccgacgugagcuccagcgugaucaccucccugggggccaucgucagcugcuacggcaagacgaagugcaccgccagcaacaagaacaaggggaucaucaagaccuucuccaacggcugcgacuacgugagcaacaagggcguggacaccguguccgucgggaacacccuguacuacgugaacaagcaggagggccagagccucuacgugaagggggagcccaucaucaacuucuacgacccgcuggucuuccccuccgacgaguucgacgcgagcaucucccaggugaacgagaagaucaaccagagccuggccuucauccgcaaguccgacgagcugcuccacaacgugaacgccggcaagagcacgaccaacaucaugaucaccaccaucaucaucgucaucaucgugauccugcugucccucaucgccguggggcugcugcucuacugcaaggcccggugaggacuaguguccaccugucccuccugggcugcuggauugucucguuuuccugccaaauaaacaggaucagcgcuuuacagaucuaaaaaaaaaaaaaaaaaaaaaaaaaaaaaaaaaaaaaaaaaaaaaaaaaaaaaaaaaaaaaaaaugcaucccccccccccccccccccccccccccccccaaaggcucuuuucagagccaccagaauu

SEQ ID NO: 6483 - RNA, 1994 nt, Artificial Sequence
  mRNA product Design b-1 comprising derived and/or modified sequence from HRSV(A2)__F-del_DSCav1_mut6 (opt1)
gggagacggagacggccugcaggaccugcucucucagcccucagccgaggccuacgccgagccgagugcgcagccgacgaccgggaggagccgcagccuucaacucugagguacugugauccgcgcugcccgccgggccgccccaguccgcugcugcggcaccuccuucccucgcgcccucuucgcucgccagcgccuucccugugagccugcgucaccgcggccgccaagcuuaccauggagcugcucauccugaaggccaacgccaucaccaccauccugacggcggugaccuucugcuucgccagcggccagaacaucaccgaggaguucuaccaguccacgugcagcgccgucuccaagggguaccucggcgcccugcgcaccgggugguacaccagcgugaucaccaucgagcuguccaacaucaaggagaacaagugcaacggcaccgacgccaaggugaagcucaucaagcaggagcuggacaaguacaagaacgcggucacggaccugcagaugcucaugugcagcacccccgccaccggguccggcagcgccaucgccuccggcguggcggugugcaagguccugcaccuggagggggaggugaacaagaucaagagcgcccuccuguccaccaacaaggccguggucagccuguccaacggcgugagcgugcucacguucaagguccuggaccugaagaacuacaucgacaagcagcuccugccgauccugaacaagcaguccugcagcauccccaaccccgagaccgugauggaguuccagcagaagaacaaccggcuccuggagaucacccgcgaguucuccgugaacgccggggucaccacgcccgugagcaccuacaugcugaccaacuccgagcuccugagccugaucaacgacaugccgaucaccaacgaccagaagaagcucaugagcaacaacgugcagaucguccggcagcaguccuacagcaucaugugcaucaucaaggaggaggugcuggccuacgugguccagcugccccucuacggcgugaucgacacgcccugcuggaagcugcacaccagcccccugugcaccaccaacacgaaggaggggagcaacaucugccucacccgcaccgaccggggcugguacugcgacaacgcgggcuccgugagcuucuucccgcaggccgagaccugcaaggucugcuccaaccgcguguucugcgacacgaugaacagccugacccugcccuccgaggucaaccucugcaacguggacaucuucaaccccaaguacgacugcaagaucaugaccagcaagaccgacguguccagcuccgucaucacgagccugggggccaucguguccugcuacggcaagaccaagugcaccgccagcaacaagaacaaggggaucaucaagaccuucuccaacggcugcgacuacgugagcaacaagggcgucgacacgguguccguggggaacacccuguacuacgucaacaagcaggagggccagagccucuacgugaagggggagcccaucaucaacuucuacgacccgcugguguuccccagcgacgaguucgacgccuccaucagccaggucaacgagaagaucaaccagucccuggcguucauccggaaguccgacgagcuccugcacaacgugaacgccggcaaguccaccaccaacaucaugaucaccacgaucaucaucgugaucaucgucauccugcucagccugaucgccguggggcugcuccuguacugcaaggcccgcugaggacuaguguccaccugucccuccugggcugcuggauugucucguuuuccugccaaauaaacaggaucagcgcuuuacagaucuaaaaaaaaaaaaaaaaaaaaaaaaaaaaaaaaaaaaaaaaaaaaaaaaaaaaaaaaaaaaaaaaugcaucccccccccccccccccccccccccccccccaaaggcucuuuucagagccaccagaauu

SEQ ID NO: 6484 - RNA, 1994 nt, Artificial Sequence
  mRNA product Design b-1 comprising derived and/or modified sequence from HRSV(A2)__F-del_DSCav1_mut6 (opt2)
gggagacggagacggccugcaggaccugcucucucagcccucagccgaggccuacgccgagccgagugcgcagccgacgaccgggaggagccgcagccuucaacucugagguacugugauccgcgcugcccgccgggccgccccaguccgcugcugcggcaccuccuucccucgcgcccucuucgcucgccagcgccuucccugugagccugcgucaccgcggccgccaagcuuaccauggagcuccucauccucaaggccaacgccaucaccaccauccucaccgccgucaccuucugcuucgccuccggccagaacaucaccgaggaguucuaccaguccaccugcuccgccgucuccaagggcuaccucggcgcccuccgcaccggcugguacaccuccgucaucaccaucgagcucuccaacaucaaggagaacaagugcaacggcaccgacgccaaggucaagcucaucaagcaggagcucgacaaguacaagaacgccgucaccgaccuccagaugcucaugugcuccacccccgccaccggcuccggcuccgccaucgccuccggcgucgccgucugcaagguccuccaccucgagggcgaggucaacaagaucaaguccgcccuccucuccaccaacaaggccgucgucucccucuccaacggcgucuccguccucaccuucaagguccucgaccucaagaacuacaucgacaagcagcuccuccccauccucaacaagcaguccugcuccauccccaaccccgagaccgucauggaguuccagcagaagaacaaccgccuccucgagaucacccgcgaguucuccgucaacgccggcgucaccacccccgucuccaccuacaugcucaccaacuccgagcuccucucccucaucaacgacaugcccaucaccaacgaccagaagaagcucauguccaacaacguccagaucguccgccagcaguccuacuccaucaugugcaucaucaaggaggagguccucgccuacgucguccagcucccccucuacggcgucaucgacacccccugcuggaagcuccacaccuccccccucugcaccaccaacaccaaggagggcuccaacaucugccucacccgcaccgaccgcggcugguacugcgacaacgccggcuccgucuccuucuucccccaggccgagaccugcaaggucugcuccaaccgcgucuucugcgacaccaugaacucccucacccuccccuccgaggucaaccucugcaacgucgacaucuucaaccccaaguacgacugcaagaucaugaccuccaagaccgacgucuccuccuccgucaucaccucccucggcgccaucgucuccugcuacggcaagaccaagugcaccgccuccaacaagaacaagggcaucaucaagaccuucuccaacggcugcgacuacgucuccaacaagggcgucgacaccgucuccgucggcaacacccucuacuacgucaacaagcaggagggccagucccucuacgucaagggcgagcccaucaucaacuucuacgacccccucgucuuccccuccgacgaguucgacgccuccaucucccaggucaacgagaagaucaaccagucccucgccuucauccgcaaguccgacgagcuccuccacaacgucaacgccggcaaguccaccaccaacaucaugaucaccaccaucaucaucgucaucaucgucauccuccucucccucaucgccgucggccuccuccucuacugcaaggcccgcugaggacuaguguccaccugucccuccugggcugcuggauugucucguuuuccugccaaauaaacaggaucagcgcuuuacagaucuaaaaaaaaaaaaaaaaaaaaaaaaaaaaaaaaaaaaaaaaaaaaaaaaaaaaaaaaaaaaaaaaugcaucccccccccccccccccccccccccccccccaaaggcucuuuucagagccaccagaauu

SEQ ID NO: 6485 - RNA, 1994 nt, Artificial Sequence
  mRNA product Design b-1 comprising derived and/or modified sequence from HRSV(A2)__F-del_DSCav1_mut6 (opt3)
gggagacggagacggccugcaggaccugcucucucagcccucagccgaggccuacgccgagccgagugcgcagccgacgaccgggaggagccgcagccuucaacucugagguacugugauccgcgcugcccgccgggccgccccaguccgcugcugcggcaccuccuucccucgcgcccucuucgcucgccagcgccuucccugugagccugcgucaccgcggccgccaagcuuaccauggagcugcucauccuuaaggccaacgcuauuaccacaauacugacugcagugacguucugcuuugccagcggccagaauaucaccgaagaguucuaccaauccacauguucugcggucucaaaaggguauuugggagcuuuaagaacugguugguacaccaguguuauuacaaucgaacugagcaacauuaaggagaauaaaugcaacggcaccgacgccaaggugaaacuaaucaagcaggaacucgauaaguauaaaaaugcaguaacugaccugcagaugcuuauguguuccacacccgccaccgggucuggaucggcuauagcaucaggcguggccgucugcaaggugcugcacuuggagggugagguuaacaaaaucaagagcgcucuccugaguacgaauaaagccguggucucccugucuaacggggugagcguacucacuuuuaagguuuuagaucugaagaauuacauugacaaacagcuuuugccuauccugaacaagcaauccuguucaauuccaaauccggaaaccgugauggaguuccagcagaaaaacaauaggcuacucgaaaucacacgggaguuuagugucaacgcgggagugacuacccccgugagcacauauaugcugaccaauucugagcuucuguccuugauaaacgauaugccuauuacgaacgaccagaagaaacucaugucaaauaacguccaaaucguucgccagcagagcuacaguauuaugugcaucaucaaggaagaggugcuggcauauguagugcaguuaccacuguacggcgucauugauacucccuguuggaaacuccauacaucuccucuuugcaccacuaauacaaaggaaggcuccaacauaugucugacccgaacggaccgugggugguacugcgauaaugccggaagcgugucguucuuuccacaagcugagaccuguaagguuugcucuaacagaguguucugcgacacaaugaacuccuugacucuacccucagaagucaaucuguguaauguggauaucuuuaacccuaaauaugacugcaagauuaugaccaguaaaacagauguaagcuccucuguuaucacuagccucggugccauagugucauguuacggcaagaccaaaugcacagcaaguaauaagaacaaggggauuaucaaaaccuucuccaauggaugugacuaugucagcaacaagggcguggacacugucucuguggguaauacgcuguacuauguuaacaaacaggaggggcagucacuuuacgugaagggagagccaaucauuaacuuuuaugauccgcugguauuccccagugacgaauuugaugcuagcaucucccaagucaaugagaaaauuaaccagucuuuggccuucauaaggaagucggacgaacuccugcacaaugugaacgcgggcaagagcacaaccaauaucaugauuacuaccaucaucauuguuauaaucgugauuuuacugucccuaaucgccgucggccuccugcuuuacugcaaagcacggugaggacuaguguccaccugucccuccugggcugcuggauugucucguuuuccugccaaauaaacaggaucagcgcuuuacagaucuaaaaaaaaaaaaaaaaaaaaaaaaaaaaaaaaaaaaaaaaaaaaaaaaaaaaaaaaaaaaaaaaugcaucccccccccccccccccccccccccccccccaaaggcucuuuucagagccaccagaauu

SEQ ID NO: 6486 - RNA, 1994 nt, Artificial Sequence
  mRNA product Design b-1 comprising derived and/or modified sequence from HRSV(A2)__F-del_DSCav1_mut6 (opt4)
gggagacggagacggccugcaggaccugcucucucagcccucagccgaggccuacgccgagccgagugcgcagccgacgaccgggaggagccgcagccuucaacucugagguacugugauccgcgcugcccgccgggccgccccaguccgcugcugcggcaccuccuucccucgcgcccucuucgcucgccagcgccuucccugugagccugcgucaccgcggccgccaagcuuaccauggagcugcugauccugaaggccaacgccaucaccaccauccugaccgccgugaccuucugcuucgccagcggccagaacaucaccgaggaguucuaccagagcaccugcagcgccgugagcaagggcuaccugggcgcccugagaaccggcugguacaccagcgugaucaccaucgagcugagcaacaucaaggagaacaagugcaacggcaccgacgccaaggugaagcugaucaagcaggagcuggacaaguacaagaacgccgugaccgaccugcagaugcugaugugcagcacccccgccaccggcagcggcagcgccaucgccagcggcguggccgugugcaaggugcugcaccuggagggcgaggugaacaagaucaagagcgcccugcugagcaccaacaaggccguggugagccugagcaacggcgugagcgugcugaccuucaaggugcuggaccugaagaacuacaucgacaagcagcugcugcccauccugaacaagcagagcugcagcauccccaaccccgagaccgugauggaguuccagcagaagaacaacagacugcuggagaucaccagagaguucagcgugaacgccggcgugaccacccccgugagcaccuacaugcugaccaacagcgagcugcugagccugaucaacgacaugcccaucaccaacgaccagaagaagcugaugagcaacaacgugcagaucgugagacagcagagcuacagcaucaugugcaucaucaaggaggaggugcuggccuacguggugcagcugccccuguacggcgugaucgacacccccugcuggaagcugcacaccagcccccugugcaccaccaacaccaaggagggcagcaacaucugccugaccagaaccgacagaggcugguacugcgacaacgccggcagcgugagcuucuucccccaggccgagaccugcaaggugugcagcaacagaguguucugcgacaccaugaacagccugacccugcccagcgaggugaaccugugcaacguggacaucuucaaccccaaguacgacugcaagaucaugaccagcaagaccgacgugagcagcagcgugaucaccagccugggcgccaucgugagcugcuacggcaagaccaagugcaccgccagcaacaagaacaagggcaucaucaagaccuucagcaacggcugcgacuacgugagcaacaagggcguggacaccgugagcgugggcaacacccuguacuacgugaacaagcaggagggccagagccuguacgugaagggcgagcccaucaucaacuucuacgacccccugguguuccccagcgacgaguucgacgccagcaucagccaggugaacgagaagaucaaccagagccuggccuucaucagaaagagcgacgagcugcugcacaacgugaacgccggcaagagcaccaccaacaucaugaucaccaccaucaucaucgugaucaucgugauccugcugagccugaucgccgugggccugcugcuguacugcaaggccagaugaggacuaguguccaccugucccuccugggcugcuggauugucucguuuuccugccaaauaaacaggaucagcgcuuuacagaucuaaaaaaaaaaaaaaaaaaaaaaaaaaaaaaaaaaaaaaaaaaaaaaaaaaaaaaaaaaaaaaaaugcaucccccccccccccccccccccccccccccccaaaggcucuuuucagagccaccagaauu

SEQ ID NO: 6487 - RNA, 1994 nt, Artificial Sequence
  mRNA product Design b-1 comprising derived and/or modified sequence from HRSV(A2)__F-del_DSCav1_mut6 (opt5)
gggagacggagacggccugcaggaccugcucucucagcccucagccgaggccuacgccgagccgagugcgcagccgacgaccgggaggagccgcagccuucaacucugagguacugugauccgcgcugcccgccgggccgccccaguccgcugcugcggcaccuccuucccucgcgcccucuucgcucgccagcgccuucccugugagccugcgucaccgcggccgccaagcuuaccauggagcugcucauccugaaggccaacgcuauuaccacaauccuuacggccgugaccuucugcuuugcgagcggccagaauauuacagaagaguucuaccaauccaccuguucugcugucagcaaaggguaucugggagcccucagaacaggcugguacaccuccguuaucacaauugaacugucuaacaucaaggagaauaaaugcaacgggaccgacgccaaggugaaacuuaucaagcaggaacuggauaaguauaaaaaugcugugacggaccuccagaugcugauguguagcacccccgccacaggauccggcucugcuauugccagcggggucgcggugugcaagguucugcaccucgagggagaggugaacaaaaucaaguccgcccugcuuagcaccaauaaagcugucgugucucuguccaacggcguuagcgugcucacauuuaagguccuggaucuuaagaauuacauugacaaacagcugcucccuauccugaacaagcaaucuuguuccauuccgaaucccgaaaccgugauggaguuccagcagaaaaacaaucggcugcucgaaaucacgcgcgaguuuagcgugaacgccggcgucacaaccccuguuucuacauauaugcugaccaauuccgagcuucugagccucauuaacgauaugcccaucaccaacgaccagaagaaacugauguccaauaacgugcaaaucgugagacagcagucuuacagcauuaugugcaucauuaaggaagagguccuugcuuaugugguucagcugccucucuacggggugaucgauacacccuguuggaaacugcauacguccccucugugcaccacaaauaccaaggaaggaagcaacauuugucucacacggaccgaccgcggcugguacugcgauaaugccgggucugucuccuucuuuccgcaagcggagacguguaaggugugcagcaacagaguuuucugcgacacaaugaacucucugacccuucccagcgaagugaaucuguguaaugucgauaucuuuaacccuaaauaugacugcaagaucaugaccuccaaaacagaugugucuagcuccgucauuaccagccucggagccaucgugucuuguuacggcaagacaaaaugcacggcuuccaauaagaacaaggggauuaucaaaaccuucagcaauggaugugacuauguuucuaacaagggcguggacacagucuccgugggcaauacccuguacuauguuaacaaacaggaggggcagagccuuuacgugaagggagagcccauuaucaacuuuuaugauccucuggucuuccccuccgacgaauuugaugccucuaucagccaagugaaugagaaaauuaaccagucccucgcuuucauccggaagucugacgaacugcugcacaaugugaacgccggcaagagcacaaccaauauuaugaucacgaccauuaucauuguuaucaucgucauucuccugucccuuaucgccguggggcugcuccuguacugcaaagcucgcugaggacuaguguccaccugucccuccugggcugcuggauugucucguuuuccugccaaauaaacaggaucagcgcuuuacagaucuaaaaaaaaaaaaaaaaaaaaaaaaaaaaaaaaaaaaaaaaaaaaaaaaaaaaaaaaaaaaaaaaugcaucccccccccccccccccccccccccccccccaaaggcucuuuucagagccaccagaauu

SEQ ID NO: 6488 - RNA, 1994 nt, Artificial Sequence
  mRNA product Design b-1 comprising derived and/or modified sequence from HRSV(A2)__F-del_DSCav1_mut6 (opt6)
gggagacggagacggccugcaggaccugcucucucagcccucagccgaggccuacgccgagccgagugcgcagccgacgaccgggaggagccgcagccuucaacucugagguacugugauccgcgcugcccgccgggccgccccaguccgcugcugcggcaccuccuucccucgcgcccucuucgcucgccagcgccuucccugugagccugcgucaccgcggccgccaagcuuaccauggaacuacucauauuaaaagcaaacgcaauaacaacgauauuaacagcuguaacauucugcuuugcaucaggccaaaauaucaccgaagaauuuuaucaaagcacaugcucugcaguauccaaaggauacuuaggagcauuaagaacaggcugguacacauccguaauaacaauagaacuaucaaacaucaaagaaaacaaaugcaacggcacagacgccaaaguaaaacucauaaaacaagaacuagacaaauauaaaaacgcaguaacagaucuacaaaugcucaugugcuccacaccagcaaccggaucugguucagccauagcauccggcguagccgucugcaaaguauuacaccucgaaggagaaguaaacaaaauaaaaucugcccuauuaucuacaaauaaagccguaguaagucuaaguaacggaguaucaguacuaacauuuaaaguccuagaccugaaaaacuauaucgacaaacaacuauuaccaauacuaaacaaacaauccuguuccaucccuaacccagaaacaguuauggaauuucaacaaaaaaauaaccgccuuuuagaaauaacuagagaauuuucaguaaacgcaggaguuacaacaccaguaucaacauacaugcuaacaaauucagaauuauuaucccuuauaaaugacaugccuaucacaaacgaucaaaaaaaauuaauguccaacaacguacaaauaguaagacaacaaucauauuccaucaugugcaucauaaaagaagaaguccucgcauacguagugcaacuaccacuauacggagucauagauacacccuguuggaaacuucacacaucuccacuaugcacaacaaacacgaaagaaggauccaacauaugccuaacacgaacagacagaggaugguauugcgacaacgcuggaagugugagcuucuucccucaagcagaaacuugcaaaguaugcagcaaucguguauucugcgacacaaugaacucauuaacacucccaagcgaaguaaaccucugcaauguagacaucuuuaauccaaaauacgauuguaaaauaaugacuucaaaaacagacgucucaucaucuguaauaacaucuuuaggagcaauaguuucuugcuacgguaaaacaaaaugcaccgcauccaacaaaaacaaaggaauaauaaaaacauucucuaacggcugcgauuacguaucuaacaaaggaguugacacagucucaguaggaaacacacuauacuacguaaacaaacaagaaggacaaagccuauacguaaaaggagaaccaauaauaaacuucuaugacccauuaguauuuccaagcgaugaauuugacgcuucaauaucacaagucaaugaaaaaauaaaucagagcuuagcauucauaagaaaaucugaugaacuacuacacaauguaaaugcaggaaaauccacuaccaacauaaugauuaccacaauuauaauaguuaucauaguaauacuauuaucacuaauagccguuggauuacuacuauacugcaaagcaagauaaggacuaguguccaccugucccuccugggcugcuggauugucucguuuuccugccaaauaaacaggaucagcgcuuuacagaucuaaaaaaaaaaaaaaaaaaaaaaaaaaaaaaaaaaaaaaaaaaaaaaaaaaaaaaaaaaaaaaaaugcaucccccccccccccccccccccccccccccccaaaggcucuuuucagagccaccagaauu

SEQ ID NO: 6489 - RNA, 1994 nt, Artificial Sequence
  mRNA product Design b-1 comprising derived and/or modified sequence from HRSV(A2)__F-del_DSCav1_mut6 (opt11)
gggagacggagacggccugcaggaccugcucucucagcccucagccgaggccuacgccgagccgagugcgcagccgacgaccgggaggagccgcagccuucaacucugagguacugugauccgcgcugcccgccgggccgccccaguccgcugcugcggcaccuccuucccucgcgcccucuucgcucgccagcgccuucccugugagccugcgucaccgcggccgccaagcuuaccauggaacuacucauccuaaaagcaaacgccaucaccaccauacuaaccgccgucaccuucugcuucgccucgggacaaaacaucaccgaagaguucuaccagucaacgugcuccgccgucucaaaaggcuaccuaggcgcccuccgcaccgggugguauaccuccgucauaacuaucgaacucucuaacaucaaagaaaacaaauguaacggcaccgacgccaaagucaaacuaaucaaacaagaacuggacaaauacaaaaacgccgucaccgaccuacaaaugcucaugugcuccacuccagccaccggcuccgguagcgcaaucgccucaggcguagcuguaugcaaaguccuccaccuagaaggcgaaguaaacaaaauaaaauccgcccuccucucaaccaacaaggccgucgucucacucucaaacggcgucuccguacucaccuuuaaaguccuagaccuuaaaaacuacaucgacaaacaacugcuaccaauccucaacaaacaaucaugcagcaucccaaacccggaaacagucauggaguuccaacagaaaaacaaccgacuccucgaaaucacccgcgaguucuccgucaacgccggagucaccacaccuguaagcacauacaugcuuacuaauuccgaacuccuuucacuaauaaacgacaugccaauaaccaacgaccaaaagaaacucauguccaacaacguacaaaucguacgccaacaauccuacuccaucaugugcaucaucaaagaagaaguccuggccuaugucguacaacucccccuuuacggugucaucgacacacccugcuggaaacuacacaccagcccccucugcacaacaaacaccaaagaaggcuccaacaucugccucacccguaccgaccgaggcugguacugcgacaacgccggcuccgucuccuucuucccccaagccgaaaccugcaaagucugcagcaaccgcgucuucugcgauaccaugaacucccucacacucccaucugaagucaaccucugcaacgucgauauuuucaauccaaaauacgacugcaaaaucaugacuagcaaaaccgacguuagcuccuccgucaucaccucccucggcgccauaguuucaugcuacggcaaaaccaaaugcaccgccuccaacaaaaacaaaggcaucauaaaaaccuucuccaacgggugcgacuacguaucuaauaaaggagucgacaccgucucaguaggaaacacccucuacuaugucaacaaacaagaaggccaaucacuauacguuaaaggcgaaccaaucaucaacuucuacgacccacucgucuuccccagcgacgaguuugacgccucaaucucgcaagucaaugaaaagauuaaccaaucccuagccuucauccgaaaaagugacgaacuccuccacaacguuaacgccggcaaaucuacaaccaacaucaugaucaccacuauaaucaucgucaucauagucauacuucucagccucaucgcagucggacuccuccuuuauugcaaggcacgauaaggacuaguguccaccugucccuccugggcugcuggauugucucguuuuccugccaaauaaacaggaucagcgcuuuacagaucuaaaaaaaaaaaaaaaaaaaaaaaaaaaaaaaaaaaaaaaaaaaaaaaaaaaaaaaaaaaaaaaaugcaucccccccccccccccccccccccccccccccaaaggcucuuuucagagccaccagaauu

SEQ ID NO: 6490 - RNA, 1814 nt, Artificial Sequence
  mRNA product Design b-2 comprising derived and/or modified sequence from HRSV(A2)__F-del_DSCav1_mut6 (opt1)
gggagagccucugcuggaguccggggaguggcguuggcugcuagagcgaagcuuaccauggagcugcucauccugaaggccaacgccaucaccaccauccugacggcggugaccuucugcuucgccagcggccagaacaucaccgaggaguucuaccaguccacgugcagcgccgucuccaagggguaccucggcgcccugcggaccggcugguacaccuccgugaucaccaucgagcugagcaacaucaaggagaacaagugcaacgggaccgacgccaaggugaagcucaucaagcaggagcuggacaaguacaagaacgcggucacggaccugcagaugcugaugugcuccaccccggcaaccggcuccggcuccgccaucgcgagcggcgucgccgugugcaaggugcugcaccucgagggggaggucaacaagaucaagagcgcccugcuguccaccaacaaggccguggugagccucuccaacggcgucagcgugcugaccuucaaggugcuggaccucaagaacuacaucgacaagcagcugcugcccauccugaacaagcagagcugcuccauccccaaccccgagacggugauggaguuccagcagaagaacaaccggcuccuggagaucacccgcgaguucagcgugaacgccggggucaccacccccguguccacguacaugcugaccaacagcgagcuccugucccugaucaacgacaugccgaucaccaacgaccagaagaagcucaugagcaacaacgugcagaucguccggcagcaguccuacagcaucaugugcaucaucaaggaggaggugcuggcguacgugguccagcugccccucuacggcgugaucgacacccccugcuggaagcugcacacgagcccccugugcaccaccaacaccaaggagggguccaacaucugccucacgcgcaccgaccggggcugguacugcgacaacgccggcagcgucuccuucuucccgcaggccgagaccugcaaggugugcagcaaccgcguguucugcgacaccaugaacucccugacgcugcccagcgagguaaaccucugcaacgucgacaucuucaaccccaaguacgacugcaagaucaugaccuccaagaccgacgugagcuccagcgugaucaccucccugggggccaucgucagcugcuacggcaagacgaagugcaccgccagcaacaagaacaaggggaucaucaagaccuucuccaacggcugcgacuacgugagcaacaagggcguggacaccguguccgucgggaacacccuguacuacgugaacaagcaggagggccagagccucuacgugaagggggagcccaucaucaacuucuacgacccgcuggucuuccccuccgacgaguucgacgcgagcaucucccaggugaacgagaagaucaaccagagccuggccuucauccgcaaguccgacgagcugcuccacaacgugaacgccggcaagagcacgaccaacaucaugaucaccaccaucaucaucgucaucaucgugauccugcugucccucaucgccguggggcugcugcucuacugcaaggcccggugaggacuaguguccaccugucccuccugggcugcuggauugucucguuuuccugccaaauaaacaggaucagcgcuuuacagaucuaaaaaaaaaaaaaaaaaaaaaaaaaaaaaaaaaaaaaaaaaaaaaaaaaaaaaaaaaaaaaaaaugcaucccccccccccccccccccccccccccccccaaaggcucuuuucagagccaccagaauu

SEQ ID NO: 6491 - RNA, 1814 nt, Artificial Sequence
  mRNA product Design b-2 comprising derived and/or modified sequence from HRSV(A2)__F-del_DSCav1_mut6 (opt1)
gggagagccucugcuggaguccggggaguggcguuggcugcuagagcgaagcuuaccauggagcugcucauccugaaggccaacgccaucaccaccauccugacggcggugaccuucugcuucgccagcggccagaacaucaccgaggaguucuaccaguccacgugcagcgccgucuccaagggguaccucggcgcccugcgcaccgggugguacaccagcgugaucaccaucgagcuguccaacaucaaggagaacaagugcaacggcaccgacgccaaggugaagcucaucaagcaggagcuggacaaguacaagaacgcggucacggaccugcagaugcucaugugcagcacccccgccaccggguccggcagcgccaucgccuccggcguggcggugugcaagguccugcaccuggagggggaggugaacaagaucaagagcgcccuccuguccaccaacaaggccguggucagccuguccaacggcgugagcgugcucacguucaagguccuggaccugaagaacuacaucgacaagcagcuccugccgauccugaacaagcaguccugcagcauccccaaccccgagaccgugauggaguuccagcagaagaacaaccggcuccuggagaucacccgcgaguucuccgugaacgccggggucaccacgcccgugagcaccuacaugcugaccaacuccgagcuccugagccugaucaacgacaugccgaucaccaacgaccagaagaagcucaugagcaacaacgugcagaucguccggcagcaguccuacagcaucaugugcaucaucaaggaggaggugcuggccuacgugguccagcugccccucuacggcgugaucgacacgcccugcuggaagcugcacaccagcccccugugcaccaccaacacgaaggaggggagcaacaucugccucacccgcaccgaccggggcugguacugcgacaacgcgggcuccgugagcuucuucccgcaggccgagaccugcaaggucugcuccaaccgcguguucugcgacacgaugaacagccugacccugcccuccgaggucaaccucugcaacguggacaucuucaaccccaaguacgacugcaagaucaugaccagcaagaccgacguguccagcuccgucaucacgagccugggggccaucguguccugcuacggcaagaccaagugcaccgccagcaacaagaacaaggggaucaucaagaccuucuccaacggcugcgacuacgugagcaacaagggcgucgacacgguguccguggggaacacccuguacuacgucaacaagcaggagggccagagccucuacgugaagggggagcccaucaucaacuucuacgacccgcugguguuccccagcgacgaguucgacgccuccaucagccaggucaacgagaagaucaaccagucccuggcguucauccggaaguccgacgagcuccugcacaacgugaacgccggcaaguccaccaccaacaucaugaucaccacgaucaucaucgugaucaucgucauccugcucagccugaucgccguggggcugcuccuguacugcaaggcccgcugaggacuaguguccaccugucccuccugggcugcuggauugucucguuuuccugccaaauaaacaggaucagcgcuuuacagaucuaaaaaaaaaaaaaaaaaaaaaaaaaaaaaaaaaaaaaaaaaaaaaaaaaaaaaaaaaaaaaaaaugcaucccccccccccccccccccccccccccccccaaaggcucuuuucagagccaccagaauu

SEQ ID NO: 6492 - RNA, 1814 nt, Artificial Sequence
  mRNA product Design b-2 comprising derived and/or modified sequence from HRSV(A2)__F-del_DSCav1_mut6 (opt2)
gggagagccucugcuggaguccggggaguggcguuggcugcuagagcgaagcuuaccauggagcuccucauccucaaggccaacgccaucaccaccauccucaccgccgucaccuucugcuucgccuccggccagaacaucaccgaggaguucuaccaguccaccugcuccgccgucuccaagggcuaccucggcgcccuccgcaccggcugguacaccuccgucaucaccaucgagcucuccaacaucaaggagaacaagugcaacggcaccgacgccaaggucaagcucaucaagcaggagcucgacaaguacaagaacgccgucaccgaccuccagaugcucaugugcuccacccccgccaccggcuccggcuccgccaucgccuccggcgucgccgucugcaagguccuccaccucgagggcgaggucaacaagaucaaguccgcccuccucuccaccaacaaggccgucgucucccucuccaacggcgucuccguccucaccuucaagguccucgaccucaagaacuacaucgacaagcagcuccuccccauccucaacaagcaguccugcuccauccccaaccccgagaccgucauggaguuccagcagaagaacaaccgccuccucgagaucacccgcgaguucuccgucaacgccggcgucaccacccccgucuccaccuacaugcucaccaacuccgagcuccucucccucaucaacgacaugcccaucaccaacgaccagaagaagcucauguccaacaacguccagaucguccgccagcaguccuacuccaucaugugcaucaucaaggaggagguccucgccuacgucguccagcucccccucuacggcgucaucgacacccccugcuggaagcuccacaccuccccccucugcaccaccaacaccaaggagggcuccaacaucugccucacccgcaccgaccgcggcugguacugcgacaacgccggcuccgucuccuucuucccccaggccgagaccugcaaggucugcuccaaccgcgucuucugcgacaccaugaacucccucacccuccccuccgaggucaaccucugcaacgucgacaucuucaaccccaaguacgacugcaagaucaugaccuccaagaccgacgucuccuccuccgucaucaccucccucggcgccaucgucuccugcuacggcaagaccaagugcaccgccuccaacaagaacaagggcaucaucaagaccuucuccaacggcugcgacuacgucuccaacaagggcgucgacaccgucuccgucggcaacacccucuacuacgucaacaagcaggagggccagucccucuacgucaagggcgagcccaucaucaacuucuacgacccccucgucuuccccuccgacgaguucgacgccuccaucucccaggucaacgagaagaucaaccagucccucgccuucauccgcaaguccgacgagcuccuccacaacgucaacgccggcaaguccaccaccaacaucaugaucaccaccaucaucaucgucaucaucgucauccuccucucccucaucgccgucggccuccuccucuacugcaaggcccgcugaggacuaguguccaccugucccuccugggcugcuggauugucucguuuuccugccaaauaaacaggaucagcgcuuuacagaucuaaaaaaaaaaaaaaaaaaaaaaaaaaaaaaaaaaaaaaaaaaaaaaaaaaaaaaaaaaaaaaaaugcaucccccccccccccccccccccccccccccccaaaggcucuuuucagagccaccagaauu

SEQ ID NO: 6493 - RNA, 1814 nt, Artificial Sequence
  mRNA product Design b-2 comprising derived and/or modified sequence from HRSV(A2)__F-del_DSCav1_mut6 (opt3)
gggagagccucugcuggaguccggggaguggcguuggcugcuagagcgaagcuuaccauggagcugcucauccuuaaggccaacgcuauuaccacaauacugacugcagugacguucugcuuugccagcggccagaauaucaccgaagaguucuaccaauccacauguucugcggucucaaaaggguauuugggagcuuuaagaacugguugguacaccaguguuauuacaaucgaacugagcaacauuaaggagaauaaaugcaacggcaccgacgccaaggugaaacuaaucaagcaggaacucgauaaguauaaaaaugcaguaacugaccugcagaugcuuauguguuccacacccgccaccgggucuggaucggcuauagcaucaggcguggccgucugcaaggugcugcacuuggagggugagguuaacaaaaucaagagcgcucuccugaguacgaauaaagccguggucucccugucuaacggggugagcguacucacuuuuaagguuuuagaucugaagaauuacauugacaaacagcuuuugccuauccugaacaagcaauccuguucaauuccaaauccggaaaccgugauggaguuccagcagaaaaacaauaggcuacucgaaaucacacgggaguuuagugucaacgcgggagugacuacccccgugagcacauauaugcugaccaauucugagcuucuguccuugauaaacgauaugccuauuacgaacgaccagaagaaacucaugucaaauaacguccaaaucguucgccagcagagcuacaguauuaugugcaucaucaaggaagaggugcuggcauauguagugcaguuaccacuguacggcgucauugauacucccuguuggaaacuccauacaucuccucuuugcaccacuaauacaaaggaaggcuccaacauaugucugacccgaacggaccgugggugguacugcgauaaugccggaagcgugucguucuuuccacaagcugagaccuguaagguuugcucuaacagaguguucugcgacacaaugaacuccuugacucuacccucagaagucaaucuguguaauguggauaucuuuaacccuaaauaugacugcaagauuaugaccaguaaaacagauguaagcuccucuguuaucacuagccucggugccauagugucauguuacggcaagaccaaaugcacagcaaguaauaagaacaaggggauuaucaaaaccuucuccaauggaugugacuaugucagcaacaagggcguggacacugucucuguggguaauacgcuguacuauguuaacaaacaggaggggcagucacuuuacgugaagggagagccaaucauuaacuuuuaugauccgcugguauuccccagugacgaauuugaugcuagcaucucccaagucaaugagaaaauuaaccagucuuuggccuucauaaggaagucggacgaacuccugcacaaugugaacgcgggcaagagcacaaccaauaucaugauuacuaccaucaucauuguuauaaucgugauuuuacugucccuaaucgccgucggccuccugcuuuacugcaaagcacggugaggacuaguguccaccugucccuccugggcugcuggauugucucguuuuccugccaaauaaacaggaucagcgcuuuacagaucuaaaaaaaaaaaaaaaaaaaaaaaaaaaaaaaaaaaaaaaaaaaaaaaaaaaaaaaaaaaaaaaaugcaucccccccccccccccccccccccccccccccaaaggcucuuuucagagccaccagaauu

SEQ ID NO: 6494 - RNA, 1814 nt, Artificial Sequence
  mRNA product Design b-2 comprising derived and/or modified sequence from HRSV(A2)__F-del_DSCav1_mut6 (opt4)
gggagagccucugcuggaguccggggaguggcguuggcugcuagagcgaagcuuaccauggagcugcugauccugaaggccaacgccaucaccaccauccugaccgccgugaccuucugcuucgccagcggccagaacaucaccgaggaguucuaccagagcaccugcagcgccgugagcaagggcuaccugggcgcccugagaaccggcugguacaccagcgugaucaccaucgagcugagcaacaucaaggagaacaagugcaacggcaccgacgccaaggugaagcugaucaagcaggagcuggacaaguacaagaacgccgugaccgaccugcagaugcugaugugcagcacccccgccaccggcagcggcagcgccaucgccagcggcguggccgugugcaaggugcugcaccuggagggcgaggugaacaagaucaagagcgcccugcugagcaccaacaaggccguggugagccugagcaacggcgugagcgugcugaccuucaaggugcuggaccugaagaacuacaucgacaagcagcugcugcccauccugaacaagcagagcugcagcauccccaaccccgagaccgugauggaguuccagcagaagaacaacagacugcuggagaucaccagagaguucagcgugaacgccggcgugaccacccccgugagcaccuacaugcugaccaacagcgagcugcugagccugaucaacgacaugcccaucaccaacgaccagaagaagcugaugagcaacaacgugcagaucgugagacagcagagcuacagcaucaugugcaucaucaaggaggaggugcuggccuacguggugcagcugccccuguacggcgugaucgacacccccugcuggaagcugcacaccagcccccugugcaccaccaacaccaaggagggcagcaacaucugccugaccagaaccgacagaggcugguacugcgacaacgccggcagcgugagcuucuucccccaggccgagaccugcaaggugugcagcaacagaguguucugcgacaccaugaacagccugacccugcccagcgaggugaaccugugcaacguggacaucuucaaccccaaguacgacugcaagaucaugaccagcaagaccgacgugagcagcagcgugaucaccagccugggcgccaucgugagcugcuacggcaagaccaagugcaccgccagcaacaagaacaagggcaucaucaagaccuucagcaacggcugcgacuacgugagcaacaagggcguggacaccgugagcgugggcaacacccuguacuacgugaacaagcaggagggccagagccuguacgugaagggcgagcccaucaucaacuucuacgacccccugguguuccccagcgacgaguucgacgccagcaucagccaggugaacgagaagaucaaccagagccuggccuucaucagaaagagcgacgagcugcugcacaacgugaacgccggcaagagcaccaccaacaucaugaucaccaccaucaucaucgugaucaucgugauccugcugagccugaucgccgugggccugcugcuguacugcaaggccagaugaggacuaguguccaccugucccuccugggcugcuggauugucucguuuuccugccaaauaaacaggaucagcgcuuuacagaucuaaaaaaaaaaaaaaaaaaaaaaaaaaaaaaaaaaaaaaaaaaaaaaaaaaaaaaaaaaaaaaaaugcaucccccccccccccccccccccccccccccccaaaggcucuuuucagagccaccagaauu

SEQ ID NO: 6495 - RNA, 1814 nt, Artificial Sequence
  mRNA product Design b-2 comprising derived and/or modified sequence from HRSV(A2)__F-del_DSCav1_mut6 (opt5)
gggagagccucugcuggaguccggggaguggcguuggcugcuagagcgaagcuuaccauggagcugcucauccugaaggccaacgcuauuaccacaauccuuacggccgugaccuucugcuuugcgagcggccagaauauuacagaagaguucuaccaauccaccuguucugcugucagcaaaggguaucugggagcccucagaacaggcugguacaccuccguuaucacaauugaacugucuaacaucaaggagaauaaaugcaacgggaccgacgccaaggugaaacuuaucaagcaggaacuggauaaguauaaaaaugcugugacggaccuccagaugcugauguguagcacccccgccacaggauccggcucugcuauugccagcggggucgcggugugcaagguucugcaccucgagggagaggugaacaaaaucaaguccgcccugcuuagcaccaauaaagcugucgugucucuguccaacggcguuagcgugcucacauuuaagguccuggaucuuaagaauuacauugacaaacagcugcucccuauccugaacaagcaaucuuguuccauuccgaaucccgaaaccgugauggaguuccagcagaaaaacaaucggcugcucgaaaucacgcgcgaguuuagcgugaacgccggcgucacaaccccuguuucuacauauaugcugaccaauuccgagcuucugagccucauuaacgauaugcccaucaccaacgaccagaagaaacugauguccaauaacgugcaaaucgugagacagcagucuuacagcauuaugugcaucauuaaggaagagguccuugcuuaugugguucagcugccucucuacggggugaucgauacacccuguuggaaacugcauacguccccucugugcaccacaaauaccaaggaaggaagcaacauuugucucacacggaccgaccgcggcugguacugcgauaaugccgggucugucuccuucuuuccgcaagcggagacguguaaggugugcagcaacagaguuuucugcgacacaaugaacucucugacccuucccagcgaagugaaucuguguaaugucgauaucuuuaacccuaaauaugacugcaagaucaugaccuccaaaacagaugugucuagcuccgucauuaccagccucggagccaucgugucuuguuacggcaagacaaaaugcacggcuuccaauaagaacaaggggauuaucaaaaccuucagcaauggaugugacuauguuucuaacaagggcguggacacagucuccgugggcaauacccuguacuauguuaacaaacaggaggggcagagccuuuacgugaagggagagcccauuaucaacuuuuaugauccucuggucuuccccuccgacgaauuugaugccucuaucagccaagugaaugagaaaauuaaccagucccucgcuuucauccggaagucugacgaacugcugcacaaugugaacgccggcaagagcacaaccaauauuaugaucacgaccauuaucauuguuaucaucgucauucuccugucccuuaucgccguggggcugcuccuguacugcaaagcucgcugaggacuaguguccaccugucccuccugggcugcuggauugucucguuuuccugccaaauaaacaggaucagcgcuuuacagaucuaaaaaaaaaaaaaaaaaaaaaaaaaaaaaaaaaaaaaaaaaaaaaaaaaaaaaaaaaaaaaaaaugcaucccccccccccccccccccccccccccccccaaaggcucuuuucagagccaccagaauu

SEQ ID NO: 6496 - RNA, 1814 nt, Artificial Sequence
  mRNA product Design b-2 comprising derived and/or modified sequence from HRSV(A2)__F-del_DSCav1_mut6 (opt6)
gggagagccucugcuggaguccggggaguggcguuggcugcuagagcgaagcuuaccauggaacuacucauauuaaaagcaaacgcaauaacaacgauauuaacagcuguaacauucugcuuugcaucaggccaaaauaucaccgaagaauuuuaucaaagcacaugcucugcaguauccaaaggauacuuaggagcauuaagaacaggcugguacacauccguaauaacaauagaacuaucaaacaucaaagaaaacaaaugcaacggcacagacgccaaaguaaaacucauaaaacaagaacuagacaaauauaaaaacgcaguaacagaucuacaaaugcucaugugcuccacaccagcaaccggaucugguucagccauagcauccggcguagccgucugcaaaguauuacaccucgaaggagaaguaaacaaaauaaaaucugcccuauuaucuacaaauaaagccguaguaagucuaaguaacggaguaucaguacuaacauuuaaaguccuagaccugaaaaacuauaucgacaaacaacuauuaccaauacuaaacaaacaauccuguuccaucccuaacccagaaacaguuauggaauuucaacaaaaaaauaaccgccuuuuagaaauaacuagagaauuuucaguaaacgcaggaguuacaacaccaguaucaacauacaugcuaacaaauucagaauuauuaucccuuauaaaugacaugccuaucacaaacgaucaaaaaaaauuaauguccaacaacguacaaauaguaagacaacaaucauauuccaucaugugcaucauaaaagaagaaguccucgcauacguagugcaacuaccacuauacggagucauagauacacccuguuggaaacuucacacaucuccacuaugcacaacaaacacgaaagaaggauccaacauaugccuaacacgaacagacagaggaugguauugcgacaacgcuggaagugugagcuucuucccucaagcagaaacuugcaaaguaugcagcaaucguguauucugcgacacaaugaacucauuaacacucccaagcgaaguaaaccucugcaauguagacaucuuuaauccaaaauacgauuguaaaauaaugacuucaaaaacagacgucucaucaucuguaauaacaucuuuaggagcaauaguuucuugcuacgguaaaacaaaaugcaccgcauccaacaaaaacaaaggaauaauaaaaacauucucuaacggcugcgauuacguaucuaacaaaggaguugacacagucucaguaggaaacacacuauacuacguaaacaaacaagaaggacaaagccuauacguaaaaggagaaccaauaauaaacuucuaugacccauuaguauuuccaagcgaugaauuugacgcuucaauaucacaagucaaugaaaaaauaaaucagagcuuagcauucauaagaaaaucugaugaacuacuacacaauguaaaugcaggaaaauccacuaccaacauaaugauuaccacaauuauaauaguuaucauaguaauacuauuaucacuaauagccguuggauuacuacuauacugcaaagcaagauaaggacuaguguccaccugucccuccugggcugcuggauugucucguuuuccugccaaauaaacaggaucagcgcuuuacagaucuaaaaaaaaaaaaaaaaaaaaaaaaaaaaaaaaaaaaaaaaaaaaaaaaaaaaaaaaaaaaaaaaugcaucccccccccccccccccccccccccccccccaaaggcucuuuucagagccaccagaauu

SEQ ID NO: 6497 - RNA, 1814 nt, Artificial Sequence
  mRNA product Design b-2 comprising derived and/or modified sequence from HRSV(A2)__F-del_DSCav1_mut6 (opt11)
gggagagccucugcuggaguccggggaguggcguuggcugcuagagcgaagcuuaccauggaacuacucauccuaaaagcaaacgccaucaccaccauacuaaccgccgucaccuucugcuucgccucgggacaaaacaucaccgaagaguucuaccagucaacgugcuccgccgucucaaaaggcuaccuaggcgcccuccgcaccgggugguauaccuccgucauaacuaucgaacucucuaacaucaaagaaaacaaauguaacggcaccgacgccaaagucaaacuaaucaaacaagaacuggacaaauacaaaaacgccgucaccgaccuacaaaugcucaugugcuccacuccagccaccggcuccgguagcgcaaucgccucaggcguagcuguaugcaaaguccuccaccuagaaggcgaaguaaacaaaauaaaauccgcccuccucucaaccaacaaggccgucgucucacucucaaacggcgucuccguacucaccuuuaaaguccuagaccuuaaaaacuacaucgacaaacaacugcuaccaauccucaacaaacaaucaugcagcaucccaaacccggaaacagucauggaguuccaacagaaaaacaaccgacuccucgaaaucacccgcgaguucuccgucaacgccggagucaccacaccuguaagcacauacaugcuuacuaauuccgaacuccuuucacuaauaaacgacaugccaauaaccaacgaccaaaagaaacucauguccaacaacguacaaaucguacgccaacaauccuacuccaucaugugcaucaucaaagaagaaguccuggccuaugucguacaacucccccuuuacggugucaucgacacacccugcuggaaacuacacaccagcccccucugcacaacaaacaccaaagaaggcuccaacaucugccucacccguaccgaccgaggcugguacugcgacaacgccggcuccgucuccuucuucccccaagccgaaaccugcaaagucugcagcaaccgcgucuucugcgauaccaugaacucccucacacucccaucugaagucaaccucugcaacgucgauauuuucaauccaaaauacgacugcaaaaucaugacuagcaaaaccgacguuagcuccuccgucaucaccucccucggcgccauaguuucaugcuacggcaaaaccaaaugcaccgccuccaacaaaaacaaaggcaucauaaaaaccuucuccaacgggugcgacuacguaucuaauaaaggagucgacaccgucucaguaggaaacacccucuacuaugucaacaaacaagaaggccaaucacuauacguuaaaggcgaaccaaucaucaacuucuacgacccacucgucuuccccagcgacgaguuugacgccucaaucucgcaagucaaugaaaagauuaaccaaucccuagccuucauccgaaaaagugacgaacuccuccacaacguuaacgccggcaaaucuacaaccaacaucaugaucaccacuauaaucaucgucaucauagucauacuucucagccucaucgcagucggacuccuccuuuauugcaaggcacgauaaggacuaguguccaccugucccuccugggcugcuggauugucucguuuuccugccaaauaaacaggaucagcgcuuuacagaucuaaaaaaaaaaaaaaaaaaaaaaaaaaaaaaaaaaaaaaaaaaaaaaaaaaaaaaaaaaaaaaaaugcaucccccccccccccccccccccccccccccccaaaggcucuuuucagagccaccagaauu

SEQ ID NO: 6498 - RNA, 1834 nt, Artificial Sequence
  mRNA product Design b-3 comprising derived and/or modified sequence from HRSV(A2)__F-del_DSCav1_mut6 (opt1)
gggagagucccgcagucggcguccagcggcucugcuuguucgugugugugucguugcaggccuuauucaagcuuaccauggagcugcucauccugaaggccaacgccaucaccaccauccugacggcggugaccuucugcuucgccagcggccagaacaucaccgaggaguucuaccaguccacgugcagcgccgucuccaagggguaccucggcgcccugcggaccggcugguacaccuccgugaucaccaucgagcugagcaacaucaaggagaacaagugcaacgggaccgacgccaaggugaagcucaucaagcaggagcuggacaaguacaagaacgcggucacggaccugcagaugcugaugugcuccaccccggcaaccggcuccggcuccgccaucgcgagcggcgucgccgugugcaaggugcugcaccucgagggggaggucaacaagaucaagagcgcccugcuguccaccaacaaggccguggugagccucuccaacggcgucagcgugcugaccuucaaggugcuggaccucaagaacuacaucgacaagcagcugcugcccauccugaacaagcagagcugcuccauccccaaccccgagacggugauggaguuccagcagaagaacaaccggcuccuggagaucacccgcgaguucagcgugaacgccggggucaccacccccguguccacguacaugcugaccaacagcgagcuccugucccugaucaacgacaugccgaucaccaacgaccagaagaagcucaugagcaacaacgugcagaucguccggcagcaguccuacagcaucaugugcaucaucaaggaggaggugcuggcguacgugguccagcugccccucuacggcgugaucgacacccccugcuggaagcugcacacgagcccccugugcaccaccaacaccaaggagggguccaacaucugccucacgcgcaccgaccggggcugguacugcgacaacgccggcagcgucuccuucuucccgcaggccgagaccugcaaggugugcagcaaccgcguguucugcgacaccaugaacucccugacgcugcccagcgagguaaaccucugcaacgucgacaucuucaaccccaaguacgacugcaagaucaugaccuccaagaccgacgugagcuccagcgugaucaccucccugggggccaucgucagcugcuacggcaagacgaagugcaccgccagcaacaagaacaaggggaucaucaagaccuucuccaacggcugcgacuacgugagcaacaagggcguggacaccguguccgucgggaacacccuguacuacgugaacaagcaggagggccagagccucuacgugaagggggagcccaucaucaacuucuacgacccgcuggucuuccccuccgacgaguucgacgcgagcaucucccaggugaacgagaagaucaaccagagccuggccuucauccgcaaguccgacgagcugcuccacaacgugaacgccggcaagagcacgaccaacaucaugaucaccaccaucaucaucgucaucaucgugauccugcugucccucaucgccguggggcugcugcucuacugcaaggcccggugaggacuaguguccaccugucccuccugggcugcuggauugucucguuuuccugccaaauaaacaggaucagcgcuuuacagaucuaaaaaaaaaaaaaaaaaaaaaaaaaaaaaaaaaaaaaaaaaaaaaaaaaaaaaaaaaaaaaaaaugcaucccccccccccccccccccccccccccccccaaaggcucuuuucagagccaccagaauu

SEQ ID NO: 6499 - RNA, 1834 nt, Artificial Sequence
  mRNA product Design b-3 comprising derived and/or modified sequence from HRSV(A2)__F-del_DSCav1_mut6 (opt1)
gggagagucccgcagucggcguccagcggcucugcuuguucgugugugugucguugcaggccuuauucaagcuuaccauggagcugcucauccugaaggccaacgccaucaccaccauccugacggcggugaccuucugcuucgccagcggccagaacaucaccgaggaguucuaccaguccacgugcagcgccgucuccaagggguaccucggcgcccugcgcaccgggugguacaccagcgugaucaccaucgagcuguccaacaucaaggagaacaagugcaacggcaccgacgccaaggugaagcucaucaagcaggagcuggacaaguacaagaacgcggucacggaccugcagaugcucaugugcagcacccccgccaccggguccggcagcgccaucgccuccggcguggcggugugcaagguccugcaccuggagggggaggugaacaagaucaagagcgcccuccuguccaccaacaaggccguggucagccuguccaacggcgugagcgugcucacguucaagguccuggaccugaagaacuacaucgacaagcagcuccugccgauccugaacaagcaguccugcagcauccccaaccccgagaccgugauggaguuccagcagaagaacaaccggcuccuggagaucacccgcgaguucuccgugaacgccggggucaccacgcccgugagcaccuacaugcugaccaacuccgagcuccugagccugaucaacgacaugccgaucaccaacgaccagaagaagcucaugagcaacaacgugcagaucguccggcagcaguccuacagcaucaugugcaucaucaaggaggaggugcuggccuacgugguccagcugccccucuacggcgugaucgacacgcccugcuggaagcugcacaccagcccccugugcaccaccaacacgaaggaggggagcaacaucugccucacccgcaccgaccggggcugguacugcgacaacgcgggcuccgugagcuucuucccgcaggccgagaccugcaaggucugcuccaaccgcguguucugcgacacgaugaacagccugacccugcccuccgaggucaaccucugcaacguggacaucuucaaccccaaguacgacugcaagaucaugaccagcaagaccgacguguccagcuccgucaucacgagccugggggccaucguguccugcuacggcaagaccaagugcaccgccagcaacaagaacaaggggaucaucaagaccuucuccaacggcugcgacuacgugagcaacaagggcgucgacacgguguccguggggaacacccuguacuacgucaacaagcaggagggccagagccucuacgugaagggggagcccaucaucaacuucuacgacccgcugguguuccccagcgacgaguucgacgccuccaucagccaggucaacgagaagaucaaccagucccuggcguucauccggaaguccgacgagcuccugcacaacgugaacgccggcaaguccaccaccaacaucaugaucaccacgaucaucaucgugaucaucgucauccugcucagccugaucgccguggggcugcuccuguacugcaaggcccgcugaggacuaguguccaccugucccuccugggcugcuggauugucucguuuuccugccaaauaaacaggaucagcgcuuuacagaucuaaaaaaaaaaaaaaaaaaaaaaaaaaaaaaaaaaaaaaaaaaaaaaaaaaaaaaaaaaaaaaaaugcaucccccccccccccccccccccccccccccccaaaggcucuuuucagagccaccagaauu

SEQ ID NO: 6500 - RNA, 1834 nt, Artificial Sequence
  mRNA product Design b-3 comprising derived and/or modified sequence from HRSV(A2)__F-del_DSCav1_mut6 (opt2)
gggagagucccgcagucggcguccagcggcucugcuuguucgugugugugucguugcaggccuuauucaagcuuaccauggagcuccucauccucaaggccaacgccaucaccaccauccucaccgccgucaccuucugcuucgccuccggccagaacaucaccgaggaguucuaccaguccaccugcuccgccgucuccaagggcuaccucggcgcccuccgcaccggcugguacaccuccgucaucaccaucgagcucuccaacaucaaggagaacaagugcaacggcaccgacgccaaggucaagcucaucaagcaggagcucgacaaguacaagaacgccgucaccgaccuccagaugcucaugugcuccacccccgccaccggcuccggcuccgccaucgccuccggcgucgccgucugcaagguccuccaccucgagggcgaggucaacaagaucaaguccgcccuccucuccaccaacaaggccgucgucucccucuccaacggcgucuccguccucaccuucaagguccucgaccucaagaacuacaucgacaagcagcuccuccccauccucaacaagcaguccugcuccauccccaaccccgagaccgucauggaguuccagcagaagaacaaccgccuccucgagaucacccgcgaguucuccgucaacgccggcgucaccacccccgucuccaccuacaugcucaccaacuccgagcuccucucccucaucaacgacaugcccaucaccaacgaccagaagaagcucauguccaacaacguccagaucguccgccagcaguccuacuccaucaugugcaucaucaaggaggagguccucgccuacgucguccagcucccccucuacggcgucaucgacacccccugcuggaagcuccacaccuccccccucugcaccaccaacaccaaggagggcuccaacaucugccucacccgcaccgaccgcggcugguacugcgacaacgccggcuccgucuccuucuucccccaggccgagaccugcaaggucugcuccaaccgcgucuucugcgacaccaugaacucccucacccuccccuccgaggucaaccucugcaacgucgacaucuucaaccccaaguacgacugcaagaucaugaccuccaagaccgacgucuccuccuccgucaucaccucccucggcgccaucgucuccugcuacggcaagaccaagugcaccgccuccaacaagaacaagggcaucaucaagaccuucuccaacggcugcgacuacgucuccaacaagggcgucgacaccgucuccgucggcaacacccucuacuacgucaacaagcaggagggccagucccucuacgucaagggcgagcccaucaucaacuucuacgacccccucgucuuccccuccgacgaguucgacgccuccaucucccaggucaacgagaagaucaaccagucccucgccuucauccgcaaguccgacgagcuccuccacaacgucaacgccggcaaguccaccaccaacaucaugaucaccaccaucaucaucgucaucaucgucauccuccucucccucaucgccgucggccuccuccucuacugcaaggcccgcugaggacuaguguccaccugucccuccugggcugcuggauugucucguuuuccugccaaauaaacaggaucagcgcuuuacagaucuaaaaaaaaaaaaaaaaaaaaaaaaaaaaaaaaaaaaaaaaaaaaaaaaaaaaaaaaaaaaaaaaugcaucccccccccccccccccccccccccccccccaaaggcucuuuucagagccaccagaauu

SEQ ID NO: 6501 - RNA, 1834 nt, Artificial Sequence
  mRNA product Design b-3 comprising derived and/or modified sequence from HRSV(A2)__F-del_DSCav1_mut6 (opt3)
gggagagucccgcagucggcguccagcggcucugcuuguucgugugugugucguugcaggccuuauucaagcuuaccauggagcugcucauccuuaaggccaacgcuauuaccacaauacugacugcagugacguucugcuuugccagcggccagaauaucaccgaagaguucuaccaauccacauguucugcggucucaaaaggguauuugggagcuuuaagaacugguugguacaccaguguuauuacaaucgaacugagcaacauuaaggagaauaaaugcaacggcaccgacgccaaggugaaacuaaucaagcaggaacucgauaaguauaaaaaugcaguaacugaccugcagaugcuuauguguuccacacccgccaccgggucuggaucggcuauagcaucaggcguggccgucugcaaggugcugcacuuggagggugagguuaacaaaaucaagagcgcucuccugaguacgaauaaagccguggucucccugucuaacggggugagcguacucacuuuuaagguuuuagaucugaagaauuacauugacaaacagcuuuugccuauccugaacaagcaauccuguucaauuccaaauccggaaaccgugauggaguuccagcagaaaaacaauaggcuacucgaaaucacacgggaguuuagugucaacgcgggagugacuacccccgugagcacauauaugcugaccaauucugagcuucuguccuugauaaacgauaugccuauuacgaacgaccagaagaaacucaugucaaauaacguccaaaucguucgccagcagagcuacaguauuaugugcaucaucaaggaagaggugcuggcauauguagugcaguuaccacuguacggcgucauugauacucccuguuggaaacuccauacaucuccucuuugcaccacuaauacaaaggaaggcuccaacauaugucugacccgaacggaccgugggugguacugcgauaaugccggaagcgugucguucuuuccacaagcugagaccuguaagguuugcucuaacagaguguucugcgacacaaugaacuccuugacucuacccucagaagucaaucuguguaauguggauaucuuuaacccuaaauaugacugcaagauuaugaccaguaaaacagauguaagcuccucuguuaucacuagccucggugccauagugucauguuacggcaagaccaaaugcacagcaaguaauaagaacaaggggauuaucaaaaccuucuccaauggaugugacuaugucagcaacaagggcguggacacugucucuguggguaauacgcuguacuauguuaacaaacaggaggggcagucacuuuacgugaagggagagccaaucauuaacuuuuaugauccgcugguauuccccagugacgaauuugaugcuagcaucucccaagucaaugagaaaauuaaccagucuuuggccuucauaaggaagucggacgaacuccugcacaaugugaacgcgggcaagagcacaaccaauaucaugauuacuaccaucaucauuguuauaaucgugauuuuacugucccuaaucgccgucggccuccugcuuuacugcaaagcacggugaggacuaguguccaccugucccuccugggcugcuggauugucucguuuuccugccaaauaaacaggaucagcgcuuuacagaucuaaaaaaaaaaaaaaaaaaaaaaaaaaaaaaaaaaaaaaaaaaaaaaaaaaaaaaaaaaaaaaaaugcaucccccccccccccccccccccccccccccccaaaggcucuuuucagagccaccagaauu

SEQ ID NO: 6502 - RNA, 1834 nt, Artificial Sequence
  mRNA product Design b-3 comprising derived and/or modified sequence from HRSV(A2)__F-del_DSCav1_mut6 (opt4)
gggagagucccgcagucggcguccagcggcucugcuuguucgugugugugucguugcaggccuuauucaagcuuaccauggagcugcugauccugaaggccaacgccaucaccaccauccugaccgccgugaccuucugcuucgccagcggccagaacaucaccgaggaguucuaccagagcaccugcagcgccgugagcaagggcuaccugggcgcccugagaaccggcugguacaccagcgugaucaccaucgagcugagcaacaucaaggagaacaagugcaacggcaccgacgccaaggugaagcugaucaagcaggagcuggacaaguacaagaacgccgugaccgaccugcagaugcugaugugcagcacccccgccaccggcagcggcagcgccaucgccagcggcguggccgugugcaaggugcugcaccuggagggcgaggugaacaagaucaagagcgcccugcugagcaccaacaaggccguggugagccugagcaacggcgugagcgugcugaccuucaaggugcuggaccugaagaacuacaucgacaagcagcugcugcccauccugaacaagcagagcugcagcauccccaaccccgagaccgugauggaguuccagcagaagaacaacagacugcuggagaucaccagagaguucagcgugaacgccggcgugaccacccccgugagcaccuacaugcugaccaacagcgagcugcugagccugaucaacgacaugcccaucaccaacgaccagaagaagcugaugagcaacaacgugcagaucgugagacagcagagcuacagcaucaugugcaucaucaaggaggaggugcuggccuacguggugcagcugccccuguacggcgugaucgacacccccugcuggaagcugcacaccagcccccugugcaccaccaacaccaaggagggcagcaacaucugccugaccagaaccgacagaggcugguacugcgacaacgccggcagcgugagcuucuucccccaggccgagaccugcaaggugugcagcaacagaguguucugcgacaccaugaacagccugacccugcccagcgaggugaaccugugcaacguggacaucuucaaccccaaguacgacugcaagaucaugaccagcaagaccgacgugagcagcagcgugaucaccagccugggcgccaucgugagcugcuacggcaagaccaagugcaccgccagcaacaagaacaagggcaucaucaagaccuucagcaacggcugcgacuacgugagcaacaagggcguggacaccgugagcgugggcaacacccuguacuacgugaacaagcaggagggccagagccuguacgugaagggcgagcccaucaucaacuucuacgacccccugguguuccccagcgacgaguucgacgccagcaucagccaggugaacgagaagaucaaccagagccuggccuucaucagaaagagcgacgagcugcugcacaacgugaacgccggcaagagcaccaccaacaucaugaucaccaccaucaucaucgugaucaucgugauccugcugagccugaucgccgugggccugcugcuguacugcaaggccagaugaggacuaguguccaccugucccuccugggcugcuggauugucucguuuuccugccaaauaaacaggaucagcgcuuuacagaucuaaaaaaaaaaaaaaaaaaaaaaaaaaaaaaaaaaaaaaaaaaaaaaaaaaaaaaaaaaaaaaaaugcaucccccccccccccccccccccccccccccccaaaggcucuuuucagagccaccagaauu

SEQ ID NO: 6503 - RNA, 1834 nt, Artificial Sequence
  mRNA product Design b-3 comprising derived and/or modified sequence from HRSV(A2)__F-del_DSCav1_mut6 (opt5)
gggagagucccgcagucggcguccagcggcucugcuuguucgugugugugucguugcaggccuuauucaagcuuaccauggagcugcucauccugaaggccaacgcuauuaccacaauccuuacggccgugaccuucugcuuugcgagcggccagaauauuacagaagaguucuaccaauccaccuguucugcugucagcaaaggguaucugggagcccucagaacaggcugguacaccuccguuaucacaauugaacugucuaacaucaaggagaauaaaugcaacgggaccgacgccaaggugaaacuuaucaagcaggaacuggauaaguauaaaaaugcugugacggaccuccagaugcugauguguagcacccccgccacaggauccggcucugcuauugccagcggggucgcggugugcaagguucugcaccucgagggagaggugaacaaaaucaaguccgcccugcuuagcaccaauaaagcugucgugucucuguccaacggcguuagcgugcucacauuuaagguccuggaucuuaagaauuacauugacaaacagcugcucccuauccugaacaagcaaucuuguuccauuccgaaucccgaaaccgugauggaguuccagcagaaaaacaaucggcugcucgaaaucacgcgcgaguuuagcgugaacgccggcgucacaaccccuguuucuacauauaugcugaccaauuccgagcuucugagccucauuaacgauaugcccaucaccaacgaccagaagaaacugauguccaauaacgugcaaaucgugagacagcagucuuacagcauuaugugcaucauuaaggaagagguccuugcuuaugugguucagcugccucucuacggggugaucgauacacccuguuggaaacugcauacguccccucugugcaccacaaauaccaaggaaggaagcaacauuugucucacacggaccgaccgcggcugguacugcgauaaugccgggucugucuccuucuuuccgcaagcggagacguguaaggugugcagcaacagaguuuucugcgacacaaugaacucucugacccuucccagcgaagugaaucuguguaaugucgauaucuuuaacccuaaauaugacugcaagaucaugaccuccaaaacagaugugucuagcuccgucauuaccagccucggagccaucgugucuuguuacggcaagacaaaaugcacggcuuccaauaagaacaaggggauuaucaaaaccuucagcaauggaugugacuauguuucuaacaagggcguggacacagucuccgugggcaauacccuguacuauguuaacaaacaggaggggcagagccuuuacgugaagggagagcccauuaucaacuuuuaugauccucuggucuuccccuccgacgaauuugaugccucuaucagccaagugaaugagaaaauuaaccagucccucgcuuucauccggaagucugacgaacugcugcacaaugugaacgccggcaagagcacaaccaauauuaugaucacgaccauuaucauuguuaucaucgucauucuccugucccuuaucgccguggggcugcuccuguacugcaaagcucgcugaggacuaguguccaccugucccuccugggcugcuggauugucucguuuuccugccaaauaaacaggaucagcgcuuuacagaucuaaaaaaaaaaaaaaaaaaaaaaaaaaaaaaaaaaaaaaaaaaaaaaaaaaaaaaaaaaaaaaaaugcaucccccccccccccccccccccccccccccccaaaggcucuuuucagagccaccagaauu

SEQ ID NO: 6504 - RNA, 1834 nt, Artificial Sequence
  mRNA product Design b-3 comprising derived and/or modified sequence from HRSV(A2)__F-del_DSCav1_mut6 (opt6)
gggagagucccgcagucggcguccagcggcucugcuuguucgugugugugucguugcaggccuuauucaagcuuaccauggaacuacucauauuaaaagcaaacgcaauaacaacgauauuaacagcuguaacauucugcuuugcaucaggccaaaauaucaccgaagaauuuuaucaaagcacaugcucugcaguauccaaaggauacuuaggagcauuaagaacaggcugguacacauccguaauaacaauagaacuaucaaacaucaaagaaaacaaaugcaacggcacagacgccaaaguaaaacucauaaaacaagaacuagacaaauauaaaaacgcaguaacagaucuacaaaugcucaugugcuccacaccagcaaccggaucugguucagccauagcauccggcguagccgucugcaaaguauuacaccucgaaggagaaguaaacaaaauaaaaucugcccuauuaucuacaaauaaagccguaguaagucuaaguaacggaguaucaguacuaacauuuaaaguccuagaccugaaaaacuauaucgacaaacaacuauuaccaauacuaaacaaacaauccuguuccaucccuaacccagaaacaguuauggaauuucaacaaaaaaauaaccgccuuuuagaaauaacuagagaauuuucaguaaacgcaggaguuacaacaccaguaucaacauacaugcuaacaaauucagaauuauuaucccuuauaaaugacaugccuaucacaaacgaucaaaaaaaauuaauguccaacaacguacaaauaguaagacaacaaucauauuccaucaugugcaucauaaaagaagaaguccucgcauacguagugcaacuaccacuauacggagucauagauacacccuguuggaaacuucacacaucuccacuaugcacaacaaacacgaaagaaggauccaacauaugccuaacacgaacagacagaggaugguauugcgacaacgcuggaagugugagcuucuucccucaagcagaaacuugcaaaguaugcagcaaucguguauucugcgacacaaugaacucauuaacacucccaagcgaaguaaaccucugcaauguagacaucuuuaauccaaaauacgauuguaaaauaaugacuucaaaaacagacgucucaucaucuguaauaacaucuuuaggagcaauaguuucuugcuacgguaaaacaaaaugcaccgcauccaacaaaaacaaaggaauaauaaaaacauucucuaacggcugcgauuacguaucuaacaaaggaguugacacagucucaguaggaaacacacuauacuacguaaacaaacaagaaggacaaagccuauacguaaaaggagaaccaauaauaaacuucuaugacccauuaguauuuccaagcgaugaauuugacgcuucaauaucacaagucaaugaaaaaauaaaucagagcuuagcauucauaagaaaaucugaugaacuacuacacaauguaaaugcaggaaaauccacuaccaacauaaugauuaccacaauuauaauaguuaucauaguaauacuauuaucacuaauagccguuggauuacuacuauacugcaaagcaagauaaggacuaguguccaccugucccuccugggcugcuggauugucucguuuuccugccaaauaaacaggaucagcgcuuuacagaucuaaaaaaaaaaaaaaaaaaaaaaaaaaaaaaaaaaaaaaaaaaaaaaaaaaaaaaaaaaaaaaaaugcaucccccccccccccccccccccccccccccccaaaggcucuuuucagagccaccagaauu

SEQ ID NO: 6505 - RNA, 1834 nt, Artificial Sequence
  mRNA product Design b-3 comprising derived and/or modified sequence from HRSV(A2)__F-del_DSCav1_mut6 (opt11)
gggagagucccgcagucggcguccagcggcucugcuuguucgugugugugucguugcaggccuuauucaagcuuaccauggaacuacucauccuaaaagcaaacgccaucaccaccauacuaaccgccgucaccuucugcuucgccucgggacaaaacaucaccgaagaguucuaccagucaacgugcuccgccgucucaaaaggcuaccuaggcgcccuccgcaccgggugguauaccuccgucauaacuaucgaacucucuaacaucaaagaaaacaaauguaacggcaccgacgccaaagucaaacuaaucaaacaagaacuggacaaauacaaaaacgccgucaccgaccuacaaaugcucaugugcuccacuccagccaccggcuccgguagcgcaaucgccucaggcguagcuguaugcaaaguccuccaccuagaaggcgaaguaaacaaaauaaaauccgcccuccucucaaccaacaaggccgucgucucacucucaaacggcgucuccguacucaccuuuaaaguccuagaccuuaaaaacuacaucgacaaacaacugcuaccaauccucaacaaacaaucaugcagcaucccaaacccggaaacagucauggaguuccaacagaaaaacaaccgacuccucgaaaucacccgcgaguucuccgucaacgccggagucaccacaccuguaagcacauacaugcuuacuaauuccgaacuccuuucacuaauaaacgacaugccaauaaccaacgaccaaaagaaacucauguccaacaacguacaaaucguacgccaacaauccuacuccaucaugugcaucaucaaagaagaaguccuggccuaugucguacaacucccccuuuacggugucaucgacacacccugcuggaaacuacacaccagcccccucugcacaacaaacaccaaagaaggcuccaacaucugccucacccguaccgaccgaggcugguacugcgacaacgccggcuccgucuccuucuucccccaagccgaaaccugcaaagucugcagcaaccgcgucuucugcgauaccaugaacucccucacacucccaucugaagucaaccucugcaacgucgauauuuucaauccaaaauacgacugcaaaaucaugacuagcaaaaccgacguuagcuccuccgucaucaccucccucggcgccauaguuucaugcuacggcaaaaccaaaugcaccgccuccaacaaaaacaaaggcaucauaaaaaccuucuccaacgggugcgacuacguaucuaauaaaggagucgacaccgucucaguaggaaacacccucuacuaugucaacaaacaagaaggccaaucacuauacguuaaaggcgaaccaaucaucaacuucuacgacccacucgucuuccccagcgacgaguuugacgccucaaucucgcaagucaaugaaaagauuaaccaaucccuagccuucauccgaaaaagugacgaacuccuccacaacguuaacgccggcaaaucuacaaccaacaucaugaucaccacuauaaucaucgucaucauagucauacuucucagccucaucgcagucggacuccuccuuuauugcaaggcacgauaaggacuaguguccaccugucccuccugggcugcuggauugucucguuuuccugccaaauaaacaggaucagcgcuuuacagaucuaaaaaaaaaaaaaaaaaaaaaaaaaaaaaaaaaaaaaaaaaaaaaaaaaaaaaaaaaaaaaaaaugcaucccccccccccccccccccccccccccccccaaaggcucuuuucagagccaccagaauu

SEQ ID NO: 6506 - RNA, 1885 nt, Artificial Sequence
  mRNA product Design b-4 comprising derived and/or modified sequence from HRSV(A2)__F-del_DSCav1_mut6 (opt1)
gggagagucccgcagucggcguccagcggcucugcuuguucgugugugugucguugcaggccuuauucaagcuuaccauggagcugcucauccugaaggccaacgccaucaccaccauccugacggcggugaccuucugcuucgccagcggccagaacaucaccgaggaguucuaccaguccacgugcagcgccgucuccaagggguaccucggcgcccugcggaccggcugguacaccuccgugaucaccaucgagcugagcaacaucaaggagaacaagugcaacgggaccgacgccaaggugaagcucaucaagcaggagcuggacaaguacaagaacgcggucacggaccugcagaugcugaugugcuccaccccggcaaccggcuccggcuccgccaucgcgagcggcgucgccgugugcaaggugcugcaccucgagggggaggucaacaagaucaagagcgcccugcuguccaccaacaaggccguggugagccucuccaacggcgucagcgugcugaccuucaaggugcuggaccucaagaacuacaucgacaagcagcugcugcccauccugaacaagcagagcugcuccauccccaaccccgagacggugauggaguuccagcagaagaacaaccggcuccuggagaucacccgcgaguucagcgugaacgccggggucaccacccccguguccacguacaugcugaccaacagcgagcuccugucccugaucaacgacaugccgaucaccaacgaccagaagaagcucaugagcaacaacgugcagaucguccggcagcaguccuacagcaucaugugcaucaucaaggaggaggugcuggcguacgugguccagcugccccucuacggcgugaucgacacccccugcuggaagcugcacacgagcccccugugcaccaccaacaccaaggagggguccaacaucugccucacgcgcaccgaccggggcugguacugcgacaacgccggcagcgucuccuucuucccgcaggccgagaccugcaaggugugcagcaaccgcguguucugcgacaccaugaacucccugacgcugcccagcgagguaaaccucugcaacgucgacaucuucaaccccaaguacgacugcaagaucaugaccuccaagaccgacgugagcuccagcgugaucaccucccugggggccaucgucagcugcuacggcaagacgaagugcaccgccagcaacaagaacaaggggaucaucaagaccuucuccaacggcugcgacuacgugagcaacaagggcguggacaccguguccgucgggaacacccuguacuacgugaacaagcaggagggccagagccucuacgugaagggggagcccaucaucaacuucuacgacccgcuggucuuccccuccgacgaguucgacgcgagcaucucccaggugaacgagaagaucaaccagagccuggccuucauccgcaaguccgacgagcugcuccacaacgugaacgccggcaagagcacgaccaacaucaugaucaccaccaucaucaucgucaucaucgugauccugcugucccucaucgccguggggcugcugcucuacugcaaggcccggugaggacuaguaauaaggaaacuguaugaaugucugugggcaggaagugaagagauccuucuguaaagguuuuuggaauuaugucugcugaauaauaaacuuuuuugaaauaauaaaucugguagaaaaaugagaucuaaaaaaaaaaaaaaaaaaaaaaaaaaaaaaaaaaaaaaaaaaaaaaaaaaaaaaaaaaaaaaaaugcaucccccccccccccccccccccccccccccccaaaggcucuuuucagagccaccagaauu

SEQ ID NO: 6507 - RNA, 1885 nt, Artificial Sequence
  mRNA product Design b-4 comprising derived and/or modified sequence from HRSV(A2)__F-del_DSCav1_mut6 (opt1)
gggagagucccgcagucggcguccagcggcucugcuuguucgugugugugucguugcaggccuuauucaagcuuaccauggagcugcucauccugaaggccaacgccaucaccaccauccugacggcggugaccuucugcuucgccagcggccagaacaucaccgaggaguucuaccaguccacgugcagcgccgucuccaagggguaccucggcgcccugcgcaccgggugguacaccagcgugaucaccaucgagcuguccaacaucaaggagaacaagugcaacggcaccgacgccaaggugaagcucaucaagcaggagcuggacaaguacaagaacgcggucacggaccugcagaugcucaugugcagcacccccgccaccggguccggcagcgccaucgccuccggcguggcggugugcaagguccugcaccuggagggggaggugaacaagaucaagagcgcccuccuguccaccaacaaggccguggucagccuguccaacggcgugagcgugcucacguucaagguccuggaccugaagaacuacaucgacaagcagcuccugccgauccugaacaagcaguccugcagcauccccaaccccgagaccgugauggaguuccagcagaagaacaaccggcuccuggagaucacccgcgaguucuccgugaacgccggggucaccacgcccgugagcaccuacaugcugaccaacuccgagcuccugagccugaucaacgacaugccgaucaccaacgaccagaagaagcucaugagcaacaacgugcagaucguccggcagcaguccuacagcaucaugugcaucaucaaggaggaggugcuggccuacgugguccagcugccccucuacggcgugaucgacacgcccugcuggaagcugcacaccagcccccugugcaccaccaacacgaaggaggggagcaacaucugccucacccgcaccgaccggggcugguacugcgacaacgcgggcuccgugagcuucuucccgcaggccgagaccugcaaggucugcuccaaccgcguguucugcgacacgaugaacagccugacccugcccuccgaggucaaccucugcaacguggacaucuucaaccccaaguacgacugcaagaucaugaccagcaagaccgacguguccagcuccgucaucacgagccugggggccaucguguccugcuacggcaagaccaagugcaccgccagcaacaagaacaaggggaucaucaagaccuucuccaacggcugcgacuacgugagcaacaagggcgucgacacgguguccguggggaacacccuguacuacgucaacaagcaggagggccagagccucuacgugaagggggagcccaucaucaacuucuacgacccgcugguguuccccagcgacgaguucgacgccuccaucagccaggucaacgagaagaucaaccagucccuggcguucauccggaaguccgacgagcuccugcacaacgugaacgccggcaaguccaccaccaacaucaugaucaccacgaucaucaucgugaucaucgucauccugcucagccugaucgccguggggcugcuccuguacugcaaggcccgcugaggacuaguaauaaggaaacuguaugaaugucugugggcaggaagugaagagauccuucuguaaagguuuuuggaauuaugucugcugaauaauaaacuuuuuugaaauaauaaaucugguagaaaaaugagaucuaaaaaaaaaaaaaaaaaaaaaaaaaaaaaaaaaaaaaaaaaaaaaaaaaaaaaaaaaaaaaaaaugcaucccccccccccccccccccccccccccccccaaaggcucuuuucagagccaccagaauu

SEQ ID NO: 6508 - RNA, 1885 nt, Artificial Sequence
  mRNA product Design b-4 comprising derived and/or modified sequence from HRSV(A2)__F-del_DSCav1_mut6 (opt2)
gggagagucccgcagucggcguccagcggcucugcuuguucgugugugugucguugcaggccuuauucaagcuuaccauggagcuccucauccucaaggccaacgccaucaccaccauccucaccgccgucaccuucugcuucgccuccggccagaacaucaccgaggaguucuaccaguccaccugcuccgccgucuccaagggcuaccucggcgcccuccgcaccggcugguacaccuccgucaucaccaucgagcucuccaacaucaaggagaacaagugcaacggcaccgacgccaaggucaagcucaucaagcaggagcucgacaaguacaagaacgccgucaccgaccuccagaugcucaugugcuccacccccgccaccggcuccggcuccgccaucgccuccggcgucgccgucugcaagguccuccaccucgagggcgaggucaacaagaucaaguccgcccuccucuccaccaacaaggccgucgucucccucuccaacggcgucuccguccucaccuucaagguccucgaccucaagaacuacaucgacaagcagcuccuccccauccucaacaagcaguccugcuccauccccaaccccgagaccgucauggaguuccagcagaagaacaaccgccuccucgagaucacccgcgaguucuccgucaacgccggcgucaccacccccgucuccaccuacaugcucaccaacuccgagcuccucucccucaucaacgacaugcccaucaccaacgaccagaagaagcucauguccaacaacguccagaucguccgccagcaguccuacuccaucaugugcaucaucaaggaggagguccucgccuacgucguccagcucccccucuacggcgucaucgacacccccugcuggaagcuccacaccuccccccucugcaccaccaacaccaaggagggcuccaacaucugccucacccgcaccgaccgcggcugguacugcgacaacgccggcuccgucuccuucuucccccaggccgagaccugcaaggucugcuccaaccgcgucuucugcgacaccaugaacucccucacccuccccuccgaggucaaccucugcaacgucgacaucuucaaccccaaguacgacugcaagaucaugaccuccaagaccgacgucuccuccuccgucaucaccucccucggcgccaucgucuccugcuacggcaagaccaagugcaccgccuccaacaagaacaagggcaucaucaagaccuucuccaacggcugcgacuacgucuccaacaagggcgucgacaccgucuccgucggcaacacccucuacuacgucaacaagcaggagggccagucccucuacgucaagggcgagcccaucaucaacuucuacgacccccucgucuuccccuccgacgaguucgacgccuccaucucccaggucaacgagaagaucaaccagucccucgccuucauccgcaaguccgacgagcuccuccacaacgucaacgccggcaaguccaccaccaacaucaugaucaccaccaucaucaucgucaucaucgucauccuccucucccucaucgccgucggccuccuccucuacugcaaggcccgcugaggacuaguaauaaggaaacuguaugaaugucugugggcaggaagugaagagauccuucuguaaagguuuuuggaauuaugucugcugaauaauaaacuuuuuugaaauaauaaaucugguagaaaaaugagaucuaaaaaaaaaaaaaaaaaaaaaaaaaaaaaaaaaaaaaaaaaaaaaaaaaaaaaaaaaaaaaaaaugcaucccccccccccccccccccccccccccccccaaaggcucuuuucagagccaccagaauu

SEQ ID NO: 6509 - RNA, 1885 nt, Artificial Sequence
  mRNA product Design b-4 comprising derived and/or modified sequence from HRSV(A2)__F-del_DSCav1_mut6 (opt3)
gggagagucccgcagucggcguccagcggcucugcuuguucgugugugugucguugcaggccuuauucaagcuuaccauggagcugcucauccuuaaggccaacgcuauuaccacaauacugacugcagugacguucugcuuugccagcggccagaauaucaccgaagaguucuaccaauccacauguucugcggucucaaaaggguauuugggagcuuuaagaacugguugguacaccaguguuauuacaaucgaacugagcaacauuaaggagaauaaaugcaacggcaccgacgccaaggugaaacuaaucaagcaggaacucgauaaguauaaaaaugcaguaacugaccugcagaugcuuauguguuccacacccgccaccgggucuggaucggcuauagcaucaggcguggccgucugcaaggugcugcacuuggagggugagguuaacaaaaucaagagcgcucuccugaguacgaauaaagccguggucucccugucuaacggggugagcguacucacuuuuaagguuuuagaucugaagaauuacauugacaaacagcuuuugccuauccugaacaagcaauccuguucaauuccaaauccggaaaccgugauggaguuccagcagaaaaacaauaggcuacucgaaaucacacgggaguuuagugucaacgcgggagugacuacccccgugagcacauauaugcugaccaauucugagcuucuguccuugauaaacgauaugccuauuacgaacgaccagaagaaacucaugucaaauaacguccaaaucguucgccagcagagcuacaguauuaugugcaucaucaaggaagaggugcuggcauauguagugcaguuaccacuguacggcgucauugauacucccuguuggaaacuccauacaucuccucuuugcaccacuaauacaaaggaaggcuccaacauaugucugacccgaacggaccgugggugguacugcgauaaugccggaagcgugucguucuuuccacaagcugagaccuguaagguuugcucuaacagaguguucugcgacacaaugaacuccuugacucuacccucagaagucaaucuguguaauguggauaucuuuaacccuaaauaugacugcaagauuaugaccaguaaaacagauguaagcuccucuguuaucacuagccucggugccauagugucauguuacggcaagaccaaaugcacagcaaguaauaagaacaaggggauuaucaaaaccuucuccaauggaugugacuaugucagcaacaagggcguggacacugucucuguggguaauacgcuguacuauguuaacaaacaggaggggcagucacuuuacgugaagggagagccaaucauuaacuuuuaugauccgcugguauuccccagugacgaauuugaugcuagcaucucccaagucaaugagaaaauuaaccagucuuuggccuucauaaggaagucggacgaacuccugcacaaugugaacgcgggcaagagcacaaccaauaucaugauuacuaccaucaucauuguuauaaucgugauuuuacugucccuaaucgccgucggccuccugcuuuacugcaaagcacggugaggacuaguaauaaggaaacuguaugaaugucugugggcaggaagugaagagauccuucuguaaagguuuuuggaauuaugucugcugaauaauaaacuuuuuugaaauaauaaaucugguagaaaaaugagaucuaaaaaaaaaaaaaaaaaaaaaaaaaaaaaaaaaaaaaaaaaaaaaaaaaaaaaaaaaaaaaaaaugcaucccccccccccccccccccccccccccccccaaaggcucuuuucagagccaccagaauu

SEQ ID NO: 6510 - RNA, 1885 nt, Artificial Sequence
  mRNA product Design b-4 comprising derived and/or modified sequence from HRSV(A2)__F-del_DSCav1_mut6 (opt4)
gggagagucccgcagucggcguccagcggcucugcuuguucgugugugugucguugcaggccuuauucaagcuuaccauggagcugcugauccugaaggccaacgccaucaccaccauccugaccgccgugaccuucugcuucgccagcggccagaacaucaccgaggaguucuaccagagcaccugcagcgccgugagcaagggcuaccugggcgcccugagaaccggcugguacaccagcgugaucaccaucgagcugagcaacaucaaggagaacaagugcaacggcaccgacgccaaggugaagcugaucaagcaggagcuggacaaguacaagaacgccgugaccgaccugcagaugcugaugugcagcacccccgccaccggcagcggcagcgccaucgccagcggcguggccgugugcaaggugcugcaccuggagggcgaggugaacaagaucaagagcgcccugcugagcaccaacaaggccguggugagccugagcaacggcgugagcgugcugaccuucaaggugcuggaccugaagaacuacaucgacaagcagcugcugcccauccugaacaagcagagcugcagcauccccaaccccgagaccgugauggaguuccagcagaagaacaacagacugcuggagaucaccagagaguucagcgugaacgccggcgugaccacccccgugagcaccuacaugcugaccaacagcgagcugcugagccugaucaacgacaugcccaucaccaacgaccagaagaagcugaugagcaacaacgugcagaucgugagacagcagagcuacagcaucaugugcaucaucaaggaggaggugcuggccuacguggugcagcugccccuguacggcgugaucgacacccccugcuggaagcugcacaccagcccccugugcaccaccaacaccaaggagggcagcaacaucugccugaccagaaccgacagaggcugguacugcgacaacgccggcagcgugagcuucuucccccaggccgagaccugcaaggugugcagcaacagaguguucugcgacaccaugaacagccugacccugcccagcgaggugaaccugugcaacguggacaucuucaaccccaaguacgacugcaagaucaugaccagcaagaccgacgugagcagcagcgugaucaccagccugggcgccaucgugagcugcuacggcaagaccaagugcaccgccagcaacaagaacaagggcaucaucaagaccuucagcaacggcugcgacuacgugagcaacaagggcguggacaccgugagcgugggcaacacccuguacuacgugaacaagcaggagggccagagccuguacgugaagggcgagcccaucaucaacuucuacgacccccugguguuccccagcgacgaguucgacgccagcaucagccaggugaacgagaagaucaaccagagccuggccuucaucagaaagagcgacgagcugcugcacaacgugaacgccggcaagagcaccaccaacaucaugaucaccaccaucaucaucgugaucaucgugauccugcugagccugaucgccgugggccugcugcuguacugcaaggccagaugaggacuaguaauaaggaaacuguaugaaugucugugggcaggaagugaagagauccuucuguaaagguuuuuggaauuaugucugcugaauaauaaacuuuuuugaaauaauaaaucugguagaaaaaugagaucuaaaaaaaaaaaaaaaaaaaaaaaaaaaaaaaaaaaaaaaaaaaaaaaaaaaaaaaaaaaaaaaaugcaucccccccccccccccccccccccccccccccaaaggcucuuuucagagccaccagaauu

SEQ ID NO: 6511 - RNA, 1885 nt, Artificial Sequence
  mRNA product Design b-4 comprising derived and/or modified sequence from HRSV(A2)__F-del_DSCav1_mut6 (opt5)
gggagagucccgcagucggcguccagcggcucugcuuguucgugugugugucguugcaggccuuauucaagcuuaccauggagcugcucauccugaaggccaacgcuauuaccacaauccuuacggccgugaccuucugcuuugcgagcggccagaauauuacagaagaguucuaccaauccaccuguucugcugucagcaaaggguaucugggagcccucagaacaggcugguacaccuccguuaucacaauugaacugucuaacaucaaggagaauaaaugcaacgggaccgacgccaaggugaaacuuaucaagcaggaacuggauaaguauaaaaaugcugugacggaccuccagaugcugauguguagcacccccgccacaggauccggcucugcuauugccagcggggucgcggugugcaagguucugcaccucgagggagaggugaacaaaaucaaguccgcccugcuuagcaccaauaaagcugucgugucucuguccaacggcguuagcgugcucacauuuaagguccuggaucuuaagaauuacauugacaaacagcugcucccuauccugaacaagcaaucuuguuccauuccgaaucccgaaaccgugauggaguuccagcagaaaaacaaucggcugcucgaaaucacgcgcgaguuuagcgugaacgccggcgucacaaccccuguuucuacauauaugcugaccaauuccgagcuucugagccucauuaacgauaugcccaucaccaacgaccagaagaaacugauguccaauaacgugcaaaucgugagacagcagucuuacagcauuaugugcaucauuaaggaagagguccuugcuuaugugguucagcugccucucuacggggugaucgauacacccuguuggaaacugcauacguccccucugugcaccacaaauaccaaggaaggaagcaacauuugucucacacggaccgaccgcggcugguacugcgauaaugccgggucugucuccuucuuuccgcaagcggagacguguaaggugugcagcaacagaguuuucugcgacacaaugaacucucugacccuucccagcgaagugaaucuguguaaugucgauaucuuuaacccuaaauaugacugcaagaucaugaccuccaaaacagaugugucuagcuccgucauuaccagccucggagccaucgugucuuguuacggcaagacaaaaugcacggcuuccaauaagaacaaggggauuaucaaaaccuucagcaauggaugugacuauguuucuaacaagggcguggacacagucuccgugggcaauacccuguacuauguuaacaaacaggaggggcagagccuuuacgugaagggagagcccauuaucaacuuuuaugauccucuggucuuccccuccgacgaauuugaugccucuaucagccaagugaaugagaaaauuaaccagucccucgcuuucauccggaagucugacgaacugcugcacaaugugaacgccggcaagagcacaaccaauauuaugaucacgaccauuaucauuguuaucaucgucauucuccugucccuuaucgccguggggcugcuccuguacugcaaagcucgcugaggacuaguaauaaggaaacuguaugaaugucugugggcaggaagugaagagauccuucuguaaagguuuuuggaauuaugucugcugaauaauaaacuuuuuugaaauaauaaaucugguagaaaaaugagaucuaaaaaaaaaaaaaaaaaaaaaaaaaaaaaaaaaaaaaaaaaaaaaaaaaaaaaaaaaaaaaaaaugcaucccccccccccccccccccccccccccccccaaaggcucuuuucagagccaccagaauu

SEQ ID NO: 6512 - RNA, 1885 nt, Artificial Sequence
  mRNA product Design b-4 comprising derived and/or modified sequence from HRSV(A2)__F-del_DSCav1_mut6 (opt6)
gggagagucccgcagucggcguccagcggcucugcuuguucgugugugugucguugcaggccuuauucaagcuuaccauggaacuacucauauuaaaagcaaacgcaauaacaacgauauuaacagcuguaacauucugcuuugcaucaggccaaaauaucaccgaagaauuuuaucaaagcacaugcucugcaguauccaaaggauacuuaggagcauuaagaacaggcugguacacauccguaauaacaauagaacuaucaaacaucaaagaaaacaaaugcaacggcacagacgccaaaguaaaacucauaaaacaagaacuagacaaauauaaaaacgcaguaacagaucuacaaaugcucaugugcuccacaccagcaaccggaucugguucagccauagcauccggcguagccgucugcaaaguauuacaccucgaaggagaaguaaacaaaauaaaaucugcccuauuaucuacaaauaaagccguaguaagucuaaguaacggaguaucaguacuaacauuuaaaguccuagaccugaaaaacuauaucgacaaacaacuauuaccaauacuaaacaaacaauccuguuccaucccuaacccagaaacaguuauggaauuucaacaaaaaaauaaccgccuuuuagaaauaacuagagaauuuucaguaaacgcaggaguuacaacaccaguaucaacauacaugcuaacaaauucagaauuauuaucccuuauaaaugacaugccuaucacaaacgaucaaaaaaaauuaauguccaacaacguacaaauaguaagacaacaaucauauuccaucaugugcaucauaaaagaagaaguccucgcauacguagugcaacuaccacuauacggagucauagauacacccuguuggaaacuucacacaucuccacuaugcacaacaaacacgaaagaaggauccaacauaugccuaacacgaacagacagaggaugguauugcgacaacgcuggaagugugagcuucuucccucaagcagaaacuugcaaaguaugcagcaaucguguauucugcgacacaaugaacucauuaacacucccaagcgaaguaaaccucugcaauguagacaucuuuaauccaaaauacgauuguaaaauaaugacuucaaaaacagacgucucaucaucuguaauaacaucuuuaggagcaauaguuucuugcuacgguaaaacaaaaugcaccgcauccaacaaaaacaaaggaauaauaaaaacauucucuaacggcugcgauuacguaucuaacaaaggaguugacacagucucaguaggaaacacacuauacuacguaaacaaacaagaaggacaaagccuauacguaaaaggagaaccaauaauaaacuucuaugacccauuaguauuuccaagcgaugaauuugacgcuucaauaucacaagucaaugaaaaaauaaaucagagcuuagcauucauaagaaaaucugaugaacuacuacacaauguaaaugcaggaaaauccacuaccaacauaaugauuaccacaauuauaauaguuaucauaguaauacuauuaucacuaauagccguuggauuacuacuauacugcaaagcaagauaaggacuaguaauaaggaaacuguaugaaugucugugggcaggaagugaagagauccuucuguaaagguuuuuggaauuaugucugcugaauaauaaacuuuuuugaaauaauaaaucugguagaaaaaugagaucuaaaaaaaaaaaaaaaaaaaaaaaaaaaaaaaaaaaaaaaaaaaaaaaaaaaaaaaaaaaaaaaaugcaucccccccccccccccccccccccccccccccaaaggcucuuuucagagccaccagaauu

SEQ ID NO: 6513 - RNA, 1885 nt, Artificial Sequence
  mRNA product Design b-4 comprising derived and/or modified sequence from HRSV(A2)__F-del_DSCav1_mut6 (opt11)
gggagagucccgcagucggcguccagcggcucugcuuguucgugugugugucguugcaggccuuauucaagcuuaccauggaacuacucauccuaaaagcaaacgccaucaccaccauacuaaccgccgucaccuucugcuucgccucgggacaaaacaucaccgaagaguucuaccagucaacgugcuccgccgucucaaaaggcuaccuaggcgcccuccgcaccgggugguauaccuccgucauaacuaucgaacucucuaacaucaaagaaaacaaauguaacggcaccgacgccaaagucaaacuaaucaaacaagaacuggacaaauacaaaaacgccgucaccgaccuacaaaugcucaugugcuccacuccagccaccggcuccgguagcgcaaucgccucaggcguagcuguaugcaaaguccuccaccuagaaggcgaaguaaacaaaauaaaauccgcccuccucucaaccaacaaggccgucgucucacucucaaacggcgucuccguacucaccuuuaaaguccuagaccuuaaaaacuacaucgacaaacaacugcuaccaauccucaacaaacaaucaugcagcaucccaaacccggaaacagucauggaguuccaacagaaaaacaaccgacuccucgaaaucacccgcgaguucuccgucaacgccggagucaccacaccuguaagcacauacaugcuuacuaauuccgaacuccuuucacuaauaaacgacaugccaauaaccaacgaccaaaagaaacucauguccaacaacguacaaaucguacgccaacaauccuacuccaucaugugcaucaucaaagaagaaguccuggccuaugucguacaacucccccuuuacggugucaucgacacacccugcuggaaacuacacaccagcccccucugcacaacaaacaccaaagaaggcuccaacaucugccucacccguaccgaccgaggcugguacugcgacaacgccggcuccgucuccuucuucccccaagccgaaaccugcaaagucugcagcaaccgcgucuucugcgauaccaugaacucccucacacucccaucugaagucaaccucugcaacgucgauauuuucaauccaaaauacgacugcaaaaucaugacuagcaaaaccgacguuagcuccuccgucaucaccucccucggcgccauaguuucaugcuacggcaaaaccaaaugcaccgccuccaacaaaaacaaaggcaucauaaaaaccuucuccaacgggugcgacuacguaucuaauaaaggagucgacaccgucucaguaggaaacacccucuacuaugucaacaaacaagaaggccaaucacuauacguuaaaggcgaaccaaucaucaacuucuacgacccacucgucuuccccagcgacgaguuugacgccucaaucucgcaagucaaugaaaagauuaaccaaucccuagccuucauccgaaaaagugacgaacuccuccacaacguuaacgccggcaaaucuacaaccaacaucaugaucaccacuauaaucaucgucaucauagucauacuucucagccucaucgcagucggacuccuccuuuauugcaaggcacgauaaggacuaguaauaaggaaacuguaugaaugucugugggcaggaagugaagagauccuucuguaaagguuuuuggaauuaugucugcugaauaauaaacuuuuuugaaauaauaaaucugguagaaaaaugagaucuaaaaaaaaaaaaaaaaaaaaaaaaaaaaaaaaaaaaaaaaaaaaaaaaaaaaaaaaaaaaaaaaugcaucccccccccccccccccccccccccccccccaaaggcucuuuucagagccaccagaauu

SEQ ID NO: 6514 - RNA, 1947 nt, Artificial Sequence
  mRNA product Design b-5 comprising derived and/or modified sequence from HRSV(A2)__F-del_DSCav1_mut6 (opt1)
gggagacuccugucgggcggaaguaggaggaguagaguuuaaaaacaguacucuuuuuccgguucgggacguaguugaagcaacgacaagccggauaaccgcucuugagacaggaagcuuaccauggagcugcucauccugaaggccaacgccaucaccaccauccugacggcggugaccuucugcuucgccagcggccagaacaucaccgaggaguucuaccaguccacgugcagcgccgucuccaagggguaccucggcgcccugcggaccggcugguacaccuccgugaucaccaucgagcugagcaacaucaaggagaacaagugcaacgggaccgacgccaaggugaagcucaucaagcaggagcuggacaaguacaagaacgcggucacggaccugcagaugcugaugugcuccaccccggcaaccggcuccggcuccgccaucgcgagcggcgucgccgugugcaaggugcugcaccucgagggggaggucaacaagaucaagagcgcccugcuguccaccaacaaggccguggugagccucuccaacggcgucagcgugcugaccuucaaggugcuggaccucaagaacuacaucgacaagcagcugcugcccauccugaacaagcagagcugcuccauccccaaccccgagacggugauggaguuccagcagaagaacaaccggcuccuggagaucacccgcgaguucagcgugaacgccggggucaccacccccguguccacguacaugcugaccaacagcgagcuccugucccugaucaacgacaugccgaucaccaacgaccagaagaagcucaugagcaacaacgugcagaucguccggcagcaguccuacagcaucaugugcaucaucaaggaggaggugcuggcguacgugguccagcugccccucuacggcgugaucgacacccccugcuggaagcugcacacgagcccccugugcaccaccaacaccaaggagggguccaacaucugccucacgcgcaccgaccggggcugguacugcgacaacgccggcagcgucuccuucuucccgcaggccgagaccugcaaggugugcagcaaccgcguguucugcgacaccaugaacucccugacgcugcccagcgagguaaaccucugcaacgucgacaucuucaaccccaaguacgacugcaagaucaugaccuccaagaccgacgugagcuccagcgugaucaccucccugggggccaucgucagcugcuacggcaagacgaagugcaccgccagcaacaagaacaaggggaucaucaagaccuucuccaacggcugcgacuacgugagcaacaagggcguggacaccguguccgucgggaacacccuguacuacgugaacaagcaggagggccagagccucuacgugaagggggagcccaucaucaacuucuacgacccgcuggucuuccccuccgacgaguucgacgcgagcaucucccaggugaacgagaagaucaaccagagccuggccuucauccgcaaguccgacgagcugcuccacaacgugaacgccggcaagagcacgaccaacaucaugaucaccaccaucaucaucgucaucaucgugauccugcugucccucaucgccguggggcugcugcucuacugcaaggcccggugaggacuaguacuggcugcaucucccuuuccucuguccuccauccuucucccaggauggugaagggggaccugguacccagugauccccaccccaggauccuaaaucaugacuuaccugcuaauaaaaacucauuggaaaagugagaagaucuaaaaaaaaaaaaaaaaaaaaaaaaaaaaaaaaaaaaaaaaaaaaaaaaaaaaaaaaaaaaaaaaugcaucccccccccccccccccccccccccccccccaaaggcucuuuucagagccaccagaauu

SEQ ID NO: 6515 - RNA, 1947 nt, Artificial Sequence
  mRNA product Design b-5 comprising derived and/or modified sequence from HRSV(A2)__F-del_DSCav1_mut6 (opt1)
gggagacuccugucgggcggaaguaggaggaguagaguuuaaaaacaguacucuuuuuccgguucgggacguaguugaagcaacgacaagccggauaaccgcucuugagacaggaagcuuaccauggagcugcucauccugaaggccaacgccaucaccaccauccugacggcggugaccuucugcuucgccagcggccagaacaucaccgaggaguucuaccaguccacgugcagcgccgucuccaagggguaccucggcgcccugcgcaccgggugguacaccagcgugaucaccaucgagcuguccaacaucaaggagaacaagugcaacggcaccgacgccaaggugaagcucaucaagcaggagcuggacaaguacaagaacgcggucacggaccugcagaugcucaugugcagcacccccgccaccggguccggcagcgccaucgccuccggcguggcggugugcaagguccugcaccuggagggggaggugaacaagaucaagagcgcccuccuguccaccaacaaggccguggucagccuguccaacggcgugagcgugcucacguucaagguccuggaccugaagaacuacaucgacaagcagcuccugccgauccugaacaagcaguccugcagcauccccaaccccgagaccgugauggaguuccagcagaagaacaaccggcuccuggagaucacccgcgaguucuccgugaacgccggggucaccacgcccgugagcaccuacaugcugaccaacuccgagcuccugagccugaucaacgacaugccgaucaccaacgaccagaagaagcucaugagcaacaacgugcagaucguccggcagcaguccuacagcaucaugugcaucaucaaggaggaggugcuggccuacgugguccagcugccccucuacggcgugaucgacacgcccugcuggaagcugcacaccagcccccugugcaccaccaacacgaaggaggggagcaacaucugccucacccgcaccgaccggggcugguacugcgacaacgcgggcuccgugagcuucuucccgcaggccgagaccugcaaggucugcuccaaccgcguguucugcgacacgaugaacagccugacccugcccuccgaggucaaccucugcaacguggacaucuucaaccccaaguacgacugcaagaucaugaccagcaagaccgacguguccagcuccgucaucacgagccugggggccaucguguccugcuacggcaagaccaagugcaccgccagcaacaagaacaaggggaucaucaagaccuucuccaacggcugcgacuacgugagcaacaagggcgucgacacgguguccguggggaacacccuguacuacgucaacaagcaggagggccagagccucuacgugaagggggagcccaucaucaacuucuacgacccgcugguguuccccagcgacgaguucgacgccuccaucagccaggucaacgagaagaucaaccagucccuggcguucauccggaaguccgacgagcuccugcacaacgugaacgccggcaaguccaccaccaacaucaugaucaccacgaucaucaucgugaucaucgucauccugcucagccugaucgccguggggcugcuccuguacugcaaggcccgcugaggacuaguacuggcugcaucucccuuuccucuguccuccauccuucucccaggauggugaagggggaccugguacccagugauccccaccccaggauccuaaaucaugacuuaccugcuaauaaaaacucauuggaaaagugagaagaucuaaaaaaaaaaaaaaaaaaaaaaaaaaaaaaaaaaaaaaaaaaaaaaaaaaaaaaaaaaaaaaaaugcaucccccccccccccccccccccccccccccccaaaggcucuuuucagagccaccagaauu

SEQ ID NO: 6516 - RNA, 1947 nt, Artificial Sequence
  mRNA product Design b-5 comprising derived and/or modified sequence from HRSV(A2)__F-del_DSCav1_mut6 (opt2)
gggagacuccugucgggcggaaguaggaggaguagaguuuaaaaacaguacucuuuuuccgguucgggacguaguugaagcaacgacaagccggauaaccgcucuugagacaggaagcuuaccauggagcuccucauccucaaggccaacgccaucaccaccauccucaccgccgucaccuucugcuucgccuccggccagaacaucaccgaggaguucuaccaguccaccugcuccgccgucuccaagggcuaccucggcgcccuccgcaccggcugguacaccuccgucaucaccaucgagcucuccaacaucaaggagaacaagugcaacggcaccgacgccaaggucaagcucaucaagcaggagcucgacaaguacaagaacgccgucaccgaccuccagaugcucaugugcuccacccccgccaccggcuccggcuccgccaucgccuccggcgucgccgucugcaagguccuccaccucgagggcgaggucaacaagaucaaguccgcccuccucuccaccaacaaggccgucgucucccucuccaacggcgucuccguccucaccuucaagguccucgaccucaagaacuacaucgacaagcagcuccuccccauccucaacaagcaguccugcuccauccccaaccccgagaccgucauggaguuccagcagaagaacaaccgccuccucgagaucacccgcgaguucuccgucaacgccggcgucaccacccccgucuccaccuacaugcucaccaacuccgagcuccucucccucaucaacgacaugcccaucaccaacgaccagaagaagcucauguccaacaacguccagaucguccgccagcaguccuacuccaucaugugcaucaucaaggaggagguccucgccuacgucguccagcucccccucuacggcgucaucgacacccccugcuggaagcuccacaccuccccccucugcaccaccaacaccaaggagggcuccaacaucugccucacccgcaccgaccgcggcugguacugcgacaacgccggcuccgucuccuucuucccccaggccgagaccugcaaggucugcuccaaccgcgucuucugcgacaccaugaacucccucacccuccccuccgaggucaaccucugcaacgucgacaucuucaaccccaaguacgacugcaagaucaugaccuccaagaccgacgucuccuccuccgucaucaccucccucggcgccaucgucuccugcuacggcaagaccaagugcaccgccuccaacaagaacaagggcaucaucaagaccuucuccaacggcugcgacuacgucuccaacaagggcgucgacaccgucuccgucggcaacacccucuacuacgucaacaagcaggagggccagucccucuacgucaagggcgagcccaucaucaacuucuacgacccccucgucuuccccuccgacgaguucgacgccuccaucucccaggucaacgagaagaucaaccagucccucgccuucauccgcaaguccgacgagcuccuccacaacgucaacgccggcaaguccaccaccaacaucaugaucaccaccaucaucaucgucaucaucgucauccuccucucccucaucgccgucggccuccuccucuacugcaaggcccgcugaggacuaguacuggcugcaucucccuuuccucuguccuccauccuucucccaggauggugaagggggaccugguacccagugauccccaccccaggauccuaaaucaugacuuaccugcuaauaaaaacucauuggaaaagugagaagaucuaaaaaaaaaaaaaaaaaaaaaaaaaaaaaaaaaaaaaaaaaaaaaaaaaaaaaaaaaaaaaaaaugcaucccccccccccccccccccccccccccccccaaaggcucuuuucagagccaccagaauu

SEQ ID NO: 6517 - RNA, 1947 nt, Artificial Sequence
  mRNA product Design b-5 comprising derived and/or modified sequence from HRSV(A2)__F-del_DSCav1_mut6 (opt3)
gggagacuccugucgggcggaaguaggaggaguagaguuuaaaaacaguacucuuuuuccgguucgggacguaguugaagcaacgacaagccggauaaccgcucuugagacaggaagcuuaccauggagcugcucauccuuaaggccaacgcuauuaccacaauacugacugcagugacguucugcuuugccagcggccagaauaucaccgaagaguucuaccaauccacauguucugcggucucaaaaggguauuugggagcuuuaagaacugguugguacaccaguguuauuacaaucgaacugagcaacauuaaggagaauaaaugcaacggcaccgacgccaaggugaaacuaaucaagcaggaacucgauaaguauaaaaaugcaguaacugaccugcagaugcuuauguguuccacacccgccaccgggucuggaucggcuauagcaucaggcguggccgucugcaaggugcugcacuuggagggugagguuaacaaaaucaagagcgcucuccugaguacgaauaaagccguggucucccugucuaacggggugagcguacucacuuuuaagguuuuagaucugaagaauuacauugacaaacagcuuuugccuauccugaacaagcaauccuguucaauuccaaauccggaaaccgugauggaguuccagcagaaaaacaauaggcuacucgaaaucacacgggaguuuagugucaacgcgggagugacuacccccgugagcacauauaugcugaccaauucugagcuucuguccuugauaaacgauaugccuauuacgaacgaccagaagaaacucaugucaaauaacguccaaaucguucgccagcagagcuacaguauuaugugcaucaucaaggaagaggugcuggcauauguagugcaguuaccacuguacggcgucauugauacucccuguuggaaacuccauacaucuccucuuugcaccacuaauacaaaggaaggcuccaacauaugucugacccgaacggaccgugggugguacugcgauaaugccggaagcgugucguucuuuccacaagcugagaccuguaagguuugcucuaacagaguguucugcgacacaaugaacuccuugacucuacccucagaagucaaucuguguaauguggauaucuuuaacccuaaauaugacugcaagauuaugaccaguaaaacagauguaagcuccucuguuaucacuagccucggugccauagugucauguuacggcaagaccaaaugcacagcaaguaauaagaacaaggggauuaucaaaaccuucuccaauggaugugacuaugucagcaacaagggcguggacacugucucuguggguaauacgcuguacuauguuaacaaacaggaggggcagucacuuuacgugaagggagagccaaucauuaacuuuuaugauccgcugguauuccccagugacgaauuugaugcuagcaucucccaagucaaugagaaaauuaaccagucuuuggccuucauaaggaagucggacgaacuccugcacaaugugaacgcgggcaagagcacaaccaauaucaugauuacuaccaucaucauuguuauaaucgugauuuuacugucccuaaucgccgucggccuccugcuuuacugcaaagcacggugaggacuaguacuggcugcaucucccuuuccucuguccuccauccuucucccaggauggugaagggggaccugguacccagugauccccaccccaggauccuaaaucaugacuuaccugcuaauaaaaacucauuggaaaagugagaagaucuaaaaaaaaaaaaaaaaaaaaaaaaaaaaaaaaaaaaaaaaaaaaaaaaaaaaaaaaaaaaaaaaugcaucccccccccccccccccccccccccccccccaaaggcucuuuucagagccaccagaauu

SEQ ID NO: 6518 - RNA, 1947 nt, Artificial Sequence
  mRNA product Design b-5 comprising derived and/or modified sequence from HRSV(A2)__F-del_DSCav1_mut6 (opt4)
gggagacuccugucgggcggaaguaggaggaguagaguuuaaaaacaguacucuuuuuccgguucgggacguaguugaagcaacgacaagccggauaaccgcucuugagacaggaagcuuaccauggagcugcugauccugaaggccaacgccaucaccaccauccugaccgccgugaccuucugcuucgccagcggccagaacaucaccgaggaguucuaccagagcaccugcagcgccgugagcaagggcuaccugggcgcccugagaaccggcugguacaccagcgugaucaccaucgagcugagcaacaucaaggagaacaagugcaacggcaccgacgccaaggugaagcugaucaagcaggagcuggacaaguacaagaacgccgugaccgaccugcagaugcugaugugcagcacccccgccaccggcagcggcagcgccaucgccagcggcguggccgugugcaaggugcugcaccuggagggcgaggugaacaagaucaagagcgcccugcugagcaccaacaaggccguggugagccugagcaacggcgugagcgugcugaccuucaaggugcuggaccugaagaacuacaucgacaagcagcugcugcccauccugaacaagcagagcugcagcauccccaaccccgagaccgugauggaguuccagcagaagaacaacagacugcuggagaucaccagagaguucagcgugaacgccggcgugaccacccccgugagcaccuacaugcugaccaacagcgagcugcugagccugaucaacgacaugcccaucaccaacgaccagaagaagcugaugagcaacaacgugcagaucgugagacagcagagcuacagcaucaugugcaucaucaaggaggaggugcuggccuacguggugcagcugccccuguacggcgugaucgacacccccugcuggaagcugcacaccagcccccugugcaccaccaacaccaaggagggcagcaacaucugccugaccagaaccgacagaggcugguacugcgacaacgccggcagcgugagcuucuucccccaggccgagaccugcaaggugugcagcaacagaguguucugcgacaccaugaacagccugacccugcccagcgaggugaaccugugcaacguggacaucuucaaccccaaguacgacugcaagaucaugaccagcaagaccgacgugagcagcagcgugaucaccagccugggcgccaucgugagcugcuacggcaagaccaagugcaccgccagcaacaagaacaagggcaucaucaagaccuucagcaacggcugcgacuacgugagcaacaagggcguggacaccgugagcgugggcaacacccuguacuacgugaacaagcaggagggccagagccuguacgugaagggcgagcccaucaucaacuucuacgacccccugguguuccccagcgacgaguucgacgccagcaucagccaggugaacgagaagaucaaccagagccuggccuucaucagaaagagcgacgagcugcugcacaacgugaacgccggcaagagcaccaccaacaucaugaucaccaccaucaucaucgugaucaucgugauccugcugagccugaucgccgugggccugcugcuguacugcaaggccagaugaggacuaguacuggcugcaucucccuuuccucuguccuccauccuucucccaggauggugaagggggaccugguacccagugauccccaccccaggauccuaaaucaugacuuaccugcuaauaaaaacucauuggaaaagugagaagaucuaaaaaaaaaaaaaaaaaaaaaaaaaaaaaaaaaaaaaaaaaaaaaaaaaaaaaaaaaaaaaaaaugcaucccccccccccccccccccccccccccccccaaaggcucuuuucagagccaccagaauu

SEQ ID NO: 6519 - RNA, 1947 nt, Artificial Sequence
  mRNA product Design b-5 comprising derived and/or modified sequence from HRSV(A2)__F-del_DSCav1_mut6 (opt5)
gggagacuccugucgggcggaaguaggaggaguagaguuuaaaaacaguacucuuuuuccgguucgggacguaguugaagcaacgacaagccggauaaccgcucuugagacaggaagcuuaccauggagcugcucauccugaaggccaacgcuauuaccacaauccuuacggccgugaccuucugcuuugcgagcggccagaauauuacagaagaguucuaccaauccaccuguucugcugucagcaaaggguaucugggagcccucagaacaggcugguacaccuccguuaucacaauugaacugucuaacaucaaggagaauaaaugcaacgggaccgacgccaaggugaaacuuaucaagcaggaacuggauaaguauaaaaaugcugugacggaccuccagaugcugauguguagcacccccgccacaggauccggcucugcuauugccagcggggucgcggugugcaagguucugcaccucgagggagaggugaacaaaaucaaguccgcccugcuuagcaccaauaaagcugucgugucucuguccaacggcguuagcgugcucacauuuaagguccuggaucuuaagaauuacauugacaaacagcugcucccuauccugaacaagcaaucuuguuccauuccgaaucccgaaaccgugauggaguuccagcagaaaaacaaucggcugcucgaaaucacgcgcgaguuuagcgugaacgccggcgucacaaccccuguuucuacauauaugcugaccaauuccgagcuucugagccucauuaacgauaugcccaucaccaacgaccagaagaaacugauguccaauaacgugcaaaucgugagacagcagucuuacagcauuaugugcaucauuaaggaagagguccuugcuuaugugguucagcugccucucuacggggugaucgauacacccuguuggaaacugcauacguccccucugugcaccacaaauaccaaggaaggaagcaacauuugucucacacggaccgaccgcggcugguacugcgauaaugccgggucugucuccuucuuuccgcaagcggagacguguaaggugugcagcaacagaguuuucugcgacacaaugaacucucugacccuucccagcgaagugaaucuguguaaugucgauaucuuuaacccuaaauaugacugcaagaucaugaccuccaaaacagaugugucuagcuccgucauuaccagccucggagccaucgugucuuguuacggcaagacaaaaugcacggcuuccaauaagaacaaggggauuaucaaaaccuucagcaauggaugugacuauguuucuaacaagggcguggacacagucuccgugggcaauacccuguacuauguuaacaaacaggaggggcagagccuuuacgugaagggagagcccauuaucaacuuuuaugauccucuggucuuccccuccgacgaauuugaugccucuaucagccaagugaaugagaaaauuaaccagucccucgcuuucauccggaagucugacgaacugcugcacaaugugaacgccggcaagagcacaaccaauauuaugaucacgaccauuaucauuguuaucaucgucauucuccugucccuuaucgccguggggcugcuccuguacugcaaagcucgcugaggacuaguacuggcugcaucucccuuuccucuguccuccauccuucucccaggauggugaagggggaccugguacccagugauccccaccccaggauccuaaaucaugacuuaccugcuaauaaaaacucauuggaaaagugagaagaucuaaaaaaaaaaaaaaaaaaaaaaaaaaaaaaaaaaaaaaaaaaaaaaaaaaaaaaaaaaaaaaaaugcaucccccccccccccccccccccccccccccccaaaggcucuuuucagagccaccagaauu

SEQ ID NO: 6520 - RNA, 1947 nt, Artificial Sequence
  mRNA product Design b-5 comprising derived and/or modified sequence from HRSV(A2)__F-del_DSCav1_mut6 (opt6)
gggagacuccugucgggcggaaguaggaggaguagaguuuaaaaacaguacucuuuuuccgguucgggacguaguugaagcaacgacaagccggauaaccgcucuugagacaggaagcuuaccauggaacuacucauauuaaaagcaaacgcaauaacaacgauauuaacagcuguaacauucugcuuugcaucaggccaaaauaucaccgaagaauuuuaucaaagcacaugcucugcaguauccaaaggauacuuaggagcauuaagaacaggcugguacacauccguaauaacaauagaacuaucaaacaucaaagaaaacaaaugcaacggcacagacgccaaaguaaaacucauaaaacaagaacuagacaaauauaaaaacgcaguaacagaucuacaaaugcucaugugcuccacaccagcaaccggaucugguucagccauagcauccggcguagccgucugcaaaguauuacaccucgaaggagaaguaaacaaaauaaaaucugcccuauuaucuacaaauaaagccguaguaagucuaaguaacggaguaucaguacuaacauuuaaaguccuagaccugaaaaacuauaucgacaaacaacuauuaccaauacuaaacaaacaauccuguuccaucccuaacccagaaacaguuauggaauuucaacaaaaaaauaaccgccuuuuagaaauaacuagagaauuuucaguaaacgcaggaguuacaacaccaguaucaacauacaugcuaacaaauucagaauuauuaucccuuauaaaugacaugccuaucacaaacgaucaaaaaaaauuaauguccaacaacguacaaauaguaagacaacaaucauauuccaucaugugcaucauaaaagaagaaguccucgcauacguagugcaacuaccacuauacggagucauagauacacccuguuggaaacuucacacaucuccacuaugcacaacaaacacgaaagaaggauccaacauaugccuaacacgaacagacagaggaugguauugcgacaacgcuggaagugugagcuucuucccucaagcagaaacuugcaaaguaugcagcaaucguguauucugcgacacaaugaacucauuaacacucccaagcgaaguaaaccucugcaauguagacaucuuuaauccaaaauacgauuguaaaauaaugacuucaaaaacagacgucucaucaucuguaauaacaucuuuaggagcaauaguuucuugcuacgguaaaacaaaaugcaccgcauccaacaaaaacaaaggaauaauaaaaacauucucuaacggcugcgauuacguaucuaacaaaggaguugacacagucucaguaggaaacacacuauacuacguaaacaaacaagaaggacaaagccuauacguaaaaggagaaccaauaauaaacuucuaugacccauuaguauuuccaagcgaugaauuugacgcuucaauaucacaagucaaugaaaaaauaaaucagagcuuagcauucauaagaaaaucugaugaacuacuacacaauguaaaugcaggaaaauccacuaccaacauaaugauuaccacaauuauaauaguuaucauaguaauacuauuaucacuaauagccguuggauuacuacuauacugcaaagcaagauaaggacuaguacuggcugcaucucccuuuccucuguccuccauccuucucccaggauggugaagggggaccugguacccagugauccccaccccaggauccuaaaucaugacuuaccugcuaauaaaaacucauuggaaaagugagaagaucuaaaaaaaaaaaaaaaaaaaaaaaaaaaaaaaaaaaaaaaaaaaaaaaaaaaaaaaaaaaaaaaaugcaucccccccccccccccccccccccccccccccaaaggcucuuuucagagccaccagaauu

SEQ ID NO: 6521 - RNA, 1947 nt, Artificial Sequence
  mRNA product Design b-5 comprising derived and/or modified sequence from HRSV(A2)__F-del_DSCav1_mut6 (opt11)
gggagacuccugucgggcggaaguaggaggaguagaguuuaaaaacaguacucuuuuuccgguucgggacguaguugaagcaacgacaagccggauaaccgcucuugagacaggaagcuuaccauggaacuacucauccuaaaagcaaacgccaucaccaccauacuaaccgccgucaccuucugcuucgccucgggacaaaacaucaccgaagaguucuaccagucaacgugcuccgccgucucaaaaggcuaccuaggcgcccuccgcaccgggugguauaccuccgucauaacuaucgaacucucuaacaucaaagaaaacaaauguaacggcaccgacgccaaagucaaacuaaucaaacaagaacuggacaaauacaaaaacgccgucaccgaccuacaaaugcucaugugcuccacuccagccaccggcuccgguagcgcaaucgccucaggcguagcuguaugcaaaguccuccaccuagaaggcgaaguaaacaaaauaaaauccgcccuccucucaaccaacaaggccgucgucucacucucaaacggcgucuccguacucaccuuuaaaguccuagaccuuaaaaacuacaucgacaaacaacugcuaccaauccucaacaaacaaucaugcagcaucccaaacccggaaacagucauggaguuccaacagaaaaacaaccgacuccucgaaaucacccgcgaguucuccgucaacgccggagucaccacaccuguaagcacauacaugcuuacuaauuccgaacuccuuucacuaauaaacgacaugccaauaaccaacgaccaaaagaaacucauguccaacaacguacaaaucguacgccaacaauccuacuccaucaugugcaucaucaaagaagaaguccuggccuaugucguacaacucccccuuuacggugucaucgacacacccugcuggaaacuacacaccagcccccucugcacaacaaacaccaaagaaggcuccaacaucugccucacccguaccgaccgaggcugguacugcgacaacgccggcuccgucuccuucuucccccaagccgaaaccugcaaagucugcagcaaccgcgucuucugcgauaccaugaacucccucacacucccaucugaagucaaccucugcaacgucgauauuuucaauccaaaauacgacugcaaaaucaugacuagcaaaaccgacguuagcuccuccgucaucaccucccucggcgccauaguuucaugcuacggcaaaaccaaaugcaccgccuccaacaaaaacaaaggcaucauaaaaaccuucuccaacgggugcgacuacguaucuaauaaaggagucgacaccgucucaguaggaaacacccucuacuaugucaacaaacaagaaggccaaucacuauacguuaaaggcgaaccaaucaucaacuucuacgacccacucgucuuccccagcgacgaguuugacgccucaaucucgcaagucaaugaaaagauuaaccaaucccuagccuucauccgaaaaagugacgaacuccuccacaacguuaacgccggcaaaucuacaaccaacaucaugaucaccacuauaaucaucgucaucauagucauacuucucagccucaucgcagucggacuccuccuuuauugcaaggcacgauaaggacuaguacuggcugcaucucccuuuccucuguccuccauccuucucccaggauggugaagggggaccugguacccagugauccccaccccaggauccuaaaucaugacuuaccugcuaauaaaaacucauuggaaaagugagaagaucuaaaaaaaaaaaaaaaaaaaaaaaaaaaaaaaaaaaaaaaaaaaaaaaaaaaaaaaaaaaaaaaaugcaucccccccccccccccccccccccccccccccaaaggcucuuuucagagccaccagaauu

SEQ ID NO: 6522 - RNA, 1853 nt, Artificial Sequence
  mRNA product Design c-1 comprising derived and/or modified sequence from HRSV(A2)__F-del_DSCav1_mut6 (opt1)
gggagaguccgcucagccagguugcagaagcggcuuagcguguguccuaaucuucucucugcguguagguaggccugugccgcaaacaagcuuaccauggagcugcucauccugaaggccaacgccaucaccaccauccugacggcggugaccuucugcuucgccagcggccagaacaucaccgaggaguucuaccaguccacgugcagcgccgucuccaagggguaccucggcgcccugcggaccggcugguacaccuccgugaucaccaucgagcugagcaacaucaaggagaacaagugcaacgggaccgacgccaaggugaagcucaucaagcaggagcuggacaaguacaagaacgcggucacggaccugcagaugcugaugugcuccaccccggcaaccggcuccggcuccgccaucgcgagcggcgucgccgugugcaaggugcugcaccucgagggggaggucaacaagaucaagagcgcccugcuguccaccaacaaggccguggugagccucuccaacggcgucagcgugcugaccuucaaggugcuggaccucaagaacuacaucgacaagcagcugcugcccauccugaacaagcagagcugcuccauccccaaccccgagacggugauggaguuccagcagaagaacaaccggcuccuggagaucacccgcgaguucagcgugaacgccggggucaccacccccguguccacguacaugcugaccaacagcgagcuccugucccugaucaacgacaugccgaucaccaacgaccagaagaagcucaugagcaacaacgugcagaucguccggcagcaguccuacagcaucaugugcaucaucaaggaggaggugcuggcguacgugguccagcugccccucuacggcgugaucgacacccccugcuggaagcugcacacgagcccccugugcaccaccaacaccaaggagggguccaacaucugccucacgcgcaccgaccggggcugguacugcgacaacgccggcagcgucuccuucuucccgcaggccgagaccugcaaggugugcagcaaccgcguguucugcgacaccaugaacucccugacgcugcccagcgagguaaaccucugcaacgucgacaucuucaaccccaaguacgacugcaagaucaugaccuccaagaccgacgugagcuccagcgugaucaccucccugggggccaucgucagcugcuacggcaagacgaagugcaccgccagcaacaagaacaaggggaucaucaagaccuucuccaacggcugcgacuacgugagcaacaagggcguggacaccguguccgucgggaacacccuguacuacgugaacaagcaggagggccagagccucuacgugaagggggagcccaucaucaacuucuacgacccgcuggucuuccccuccgacgaguucgacgcgagcaucucccaggugaacgagaagaucaaccagagccuggccuucauccgcaaguccgacgagcugcuccacaacgugaacgccggcaagagcacgaccaacaucaugaucaccaccaucaucaucgucaucaucgugauccugcugucccucaucgccguggggcugcugcucuacugcaaggcccggugaggacuaguguccaccugucccuccugggcugcuggauugucucguuuuccugccaaauaaacaggaucagcgcuuuacagaucuaaaaaaaaaaaaaaaaaaaaaaaaaaaaaaaaaaaaaaaaaaaaaaaaaaaaaaaaaaaaaaaaugcaucccccccccccccccccccccccccccccccaaaggcucuuuucagagccaccagaauu

SEQ ID NO: 6523 - RNA, 1853 nt, Artificial Sequence
  mRNA product Design c-1 comprising derived and/or modified sequence from HRSV(A2)__F-del_DSCav1_mut6 (opt1)
gggagaguccgcucagccagguugcagaagcggcuuagcguguguccuaaucuucucucugcguguagguaggccugugccgcaaacaagcuuaccauggagcugcucauccugaaggccaacgccaucaccaccauccugacggcggugaccuucugcuucgccagcggccagaacaucaccgaggaguucuaccaguccacgugcagcgccgucuccaagggguaccucggcgcccugcgcaccgggugguacaccagcgugaucaccaucgagcuguccaacaucaaggagaacaagugcaacggcaccgacgccaaggugaagcucaucaagcaggagcuggacaaguacaagaacgcggucacggaccugcagaugcucaugugcagcacccccgccaccggguccggcagcgccaucgccuccggcguggcggugugcaagguccugcaccuggagggggaggugaacaagaucaagagcgcccuccuguccaccaacaaggccguggucagccuguccaacggcgugagcgugcucacguucaagguccuggaccugaagaacuacaucgacaagcagcuccugccgauccugaacaagcaguccugcagcauccccaaccccgagaccgugauggaguuccagcagaagaacaaccggcuccuggagaucacccgcgaguucuccgugaacgccggggucaccacgcccgugagcaccuacaugcugaccaacuccgagcuccugagccugaucaacgacaugccgaucaccaacgaccagaagaagcucaugagcaacaacgugcagaucguccggcagcaguccuacagcaucaugugcaucaucaaggaggaggugcuggccuacgugguccagcugccccucuacggcgugaucgacacgcccugcuggaagcugcacaccagcccccugugcaccaccaacacgaaggaggggagcaacaucugccucacccgcaccgaccggggcugguacugcgacaacgcgggcuccgugagcuucuucccgcaggccgagaccugcaaggucugcuccaaccgcguguucugcgacacgaugaacagccugacccugcccuccgaggucaaccucugcaacguggacaucuucaaccccaaguacgacugcaagaucaugaccagcaagaccgacguguccagcuccgucaucacgagccugggggccaucguguccugcuacggcaagaccaagugcaccgccagcaacaagaacaaggggaucaucaagaccuucuccaacggcugcgacuacgugagcaacaagggcgucgacacgguguccguggggaacacccuguacuacgucaacaagcaggagggccagagccucuacgugaagggggagcccaucaucaacuucuacgacccgcugguguuccccagcgacgaguucgacgccuccaucagccaggucaacgagaagaucaaccagucccuggcguucauccggaaguccgacgagcuccugcacaacgugaacgccggcaaguccaccaccaacaucaugaucaccacgaucaucaucgugaucaucgucauccugcucagccugaucgccguggggcugcuccuguacugcaaggcccgcugaggacuaguguccaccugucccuccugggcugcuggauugucucguuuuccugccaaauaaacaggaucagcgcuuuacagaucuaaaaaaaaaaaaaaaaaaaaaaaaaaaaaaaaaaaaaaaaaaaaaaaaaaaaaaaaaaaaaaaaugcaucccccccccccccccccccccccccccccccaaaggcucuuuucagagccaccagaauu

SEQ ID NO: 6524 - RNA, 1853 nt, Artificial Sequence
  mRNA product Design c-1 comprising derived and/or modified sequence from HRSV(A2)__F-del_DSCav1_mut6 (opt2)
gggagaguccgcucagccagguugcagaagcggcuuagcguguguccuaaucuucucucugcguguagguaggccugugccgcaaacaagcuuaccauggagcuccucauccucaaggccaacgccaucaccaccauccucaccgccgucaccuucugcuucgccuccggccagaacaucaccgaggaguucuaccaguccaccugcuccgccgucuccaagggcuaccucggcgcccuccgcaccggcugguacaccuccgucaucaccaucgagcucuccaacaucaaggagaacaagugcaacggcaccgacgccaaggucaagcucaucaagcaggagcucgacaaguacaagaacgccgucaccgaccuccagaugcucaugugcuccacccccgccaccggcuccggcuccgccaucgccuccggcgucgccgucugcaagguccuccaccucgagggcgaggucaacaagaucaaguccgcccuccucuccaccaacaaggccgucgucucccucuccaacggcgucuccguccucaccuucaagguccucgaccucaagaacuacaucgacaagcagcuccuccccauccucaacaagcaguccugcuccauccccaaccccgagaccgucauggaguuccagcagaagaacaaccgccuccucgagaucacccgcgaguucuccgucaacgccggcgucaccacccccgucuccaccuacaugcucaccaacuccgagcuccucucccucaucaacgacaugcccaucaccaacgaccagaagaagcucauguccaacaacguccagaucguccgccagcaguccuacuccaucaugugcaucaucaaggaggagguccucgccuacgucguccagcucccccucuacggcgucaucgacacccccugcuggaagcuccacaccuccccccucugcaccaccaacaccaaggagggcuccaacaucugccucacccgcaccgaccgcggcugguacugcgacaacgccggcuccgucuccuucuucccccaggccgagaccugcaaggucugcuccaaccgcgucuucugcgacaccaugaacucccucacccuccccuccgaggucaaccucugcaacgucgacaucuucaaccccaaguacgacugcaagaucaugaccuccaagaccgacgucuccuccuccgucaucaccucccucggcgccaucgucuccugcuacggcaagaccaagugcaccgccuccaacaagaacaagggcaucaucaagaccuucuccaacggcugcgacuacgucuccaacaagggcgucgacaccgucuccgucggcaacacccucuacuacgucaacaagcaggagggccagucccucuacgucaagggcgagcccaucaucaacuucuacgacccccucgucuuccccuccgacgaguucgacgccuccaucucccaggucaacgagaagaucaaccagucccucgccuucauccgcaaguccgacgagcuccuccacaacgucaacgccggcaaguccaccaccaacaucaugaucaccaccaucaucaucgucaucaucgucauccuccucucccucaucgccgucggccuccuccucuacugcaaggcccgcugaggacuaguguccaccugucccuccugggcugcuggauugucucguuuuccugccaaauaaacaggaucagcgcuuuacagaucuaaaaaaaaaaaaaaaaaaaaaaaaaaaaaaaaaaaaaaaaaaaaaaaaaaaaaaaaaaaaaaaaugcaucccccccccccccccccccccccccccccccaaaggcucuuuucagagccaccagaauu

SEQ ID NO: 6525 - RNA, 1853 nt, Artificial Sequence
  mRNA product Design c-1 comprising derived and/or modified sequence from HRSV(A2)__F-del_DSCav1_mut6 (opt3)
gggagaguccgcucagccagguugcagaagcggcuuagcguguguccuaaucuucucucugcguguagguaggccugugccgcaaacaagcuuaccauggagcugcucauccuuaaggccaacgcuauuaccacaauacugacugcagugacguucugcuuugccagcggccagaauaucaccgaagaguucuaccaauccacauguucugcggucucaaaaggguauuugggagcuuuaagaacugguugguacaccaguguuauuacaaucgaacugagcaacauuaaggagaauaaaugcaacggcaccgacgccaaggugaaacuaaucaagcaggaacucgauaaguauaaaaaugcaguaacugaccugcagaugcuuauguguuccacacccgccaccgggucuggaucggcuauagcaucaggcguggccgucugcaaggugcugcacuuggagggugagguuaacaaaaucaagagcgcucuccugaguacgaauaaagccguggucucccugucuaacggggugagcguacucacuuuuaagguuuuagaucugaagaauuacauugacaaacagcuuuugccuauccugaacaagcaauccuguucaauuccaaauccggaaaccgugauggaguuccagcagaaaaacaauaggcuacucgaaaucacacgggaguuuagugucaacgcgggagugacuacccccgugagcacauauaugcugaccaauucugagcuucuguccuugauaaacgauaugccuauuacgaacgaccagaagaaacucaugucaaauaacguccaaaucguucgccagcagagcuacaguauuaugugcaucaucaaggaagaggugcuggcauauguagugcaguuaccacuguacggcgucauugauacucccuguuggaaacuccauacaucuccucuuugcaccacuaauacaaaggaaggcuccaacauaugucugacccgaacggaccgugggugguacugcgauaaugccggaagcgugucguucuuuccacaagcugagaccuguaagguuugcucuaacagaguguucugcgacacaaugaacuccuugacucuacccucagaagucaaucuguguaauguggauaucuuuaacccuaaauaugacugcaagauuaugaccaguaaaacagauguaagcuccucuguuaucacuagccucggugccauagugucauguuacggcaagaccaaaugcacagcaaguaauaagaacaaggggauuaucaaaaccuucuccaauggaugugacuaugucagcaacaagggcguggacacugucucuguggguaauacgcuguacuauguuaacaaacaggaggggcagucacuuuacgugaagggagagccaaucauuaacuuuuaugauccgcugguauuccccagugacgaauuugaugcuagcaucucccaagucaaugagaaaauuaaccagucuuuggccuucauaaggaagucggacgaacuccugcacaaugugaacgcgggcaagagcacaaccaauaucaugauuacuaccaucaucauuguuauaaucgugauuuuacugucccuaaucgccgucggccuccugcuuuacugcaaagcacggugaggacuaguguccaccugucccuccugggcugcuggauugucucguuuuccugccaaauaaacaggaucagcgcuuuacagaucuaaaaaaaaaaaaaaaaaaaaaaaaaaaaaaaaaaaaaaaaaaaaaaaaaaaaaaaaaaaaaaaaugcaucccccccccccccccccccccccccccccccaaaggcucuuuucagagccaccagaauu

SEQ ID NO: 6526 - RNA, 1853 nt, Artificial Sequence
  mRNA product Design c-1 comprising derived and/or modified sequence from HRSV(A2)__F-del_DSCav1_mut6 (opt4)
gggagaguccgcucagccagguugcagaagcggcuuagcguguguccuaaucuucucucugcguguagguaggccugugccgcaaacaagcuuaccauggagcugcugauccugaaggccaacgccaucaccaccauccugaccgccgugaccuucugcuucgccagcggccagaacaucaccgaggaguucuaccagagcaccugcagcgccgugagcaagggcuaccugggcgcccugagaaccggcugguacaccagcgugaucaccaucgagcugagcaacaucaaggagaacaagugcaacggcaccgacgccaaggugaagcugaucaagcaggagcuggacaaguacaagaacgccgugaccgaccugcagaugcugaugugcagcacccccgccaccggcagcggcagcgccaucgccagcggcguggccgugugcaaggugcugcaccuggagggcgaggugaacaagaucaagagcgcccugcugagcaccaacaaggccguggugagccugagcaacggcgugagcgugcugaccuucaaggugcuggaccugaagaacuacaucgacaagcagcugcugcccauccugaacaagcagagcugcagcauccccaaccccgagaccgugauggaguuccagcagaagaacaacagacugcuggagaucaccagagaguucagcgugaacgccggcgugaccacccccgugagcaccuacaugcugaccaacagcgagcugcugagccugaucaacgacaugcccaucaccaacgaccagaagaagcugaugagcaacaacgugcagaucgugagacagcagagcuacagcaucaugugcaucaucaaggaggaggugcuggccuacguggugcagcugccccuguacggcgugaucgacacccccugcuggaagcugcacaccagcccccugugcaccaccaacaccaaggagggcagcaacaucugccugaccagaaccgacagaggcugguacugcgacaacgccggcagcgugagcuucuucccccaggccgagaccugcaaggugugcagcaacagaguguucugcgacaccaugaacagccugacccugcccagcgaggugaaccugugcaacguggacaucuucaaccccaaguacgacugcaagaucaugaccagcaagaccgacgugagcagcagcgugaucaccagccugggcgccaucgugagcugcuacggcaagaccaagugcaccgccagcaacaagaacaagggcaucaucaagaccuucagcaacggcugcgacuacgugagcaacaagggcguggacaccgugagcgugggcaacacccuguacuacgugaacaagcaggagggccagagccuguacgugaagggcgagcccaucaucaacuucuacgacccccugguguuccccagcgacgaguucgacgccagcaucagccaggugaacgagaagaucaaccagagccuggccuucaucagaaagagcgacgagcugcugcacaacgugaacgccggcaagagcaccaccaacaucaugaucaccaccaucaucaucgugaucaucgugauccugcugagccugaucgccgugggccugcugcuguacugcaaggccagaugaggacuaguguccaccugucccuccugggcugcuggauugucucguuuuccugccaaauaaacaggaucagcgcuuuacagaucuaaaaaaaaaaaaaaaaaaaaaaaaaaaaaaaaaaaaaaaaaaaaaaaaaaaaaaaaaaaaaaaaugcaucccccccccccccccccccccccccccccccaaaggcucuuuucagagccaccagaauu

SEQ ID NO: 6527 - RNA, 1853 nt, Artificial Sequence
  mRNA product Design c-1 comprising derived and/or modified sequence from HRSV(A2)__F-del_DSCav1_mut6 (opt5)
gggagaguccgcucagccagguugcagaagcggcuuagcguguguccuaaucuucucucugcguguagguaggccugugccgcaaacaagcuuaccauggagcugcucauccugaaggccaacgcuauuaccacaauccuuacggccgugaccuucugcuuugcgagcggccagaauauuacagaagaguucuaccaauccaccuguucugcugucagcaaaggguaucugggagcccucagaacaggcugguacaccuccguuaucacaauugaacugucuaacaucaaggagaauaaaugcaacgggaccgacgccaaggugaaacuuaucaagcaggaacuggauaaguauaaaaaugcugugacggaccuccagaugcugauguguagcacccccgccacaggauccggcucugcuauugccagcggggucgcggugugcaagguucugcaccucgagggagaggugaacaaaaucaaguccgcccugcuuagcaccaauaaagcugucgugucucuguccaacggcguuagcgugcucacauuuaagguccuggaucuuaagaauuacauugacaaacagcugcucccuauccugaacaagcaaucuuguuccauuccgaaucccgaaaccgugauggaguuccagcagaaaaacaaucggcugcucgaaaucacgcgcgaguuuagcgugaacgccggcgucacaaccccuguuucuacauauaugcugaccaauuccgagcuucugagccucauuaacgauaugcccaucaccaacgaccagaagaaacugauguccaauaacgugcaaaucgugagacagcagucuuacagcauuaugugcaucauuaaggaagagguccuugcuuaugugguucagcugccucucuacggggugaucgauacacccuguuggaaacugcauacguccccucugugcaccacaaauaccaaggaaggaagcaacauuugucucacacggaccgaccgcggcugguacugcgauaaugccgggucugucuccuucuuuccgcaagcggagacguguaaggugugcagcaacagaguuuucugcgacacaaugaacucucugacccuucccagcgaagugaaucuguguaaugucgauaucuuuaacccuaaauaugacugcaagaucaugaccuccaaaacagaugugucuagcuccgucauuaccagccucggagccaucgugucuuguuacggcaagacaaaaugcacggcuuccaauaagaacaaggggauuaucaaaaccuucagcaauggaugugacuauguuucuaacaagggcguggacacagucuccgugggcaauacccuguacuauguuaacaaacaggaggggcagagccuuuacgugaagggagagcccauuaucaacuuuuaugauccucuggucuuccccuccgacgaauuugaugccucuaucagccaagugaaugagaaaauuaaccagucccucgcuuucauccggaagucugacgaacugcugcacaaugugaacgccggcaagagcacaaccaauauuaugaucacgaccauuaucauuguuaucaucgucauucuccugucccuuaucgccguggggcugcuccuguacugcaaagcucgcugaggacuaguguccaccugucccuccugggcugcuggauugucucguuuuccugccaaauaaacaggaucagcgcuuuacagaucuaaaaaaaaaaaaaaaaaaaaaaaaaaaaaaaaaaaaaaaaaaaaaaaaaaaaaaaaaaaaaaaaugcaucccccccccccccccccccccccccccccccaaaggcucuuuucagagccaccagaauu

SEQ ID NO: 6528 - RNA, 1853 nt, Artificial Sequence
  mRNA product Design c-1 comprising derived and/or modified sequence from HRSV(A2)__F-del_DSCav1_mut6 (opt6)
gggagaguccgcucagccagguugcagaagcggcuuagcguguguccuaaucuucucucugcguguagguaggccugugccgcaaacaagcuuaccauggaacuacucauauuaaaagcaaacgcaauaacaacgauauuaacagcuguaacauucugcuuugcaucaggccaaaauaucaccgaagaauuuuaucaaagcacaugcucugcaguauccaaaggauacuuaggagcauuaagaacaggcugguacacauccguaauaacaauagaacuaucaaacaucaaagaaaacaaaugcaacggcacagacgccaaaguaaaacucauaaaacaagaacuagacaaauauaaaaacgcaguaacagaucuacaaaugcucaugugcuccacaccagcaaccggaucugguucagccauagcauccggcguagccgucugcaaaguauuacaccucgaaggagaaguaaacaaaauaaaaucugcccuauuaucuacaaauaaagccguaguaagucuaaguaacggaguaucaguacuaacauuuaaaguccuagaccugaaaaacuauaucgacaaacaacuauuaccaauacuaaacaaacaauccuguuccaucccuaacccagaaacaguuauggaauuucaacaaaaaaauaaccgccuuuuagaaauaacuagagaauuuucaguaaacgcaggaguuacaacaccaguaucaacauacaugcuaacaaauucagaauuauuaucccuuauaaaugacaugccuaucacaaacgaucaaaaaaaauuaauguccaacaacguacaaauaguaagacaacaaucauauuccaucaugugcaucauaaaagaagaaguccucgcauacguagugcaacuaccacuauacggagucauagauacacccuguuggaaacuucacacaucuccacuaugcacaacaaacacgaaagaaggauccaacauaugccuaacacgaacagacagaggaugguauugcgacaacgcuggaagugugagcuucuucccucaagcagaaacuugcaaaguaugcagcaaucguguauucugcgacacaaugaacucauuaacacucccaagcgaaguaaaccucugcaauguagacaucuuuaauccaaaauacgauuguaaaauaaugacuucaaaaacagacgucucaucaucuguaauaacaucuuuaggagcaauaguuucuugcuacgguaaaacaaaaugcaccgcauccaacaaaaacaaaggaauaauaaaaacauucucuaacggcugcgauuacguaucuaacaaaggaguugacacagucucaguaggaaacacacuauacuacguaaacaaacaagaaggacaaagccuauacguaaaaggagaaccaauaauaaacuucuaugacccauuaguauuuccaagcgaugaauuugacgcuucaauaucacaagucaaugaaaaaauaaaucagagcuuagcauucauaagaaaaucugaugaacuacuacacaauguaaaugcaggaaaauccacuaccaacauaaugauuaccacaauuauaauaguuaucauaguaauacuauuaucacuaauagccguuggauuacuacuauacugcaaagcaagauaaggacuaguguccaccugucccuccugggcugcuggauugucucguuuuccugccaaauaaacaggaucagcgcuuuacagaucuaaaaaaaaaaaaaaaaaaaaaaaaaaaaaaaaaaaaaaaaaaaaaaaaaaaaaaaaaaaaaaaaugcaucccccccccccccccccccccccccccccccaaaggcucuuuucagagccaccagaauu

SEQ ID NO: 6529 - RNA, 1853 nt, Artificial Sequence
  mRNA product Design c-1 comprising derived and/or modified sequence from HRSV(A2)__F-del_DSCav1_mut6 (opt11)
gggagaguccgcucagccagguugcagaagcggcuuagcguguguccuaaucuucucucugcguguagguaggccugugccgcaaacaagcuuaccauggaacuacucauccuaaaagcaaacgccaucaccaccauacuaaccgccgucaccuucugcuucgccucgggacaaaacaucaccgaagaguucuaccagucaacgugcuccgccgucucaaaaggcuaccuaggcgcccuccgcaccgggugguauaccuccgucauaacuaucgaacucucuaacaucaaagaaaacaaauguaacggcaccgacgccaaagucaaacuaaucaaacaagaacuggacaaauacaaaaacgccgucaccgaccuacaaaugcucaugugcuccacuccagccaccggcuccgguagcgcaaucgccucaggcguagcuguaugcaaaguccuccaccuagaaggcgaaguaaacaaaauaaaauccgcccuccucucaaccaacaaggccgucgucucacucucaaacggcgucuccguacucaccuuuaaaguccuagaccuuaaaaacuacaucgacaaacaacugcuaccaauccucaacaaacaaucaugcagcaucccaaacccggaaacagucauggaguuccaacagaaaaacaaccgacuccucgaaaucacccgcgaguucuccgucaacgccggagucaccacaccuguaagcacauacaugcuuacuaauuccgaacuccuuucacuaauaaacgacaugccaauaaccaacgaccaaaagaaacucauguccaacaacguacaaaucguacgccaacaauccuacuccaucaugugcaucaucaaagaagaaguccuggccuaugucguacaacucccccuuuacggugucaucgacacacccugcuggaaacuacacaccagcccccucugcacaacaaacaccaaagaaggcuccaacaucugccucacccguaccgaccgaggcugguacugcgacaacgccggcuccgucuccuucuucccccaagccgaaaccugcaaagucugcagcaaccgcgucuucugcgauaccaugaacucccucacacucccaucugaagucaaccucugcaacgucgauauuuucaauccaaaauacgacugcaaaaucaugacuagcaaaaccgacguuagcuccuccgucaucaccucccucggcgccauaguuucaugcuacggcaaaaccaaaugcaccgccuccaacaaaaacaaaggcaucauaaaaaccuucuccaacgggugcgacuacguaucuaauaaaggagucgacaccgucucaguaggaaacacccucuacuaugucaacaaacaagaaggccaaucacuauacguuaaaggcgaaccaaucaucaacuucuacgacccacucgucuuccccagcgacgaguuugacgccucaaucucgcaagucaaugaaaagauuaaccaaucccuagccuucauccgaaaaagugacgaacuccuccacaacguuaacgccggcaaaucuacaaccaacaucaugaucaccacuauaaucaucgucaucauagucauacuucucagccucaucgcagucggacuccuccuuuauugcaaggcacgauaaggacuaguguccaccugucccuccugggcugcuggauugucucguuuuccugccaaauaaacaggaucagcgcuuuacagaucuaaaaaaaaaaaaaaaaaaaaaaaaaaaaaaaaaaaaaaaaaaaaaaaaaaaaaaaaaaaaaaaaugcaucccccccccccccccccccccccccccccccaaaggcucuuuucagagccaccagaauu

SEQ ID NO: 6530 - RNA, 1943 nt, Artificial Sequence
  mRNA product Design c-2 comprising derived and/or modified sequence from HRSV(A2)__F-del_DSCav1_mut6 (opt1)
gggagacuccugucgggcggaaguaggaggaguagaguuuaaaaacaguacucuuuuuccgguucgggacguaguugaagcaacgacaagccggauaaccgcucuugagacaggaagcuuaccauggagcugcucauccugaaggccaacgccaucaccaccauccugacggcggugaccuucugcuucgccagcggccagaacaucaccgaggaguucuaccaguccacgugcagcgccgucuccaagggguaccucggcgcccugcggaccggcugguacaccuccgugaucaccaucgagcugagcaacaucaaggagaacaagugcaacgggaccgacgccaaggugaagcucaucaagcaggagcuggacaaguacaagaacgcggucacggaccugcagaugcugaugugcuccaccccggcaaccggcuccggcuccgccaucgcgagcggcgucgccgugugcaaggugcugcaccucgagggggaggucaacaagaucaagagcgcccugcuguccaccaacaaggccguggugagccucuccaacggcgucagcgugcugaccuucaaggugcuggaccucaagaacuacaucgacaagcagcugcugcccauccugaacaagcagagcugcuccauccccaaccccgagacggugauggaguuccagcagaagaacaaccggcuccuggagaucacccgcgaguucagcgugaacgccggggucaccacccccguguccacguacaugcugaccaacagcgagcuccugucccugaucaacgacaugccgaucaccaacgaccagaagaagcucaugagcaacaacgugcagaucguccggcagcaguccuacagcaucaugugcaucaucaaggaggaggugcuggcguacgugguccagcugccccucuacggcgugaucgacacccccugcuggaagcugcacacgagcccccugugcaccaccaacaccaaggagggguccaacaucugccucacgcgcaccgaccggggcugguacugcgacaacgccggcagcgucuccuucuucccgcaggccgagaccugcaaggugugcagcaaccgcguguucugcgacaccaugaacucccugacgcugcccagcgagguaaaccucugcaacgucgacaucuucaaccccaaguacgacugcaagaucaugaccuccaagaccgacgugagcuccagcgugaucaccucccugggggccaucgucagcugcuacggcaagacgaagugcaccgccagcaacaagaacaaggggaucaucaagaccuucuccaacggcugcgacuacgugagcaacaagggcguggacaccguguccgucgggaacacccuguacuacgugaacaagcaggagggccagagccucuacgugaagggggagcccaucaucaacuucuacgacccgcuggucuuccccuccgacgaguucgacgcgagcaucucccaggugaacgagaagaucaaccagagccuggccuucauccgcaaguccgacgagcugcuccacaacgugaacgccggcaagagcacgaccaacaucaugaucaccaccaucaucaucgucaucaucgugauccugcugucccucaucgccguggggcugcugcucuacugcaaggcccggugaggacuaguggaagcauuuuccuggcugauuaaaagaaauuacucagcuauggucaucuguuccuguuagaaggcuaugcagcauauuauauacuaugcgcauguuaugaaaugcauaauaaaaaauuuuaaaaaaucuaaaagaucuaaaaaaaaaaaaaaaaaaaaaaaaaaaaaaaaaaaaaaaaaaaaaaaaaaaaaaaaaaaaaaaaugcaucccccccccccccccccccccccccccccccaaaggcucuuuucagagccaccagaauu

SEQ ID NO: 6531 - RNA, 1943 nt, Artificial Sequence
  mRNA product Design c-2 comprising derived and/or modified sequence from HRSV(A2)__F-del_DSCav1_mut6 (opt1)
gggagacuccugucgggcggaaguaggaggaguagaguuuaaaaacaguacucuuuuuccgguucgggacguaguugaagcaacgacaagccggauaaccgcucuugagacaggaagcuuaccauggagcugcucauccugaaggccaacgccaucaccaccauccugacggcggugaccuucugcuucgccagcggccagaacaucaccgaggaguucuaccaguccacgugcagcgccgucuccaagggguaccucggcgcccugcgcaccgggugguacaccagcgugaucaccaucgagcuguccaacaucaaggagaacaagugcaacggcaccgacgccaaggugaagcucaucaagcaggagcuggacaaguacaagaacgcggucacggaccugcagaugcucaugugcagcacccccgccaccggguccggcagcgccaucgccuccggcguggcggugugcaagguccugcaccuggagggggaggugaacaagaucaagagcgcccuccuguccaccaacaaggccguggucagccuguccaacggcgugagcgugcucacguucaagguccuggaccugaagaacuacaucgacaagcagcuccugccgauccugaacaagcaguccugcagcauccccaaccccgagaccgugauggaguuccagcagaagaacaaccggcuccuggagaucacccgcgaguucuccgugaacgccggggucaccacgcccgugagcaccuacaugcugaccaacuccgagcuccugagccugaucaacgacaugccgaucaccaacgaccagaagaagcucaugagcaacaacgugcagaucguccggcagcaguccuacagcaucaugugcaucaucaaggaggaggugcuggccuacgugguccagcugccccucuacggcgugaucgacacgcccugcuggaagcugcacaccagcccccugugcaccaccaacacgaaggaggggagcaacaucugccucacccgcaccgaccggggcugguacugcgacaacgcgggcuccgugagcuucuucccgcaggccgagaccugcaaggucugcuccaaccgcguguucugcgacacgaugaacagccugacccugcccuccgaggucaaccucugcaacguggacaucuucaaccccaaguacgacugcaagaucaugaccagcaagaccgacguguccagcuccgucaucacgagccugggggccaucguguccugcuacggcaagaccaagugcaccgccagcaacaagaacaaggggaucaucaagaccuucuccaacggcugcgacuacgugagcaacaagggcgucgacacgguguccguggggaacacccuguacuacgucaacaagcaggagggccagagccucuacgugaagggggagcccaucaucaacuucuacgacccgcugguguuccccagcgacgaguucgacgccuccaucagccaggucaacgagaagaucaaccagucccuggcguucauccggaaguccgacgagcuccugcacaacgugaacgccggcaaguccaccaccaacaucaugaucaccacgaucaucaucgugaucaucgucauccugcucagccugaucgccguggggcugcuccuguacugcaaggcccgcugaggacuaguggaagcauuuuccuggcugauuaaaagaaauuacucagcuauggucaucuguuccuguuagaaggcuaugcagcauauuauauacuaugcgcauguuaugaaaugcauaauaaaaaauuuuaaaaaaucuaaaagaucuaaaaaaaaaaaaaaaaaaaaaaaaaaaaaaaaaaaaaaaaaaaaaaaaaaaaaaaaaaaaaaaaugcaucccccccccccccccccccccccccccccccaaaggcucuuuucagagccaccagaauu

SEQ ID NO: 6532 - RNA, 1943 nt, Artificial Sequence
  mRNA product Design c-2 comprising derived and/or modified sequence from HRSV(A2)__F-del_DSCav1_mut6 (opt2)
gggagacuccugucgggcggaaguaggaggaguagaguuuaaaaacaguacucuuuuuccgguucgggacguaguugaagcaacgacaagccggauaaccgcucuugagacaggaagcuuaccauggagcuccucauccucaaggccaacgccaucaccaccauccucaccgccgucaccuucugcuucgccuccggccagaacaucaccgaggaguucuaccaguccaccugcuccgccgucuccaagggcuaccucggcgcccuccgcaccggcugguacaccuccgucaucaccaucgagcucuccaacaucaaggagaacaagugcaacggcaccgacgccaaggucaagcucaucaagcaggagcucgacaaguacaagaacgccgucaccgaccuccagaugcucaugugcuccacccccgccaccggcuccggcuccgccaucgccuccggcgucgccgucugcaagguccuccaccucgagggcgaggucaacaagaucaaguccgcccuccucuccaccaacaaggccgucgucucccucuccaacggcgucuccguccucaccuucaagguccucgaccucaagaacuacaucgacaagcagcuccuccccauccucaacaagcaguccugcuccauccccaaccccgagaccgucauggaguuccagcagaagaacaaccgccuccucgagaucacccgcgaguucuccgucaacgccggcgucaccacccccgucuccaccuacaugcucaccaacuccgagcuccucucccucaucaacgacaugcccaucaccaacgaccagaagaagcucauguccaacaacguccagaucguccgccagcaguccuacuccaucaugugcaucaucaaggaggagguccucgccuacgucguccagcucccccucuacggcgucaucgacacccccugcuggaagcuccacaccuccccccucugcaccaccaacaccaaggagggcuccaacaucugccucacccgcaccgaccgcggcugguacugcgacaacgccggcuccgucuccuucuucccccaggccgagaccugcaaggucugcuccaaccgcgucuucugcgacaccaugaacucccucacccuccccuccgaggucaaccucugcaacgucgacaucuucaaccccaaguacgacugcaagaucaugaccuccaagaccgacgucuccuccuccgucaucaccucccucggcgccaucgucuccugcuacggcaagaccaagugcaccgccuccaacaagaacaagggcaucaucaagaccuucuccaacggcugcgacuacgucuccaacaagggcgucgacaccgucuccgucggcaacacccucuacuacgucaacaagcaggagggccagucccucuacgucaagggcgagcccaucaucaacuucuacgacccccucgucuuccccuccgacgaguucgacgccuccaucucccaggucaacgagaagaucaaccagucccucgccuucauccgcaaguccgacgagcuccuccacaacgucaacgccggcaaguccaccaccaacaucaugaucaccaccaucaucaucgucaucaucgucauccuccucucccucaucgccgucggccuccuccucuacugcaaggcccgcugaggacuaguggaagcauuuuccuggcugauuaaaagaaauuacucagcuauggucaucuguuccuguuagaaggcuaugcagcauauuauauacuaugcgcauguuaugaaaugcauaauaaaaaauuuuaaaaaaucuaaaagaucuaaaaaaaaaaaaaaaaaaaaaaaaaaaaaaaaaaaaaaaaaaaaaaaaaaaaaaaaaaaaaaaaugcaucccccccccccccccccccccccccccccccaaaggcucuuuucagagccaccagaauu

SEQ ID NO: 6533 - RNA, 1943 nt, Artificial Sequence
  mRNA product Design c-2 comprising derived and/or modified sequence from HRSV(A2)__F-del_DSCav1_mut6 (opt3)
gggagacuccugucgggcggaaguaggaggaguagaguuuaaaaacaguacucuuuuuccgguucgggacguaguugaagcaacgacaagccggauaaccgcucuugagacaggaagcuuaccauggagcugcucauccuuaaggccaacgcuauuaccacaauacugacugcagugacguucugcuuugccagcggccagaauaucaccgaagaguucuaccaauccacauguucugcggucucaaaaggguauuugggagcuuuaagaacugguugguacaccaguguuauuacaaucgaacugagcaacauuaaggagaauaaaugcaacggcaccgacgccaaggugaaacuaaucaagcaggaacucgauaaguauaaaaaugcaguaacugaccugcagaugcuuauguguuccacacccgccaccgggucuggaucggcuauagcaucaggcguggccgucugcaaggugcugcacuuggagggugagguuaacaaaaucaagagcgcucuccugaguacgaauaaagccguggucucccugucuaacggggugagcguacucacuuuuaagguuuuagaucugaagaauuacauugacaaacagcuuuugccuauccugaacaagcaauccuguucaauuccaaauccggaaaccgugauggaguuccagcagaaaaacaauaggcuacucgaaaucacacgggaguuuagugucaacgcgggagugacuacccccgugagcacauauaugcugaccaauucugagcuucuguccuugauaaacgauaugccuauuacgaacgaccagaagaaacucaugucaaauaacguccaaaucguucgccagcagagcuacaguauuaugugcaucaucaaggaagaggugcuggcauauguagugcaguuaccacuguacggcgucauugauacucccuguuggaaacuccauacaucuccucuuugcaccacuaauacaaaggaaggcuccaacauaugucugacccgaacggaccgugggugguacugcgauaaugccggaagcgugucguucuuuccacaagcugagaccuguaagguuugcucuaacagaguguucugcgacacaaugaacuccuugacucuacccucagaagucaaucuguguaauguggauaucuuuaacccuaaauaugacugcaagauuaugaccaguaaaacagauguaagcuccucuguuaucacuagccucggugccauagugucauguuacggcaagaccaaaugcacagcaaguaauaagaacaaggggauuaucaaaaccuucuccaauggaugugacuaugucagcaacaagggcguggacacugucucuguggguaauacgcuguacuauguuaacaaacaggaggggcagucacuuuacgugaagggagagccaaucauuaacuuuuaugauccgcugguauuccccagugacgaauuugaugcuagcaucucccaagucaaugagaaaauuaaccagucuuuggccuucauaaggaagucggacgaacuccugcacaaugugaacgcgggcaagagcacaaccaauaucaugauuacuaccaucaucauuguuauaaucgugauuuuacugucccuaaucgccgucggccuccugcuuuacugcaaagcacggugaggacuaguggaagcauuuuccuggcugauuaaaagaaauuacucagcuauggucaucuguuccuguuagaaggcuaugcagcauauuauauacuaugcgcauguuaugaaaugcauaauaaaaaauuuuaaaaaaucuaaaagaucuaaaaaaaaaaaaaaaaaaaaaaaaaaaaaaaaaaaaaaaaaaaaaaaaaaaaaaaaaaaaaaaaugcaucccccccccccccccccccccccccccccccaaaggcucuuuucagagccaccagaauu

SEQ ID NO: 6534 - RNA, 1943 nt, Artificial Sequence
  mRNA product Design c-2 comprising derived and/or modified sequence from HRSV(A2)__F-del_DSCav1_mut6 (opt4)
gggagacuccugucgggcggaaguaggaggaguagaguuuaaaaacaguacucuuuuuccgguucgggacguaguugaagcaacgacaagccggauaaccgcucuugagacaggaagcuuaccauggagcugcugauccugaaggccaacgccaucaccaccauccugaccgccgugaccuucugcuucgccagcggccagaacaucaccgaggaguucuaccagagcaccugcagcgccgugagcaagggcuaccugggcgcccugagaaccggcugguacaccagcgugaucaccaucgagcugagcaacaucaaggagaacaagugcaacggcaccgacgccaaggugaagcugaucaagcaggagcuggacaaguacaagaacgccgugaccgaccugcagaugcugaugugcagcacccccgccaccggcagcggcagcgccaucgccagcggcguggccgugugcaaggugcugcaccuggagggcgaggugaacaagaucaagagcgcccugcugagcaccaacaaggccguggugagccugagcaacggcgugagcgugcugaccuucaaggugcuggaccugaagaacuacaucgacaagcagcugcugcccauccugaacaagcagagcugcagcauccccaaccccgagaccgugauggaguuccagcagaagaacaacagacugcuggagaucaccagagaguucagcgugaacgccggcgugaccacccccgugagcaccuacaugcugaccaacagcgagcugcugagccugaucaacgacaugcccaucaccaacgaccagaagaagcugaugagcaacaacgugcagaucgugagacagcagagcuacagcaucaugugcaucaucaaggaggaggugcuggccuacguggugcagcugccccuguacggcgugaucgacacccccugcuggaagcugcacaccagcccccugugcaccaccaacaccaaggagggcagcaacaucugccugaccagaaccgacagaggcugguacugcgacaacgccggcagcgugagcuucuucccccaggccgagaccugcaaggugugcagcaacagaguguucugcgacaccaugaacagccugacccugcccagcgaggugaaccugugcaacguggacaucuucaaccccaaguacgacugcaagaucaugaccagcaagaccgacgugagcagcagcgugaucaccagccugggcgccaucgugagcugcuacggcaagaccaagugcaccgccagcaacaagaacaagggcaucaucaagaccuucagcaacggcugcgacuacgugagcaacaagggcguggacaccgugagcgugggcaacacccuguacuacgugaacaagcaggagggccagagccuguacgugaagggcgagcccaucaucaacuucuacgacccccugguguuccccagcgacgaguucgacgccagcaucagccaggugaacgagaagaucaaccagagccuggccuucaucagaaagagcgacgagcugcugcacaacgugaacgccggcaagagcaccaccaacaucaugaucaccaccaucaucaucgugaucaucgugauccugcugagccugaucgccgugggccugcugcuguacugcaaggccagaugaggacuaguggaagcauuuuccuggcugauuaaaagaaauuacucagcuauggucaucuguuccuguuagaaggcuaugcagcauauuauauacuaugcgcauguuaugaaaugcauaauaaaaaauuuuaaaaaaucuaaaagaucuaaaaaaaaaaaaaaaaaaaaaaaaaaaaaaaaaaaaaaaaaaaaaaaaaaaaaaaaaaaaaaaaugcaucccccccccccccccccccccccccccccccaaaggcucuuuucagagccaccagaauu

SEQ ID NO: 6535 - RNA, 1943 nt, Artificial Sequence
  mRNA product Design c-2 comprising derived and/or modified sequence from HRSV(A2)__F-del_DSCav1_mut6 (opt5)
gggagacuccugucgggcggaaguaggaggaguagaguuuaaaaacaguacucuuuuuccgguucgggacguaguugaagcaacgacaagccggauaaccgcucuugagacaggaagcuuaccauggagcugcucauccugaaggccaacgcuauuaccacaauccuuacggccgugaccuucugcuuugcgagcggccagaauauuacagaagaguucuaccaauccaccuguucugcugucagcaaaggguaucugggagcccucagaacaggcugguacaccuccguuaucacaauugaacugucuaacaucaaggagaauaaaugcaacgggaccgacgccaaggugaaacuuaucaagcaggaacuggauaaguauaaaaaugcugugacggaccuccagaugcugauguguagcacccccgccacaggauccggcucugcuauugccagcggggucgcggugugcaagguucugcaccucgagggagaggugaacaaaaucaaguccgcccugcuuagcaccaauaaagcugucgugucucuguccaacggcguuagcgugcucacauuuaagguccuggaucuuaagaauuacauugacaaacagcugcucccuauccugaacaagcaaucuuguuccauuccgaaucccgaaaccgugauggaguuccagcagaaaaacaaucggcugcucgaaaucacgcgcgaguuuagcgugaacgccggcgucacaaccccuguuucuacauauaugcugaccaauuccgagcuucugagccucauuaacgauaugcccaucaccaacgaccagaagaaacugauguccaauaacgugcaaaucgugagacagcagucuuacagcauuaugugcaucauuaaggaagagguccuugcuuaugugguucagcugccucucuacggggugaucgauacacccuguuggaaacugcauacguccccucugugcaccacaaauaccaaggaaggaagcaacauuugucucacacggaccgaccgcggcugguacugcgauaaugccgggucugucuccuucuuuccgcaagcggagacguguaaggugugcagcaacagaguuuucugcgacacaaugaacucucugacccuucccagcgaagugaaucuguguaaugucgauaucuuuaacccuaaauaugacugcaagaucaugaccuccaaaacagaugugucuagcuccgucauuaccagccucggagccaucgugucuuguuacggcaagacaaaaugcacggcuuccaauaagaacaaggggauuaucaaaaccuucagcaauggaugugacuauguuucuaacaagggcguggacacagucuccgugggcaauacccuguacuauguuaacaaacaggaggggcagagccuuuacgugaagggagagcccauuaucaacuuuuaugauccucuggucuuccccuccgacgaauuugaugccucuaucagccaagugaaugagaaaauuaaccagucccucgcuuucauccggaagucugacgaacugcugcacaaugugaacgccggcaagagcacaaccaauauuaugaucacgaccauuaucauuguuaucaucgucauucuccugucccuuaucgccguggggcugcuccuguacugcaaagcucgcugaggacuaguggaagcauuuuccuggcugauuaaaagaaauuacucagcuauggucaucuguuccuguuagaaggcuaugcagcauauuauauacuaugcgcauguuaugaaaugcauaauaaaaaauuuuaaaaaaucuaaaagaucuaaaaaaaaaaaaaaaaaaaaaaaaaaaaaaaaaaaaaaaaaaaaaaaaaaaaaaaaaaaaaaaaugcaucccccccccccccccccccccccccccccccaaaggcucuuuucagagccaccagaauu

SEQ ID NO: 6536 - RNA, 1943 nt, Artificial Sequence
  mRNA product Design c-2 comprising derived and/or modified sequence from HRSV(A2)__F-del_DSCav1_mut6 (opt6)
gggagacuccugucgggcggaaguaggaggaguagaguuuaaaaacaguacucuuuuuccgguucgggacguaguugaagcaacgacaagccggauaaccgcucuugagacaggaagcuuaccauggaacuacucauauuaaaagcaaacgcaauaacaacgauauuaacagcuguaacauucugcuuugcaucaggccaaaauaucaccgaagaauuuuaucaaagcacaugcucugcaguauccaaaggauacuuaggagcauuaagaacaggcugguacacauccguaauaacaauagaacuaucaaacaucaaagaaaacaaaugcaacggcacagacgccaaaguaaaacucauaaaacaagaacuagacaaauauaaaaacgcaguaacagaucuacaaaugcucaugugcuccacaccagcaaccggaucugguucagccauagcauccggcguagccgucugcaaaguauuacaccucgaaggagaaguaaacaaaauaaaaucugcccuauuaucuacaaauaaagccguaguaagucuaaguaacggaguaucaguacuaacauuuaaaguccuagaccugaaaaacuauaucgacaaacaacuauuaccaauacuaaacaaacaauccuguuccaucccuaacccagaaacaguuauggaauuucaacaaaaaaauaaccgccuuuuagaaauaacuagagaauuuucaguaaacgcaggaguuacaacaccaguaucaacauacaugcuaacaaauucagaauuauuaucccuuauaaaugacaugccuaucacaaacgaucaaaaaaaauuaauguccaacaacguacaaauaguaagacaacaaucauauuccaucaugugcaucauaaaagaagaaguccucgcauacguagugcaacuaccacuauacggagucauagauacacccuguuggaaacuucacacaucuccacuaugcacaacaaacacgaaagaaggauccaacauaugccuaacacgaacagacagaggaugguauugcgacaacgcuggaagugugagcuucuucccucaagcagaaacuugcaaaguaugcagcaaucguguauucugcgacacaaugaacucauuaacacucccaagcgaaguaaaccucugcaauguagacaucuuuaauccaaaauacgauuguaaaauaaugacuucaaaaacagacgucucaucaucuguaauaacaucuuuaggagcaauaguuucuugcuacgguaaaacaaaaugcaccgcauccaacaaaaacaaaggaauaauaaaaacauucucuaacggcugcgauuacguaucuaacaaaggaguugacacagucucaguaggaaacacacuauacuacguaaacaaacaagaaggacaaagccuauacguaaaaggagaaccaauaauaaacuucuaugacccauuaguauuuccaagcgaugaauuugacgcuucaauaucacaagucaaugaaaaaauaaaucagagcuuagcauucauaagaaaaucugaugaacuacuacacaauguaaaugcaggaaaauccacuaccaacauaaugauuaccacaauuauaauaguuaucauaguaauacuauuaucacuaauagccguuggauuacuacuauacugcaaagcaagauaaggacuaguggaagcauuuuccuggcugauuaaaagaaauuacucagcuauggucaucuguuccuguuagaaggcuaugcagcauauuauauacuaugcgcauguuaugaaaugcauaauaaaaaauuuuaaaaaaucuaaaagaucuaaaaaaaaaaaaaaaaaaaaaaaaaaaaaaaaaaaaaaaaaaaaaaaaaaaaaaaaaaaaaaaaugcaucccccccccccccccccccccccccccccccaaaggcucuuuucagagccaccagaauu

SEQ ID NO: 6537 - RNA, 1943 nt, Artificial Sequence
  mRNA product Design c-2 comprising derived and/or modified sequence from HRSV(A2)__F-del_DSCav1_mut6 (opt11)
gggagacuccugucgggcggaaguaggaggaguagaguuuaaaaacaguacucuuuuuccgguucgggacguaguugaagcaacgacaagccggauaaccgcucuugagacaggaagcuuaccauggaacuacucauccuaaaagcaaacgccaucaccaccauacuaaccgccgucaccuucugcuucgccucgggacaaaacaucaccgaagaguucuaccagucaacgugcuccgccgucucaaaaggcuaccuaggcgcccuccgcaccgggugguauaccuccgucauaacuaucgaacucucuaacaucaaagaaaacaaauguaacggcaccgacgccaaagucaaacuaaucaaacaagaacuggacaaauacaaaaacgccgucaccgaccuacaaaugcucaugugcuccacuccagccaccggcuccgguagcgcaaucgccucaggcguagcuguaugcaaaguccuccaccuagaaggcgaaguaaacaaaauaaaauccgcccuccucucaaccaacaaggccgucgucucacucucaaacggcgucuccguacucaccuuuaaaguccuagaccuuaaaaacuacaucgacaaacaacugcuaccaauccucaacaaacaaucaugcagcaucccaaacccggaaacagucauggaguuccaacagaaaaacaaccgacuccucgaaaucacccgcgaguucuccgucaacgccggagucaccacaccuguaagcacauacaugcuuacuaauuccgaacuccuuucacuaauaaacgacaugccaauaaccaacgaccaaaagaaacucauguccaacaacguacaaaucguacgccaacaauccuacuccaucaugugcaucaucaaagaagaaguccuggccuaugucguacaacucccccuuuacggugucaucgacacacccugcuggaaacuacacaccagcccccucugcacaacaaacaccaaagaaggcuccaacaucugccucacccguaccgaccgaggcugguacugcgacaacgccggcuccgucuccuucuucccccaagccgaaaccugcaaagucugcagcaaccgcgucuucugcgauaccaugaacucccucacacucccaucugaagucaaccucugcaacgucgauauuuucaauccaaaauacgacugcaaaaucaugacuagcaaaaccgacguuagcuccuccgucaucaccucccucggcgccauaguuucaugcuacggcaaaaccaaaugcaccgccuccaacaaaaacaaaggcaucauaaaaaccuucuccaacgggugcgacuacguaucuaauaaaggagucgacaccgucucaguaggaaacacccucuacuaugucaacaaacaagaaggccaaucacuauacguuaaaggcgaaccaaucaucaacuucuacgacccacucgucuuccccagcgacgaguuugacgccucaaucucgcaagucaaugaaaagauuaaccaaucccuagccuucauccgaaaaagugacgaacuccuccacaacguuaacgccggcaaaucuacaaccaacaucaugaucaccacuauaaucaucgucaucauagucauacuucucagccucaucgcagucggacuccuccuuuauugcaaggcacgauaaggacuaguggaagcauuuuccuggcugauuaaaagaaauuacucagcuauggucaucuguuccuguuagaaggcuaugcagcauauuauauacuaugcgcauguuaugaaaugcauaauaaaaaauuuuaaaaaaucuaaaagaucuaaaaaaaaaaaaaaaaaaaaaaaaaaaaaaaaaaaaaaaaaaaaaaaaaaaaaaaaaaaaaaaaugcaucccccccccccccccccccccccccccccccaaaggcucuuuucagagccaccagaauu

SEQ ID NO: 6538 - RNA, 1920 nt, Artificial Sequence
  mRNA product Design c-3 comprising derived and/or modified sequence from HRSV(A2)__F-del_DSCav1_mut6 (opt1)
gggagaguccgcucagccagguugcagaagcggcuuagcguguguccuaaucuucucucugcguguagguaggccugugccgcaaacaagcuuaccauggagcugcucauccugaaggccaacgccaucaccaccauccugacggcggugaccuucugcuucgccagcggccagaacaucaccgaggaguucuaccaguccacgugcagcgccgucuccaagggguaccucggcgcccugcggaccggcugguacaccuccgugaucaccaucgagcugagcaacaucaaggagaacaagugcaacgggaccgacgccaaggugaagcucaucaagcaggagcuggacaaguacaagaacgcggucacggaccugcagaugcugaugugcuccaccccggcaaccggcuccggcuccgccaucgcgagcggcgucgccgugugcaaggugcugcaccucgagggggaggucaacaagaucaagagcgcccugcuguccaccaacaaggccguggugagccucuccaacggcgucagcgugcugaccuucaaggugcuggaccucaagaacuacaucgacaagcagcugcugcccauccugaacaagcagagcugcuccauccccaaccccgagacggugauggaguuccagcagaagaacaaccggcuccuggagaucacccgcgaguucagcgugaacgccggggucaccacccccguguccacguacaugcugaccaacagcgagcuccugucccugaucaacgacaugccgaucaccaacgaccagaagaagcucaugagcaacaacgugcagaucguccggcagcaguccuacagcaucaugugcaucaucaaggaggaggugcuggcguacgugguccagcugccccucuacggcgugaucgacacccccugcuggaagcugcacacgagcccccugugcaccaccaacaccaaggagggguccaacaucugccucacgcgcaccgaccggggcugguacugcgacaacgccggcagcgucuccuucuucccgcaggccgagaccugcaaggugugcagcaaccgcguguucugcgacaccaugaacucccugacgcugcccagcgagguaaaccucugcaacgucgacaucuucaaccccaaguacgacugcaagaucaugaccuccaagaccgacgugagcuccagcgugaucaccucccugggggccaucgucagcugcuacggcaagacgaagugcaccgccagcaacaagaacaaggggaucaucaagaccuucuccaacggcugcgacuacgugagcaacaagggcguggacaccguguccgucgggaacacccuguacuacgugaacaagcaggagggccagagccucuacgugaagggggagcccaucaucaacuucuacgacccgcuggucuuccccuccgacgaguucgacgcgagcaucucccaggugaacgagaagaucaaccagagccuggccuucauccgcaaguccgacgagcugcuccacaacgugaacgccggcaagagcacgaccaacaucaugaucaccaccaucaucaucgucaucaucgugauccugcugucccucaucgccguggggcugcugcucuacugcaaggcccggugaggacuaguacuggcugcaucucccuuuccucuguccuccauccuucucccaggauggugaagggggaccugguacccagugauccccaccccaggauccuaaaucaugacuuaccugcuaauaaaaacucauuggaaaagugagaagaucuaaaaaaaaaaaaaaaaaaaaaaaaaaaaaaaaaaaaaaaaaaaaaaaaaaaaaaaaaaaaaaaaugcaucccccccccccccccccccccccccccccccaaaggcucuuuucagagccaccagaauu

SEQ ID NO: 6539 - RNA, 1920 nt, Artificial Sequence
  mRNA product Design c-3 comprising derived and/or modified sequence from HRSV(A2)__F-del_DSCav1_mut6 (opt1)
gggagaguccgcucagccagguugcagaagcggcuuagcguguguccuaaucuucucucugcguguagguaggccugugccgcaaacaagcuuaccauggagcugcucauccugaaggccaacgccaucaccaccauccugacggcggugaccuucugcuucgccagcggccagaacaucaccgaggaguucuaccaguccacgugcagcgccgucuccaagggguaccucggcgcccugcgcaccgggugguacaccagcgugaucaccaucgagcuguccaacaucaaggagaacaagugcaacggcaccgacgccaaggugaagcucaucaagcaggagcuggacaaguacaagaacgcggucacggaccugcagaugcucaugugcagcacccccgccaccggguccggcagcgccaucgccuccggcguggcggugugcaagguccugcaccuggagggggaggugaacaagaucaagagcgcccuccuguccaccaacaaggccguggucagccuguccaacggcgugagcgugcucacguucaagguccuggaccugaagaacuacaucgacaagcagcuccugccgauccugaacaagcaguccugcagcauccccaaccccgagaccgugauggaguuccagcagaagaacaaccggcuccuggagaucacccgcgaguucuccgugaacgccggggucaccacgcccgugagcaccuacaugcugaccaacuccgagcuccugagccugaucaacgacaugccgaucaccaacgaccagaagaagcucaugagcaacaacgugcagaucguccggcagcaguccuacagcaucaugugcaucaucaaggaggaggugcuggccuacgugguccagcugccccucuacggcgugaucgacacgcccugcuggaagcugcacaccagcccccugugcaccaccaacacgaaggaggggagcaacaucugccucacccgcaccgaccggggcugguacugcgacaacgcgggcuccgugagcuucuucccgcaggccgagaccugcaaggucugcuccaaccgcguguucugcgacacgaugaacagccugacccugcccuccgaggucaaccucugcaacguggacaucuucaaccccaaguacgacugcaagaucaugaccagcaagaccgacguguccagcuccgucaucacgagccugggggccaucguguccugcuacggcaagaccaagugcaccgccagcaacaagaacaaggggaucaucaagaccuucuccaacggcugcgacuacgugagcaacaagggcgucgacacgguguccguggggaacacccuguacuacgucaacaagcaggagggccagagccucuacgugaagggggagcccaucaucaacuucuacgacccgcugguguuccccagcgacgaguucgacgccuccaucagccaggucaacgagaagaucaaccagucccuggcguucauccggaaguccgacgagcuccugcacaacgugaacgccggcaaguccaccaccaacaucaugaucaccacgaucaucaucgugaucaucgucauccugcucagccugaucgccguggggcugcuccuguacugcaaggcccgcugaggacuaguacuggcugcaucucccuuuccucuguccuccauccuucucccaggauggugaagggggaccugguacccagugauccccaccccaggauccuaaaucaugacuuaccugcuaauaaaaacucauuggaaaagugagaagaucuaaaaaaaaaaaaaaaaaaaaaaaaaaaaaaaaaaaaaaaaaaaaaaaaaaaaaaaaaaaaaaaaugcaucccccccccccccccccccccccccccccccaaaggcucuuuucagagccaccagaauu

SEQ ID NO: 6540 - RNA, 1920 nt, Artificial Sequence
  mRNA product Design c-3 comprising derived and/or modified sequence from HRSV(A2)__F-del_DSCav1_mut6 (opt2)
gggagaguccgcucagccagguugcagaagcggcuuagcguguguccuaaucuucucucugcguguagguaggccugugccgcaaacaagcuuaccauggagcuccucauccucaaggccaacgccaucaccaccauccucaccgccgucaccuucugcuucgccuccggccagaacaucaccgaggaguucuaccaguccaccugcuccgccgucuccaagggcuaccucggcgcccuccgcaccggcugguacaccuccgucaucaccaucgagcucuccaacaucaaggagaacaagugcaacggcaccgacgccaaggucaagcucaucaagcaggagcucgacaaguacaagaacgccgucaccgaccuccagaugcucaugugcuccacccccgccaccggcuccggcuccgccaucgccuccggcgucgccgucugcaagguccuccaccucgagggcgaggucaacaagaucaaguccgcccuccucuccaccaacaaggccgucgucucccucuccaacggcgucuccguccucaccuucaagguccucgaccucaagaacuacaucgacaagcagcuccuccccauccucaacaagcaguccugcuccauccccaaccccgagaccgucauggaguuccagcagaagaacaaccgccuccucgagaucacccgcgaguucuccgucaacgccggcgucaccacccccgucuccaccuacaugcucaccaacuccgagcuccucucccucaucaacgacaugcccaucaccaacgaccagaagaagcucauguccaacaacguccagaucguccgccagcaguccuacuccaucaugugcaucaucaaggaggagguccucgccuacgucguccagcucccccucuacggcgucaucgacacccccugcuggaagcuccacaccuccccccucugcaccaccaacaccaaggagggcuccaacaucugccucacccgcaccgaccgcggcugguacugcgacaacgccggcuccgucuccuucuucccccaggccgagaccugcaaggucugcuccaaccgcgucuucugcgacaccaugaacucccucacccuccccuccgaggucaaccucugcaacgucgacaucuucaaccccaaguacgacugcaagaucaugaccuccaagaccgacgucuccuccuccgucaucaccucccucggcgccaucgucuccugcuacggcaagaccaagugcaccgccuccaacaagaacaagggcaucaucaagaccuucuccaacggcugcgacuacgucuccaacaagggcgucgacaccgucuccgucggcaacacccucuacuacgucaacaagcaggagggccagucccucuacgucaagggcgagcccaucaucaacuucuacgacccccucgucuuccccuccgacgaguucgacgccuccaucucccaggucaacgagaagaucaaccagucccucgccuucauccgcaaguccgacgagcuccuccacaacgucaacgccggcaaguccaccaccaacaucaugaucaccaccaucaucaucgucaucaucgucauccuccucucccucaucgccgucggccuccuccucuacugcaaggcccgcugaggacuaguacuggcugcaucucccuuuccucuguccuccauccuucucccaggauggugaagggggaccugguacccagugauccccaccccaggauccuaaaucaugacuuaccugcuaauaaaaacucauuggaaaagugagaagaucuaaaaaaaaaaaaaaaaaaaaaaaaaaaaaaaaaaaaaaaaaaaaaaaaaaaaaaaaaaaaaaaaugcaucccccccccccccccccccccccccccccccaaaggcucuuuucagagccaccagaauu

SEQ ID NO: 6541 - RNA, 1920 nt, Artificial Sequence
  mRNA product Design c-3 comprising derived and/or modified sequence from HRSV(A2)__F-del_DSCav1_mut6 (opt3)
gggagaguccgcucagccagguugcagaagcggcuuagcguguguccuaaucuucucucugcguguagguaggccugugccgcaaacaagcuuaccauggagcugcucauccuuaaggccaacgcuauuaccacaauacugacugcagugacguucugcuuugccagcggccagaauaucaccgaagaguucuaccaauccacauguucugcggucucaaaaggguauuugggagcuuuaagaacugguugguacaccaguguuauuacaaucgaacugagcaacauuaaggagaauaaaugcaacggcaccgacgccaaggugaaacuaaucaagcaggaacucgauaaguauaaaaaugcaguaacugaccugcagaugcuuauguguuccacacccgccaccgggucuggaucggcuauagcaucaggcguggccgucugcaaggugcugcacuuggagggugagguuaacaaaaucaagagcgcucuccugaguacgaauaaagccguggucucccugucuaacggggugagcguacucacuuuuaagguuuuagaucugaagaauuacauugacaaacagcuuuugccuauccugaacaagcaauccuguucaauuccaaauccggaaaccgugauggaguuccagcagaaaaacaauaggcuacucgaaaucacacgggaguuuagugucaacgcgggagugacuacccccgugagcacauauaugcugaccaauucugagcuucuguccuugauaaacgauaugccuauuacgaacgaccagaagaaacucaugucaaauaacguccaaaucguucgccagcagagcuacaguauuaugugcaucaucaaggaagaggugcuggcauauguagugcaguuaccacuguacggcgucauugauacucccuguuggaaacuccauacaucuccucuuugcaccacuaauacaaaggaaggcuccaacauaugucugacccgaacggaccgugggugguacugcgauaaugccggaagcgugucguucuuuccacaagcugagaccuguaagguuugcucuaacagaguguucugcgacacaaugaacuccuugacucuacccucagaagucaaucuguguaauguggauaucuuuaacccuaaauaugacugcaagauuaugaccaguaaaacagauguaagcuccucuguuaucacuagccucggugccauagugucauguuacggcaagaccaaaugcacagcaaguaauaagaacaaggggauuaucaaaaccuucuccaauggaugugacuaugucagcaacaagggcguggacacugucucuguggguaauacgcuguacuauguuaacaaacaggaggggcagucacuuuacgugaagggagagccaaucauuaacuuuuaugauccgcugguauuccccagugacgaauuugaugcuagcaucucccaagucaaugagaaaauuaaccagucuuuggccuucauaaggaagucggacgaacuccugcacaaugugaacgcgggcaagagcacaaccaauaucaugauuacuaccaucaucauuguuauaaucgugauuuuacugucccuaaucgccgucggccuccugcuuuacugcaaagcacggugaggacuaguacuggcugcaucucccuuuccucuguccuccauccuucucccaggauggugaagggggaccugguacccagugauccccaccccaggauccuaaaucaugacuuaccugcuaauaaaaacucauuggaaaagugagaagaucuaaaaaaaaaaaaaaaaaaaaaaaaaaaaaaaaaaaaaaaaaaaaaaaaaaaaaaaaaaaaaaaaugcaucccccccccccccccccccccccccccccccaaaggcucuuuucagagccaccagaauu

SEQ ID NO: 6542 - RNA, 1920 nt, Artificial Sequence
  mRNA product Design c-3 comprising derived and/or modified sequence from HRSV(A2)__F-del_DSCav1_mut6 (opt4)
gggagaguccgcucagccagguugcagaagcggcuuagcguguguccuaaucuucucucugcguguagguaggccugugccgcaaacaagcuuaccauggagcugcugauccugaaggccaacgccaucaccaccauccugaccgccgugaccuucugcuucgccagcggccagaacaucaccgaggaguucuaccagagcaccugcagcgccgugagcaagggcuaccugggcgcccugagaaccggcugguacaccagcgugaucaccaucgagcugagcaacaucaaggagaacaagugcaacggcaccgacgccaaggugaagcugaucaagcaggagcuggacaaguacaagaacgccgugaccgaccugcagaugcugaugugcagcacccccgccaccggcagcggcagcgccaucgccagcggcguggccgugugcaaggugcugcaccuggagggcgaggugaacaagaucaagagcgcccugcugagcaccaacaaggccguggugagccugagcaacggcgugagcgugcugaccuucaaggugcuggaccugaagaacuacaucgacaagcagcugcugcccauccugaacaagcagagcugcagcauccccaaccccgagaccgugauggaguuccagcagaagaacaacagacugcuggagaucaccagagaguucagcgugaacgccggcgugaccacccccgugagcaccuacaugcugaccaacagcgagcugcugagccugaucaacgacaugcccaucaccaacgaccagaagaagcugaugagcaacaacgugcagaucgugagacagcagagcuacagcaucaugugcaucaucaaggaggaggugcuggccuacguggugcagcugccccuguacggcgugaucgacacccccugcuggaagcugcacaccagcccccugugcaccaccaacaccaaggagggcagcaacaucugccugaccagaaccgacagaggcugguacugcgacaacgccggcagcgugagcuucuucccccaggccgagaccugcaaggugugcagcaacagaguguucugcgacaccaugaacagccugacccugcccagcgaggugaaccugugcaacguggacaucuucaaccccaaguacgacugcaagaucaugaccagcaagaccgacgugagcagcagcgugaucaccagccugggcgccaucgugagcugcuacggcaagaccaagugcaccgccagcaacaagaacaagggcaucaucaagaccuucagcaacggcugcgacuacgugagcaacaagggcguggacaccgugagcgugggcaacacccuguacuacgugaacaagcaggagggccagagccuguacgugaagggcgagcccaucaucaacuucuacgacccccugguguuccccagcgacgaguucgacgccagcaucagccaggugaacgagaagaucaaccagagccuggccuucaucagaaagagcgacgagcugcugcacaacgugaacgccggcaagagcaccaccaacaucaugaucaccaccaucaucaucgugaucaucgugauccugcugagccugaucgccgugggccugcugcuguacugcaaggccagaugaggacuaguacuggcugcaucucccuuuccucuguccuccauccuucucccaggauggugaagggggaccugguacccagugauccccaccccaggauccuaaaucaugacuuaccugcuaauaaaaacucauuggaaaagugagaagaucuaaaaaaaaaaaaaaaaaaaaaaaaaaaaaaaaaaaaaaaaaaaaaaaaaaaaaaaaaaaaaaaaugcaucccccccccccccccccccccccccccccccaaaggcucuuuucagagccaccagaauu

SEQ ID NO: 6543 - RNA, 1920 nt, Artificial Sequence
  mRNA product Design c-3 comprising derived and/or modified sequence from HRSV(A2)__F-del_DSCav1_mut6 (opt5)
gggagaguccgcucagccagguugcagaagcggcuuagcguguguccuaaucuucucucugcguguagguaggccugugccgcaaacaagcuuaccauggagcugcucauccugaaggccaacgcuauuaccacaauccuuacggccgugaccuucugcuuugcgagcggccagaauauuacagaagaguucuaccaauccaccuguucugcugucagcaaaggguaucugggagcccucagaacaggcugguacaccuccguuaucacaauugaacugucuaacaucaaggagaauaaaugcaacgggaccgacgccaaggugaaacuuaucaagcaggaacuggauaaguauaaaaaugcugugacggaccuccagaugcugauguguagcacccccgccacaggauccggcucugcuauugccagcggggucgcggugugcaagguucugcaccucgagggagaggugaacaaaaucaaguccgcccugcuuagcaccaauaaagcugucgugucucuguccaacggcguuagcgugcucacauuuaagguccuggaucuuaagaauuacauugacaaacagcugcucccuauccugaacaagcaaucuuguuccauuccgaaucccgaaaccgugauggaguuccagcagaaaaacaaucggcugcucgaaaucacgcgcgaguuuagcgugaacgccggcgucacaaccccuguuucuacauauaugcugaccaauuccgagcuucugagccucauuaacgauaugcccaucaccaacgaccagaagaaacugauguccaauaacgugcaaaucgugagacagcagucuuacagcauuaugugcaucauuaaggaagagguccuugcuuaugugguucagcugccucucuacggggugaucgauacacccuguuggaaacugcauacguccccucugugcaccacaaauaccaaggaaggaagcaacauuugucucacacggaccgaccgcggcugguacugcgauaaugccgggucugucuccuucuuuccgcaagcggagacguguaaggugugcagcaacagaguuuucugcgacacaaugaacucucugacccuucccagcgaagugaaucuguguaaugucgauaucuuuaacccuaaauaugacugcaagaucaugaccuccaaaacagaugugucuagcuccgucauuaccagccucggagccaucgugucuuguuacggcaagacaaaaugcacggcuuccaauaagaacaaggggauuaucaaaaccuucagcaauggaugugacuauguuucuaacaagggcguggacacagucuccgugggcaauacccuguacuauguuaacaaacaggaggggcagagccuuuacgugaagggagagcccauuaucaacuuuuaugauccucuggucuuccccuccgacgaauuugaugccucuaucagccaagugaaugagaaaauuaaccagucccucgcuuucauccggaagucugacgaacugcugcacaaugugaacgccggcaagagcacaaccaauauuaugaucacgaccauuaucauuguuaucaucgucauucuccugucccuuaucgccguggggcugcuccuguacugcaaagcucgcugaggacuaguacuggcugcaucucccuuuccucuguccuccauccuucucccaggauggugaagggggaccugguacccagugauccccaccccaggauccuaaaucaugacuuaccugcuaauaaaaacucauuggaaaagugagaagaucuaaaaaaaaaaaaaaaaaaaaaaaaaaaaaaaaaaaaaaaaaaaaaaaaaaaaaaaaaaaaaaaaugcaucccccccccccccccccccccccccccccccaaaggcucuuuucagagccaccagaauu

SEQ ID NO: 6544 - RNA, 1920 nt, Artificial Sequence
  mRNA product Design c-3 comprising derived and/or modified sequence from HRSV(A2)__F-del_DSCav1_mut6 (opt6)
gggagaguccgcucagccagguugcagaagcggcuuagcguguguccuaaucuucucucugcguguagguaggccugugccgcaaacaagcuuaccauggaacuacucauauuaaaagcaaacgcaauaacaacgauauuaacagcuguaacauucugcuuugcaucaggccaaaauaucaccgaagaauuuuaucaaagcacaugcucugcaguauccaaaggauacuuaggagcauuaagaacaggcugguacacauccguaauaacaauagaacuaucaaacaucaaagaaaacaaaugcaacggcacagacgccaaaguaaaacucauaaaacaagaacuagacaaauauaaaaacgcaguaacagaucuacaaaugcucaugugcuccacaccagcaaccggaucugguucagccauagcauccggcguagccgucugcaaaguauuacaccucgaaggagaaguaaacaaaauaaaaucugcccuauuaucuacaaauaaagccguaguaagucuaaguaacggaguaucaguacuaacauuuaaaguccuagaccugaaaaacuauaucgacaaacaacuauuaccaauacuaaacaaacaauccuguuccaucccuaacccagaaacaguuauggaauuucaacaaaaaaauaaccgccuuuuagaaauaacuagagaauuuucaguaaacgcaggaguuacaacaccaguaucaacauacaugcuaacaaauucagaauuauuaucccuuauaaaugacaugccuaucacaaacgaucaaaaaaaauuaauguccaacaacguacaaauaguaagacaacaaucauauuccaucaugugcaucauaaaagaagaaguccucgcauacguagugcaacuaccacuauacggagucauagauacacccuguuggaaacuucacacaucuccacuaugcacaacaaacacgaaagaaggauccaacauaugccuaacacgaacagacagaggaugguauugcgacaacgcuggaagugugagcuucuucccucaagcagaaacuugcaaaguaugcagcaaucguguauucugcgacacaaugaacucauuaacacucccaagcgaaguaaaccucugcaauguagacaucuuuaauccaaaauacgauuguaaaauaaugacuucaaaaacagacgucucaucaucuguaauaacaucuuuaggagcaauaguuucuugcuacgguaaaacaaaaugcaccgcauccaacaaaaacaaaggaauaauaaaaacauucucuaacggcugcgauuacguaucuaacaaaggaguugacacagucucaguaggaaacacacuauacuacguaaacaaacaagaaggacaaagccuauacguaaaaggagaaccaauaauaaacuucuaugacccauuaguauuuccaagcgaugaauuugacgcuucaauaucacaagucaaugaaaaaauaaaucagagcuuagcauucauaagaaaaucugaugaacuacuacacaauguaaaugcaggaaaauccacuaccaacauaaugauuaccacaauuauaauaguuaucauaguaauacuauuaucacuaauagccguuggauuacuacuauacugcaaagcaagauaaggacuaguacuggcugcaucucccuuuccucuguccuccauccuucucccaggauggugaagggggaccugguacccagugauccccaccccaggauccuaaaucaugacuuaccugcuaauaaaaacucauuggaaaagugagaagaucuaaaaaaaaaaaaaaaaaaaaaaaaaaaaaaaaaaaaaaaaaaaaaaaaaaaaaaaaaaaaaaaaugcaucccccccccccccccccccccccccccccccaaaggcucuuuucagagccaccagaauu

SEQ ID NO: 6545 - RNA, 1920 nt, Artificial Sequence
  mRNA product Design c-3 comprising derived and/or modified sequence from HRSV(A2)__F-del_DSCav1_mut6 (opt11)
gggagaguccgcucagccagguugcagaagcggcuuagcguguguccuaaucuucucucugcguguagguaggccugugccgcaaacaagcuuaccauggaacuacucauccuaaaagcaaacgccaucaccaccauacuaaccgccgucaccuucugcuucgccucgggacaaaacaucaccgaagaguucuaccagucaacgugcuccgccgucucaaaaggcuaccuaggcgcccuccgcaccgggugguauaccuccgucauaacuaucgaacucucuaacaucaaagaaaacaaauguaacggcaccgacgccaaagucaaacuaaucaaacaagaacuggacaaauacaaaaacgccgucaccgaccuacaaaugcucaugugcuccacuccagccaccggcuccgguagcgcaaucgccucaggcguagcuguaugcaaaguccuccaccuagaaggcgaaguaaacaaaauaaaauccgcccuccucucaaccaacaaggccgucgucucacucucaaacggcgucuccguacucaccuuuaaaguccuagaccuuaaaaacuacaucgacaaacaacugcuaccaauccucaacaaacaaucaugcagcaucccaaacccggaaacagucauggaguuccaacagaaaaacaaccgacuccucgaaaucacccgcgaguucuccgucaacgccggagucaccacaccuguaagcacauacaugcuuacuaauuccgaacuccuuucacuaauaaacgacaugccaauaaccaacgaccaaaagaaacucauguccaacaacguacaaaucguacgccaacaauccuacuccaucaugugcaucaucaaagaagaaguccuggccuaugucguacaacucccccuuuacggugucaucgacacacccugcuggaaacuacacaccagcccccucugcacaacaaacaccaaagaaggcuccaacaucugccucacccguaccgaccgaggcugguacugcgacaacgccggcuccgucuccuucuucccccaagccgaaaccugcaaagucugcagcaaccgcgucuucugcgauaccaugaacucccucacacucccaucugaagucaaccucugcaacgucgauauuuucaauccaaaauacgacugcaaaaucaugacuagcaaaaccgacguuagcuccuccgucaucaccucccucggcgccauaguuucaugcuacggcaaaaccaaaugcaccgccuccaacaaaaacaaaggcaucauaaaaaccuucuccaacgggugcgacuacguaucuaauaaaggagucgacaccgucucaguaggaaacacccucuacuaugucaacaaacaagaaggccaaucacuauacguuaaaggcgaaccaaucaucaacuucuacgacccacucgucuuccccagcgacgaguuugacgccucaaucucgcaagucaaugaaaagauuaaccaaucccuagccuucauccgaaaaagugacgaacuccuccacaacguuaacgccggcaaaucuacaaccaacaucaugaucaccacuauaaucaucgucaucauagucauacuucucagccucaucgcagucggacuccuccuuuauugcaaggcacgauaaggacuaguacuggcugcaucucccuuuccucuguccuccauccuucucccaggauggugaagggggaccugguacccagugauccccaccccaggauccuaaaucaugacuuaccugcuaauaaaaacucauuggaaaagugagaagaucuaaaaaaaaaaaaaaaaaaaaaaaaaaaaaaaaaaaaaaaaaaaaaaaaaaaaaaaaaaaaaaaaugcaucccccccccccccccccccccccccccccccaaaggcucuuuucagagccaccagaauu

SEQ ID NO: 6546 - RNA, 1916 nt, Artificial Sequence
  mRNA product Design c-4 comprising derived and/or modified sequence from HRSV(A2)__F-del_DSCav1_mut6 (opt1)
gggagaguccgcucagccagguugcagaagcggcuuagcguguguccuaaucuucucucugcguguagguaggccugugccgcaaacaagcuuaccauggagcugcucauccugaaggccaacgccaucaccaccauccugacggcggugaccuucugcuucgccagcggccagaacaucaccgaggaguucuaccaguccacgugcagcgccgucuccaagggguaccucggcgcccugcggaccggcugguacaccuccgugaucaccaucgagcugagcaacaucaaggagaacaagugcaacgggaccgacgccaaggugaagcucaucaagcaggagcuggacaaguacaagaacgcggucacggaccugcagaugcugaugugcuccaccccggcaaccggcuccggcuccgccaucgcgagcggcgucgccgugugcaaggugcugcaccucgagggggaggucaacaagaucaagagcgcccugcuguccaccaacaaggccguggugagccucuccaacggcgucagcgugcugaccuucaaggugcuggaccucaagaacuacaucgacaagcagcugcugcccauccugaacaagcagagcugcuccauccccaaccccgagacggugauggaguuccagcagaagaacaaccggcuccuggagaucacccgcgaguucagcgugaacgccggggucaccacccccguguccacguacaugcugaccaacagcgagcuccugucccugaucaacgacaugccgaucaccaacgaccagaagaagcucaugagcaacaacgugcagaucguccggcagcaguccuacagcaucaugugcaucaucaaggaggaggugcuggcguacgugguccagcugccccucuacggcgugaucgacacccccugcuggaagcugcacacgagcccccugugcaccaccaacaccaaggagggguccaacaucugccucacgcgcaccgaccggggcugguacugcgacaacgccggcagcgucuccuucuucccgcaggccgagaccugcaaggugugcagcaaccgcguguucugcgacaccaugaacucccugacgcugcccagcgagguaaaccucugcaacgucgacaucuucaaccccaaguacgacugcaagaucaugaccuccaagaccgacgugagcuccagcgugaucaccucccugggggccaucgucagcugcuacggcaagacgaagugcaccgccagcaacaagaacaaggggaucaucaagaccuucuccaacggcugcgacuacgugagcaacaagggcguggacaccguguccgucgggaacacccuguacuacgugaacaagcaggagggccagagccucuacgugaagggggagcccaucaucaacuucuacgacccgcuggucuuccccuccgacgaguucgacgcgagcaucucccaggugaacgagaagaucaaccagagccuggccuucauccgcaaguccgacgagcugcuccacaacgugaacgccggcaagagcacgaccaacaucaugaucaccaccaucaucaucgucaucaucgugauccugcugucccucaucgccguggggcugcugcucuacugcaaggcccggugaggacuaguggaagcauuuuccuggcugauuaaaagaaauuacucagcuauggucaucuguuccuguuagaaggcuaugcagcauauuauauacuaugcgcauguuaugaaaugcauaauaaaaaauuuuaaaaaaucuaaaagaucuaaaaaaaaaaaaaaaaaaaaaaaaaaaaaaaaaaaaaaaaaaaaaaaaaaaaaaaaaaaaaaaaugcaucccccccccccccccccccccccccccccccaaaggcucuuuucagagccaccagaauu

SEQ ID NO: 6547 - RNA, 1916 nt, Artificial Sequence
  mRNA product Design c-4 comprising derived and/or modified sequence from HRSV(A2)__F-del_DSCav1_mut6 (opt1)
gggagaguccgcucagccagguugcagaagcggcuuagcguguguccuaaucuucucucugcguguagguaggccugugccgcaaacaagcuuaccauggagcugcucauccugaaggccaacgccaucaccaccauccugacggcggugaccuucugcuucgccagcggccagaacaucaccgaggaguucuaccaguccacgugcagcgccgucuccaagggguaccucggcgcccugcgcaccgggugguacaccagcgugaucaccaucgagcuguccaacaucaaggagaacaagugcaacggcaccgacgccaaggugaagcucaucaagcaggagcuggacaaguacaagaacgcggucacggaccugcagaugcucaugugcagcacccccgccaccggguccggcagcgccaucgccuccggcguggcggugugcaagguccugcaccuggagggggaggugaacaagaucaagagcgcccuccuguccaccaacaaggccguggucagccuguccaacggcgugagcgugcucacguucaagguccuggaccugaagaacuacaucgacaagcagcuccugccgauccugaacaagcaguccugcagcauccccaaccccgagaccgugauggaguuccagcagaagaacaaccggcuccuggagaucacccgcgaguucuccgugaacgccggggucaccacgcccgugagcaccuacaugcugaccaacuccgagcuccugagccugaucaacgacaugccgaucaccaacgaccagaagaagcucaugagcaacaacgugcagaucguccggcagcaguccuacagcaucaugugcaucaucaaggaggaggugcuggccuacgugguccagcugccccucuacggcgugaucgacacgcccugcuggaagcugcacaccagcccccugugcaccaccaacacgaaggaggggagcaacaucugccucacccgcaccgaccggggcugguacugcgacaacgcgggcuccgugagcuucuucccgcaggccgagaccugcaaggucugcuccaaccgcguguucugcgacacgaugaacagccugacccugcccuccgaggucaaccucugcaacguggacaucuucaaccccaaguacgacugcaagaucaugaccagcaagaccgacguguccagcuccgucaucacgagccugggggccaucguguccugcuacggcaagaccaagugcaccgccagcaacaagaacaaggggaucaucaagaccuucuccaacggcugcgacuacgugagcaacaagggcgucgacacgguguccguggggaacacccuguacuacgucaacaagcaggagggccagagccucuacgugaagggggagcccaucaucaacuucuacgacccgcugguguuccccagcgacgaguucgacgccuccaucagccaggucaacgagaagaucaaccagucccuggcguucauccggaaguccgacgagcuccugcacaacgugaacgccggcaaguccaccaccaacaucaugaucaccacgaucaucaucgugaucaucgucauccugcucagccugaucgccguggggcugcuccuguacugcaaggcccgcugaggacuaguggaagcauuuuccuggcugauuaaaagaaauuacucagcuauggucaucuguuccuguuagaaggcuaugcagcauauuauauacuaugcgcauguuaugaaaugcauaauaaaaaauuuuaaaaaaucuaaaagaucuaaaaaaaaaaaaaaaaaaaaaaaaaaaaaaaaaaaaaaaaaaaaaaaaaaaaaaaaaaaaaaaaugcaucccccccccccccccccccccccccccccccaaaggcucuuuucagagccaccagaauu

SEQ ID NO: 6548 - RNA, 1916 nt, Artificial Sequence
  mRNA product Design c-4 comprising derived and/or modified sequence from HRSV(A2)__F-del_DSCav1_mut6 (opt2)
gggagaguccgcucagccagguugcagaagcggcuuagcguguguccuaaucuucucucugcguguagguaggccugugccgcaaacaagcuuaccauggagcuccucauccucaaggccaacgccaucaccaccauccucaccgccgucaccuucugcuucgccuccggccagaacaucaccgaggaguucuaccaguccaccugcuccgccgucuccaagggcuaccucggcgcccuccgcaccggcugguacaccuccgucaucaccaucgagcucuccaacaucaaggagaacaagugcaacggcaccgacgccaaggucaagcucaucaagcaggagcucgacaaguacaagaacgccgucaccgaccuccagaugcucaugugcuccacccccgccaccggcuccggcuccgccaucgccuccggcgucgccgucugcaagguccuccaccucgagggcgaggucaacaagaucaaguccgcccuccucuccaccaacaaggccgucgucucccucuccaacggcgucuccguccucaccuucaagguccucgaccucaagaacuacaucgacaagcagcuccuccccauccucaacaagcaguccugcuccauccccaaccccgagaccgucauggaguuccagcagaagaacaaccgccuccucgagaucacccgcgaguucuccgucaacgccggcgucaccacccccgucuccaccuacaugcucaccaacuccgagcuccucucccucaucaacgacaugcccaucaccaacgaccagaagaagcucauguccaacaacguccagaucguccgccagcaguccuacuccaucaugugcaucaucaaggaggagguccucgccuacgucguccagcucccccucuacggcgucaucgacacccccugcuggaagcuccacaccuccccccucugcaccaccaacaccaaggagggcuccaacaucugccucacccgcaccgaccgcggcugguacugcgacaacgccggcuccgucuccuucuucccccaggccgagaccugcaaggucugcuccaaccgcgucuucugcgacaccaugaacucccucacccuccccuccgaggucaaccucugcaacgucgacaucuucaaccccaaguacgacugcaagaucaugaccuccaagaccgacgucuccuccuccgucaucaccucccucggcgccaucgucuccugcuacggcaagaccaagugcaccgccuccaacaagaacaagggcaucaucaagaccuucuccaacggcugcgacuacgucuccaacaagggcgucgacaccgucuccgucggcaacacccucuacuacgucaacaagcaggagggccagucccucuacgucaagggcgagcccaucaucaacuucuacgacccccucgucuuccccuccgacgaguucgacgccuccaucucccaggucaacgagaagaucaaccagucccucgccuucauccgcaaguccgacgagcuccuccacaacgucaacgccggcaaguccaccaccaacaucaugaucaccaccaucaucaucgucaucaucgucauccuccucucccucaucgccgucggccuccuccucuacugcaaggcccgcugaggacuaguggaagcauuuuccuggcugauuaaaagaaauuacucagcuauggucaucuguuccuguuagaaggcuaugcagcauauuauauacuaugcgcauguuaugaaaugcauaauaaaaaauuuuaaaaaaucuaaaagaucuaaaaaaaaaaaaaaaaaaaaaaaaaaaaaaaaaaaaaaaaaaaaaaaaaaaaaaaaaaaaaaaaugcaucccccccccccccccccccccccccccccccaaaggcucuuuucagagccaccagaauu

SEQ ID NO: 6549 - RNA, 1916 nt, Artificial Sequence
  mRNA product Design c-4 comprising derived and/or modified sequence from HRSV(A2)__F-del_DSCav1_mut6 (opt3)
gggagaguccgcucagccagguugcagaagcggcuuagcguguguccuaaucuucucucugcguguagguaggccugugccgcaaacaagcuuaccauggagcugcucauccuuaaggccaacgcuauuaccacaauacugacugcagugacguucugcuuugccagcggccagaauaucaccgaagaguucuaccaauccacauguucugcggucucaaaaggguauuugggagcuuuaagaacugguugguacaccaguguuauuacaaucgaacugagcaacauuaaggagaauaaaugcaacggcaccgacgccaaggugaaacuaaucaagcaggaacucgauaaguauaaaaaugcaguaacugaccugcagaugcuuauguguuccacacccgccaccgggucuggaucggcuauagcaucaggcguggccgucugcaaggugcugcacuuggagggugagguuaacaaaaucaagagcgcucuccugaguacgaauaaagccguggucucccugucuaacggggugagcguacucacuuuuaagguuuuagaucugaagaauuacauugacaaacagcuuuugccuauccugaacaagcaauccuguucaauuccaaauccggaaaccgugauggaguuccagcagaaaaacaauaggcuacucgaaaucacacgggaguuuagugucaacgcgggagugacuacccccgugagcacauauaugcugaccaauucugagcuucuguccuugauaaacgauaugccuauuacgaacgaccagaagaaacucaugucaaauaacguccaaaucguucgccagcagagcuacaguauuaugugcaucaucaaggaagaggugcuggcauauguagugcaguuaccacuguacggcgucauugauacucccuguuggaaacuccauacaucuccucuuugcaccacuaauacaaaggaaggcuccaacauaugucugacccgaacggaccgugggugguacugcgauaaugccggaagcgugucguucuuuccacaagcugagaccuguaagguuugcucuaacagaguguucugcgacacaaugaacuccuugacucuacccucagaagucaaucuguguaauguggauaucuuuaacccuaaauaugacugcaagauuaugaccaguaaaacagauguaagcuccucuguuaucacuagccucggugccauagugucauguuacggcaagaccaaaugcacagcaaguaauaagaacaaggggauuaucaaaaccuucuccaauggaugugacuaugucagcaacaagggcguggacacugucucuguggguaauacgcuguacuauguuaacaaacaggaggggcagucacuuuacgugaagggagagccaaucauuaacuuuuaugauccgcugguauuccccagugacgaauuugaugcuagcaucucccaagucaaugagaaaauuaaccagucuuuggccuucauaaggaagucggacgaacuccugcacaaugugaacgcgggcaagagcacaaccaauaucaugauuacuaccaucaucauuguuauaaucgugauuuuacugucccuaaucgccgucggccuccugcuuuacugcaaagcacggugaggacuaguggaagcauuuuccuggcugauuaaaagaaauuacucagcuauggucaucuguuccuguuagaaggcuaugcagcauauuauauacuaugcgcauguuaugaaaugcauaauaaaaaauuuuaaaaaaucuaaaagaucuaaaaaaaaaaaaaaaaaaaaaaaaaaaaaaaaaaaaaaaaaaaaaaaaaaaaaaaaaaaaaaaaugcaucccccccccccccccccccccccccccccccaaaggcucuuuucagagccaccagaauu

SEQ ID NO: 6550 - RNA, 1916 nt, Artificial Sequence
  mRNA product Design c-4 comprising derived and/or modified sequence from HRSV(A2)__F-del_DSCav1_mut6 (opt4)
gggagaguccgcucagccagguugcagaagcggcuuagcguguguccuaaucuucucucugcguguagguaggccugugccgcaaacaagcuuaccauggagcugcugauccugaaggccaacgccaucaccaccauccugaccgccgugaccuucugcuucgccagcggccagaacaucaccgaggaguucuaccagagcaccugcagcgccgugagcaagggcuaccugggcgcccugagaaccggcugguacaccagcgugaucaccaucgagcugagcaacaucaaggagaacaagugcaacggcaccgacgccaaggugaagcugaucaagcaggagcuggacaaguacaagaacgccgugaccgaccugcagaugcugaugugcagcacccccgccaccggcagcggcagcgccaucgccagcggcguggccgugugcaaggugcugcaccuggagggcgaggugaacaagaucaagagcgcccugcugagcaccaacaaggccguggugagccugagcaacggcgugagcgugcugaccuucaaggugcuggaccugaagaacuacaucgacaagcagcugcugcccauccugaacaagcagagcugcagcauccccaaccccgagaccgugauggaguuccagcagaagaacaacagacugcuggagaucaccagagaguucagcgugaacgccggcgugaccacccccgugagcaccuacaugcugaccaacagcgagcugcugagccugaucaacgacaugcccaucaccaacgaccagaagaagcugaugagcaacaacgugcagaucgugagacagcagagcuacagcaucaugugcaucaucaaggaggaggugcuggccuacguggugcagcugccccuguacggcgugaucgacacccccugcuggaagcugcacaccagcccccugugcaccaccaacaccaaggagggcagcaacaucugccugaccagaaccgacagaggcugguacugcgacaacgccggcagcgugagcuucuucccccaggccgagaccugcaaggugugcagcaacagaguguucugcgacaccaugaacagccugacccugcccagcgaggugaaccugugcaacguggacaucuucaaccccaaguacgacugcaagaucaugaccagcaagaccgacgugagcagcagcgugaucaccagccugggcgccaucgugagcugcuacggcaagaccaagugcaccgccagcaacaagaacaagggcaucaucaagaccuucagcaacggcugcgacuacgugagcaacaagggcguggacaccgugagcgugggcaacacccuguacuacgugaacaagcaggagggccagagccuguacgugaagggcgagcccaucaucaacuucuacgacccccugguguuccccagcgacgaguucgacgccagcaucagccaggugaacgagaagaucaaccagagccuggccuucaucagaaagagcgacgagcugcugcacaacgugaacgccggcaagagcaccaccaacaucaugaucaccaccaucaucaucgugaucaucgugauccugcugagccugaucgccgugggccugcugcuguacugcaaggccagaugaggacuaguggaagcauuuuccuggcugauuaaaagaaauuacucagcuauggucaucuguuccuguuagaaggcuaugcagcauauuauauacuaugcgcauguuaugaaaugcauaauaaaaaauuuuaaaaaaucuaaaagaucuaaaaaaaaaaaaaaaaaaaaaaaaaaaaaaaaaaaaaaaaaaaaaaaaaaaaaaaaaaaaaaaaugcaucccccccccccccccccccccccccccccccaaaggcucuuuucagagccaccagaauu

SEQ ID NO: 6551 - RNA, 1916 nt, Artificial Sequence
  mRNA product Design c-4 comprising derived and/or modified sequence from HRSV(A2)__F-del_DSCav1_mut6 (opt5)
gggagaguccgcucagccagguugcagaagcggcuuagcguguguccuaaucuucucucugcguguagguaggccugugccgcaaacaagcuuaccauggagcugcucauccugaaggccaacgcuauuaccacaauccuuacggccgugaccuucugcuuugcgagcggccagaauauuacagaagaguucuaccaauccaccuguucugcugucagcaaaggguaucugggagcccucagaacaggcugguacaccuccguuaucacaauugaacugucuaacaucaaggagaauaaaugcaacgggaccgacgccaaggugaaacuuaucaagcaggaacuggauaaguauaaaaaugcugugacggaccuccagaugcugauguguagcacccccgccacaggauccggcucugcuauugccagcggggucgcggugugcaagguucugcaccucgagggagaggugaacaaaaucaaguccgcccugcuuagcaccaauaaagcugucgugucucuguccaacggcguuagcgugcucacauuuaagguccuggaucuuaagaauuacauugacaaacagcugcucccuauccugaacaagcaaucuuguuccauuccgaaucccgaaaccgugauggaguuccagcagaaaaacaaucggcugcucgaaaucacgcgcgaguuuagcgugaacgccggcgucacaaccccuguuucuacauauaugcugaccaauuccgagcuucugagccucauuaacgauaugcccaucaccaacgaccagaagaaacugauguccaauaacgugcaaaucgugagacagcagucuuacagcauuaugugcaucauuaaggaagagguccuugcuuaugugguucagcugccucucuacggggugaucgauacacccuguuggaaacugcauacguccccucugugcaccacaaauaccaaggaaggaagcaacauuugucucacacggaccgaccgcggcugguacugcgauaaugccgggucugucuccuucuuuccgcaagcggagacguguaaggugugcagcaacagaguuuucugcgacacaaugaacucucugacccuucccagcgaagugaaucuguguaaugucgauaucuuuaacccuaaauaugacugcaagaucaugaccuccaaaacagaugugucuagcuccgucauuaccagccucggagccaucgugucuuguuacggcaagacaaaaugcacggcuuccaauaagaacaaggggauuaucaaaaccuucagcaauggaugugacuauguuucuaacaagggcguggacacagucuccgugggcaauacccuguacuauguuaacaaacaggaggggcagagccuuuacgugaagggagagcccauuaucaacuuuuaugauccucuggucuuccccuccgacgaauuugaugccucuaucagccaagugaaugagaaaauuaaccagucccucgcuuucauccggaagucugacgaacugcugcacaaugugaacgccggcaagagcacaaccaauauuaugaucacgaccauuaucauuguuaucaucgucauucuccugucccuuaucgccguggggcugcuccuguacugcaaagcucgcugaggacuaguggaagcauuuuccuggcugauuaaaagaaauuacucagcuauggucaucuguuccuguuagaaggcuaugcagcauauuauauacuaugcgcauguuaugaaaugcauaauaaaaaauuuuaaaaaaucuaaaagaucuaaaaaaaaaaaaaaaaaaaaaaaaaaaaaaaaaaaaaaaaaaaaaaaaaaaaaaaaaaaaaaaaugcaucccccccccccccccccccccccccccccccaaaggcucuuuucagagccaccagaauu

SEQ ID NO: 6552 - RNA, 1916 nt, Artificial Sequence
  mRNA product Design c-4 comprising derived and/or modified sequence from HRSV(A2)__F-del_DSCav1_mut6 (opt6)
gggagaguccgcucagccagguugcagaagcggcuuagcguguguccuaaucuucucucugcguguagguaggccugugccgcaaacaagcuuaccauggaacuacucauauuaaaagcaaacgcaauaacaacgauauuaacagcuguaacauucugcuuugcaucaggccaaaauaucaccgaagaauuuuaucaaagcacaugcucugcaguauccaaaggauacuuaggagcauuaagaacaggcugguacacauccguaauaacaauagaacuaucaaacaucaaagaaaacaaaugcaacggcacagacgccaaaguaaaacucauaaaacaagaacuagacaaauauaaaaacgcaguaacagaucuacaaaugcucaugugcuccacaccagcaaccggaucugguucagccauagcauccggcguagccgucugcaaaguauuacaccucgaaggagaaguaaacaaaauaaaaucugcccuauuaucuacaaauaaagccguaguaagucuaaguaacggaguaucaguacuaacauuuaaaguccuagaccugaaaaacuauaucgacaaacaacuauuaccaauacuaaacaaacaauccuguuccaucccuaacccagaaacaguuauggaauuucaacaaaaaaauaaccgccuuuuagaaauaacuagagaauuuucaguaaacgcaggaguuacaacaccaguaucaacauacaugcuaacaaauucagaauuauuaucccuuauaaaugacaugccuaucacaaacgaucaaaaaaaauuaauguccaacaacguacaaauaguaagacaacaaucauauuccaucaugugcaucauaaaagaagaaguccucgcauacguagugcaacuaccacuauacggagucauagauacacccuguuggaaacuucacacaucuccacuaugcacaacaaacacgaaagaaggauccaacauaugccuaacacgaacagacagaggaugguauugcgacaacgcuggaagugugagcuucuucccucaagcagaaacuugcaaaguaugcagcaaucguguauucugcgacacaaugaacucauuaacacucccaagcgaaguaaaccucugcaauguagacaucuuuaauccaaaauacgauuguaaaauaaugacuucaaaaacagacgucucaucaucuguaauaacaucuuuaggagcaauaguuucuugcuacgguaaaacaaaaugcaccgcauccaacaaaaacaaaggaauaauaaaaacauucucuaacggcugcgauuacguaucuaacaaaggaguugacacagucucaguaggaaacacacuauacuacguaaacaaacaagaaggacaaagccuauacguaaaaggagaaccaauaauaaacuucuaugacccauuaguauuuccaagcgaugaauuugacgcuucaauaucacaagucaaugaaaaaauaaaucagagcuuagcauucauaagaaaaucugaugaacuacuacacaauguaaaugcaggaaaauccacuaccaacauaaugauuaccacaauuauaauaguuaucauaguaauacuauuaucacuaauagccguuggauuacuacuauacugcaaagcaagauaaggacuaguggaagcauuuuccuggcugauuaaaagaaauuacucagcuauggucaucuguuccuguuagaaggcuaugcagcauauuauauacuaugcgcauguuaugaaaugcauaauaaaaaauuuuaaaaaaucuaaaagaucuaaaaaaaaaaaaaaaaaaaaaaaaaaaaaaaaaaaaaaaaaaaaaaaaaaaaaaaaaaaaaaaaugcaucccccccccccccccccccccccccccccccaaaggcucuuuucagagccaccagaauu

SEQ ID NO: 6553 - RNA, 1916 nt, Artificial Sequence
  mRNA product Design c-4 comprising derived and/or modified sequence from HRSV(A2)__F-del_DSCav1_mut6 (opt11)
gggagaguccgcucagccagguugcagaagcggcuuagcguguguccuaaucuucucucugcguguagguaggccugugccgcaaacaagcuuaccauggaacuacucauccuaaaagcaaacgccaucaccaccauacuaaccgccgucaccuucugcuucgccucgggacaaaacaucaccgaagaguucuaccagucaacgugcuccgccgucucaaaaggcuaccuaggcgcccuccgcaccgggugguauaccuccgucauaacuaucgaacucucuaacaucaaagaaaacaaauguaacggcaccgacgccaaagucaaacuaaucaaacaagaacuggacaaauacaaaaacgccgucaccgaccuacaaaugcucaugugcuccacuccagccaccggcuccgguagcgcaaucgccucaggcguagcuguaugcaaaguccuccaccuagaaggcgaaguaaacaaaauaaaauccgcccuccucucaaccaacaaggccgucgucucacucucaaacggcgucuccguacucaccuuuaaaguccuagaccuuaaaaacuacaucgacaaacaacugcuaccaauccucaacaaacaaucaugcagcaucccaaacccggaaacagucauggaguuccaacagaaaaacaaccgacuccucgaaaucacccgcgaguucuccgucaacgccggagucaccacaccuguaagcacauacaugcuuacuaauuccgaacuccuuucacuaauaaacgacaugccaauaaccaacgaccaaaagaaacucauguccaacaacguacaaaucguacgccaacaauccuacuccaucaugugcaucaucaaagaagaaguccuggccuaugucguacaacucccccuuuacggugucaucgacacacccugcuggaaacuacacaccagcccccucugcacaacaaacaccaaagaaggcuccaacaucugccucacccguaccgaccgaggcugguacugcgacaacgccggcuccgucuccuucuucccccaagccgaaaccugcaaagucugcagcaaccgcgucuucugcgauaccaugaacucccucacacucccaucugaagucaaccucugcaacgucgauauuuucaauccaaaauacgacugcaaaaucaugacuagcaaaaccgacguuagcuccuccgucaucaccucccucggcgccauaguuucaugcuacggcaaaaccaaaugcaccgccuccaacaaaaacaaaggcaucauaaaaaccuucuccaacgggugcgacuacguaucuaauaaaggagucgacaccgucucaguaggaaacacccucuacuaugucaacaaacaagaaggccaaucacuauacguuaaaggcgaaccaaucaucaacuucuacgacccacucgucuuccccagcgacgaguuugacgccucaaucucgcaagucaaugaaaagauuaaccaaucccuagccuucauccgaaaaagugacgaacuccuccacaacguuaacgccggcaaaucuacaaccaacaucaugaucaccacuauaaucaucgucaucauagucauacuucucagccucaucgcagucggacuccuccuuuauugcaaggcacgauaaggacuaguggaagcauuuuccuggcugauuaaaagaaauuacucagcuauggucaucuguuccuguuagaaggcuaugcagcauauuauauacuaugcgcauguuaugaaaugcauaauaaaaaauuuuaaaaaaucuaaaagaucuaaaaaaaaaaaaaaaaaaaaaaaaaaaaaaaaaaaaaaaaaaaaaaaaaaaaaaaaaaaaaaaaugcaucccccccccccccccccccccccccccccccaaaggcucuuuucagagccaccagaauu

SEQ ID NO: 6554 - RNA, 1834 nt, Artificial Sequence
  mRNA product Design c-5 comprising derived and/or modified sequence from HRSV(A2)__F-del_DSCav1_mut6 (opt1)
gggagagcggcucggccauuuugucccagucaguccggaggcugcggcugcagaaguaccgccugcggaguaacugcaaagaagcuuaccauggagcugcucauccugaaggccaacgccaucaccaccauccugacggcggugaccuucugcuucgccagcggccagaacaucaccgaggaguucuaccaguccacgugcagcgccgucuccaagggguaccucggcgcccugcggaccggcugguacaccuccgugaucaccaucgagcugagcaacaucaaggagaacaagugcaacgggaccgacgccaaggugaagcucaucaagcaggagcuggacaaguacaagaacgcggucacggaccugcagaugcugaugugcuccaccccggcaaccggcuccggcuccgccaucgcgagcggcgucgccgugugcaaggugcugcaccucgagggggaggucaacaagaucaagagcgcccugcuguccaccaacaaggccguggugagccucuccaacggcgucagcgugcugaccuucaaggugcuggaccucaagaacuacaucgacaagcagcugcugcccauccugaacaagcagagcugcuccauccccaaccccgagacggugauggaguuccagcagaagaacaaccggcuccuggagaucacccgcgaguucagcgugaacgccggggucaccacccccguguccacguacaugcugaccaacagcgagcuccugucccugaucaacgacaugccgaucaccaacgaccagaagaagcucaugagcaacaacgugcagaucguccggcagcaguccuacagcaucaugugcaucaucaaggaggaggugcuggcguacgugguccagcugccccucuacggcgugaucgacacccccugcuggaagcugcacacgagcccccugugcaccaccaacaccaaggagggguccaacaucugccucacgcgcaccgaccggggcugguacugcgacaacgccggcagcgucuccuucuucccgcaggccgagaccugcaaggugugcagcaaccgcguguucugcgacaccaugaacucccugacgcugcccagcgagguaaaccucugcaacgucgacaucuucaaccccaaguacgacugcaagaucaugaccuccaagaccgacgugagcuccagcgugaucaccucccugggggccaucgucagcugcuacggcaagacgaagugcaccgccagcaacaagaacaaggggaucaucaagaccuucuccaacggcugcgacuacgugagcaacaagggcguggacaccguguccgucgggaacacccuguacuacgugaacaagcaggagggccagagccucuacgugaagggggagcccaucaucaacuucuacgacccgcuggucuuccccuccgacgaguucgacgcgagcaucucccaggugaacgagaagaucaaccagagccuggccuucauccgcaaguccgacgagcugcuccacaacgugaacgccggcaagagcacgaccaacaucaugaucaccaccaucaucaucgucaucaucgugauccugcugucccucaucgccguggggcugcugcucuacugcaaggcccggugaggacuagucccuguucccagagcccacuuuuuuuucuuuuuuugaaauaaaauagccugucuuucagaucuaaaaaaaaaaaaaaaaaaaaaaaaaaaaaaaaaaaaaaaaaaaaaaaaaaaaaaaaaaaaaaaaugcaucccccccccccccccccccccccccccccccaaaggcucuuuucagagccaccagaauu

SEQ ID NO: 6555 - RNA, 1834 nt, Artificial Sequence
  mRNA product Design c-5 comprising derived and/or modified sequence from HRSV(A2)__F-del_DSCav1_mut6 (opt1)
gggagagcggcucggccauuuugucccagucaguccggaggcugcggcugcagaaguaccgccugcggaguaacugcaaagaagcuuaccauggagcugcucauccugaaggccaacgccaucaccaccauccugacggcggugaccuucugcuucgccagcggccagaacaucaccgaggaguucuaccaguccacgugcagcgccgucuccaagggguaccucggcgcccugcgcaccgggugguacaccagcgugaucaccaucgagcuguccaacaucaaggagaacaagugcaacggcaccgacgccaaggugaagcucaucaagcaggagcuggacaaguacaagaacgcggucacggaccugcagaugcucaugugcagcacccccgccaccggguccggcagcgccaucgccuccggcguggcggugugcaagguccugcaccuggagggggaggugaacaagaucaagagcgcccuccuguccaccaacaaggccguggucagccuguccaacggcgugagcgugcucacguucaagguccuggaccugaagaacuacaucgacaagcagcuccugccgauccugaacaagcaguccugcagcauccccaaccccgagaccgugauggaguuccagcagaagaacaaccggcuccuggagaucacccgcgaguucuccgugaacgccggggucaccacgcccgugagcaccuacaugcugaccaacuccgagcuccugagccugaucaacgacaugccgaucaccaacgaccagaagaagcucaugagcaacaacgugcagaucguccggcagcaguccuacagcaucaugugcaucaucaaggaggaggugcuggccuacgugguccagcugccccucuacggcgugaucgacacgcccugcuggaagcugcacaccagcccccugugcaccaccaacacgaaggaggggagcaacaucugccucacccgcaccgaccggggcugguacugcgacaacgcgggcuccgugagcuucuucccgcaggccgagaccugcaaggucugcuccaaccgcguguucugcgacacgaugaacagccugacccugcccuccgaggucaaccucugcaacguggacaucuucaaccccaaguacgacugcaagaucaugaccagcaagaccgacguguccagcuccgucaucacgagccugggggccaucguguccugcuacggcaagaccaagugcaccgccagcaacaagaacaaggggaucaucaagaccuucuccaacggcugcgacuacgugagcaacaagggcgucgacacgguguccguggggaacacccuguacuacgucaacaagcaggagggccagagccucuacgugaagggggagcccaucaucaacuucuacgacccgcugguguuccccagcgacgaguucgacgccuccaucagccaggucaacgagaagaucaaccagucccuggcguucauccggaaguccgacgagcuccugcacaacgugaacgccggcaaguccaccaccaacaucaugaucaccacgaucaucaucgugaucaucgucauccugcucagccugaucgccguggggcugcuccuguacugcaaggcccgcugaggacuagucccuguucccagagcccacuuuuuuuucuuuuuuugaaauaaaauagccugucuuucagaucuaaaaaaaaaaaaaaaaaaaaaaaaaaaaaaaaaaaaaaaaaaaaaaaaaaaaaaaaaaaaaaaaugcaucccccccccccccccccccccccccccccccaaaggcucuuuucagagccaccagaauu

SEQ ID NO: 6556 - RNA, 1834 nt, Artificial Sequence
  mRNA product Design c-5 comprising derived and/or modified sequence from HRSV(A2)__F-del_DSCav1_mut6 (opt2)
gggagagcggcucggccauuuugucccagucaguccggaggcugcggcugcagaaguaccgccugcggaguaacugcaaagaagcuuaccauggagcuccucauccucaaggccaacgccaucaccaccauccucaccgccgucaccuucugcuucgccuccggccagaacaucaccgaggaguucuaccaguccaccugcuccgccgucuccaagggcuaccucggcgcccuccgcaccggcugguacaccuccgucaucaccaucgagcucuccaacaucaaggagaacaagugcaacggcaccgacgccaaggucaagcucaucaagcaggagcucgacaaguacaagaacgccgucaccgaccuccagaugcucaugugcuccacccccgccaccggcuccggcuccgccaucgccuccggcgucgccgucugcaagguccuccaccucgagggcgaggucaacaagaucaaguccgcccuccucuccaccaacaaggccgucgucucccucuccaacggcgucuccguccucaccuucaagguccucgaccucaagaacuacaucgacaagcagcuccuccccauccucaacaagcaguccugcuccauccccaaccccgagaccgucauggaguuccagcagaagaacaaccgccuccucgagaucacccgcgaguucuccgucaacgccggcgucaccacccccgucuccaccuacaugcucaccaacuccgagcuccucucccucaucaacgacaugcccaucaccaacgaccagaagaagcucauguccaacaacguccagaucguccgccagcaguccuacuccaucaugugcaucaucaaggaggagguccucgccuacgucguccagcucccccucuacggcgucaucgacacccccugcuggaagcuccacaccuccccccucugcaccaccaacaccaaggagggcuccaacaucugccucacccgcaccgaccgcggcugguacugcgacaacgccggcuccgucuccuucuucccccaggccgagaccugcaaggucugcuccaaccgcgucuucugcgacaccaugaacucccucacccuccccuccgaggucaaccucugcaacgucgacaucuucaaccccaaguacgacugcaagaucaugaccuccaagaccgacgucuccuccuccgucaucaccucccucggcgccaucgucuccugcuacggcaagaccaagugcaccgccuccaacaagaacaagggcaucaucaagaccuucuccaacggcugcgacuacgucuccaacaagggcgucgacaccgucuccgucggcaacacccucuacuacgucaacaagcaggagggccagucccucuacgucaagggcgagcccaucaucaacuucuacgacccccucgucuuccccuccgacgaguucgacgccuccaucucccaggucaacgagaagaucaaccagucccucgccuucauccgcaaguccgacgagcuccuccacaacgucaacgccggcaaguccaccaccaacaucaugaucaccaccaucaucaucgucaucaucgucauccuccucucccucaucgccgucggccuccuccucuacugcaaggcccgcugaggacuagucccuguucccagagcccacuuuuuuuucuuuuuuugaaauaaaauagccugucuuucagaucuaaaaaaaaaaaaaaaaaaaaaaaaaaaaaaaaaaaaaaaaaaaaaaaaaaaaaaaaaaaaaaaaugcaucccccccccccccccccccccccccccccccaaaggcucuuuucagagccaccagaauu

SEQ ID NO: 6557 - RNA, 1834 nt, Artificial Sequence
  mRNA product Design c-5 comprising derived and/or modified sequence from HRSV(A2)__F-del_DSCav1_mut6 (opt3)
gggagagcggcucggccauuuugucccagucaguccggaggcugcggcugcagaaguaccgccugcggaguaacugcaaagaagcuuaccauggagcugcucauccuuaaggccaacgcuauuaccacaauacugacugcagugacguucugcuuugccagcggccagaauaucaccgaagaguucuaccaauccacauguucugcggucucaaaaggguauuugggagcuuuaagaacugguugguacaccaguguuauuacaaucgaacugagcaacauuaaggagaauaaaugcaacggcaccgacgccaaggugaaacuaaucaagcaggaacucgauaaguauaaaaaugcaguaacugaccugcagaugcuuauguguuccacacccgccaccgggucuggaucggcuauagcaucaggcguggccgucugcaaggugcugcacuuggagggugagguuaacaaaaucaagagcgcucuccugaguacgaauaaagccguggucucccugucuaacggggugagcguacucacuuuuaagguuuuagaucugaagaauuacauugacaaacagcuuuugccuauccugaacaagcaauccuguucaauuccaaauccggaaaccgugauggaguuccagcagaaaaacaauaggcuacucgaaaucacacgggaguuuagugucaacgcgggagugacuacccccgugagcacauauaugcugaccaauucugagcuucuguccuugauaaacgauaugccuauuacgaacgaccagaagaaacucaugucaaauaacguccaaaucguucgccagcagagcuacaguauuaugugcaucaucaaggaagaggugcuggcauauguagugcaguuaccacuguacggcgucauugauacucccuguuggaaacuccauacaucuccucuuugcaccacuaauacaaaggaaggcuccaacauaugucugacccgaacggaccgugggugguacugcgauaaugccggaagcgugucguucuuuccacaagcugagaccuguaagguuugcucuaacagaguguucugcgacacaaugaacuccuugacucuacccucagaagucaaucuguguaauguggauaucuuuaacccuaaauaugacugcaagauuaugaccaguaaaacagauguaagcuccucuguuaucacuagccucggugccauagugucauguuacggcaagaccaaaugcacagcaaguaauaagaacaaggggauuaucaaaaccuucuccaauggaugugacuaugucagcaacaagggcguggacacugucucuguggguaauacgcuguacuauguuaacaaacaggaggggcagucacuuuacgugaagggagagccaaucauuaacuuuuaugauccgcugguauuccccagugacgaauuugaugcuagcaucucccaagucaaugagaaaauuaaccagucuuuggccuucauaaggaagucggacgaacuccugcacaaugugaacgcgggcaagagcacaaccaauaucaugauuacuaccaucaucauuguuauaaucgugauuuuacugucccuaaucgccgucggccuccugcuuuacugcaaagcacggugaggacuagucccuguucccagagcccacuuuuuuuucuuuuuuugaaauaaaauagccugucuuucagaucuaaaaaaaaaaaaaaaaaaaaaaaaaaaaaaaaaaaaaaaaaaaaaaaaaaaaaaaaaaaaaaaaugcaucccccccccccccccccccccccccccccccaaaggcucuuuucagagccaccagaauu

SEQ ID NO: 6558 - RNA, 1834 nt, Artificial Sequence
  mRNA product Design c-5 comprising derived and/or modified sequence from HRSV(A2)__F-del_DSCav1_mut6 (opt4)
gggagagcggcucggccauuuugucccagucaguccggaggcugcggcugcagaaguaccgccugcggaguaacugcaaagaagcuuaccauggagcugcugauccugaaggccaacgccaucaccaccauccugaccgccgugaccuucugcuucgccagcggccagaacaucaccgaggaguucuaccagagcaccugcagcgccgugagcaagggcuaccugggcgcccugagaaccggcugguacaccagcgugaucaccaucgagcugagcaacaucaaggagaacaagugcaacggcaccgacgccaaggugaagcugaucaagcaggagcuggacaaguacaagaacgccgugaccgaccugcagaugcugaugugcagcacccccgccaccggcagcggcagcgccaucgccagcggcguggccgugugcaaggugcugcaccuggagggcgaggugaacaagaucaagagcgcccugcugagcaccaacaaggccguggugagccugagcaacggcgugagcgugcugaccuucaaggugcuggaccugaagaacuacaucgacaagcagcugcugcccauccugaacaagcagagcugcagcauccccaaccccgagaccgugauggaguuccagcagaagaacaacagacugcuggagaucaccagagaguucagcgugaacgccggcgugaccacccccgugagcaccuacaugcugaccaacagcgagcugcugagccugaucaacgacaugcccaucaccaacgaccagaagaagcugaugagcaacaacgugcagaucgugagacagcagagcuacagcaucaugugcaucaucaaggaggaggugcuggccuacguggugcagcugccccuguacggcgugaucgacacccccugcuggaagcugcacaccagcccccugugcaccaccaacaccaaggagggcagcaacaucugccugaccagaaccgacagaggcugguacugcgacaacgccggcagcgugagcuucuucccccaggccgagaccugcaaggugugcagcaacagaguguucugcgacaccaugaacagccugacccugcccagcgaggugaaccugugcaacguggacaucuucaaccccaaguacgacugcaagaucaugaccagcaagaccgacgugagcagcagcgugaucaccagccugggcgccaucgugagcugcuacggcaagaccaagugcaccgccagcaacaagaacaagggcaucaucaagaccuucagcaacggcugcgacuacgugagcaacaagggcguggacaccgugagcgugggcaacacccuguacuacgugaacaagcaggagggccagagccuguacgugaagggcgagcccaucaucaacuucuacgacccccugguguuccccagcgacgaguucgacgccagcaucagccaggugaacgagaagaucaaccagagccuggccuucaucagaaagagcgacgagcugcugcacaacgugaacgccggcaagagcaccaccaacaucaugaucaccaccaucaucaucgugaucaucgugauccugcugagccugaucgccgugggccugcugcuguacugcaaggccagaugaggacuagucccuguucccagagcccacuuuuuuuucuuuuuuugaaauaaaauagccugucuuucagaucuaaaaaaaaaaaaaaaaaaaaaaaaaaaaaaaaaaaaaaaaaaaaaaaaaaaaaaaaaaaaaaaaugcaucccccccccccccccccccccccccccccccaaaggcucuuuucagagccaccagaauu

SEQ ID NO: 6559 - RNA, 1834 nt, Artificial Sequence
  mRNA product Design c-5 comprising derived and/or modified sequence from HRSV(A2)__F-del_DSCav1_mut6 (opt5)
gggagagcggcucggccauuuugucccagucaguccggaggcugcggcugcagaaguaccgccugcggaguaacugcaaagaagcuuaccauggagcugcucauccugaaggccaacgcuauuaccacaauccuuacggccgugaccuucugcuuugcgagcggccagaauauuacagaagaguucuaccaauccaccuguucugcugucagcaaaggguaucugggagcccucagaacaggcugguacaccuccguuaucacaauugaacugucuaacaucaaggagaauaaaugcaacgggaccgacgccaaggugaaacuuaucaagcaggaacuggauaaguauaaaaaugcugugacggaccuccagaugcugauguguagcacccccgccacaggauccggcucugcuauugccagcggggucgcggugugcaagguucugcaccucgagggagaggugaacaaaaucaaguccgcccugcuuagcaccaauaaagcugucgugucucuguccaacggcguuagcgugcucacauuuaagguccuggaucuuaagaauuacauugacaaacagcugcucccuauccugaacaagcaaucuuguuccauuccgaaucccgaaaccgugauggaguuccagcagaaaaacaaucggcugcucgaaaucacgcgcgaguuuagcgugaacgccggcgucacaaccccuguuucuacauauaugcugaccaauuccgagcuucugagccucauuaacgauaugcccaucaccaacgaccagaagaaacugauguccaauaacgugcaaaucgugagacagcagucuuacagcauuaugugcaucauuaaggaagagguccuugcuuaugugguucagcugccucucuacggggugaucgauacacccuguuggaaacugcauacguccccucugugcaccacaaauaccaaggaaggaagcaacauuugucucacacggaccgaccgcggcugguacugcgauaaugccgggucugucuccuucuuuccgcaagcggagacguguaaggugugcagcaacagaguuuucugcgacacaaugaacucucugacccuucccagcgaagugaaucuguguaaugucgauaucuuuaacccuaaauaugacugcaagaucaugaccuccaaaacagaugugucuagcuccgucauuaccagccucggagccaucgugucuuguuacggcaagacaaaaugcacggcuuccaauaagaacaaggggauuaucaaaaccuucagcaauggaugugacuauguuucuaacaagggcguggacacagucuccgugggcaauacccuguacuauguuaacaaacaggaggggcagagccuuuacgugaagggagagcccauuaucaacuuuuaugauccucuggucuuccccuccgacgaauuugaugccucuaucagccaagugaaugagaaaauuaaccagucccucgcuuucauccggaagucugacgaacugcugcacaaugugaacgccggcaagagcacaaccaauauuaugaucacgaccauuaucauuguuaucaucgucauucuccugucccuuaucgccguggggcugcuccuguacugcaaagcucgcugaggacuagucccuguucccagagcccacuuuuuuuucuuuuuuugaaauaaaauagccugucuuucagaucuaaaaaaaaaaaaaaaaaaaaaaaaaaaaaaaaaaaaaaaaaaaaaaaaaaaaaaaaaaaaaaaaugcaucccccccccccccccccccccccccccccccaaaggcucuuuucagagccaccagaauu

SEQ ID NO: 6560 - RNA, 1834 nt, Artificial Sequence
  mRNA product Design c-5 comprising derived and/or modified sequence from HRSV(A2)__F-del_DSCav1_mut6 (opt6)
gggagagcggcucggccauuuugucccagucaguccggaggcugcggcugcagaaguaccgccugcggaguaacugcaaagaagcuuaccauggaacuacucauauuaaaagcaaacgcaauaacaacgauauuaacagcuguaacauucugcuuugcaucaggccaaaauaucaccgaagaauuuuaucaaagcacaugcucugcaguauccaaaggauacuuaggagcauuaagaacaggcugguacacauccguaauaacaauagaacuaucaaacaucaaagaaaacaaaugcaacggcacagacgccaaaguaaaacucauaaaacaagaacuagacaaauauaaaaacgcaguaacagaucuacaaaugcucaugugcuccacaccagcaaccggaucugguucagccauagcauccggcguagccgucugcaaaguauuacaccucgaaggagaaguaaacaaaauaaaaucugcccuauuaucuacaaauaaagccguaguaagucuaaguaacggaguaucaguacuaacauuuaaaguccuagaccugaaaaacuauaucgacaaacaacuauuaccaauacuaaacaaacaauccuguuccaucccuaacccagaaacaguuauggaauuucaacaaaaaaauaaccgccuuuuagaaauaacuagagaauuuucaguaaacgcaggaguuacaacaccaguaucaacauacaugcuaacaaauucagaauuauuaucccuuauaaaugacaugccuaucacaaacgaucaaaaaaaauuaauguccaacaacguacaaauaguaagacaacaaucauauuccaucaugugcaucauaaaagaagaaguccucgcauacguagugcaacuaccacuauacggagucauagauacacccuguuggaaacuucacacaucuccacuaugcacaacaaacacgaaagaaggauccaacauaugccuaacacgaacagacagaggaugguauugcgacaacgcuggaagugugagcuucuucccucaagcagaaacuugcaaaguaugcagcaaucguguauucugcgacacaaugaacucauuaacacucccaagcgaaguaaaccucugcaauguagacaucuuuaauccaaaauacgauuguaaaauaaugacuucaaaaacagacgucucaucaucuguaauaacaucuuuaggagcaauaguuucuugcuacgguaaaacaaaaugcaccgcauccaacaaaaacaaaggaauaauaaaaacauucucuaacggcugcgauuacguaucuaacaaaggaguugacacagucucaguaggaaacacacuauacuacguaaacaaacaagaaggacaaagccuauacguaaaaggagaaccaauaauaaacuucuaugacccauuaguauuuccaagcgaugaauuugacgcuucaauaucacaagucaaugaaaaaauaaaucagagcuuagcauucauaagaaaaucugaugaacuacuacacaauguaaaugcaggaaaauccacuaccaacauaaugauuaccacaauuauaauaguuaucauaguaauacuauuaucacuaauagccguuggauuacuacuauacugcaaagcaagauaaggacuagucccuguucccagagcccacuuuuuuuucuuuuuuugaaauaaaauagccugucuuucagaucuaaaaaaaaaaaaaaaaaaaaaaaaaaaaaaaaaaaaaaaaaaaaaaaaaaaaaaaaaaaaaaaaugcaucccccccccccccccccccccccccccccccaaaggcucuuuucagagccaccagaauu

SEQ ID NO: 6561 - RNA, 1834 nt, Artificial Sequence
  mRNA product Design c-5 comprising derived and/or modified sequence from HRSV(A2)__F-del_DSCav1_mut6 (opt11)
gggagagcggcucggccauuuugucccagucaguccggaggcugcggcugcagaaguaccgccugcggaguaacugcaaagaagcuuaccauggaacuacucauccuaaaagcaaacgccaucaccaccauacuaaccgccgucaccuucugcuucgccucgggacaaaacaucaccgaagaguucuaccagucaacgugcuccgccgucucaaaaggcuaccuaggcgcccuccgcaccgggugguauaccuccgucauaacuaucgaacucucuaacaucaaagaaaacaaauguaacggcaccgacgccaaagucaaacuaaucaaacaagaacuggacaaauacaaaaacgccgucaccgaccuacaaaugcucaugugcuccacuccagccaccggcuccgguagcgcaaucgccucaggcguagcuguaugcaaaguccuccaccuagaaggcgaaguaaacaaaauaaaauccgcccuccucucaaccaacaaggccgucgucucacucucaaacggcgucuccguacucaccuuuaaaguccuagaccuuaaaaacuacaucgacaaacaacugcuaccaauccucaacaaacaaucaugcagcaucccaaacccggaaacagucauggaguuccaacagaaaaacaaccgacuccucgaaaucacccgcgaguucuccgucaacgccggagucaccacaccuguaagcacauacaugcuuacuaauuccgaacuccuuucacuaauaaacgacaugccaauaaccaacgaccaaaagaaacucauguccaacaacguacaaaucguacgccaacaauccuacuccaucaugugcaucaucaaagaagaaguccuggccuaugucguacaacucccccuuuacggugucaucgacacacccugcuggaaacuacacaccagcccccucugcacaacaaacaccaaagaaggcuccaacaucugccucacccguaccgaccgaggcugguacugcgacaacgccggcuccgucuccuucuucccccaagccgaaaccugcaaagucugcagcaaccgcgucuucugcgauaccaugaacucccucacacucccaucugaagucaaccucugcaacgucgauauuuucaauccaaaauacgacugcaaaaucaugacuagcaaaaccgacguuagcuccuccgucaucaccucccucggcgccauaguuucaugcuacggcaaaaccaaaugcaccgccuccaacaaaaacaaaggcaucauaaaaaccuucuccaacgggugcgacuacguaucuaauaaaggagucgacaccgucucaguaggaaacacccucuacuaugucaacaaacaagaaggccaaucacuauacguuaaaggcgaaccaaucaucaacuucuacgacccacucgucuuccccagcgacgaguuugacgccucaaucucgcaagucaaugaaaagauuaaccaaucccuagccuucauccgaaaaagugacgaacuccuccacaacguuaacgccggcaaaucuacaaccaacaucaugaucaccacuauaaucaucgucaucauagucauacuucucagccucaucgcagucggacuccuccuuuauugcaaggcacgauaaggacuagucccuguucccagagcccacuuuuuuuucuuuuuuugaaauaaaauagccugucuuucagaucuaaaaaaaaaaaaaaaaaaaaaaaaaaaaaaaaaaaaaaaaaaaaaaaaaaaaaaaaaaaaaaaaugcaucccccccccccccccccccccccccccccccaaaggcucuuuucagagccaccagaauu

SEQ ID NO: 6562 - RNA, 1843 nt, Artificial Sequence
  mRNA product Design d-1 comprising derived and/or modified sequence from HRSV(A2)__F-del_DSCav1_mut6 (opt1)
gggagacccgugacccggaaguuguacggcuacgcgacuuucccucccacaaacccucgcgcccuuccuuuccuacuugggcccggcagaaagcuuaccauggagcugcucauccugaaggccaacgccaucaccaccauccugacggcggugaccuucugcuucgccagcggccagaacaucaccgaggaguucuaccaguccacgugcagcgccgucuccaagggguaccucggcgcccugcggaccggcugguacaccuccgugaucaccaucgagcugagcaacaucaaggagaacaagugcaacgggaccgacgccaaggugaagcucaucaagcaggagcuggacaaguacaagaacgcggucacggaccugcagaugcugaugugcuccaccccggcaaccggcuccggcuccgccaucgcgagcggcgucgccgugugcaaggugcugcaccucgagggggaggucaacaagaucaagagcgcccugcuguccaccaacaaggccguggugagccucuccaacggcgucagcgugcugaccuucaaggugcuggaccucaagaacuacaucgacaagcagcugcugcccauccugaacaagcagagcugcuccauccccaaccccgagacggugauggaguuccagcagaagaacaaccggcuccuggagaucacccgcgaguucagcgugaacgccggggucaccacccccguguccacguacaugcugaccaacagcgagcuccugucccugaucaacgacaugccgaucaccaacgaccagaagaagcucaugagcaacaacgugcagaucguccggcagcaguccuacagcaucaugugcaucaucaaggaggaggugcuggcguacgugguccagcugccccucuacggcgugaucgacacccccugcuggaagcugcacacgagcccccugugcaccaccaacaccaaggagggguccaacaucugccucacgcgcaccgaccggggcugguacugcgacaacgccggcagcgucuccuucuucccgcaggccgagaccugcaaggugugcagcaaccgcguguucugcgacaccaugaacucccugacgcugcccagcgagguaaaccucugcaacgucgacaucuucaaccccaaguacgacugcaagaucaugaccuccaagaccgacgugagcuccagcgugaucaccucccugggggccaucgucagcugcuacggcaagacgaagugcaccgccagcaacaagaacaaggggaucaucaagaccuucuccaacggcugcgacuacgugagcaacaagggcguggacaccguguccgucgggaacacccuguacuacgugaacaagcaggagggccagagccucuacgugaagggggagcccaucaucaacuucuacgacccgcuggucuuccccuccgacgaguucgacgcgagcaucucccaggugaacgagaagaucaaccagagccuggccuucauccgcaaguccgacgagcugcuccacaacgugaacgccggcaagagcacgaccaacaucaugaucaccaccaucaucaucgucaucaucgugauccugcugucccucaucgccguggggcugcugcucuacugcaaggcccggugaggacuagucccuguucccagagcccacuuuuuuuucuuuuuuugaaauaaaauagccugucuuucagaucuaaaaaaaaaaaaaaaaaaaaaaaaaaaaaaaaaaaaaaaaaaaaaaaaaaaaaaaaaaaaaaaaugcaucccccccccccccccccccccccccccccccaaaggcucuuuucagagccaccagaauu

SEQ ID NO: 6563 - RNA, 1843 nt, Artificial Sequence
  mRNA product Design d-1 comprising derived and/or modified sequence from HRSV(A2)__F-del_DSCav1_mut6 (opt1)
gggagacccgugacccggaaguuguacggcuacgcgacuuucccucccacaaacccucgcgcccuuccuuuccuacuugggcccggcagaaagcuuaccauggagcugcucauccugaaggccaacgccaucaccaccauccugacggcggugaccuucugcuucgccagcggccagaacaucaccgaggaguucuaccaguccacgugcagcgccgucuccaagggguaccucggcgcccugcgcaccgggugguacaccagcgugaucaccaucgagcuguccaacaucaaggagaacaagugcaacggcaccgacgccaaggugaagcucaucaagcaggagcuggacaaguacaagaacgcggucacggaccugcagaugcucaugugcagcacccccgccaccggguccggcagcgccaucgccuccggcguggcggugugcaagguccugcaccuggagggggaggugaacaagaucaagagcgcccuccuguccaccaacaaggccguggucagccuguccaacggcgugagcgugcucacguucaagguccuggaccugaagaacuacaucgacaagcagcuccugccgauccugaacaagcaguccugcagcauccccaaccccgagaccgugauggaguuccagcagaagaacaaccggcuccuggagaucacccgcgaguucuccgugaacgccggggucaccacgcccgugagcaccuacaugcugaccaacuccgagcuccugagccugaucaacgacaugccgaucaccaacgaccagaagaagcucaugagcaacaacgugcagaucguccggcagcaguccuacagcaucaugugcaucaucaaggaggaggugcuggccuacgugguccagcugccccucuacggcgugaucgacacgcccugcuggaagcugcacaccagcccccugugcaccaccaacacgaaggaggggagcaacaucugccucacccgcaccgaccggggcugguacugcgacaacgcgggcuccgugagcuucuucccgcaggccgagaccugcaaggucugcuccaaccgcguguucugcgacacgaugaacagccugacccugcccuccgaggucaaccucugcaacguggacaucuucaaccccaaguacgacugcaagaucaugaccagcaagaccgacguguccagcuccgucaucacgagccugggggccaucguguccugcuacggcaagaccaagugcaccgccagcaacaagaacaaggggaucaucaagaccuucuccaacggcugcgacuacgugagcaacaagggcgucgacacgguguccguggggaacacccuguacuacgucaacaagcaggagggccagagccucuacgugaagggggagcccaucaucaacuucuacgacccgcugguguuccccagcgacgaguucgacgccuccaucagccaggucaacgagaagaucaaccagucccuggcguucauccggaaguccgacgagcuccugcacaacgugaacgccggcaaguccaccaccaacaucaugaucaccacgaucaucaucgugaucaucgucauccugcucagccugaucgccguggggcugcuccuguacugcaaggcccgcugaggacuagucccuguucccagagcccacuuuuuuuucuuuuuuugaaauaaaauagccugucuuucagaucuaaaaaaaaaaaaaaaaaaaaaaaaaaaaaaaaaaaaaaaaaaaaaaaaaaaaaaaaaaaaaaaaugcaucccccccccccccccccccccccccccccccaaaggcucuuuucagagccaccagaauu

SEQ ID NO: 6564 - RNA, 1843 nt, Artificial Sequence
  mRNA product Design d-1 comprising derived and/or modified sequence from HRSV(A2)__F-del_DSCav1_mut6 (opt2)
gggagacccgugacccggaaguuguacggcuacgcgacuuucccucccacaaacccucgcgcccuuccuuuccuacuugggcccggcagaaagcuuaccauggagcuccucauccucaaggccaacgccaucaccaccauccucaccgccgucaccuucugcuucgccuccggccagaacaucaccgaggaguucuaccaguccaccugcuccgccgucuccaagggcuaccucggcgcccuccgcaccggcugguacaccuccgucaucaccaucgagcucuccaacaucaaggagaacaagugcaacggcaccgacgccaaggucaagcucaucaagcaggagcucgacaaguacaagaacgccgucaccgaccuccagaugcucaugugcuccacccccgccaccggcuccggcuccgccaucgccuccggcgucgccgucugcaagguccuccaccucgagggcgaggucaacaagaucaaguccgcccuccucuccaccaacaaggccgucgucucccucuccaacggcgucuccguccucaccuucaagguccucgaccucaagaacuacaucgacaagcagcuccuccccauccucaacaagcaguccugcuccauccccaaccccgagaccgucauggaguuccagcagaagaacaaccgccuccucgagaucacccgcgaguucuccgucaacgccggcgucaccacccccgucuccaccuacaugcucaccaacuccgagcuccucucccucaucaacgacaugcccaucaccaacgaccagaagaagcucauguccaacaacguccagaucguccgccagcaguccuacuccaucaugugcaucaucaaggaggagguccucgccuacgucguccagcucccccucuacggcgucaucgacacccccugcuggaagcuccacaccuccccccucugcaccaccaacaccaaggagggcuccaacaucugccucacccgcaccgaccgcggcugguacugcgacaacgccggcuccgucuccuucuucccccaggccgagaccugcaaggucugcuccaaccgcgucuucugcgacaccaugaacucccucacccuccccuccgaggucaaccucugcaacgucgacaucuucaaccccaaguacgacugcaagaucaugaccuccaagaccgacgucuccuccuccgucaucaccucccucggcgccaucgucuccugcuacggcaagaccaagugcaccgccuccaacaagaacaagggcaucaucaagaccuucuccaacggcugcgacuacgucuccaacaagggcgucgacaccgucuccgucggcaacacccucuacuacgucaacaagcaggagggccagucccucuacgucaagggcgagcccaucaucaacuucuacgacccccucgucuuccccuccgacgaguucgacgccuccaucucccaggucaacgagaagaucaaccagucccucgccuucauccgcaaguccgacgagcuccuccacaacgucaacgccggcaaguccaccaccaacaucaugaucaccaccaucaucaucgucaucaucgucauccuccucucccucaucgccgucggccuccuccucuacugcaaggcccgcugaggacuagucccuguucccagagcccacuuuuuuuucuuuuuuugaaauaaaauagccugucuuucagaucuaaaaaaaaaaaaaaaaaaaaaaaaaaaaaaaaaaaaaaaaaaaaaaaaaaaaaaaaaaaaaaaaugcaucccccccccccccccccccccccccccccccaaaggcucuuuucagagccaccagaauu

SEQ ID NO: 6565 - RNA, 1843 nt, Artificial Sequence
  mRNA product Design d-1 comprising derived and/or modified sequence from HRSV(A2)__F-del_DSCav1_mut6 (opt3)
gggagacccgugacccggaaguuguacggcuacgcgacuuucccucccacaaacccucgcgcccuuccuuuccuacuugggcccggcagaaagcuuaccauggagcugcucauccuuaaggccaacgcuauuaccacaauacugacugcagugacguucugcuuugccagcggccagaauaucaccgaagaguucuaccaauccacauguucugcggucucaaaaggguauuugggagcuuuaagaacugguugguacaccaguguuauuacaaucgaacugagcaacauuaaggagaauaaaugcaacggcaccgacgccaaggugaaacuaaucaagcaggaacucgauaaguauaaaaaugcaguaacugaccugcagaugcuuauguguuccacacccgccaccgggucuggaucggcuauagcaucaggcguggccgucugcaaggugcugcacuuggagggugagguuaacaaaaucaagagcgcucuccugaguacgaauaaagccguggucucccugucuaacggggugagcguacucacuuuuaagguuuuagaucugaagaauuacauugacaaacagcuuuugccuauccugaacaagcaauccuguucaauuccaaauccggaaaccgugauggaguuccagcagaaaaacaauaggcuacucgaaaucacacgggaguuuagugucaacgcgggagugacuacccccgugagcacauauaugcugaccaauucugagcuucuguccuugauaaacgauaugccuauuacgaacgaccagaagaaacucaugucaaauaacguccaaaucguucgccagcagagcuacaguauuaugugcaucaucaaggaagaggugcuggcauauguagugcaguuaccacuguacggcgucauugauacucccuguuggaaacuccauacaucuccucuuugcaccacuaauacaaaggaaggcuccaacauaugucugacccgaacggaccgugggugguacugcgauaaugccggaagcgugucguucuuuccacaagcugagaccuguaagguuugcucuaacagaguguucugcgacacaaugaacuccuugacucuacccucagaagucaaucuguguaauguggauaucuuuaacccuaaauaugacugcaagauuaugaccaguaaaacagauguaagcuccucuguuaucacuagccucggugccauagugucauguuacggcaagaccaaaugcacagcaaguaauaagaacaaggggauuaucaaaaccuucuccaauggaugugacuaugucagcaacaagggcguggacacugucucuguggguaauacgcuguacuauguuaacaaacaggaggggcagucacuuuacgugaagggagagccaaucauuaacuuuuaugauccgcugguauuccccagugacgaauuugaugcuagcaucucccaagucaaugagaaaauuaaccagucuuuggccuucauaaggaagucggacgaacuccugcacaaugugaacgcgggcaagagcacaaccaauaucaugauuacuaccaucaucauuguuauaaucgugauuuuacugucccuaaucgccgucggccuccugcuuuacugcaaagcacggugaggacuagucccuguucccagagcccacuuuuuuuucuuuuuuugaaauaaaauagccugucuuucagaucuaaaaaaaaaaaaaaaaaaaaaaaaaaaaaaaaaaaaaaaaaaaaaaaaaaaaaaaaaaaaaaaaugcaucccccccccccccccccccccccccccccccaaaggcucuuuucagagccaccagaauu

SEQ ID NO: 6566 - RNA, 1843 nt, Artificial Sequence
  mRNA product Design d-1 comprising derived and/or modified sequence from HRSV(A2)__F-del_DSCav1_mut6 (opt4)
gggagacccgugacccggaaguuguacggcuacgcgacuuucccucccacaaacccucgcgcccuuccuuuccuacuugggcccggcagaaagcuuaccauggagcugcugauccugaaggccaacgccaucaccaccauccugaccgccgugaccuucugcuucgccagcggccagaacaucaccgaggaguucuaccagagcaccugcagcgccgugagcaagggcuaccugggcgcccugagaaccggcugguacaccagcgugaucaccaucgagcugagcaacaucaaggagaacaagugcaacggcaccgacgccaaggugaagcugaucaagcaggagcuggacaaguacaagaacgccgugaccgaccugcagaugcugaugugcagcacccccgccaccggcagcggcagcgccaucgccagcggcguggccgugugcaaggugcugcaccuggagggcgaggugaacaagaucaagagcgcccugcugagcaccaacaaggccguggugagccugagcaacggcgugagcgugcugaccuucaaggugcuggaccugaagaacuacaucgacaagcagcugcugcccauccugaacaagcagagcugcagcauccccaaccccgagaccgugauggaguuccagcagaagaacaacagacugcuggagaucaccagagaguucagcgugaacgccggcgugaccacccccgugagcaccuacaugcugaccaacagcgagcugcugagccugaucaacgacaugcccaucaccaacgaccagaagaagcugaugagcaacaacgugcagaucgugagacagcagagcuacagcaucaugugcaucaucaaggaggaggugcuggccuacguggugcagcugccccuguacggcgugaucgacacccccugcuggaagcugcacaccagcccccugugcaccaccaacaccaaggagggcagcaacaucugccugaccagaaccgacagaggcugguacugcgacaacgccggcagcgugagcuucuucccccaggccgagaccugcaaggugugcagcaacagaguguucugcgacaccaugaacagccugacccugcccagcgaggugaaccugugcaacguggacaucuucaaccccaaguacgacugcaagaucaugaccagcaagaccgacgugagcagcagcgugaucaccagccugggcgccaucgugagcugcuacggcaagaccaagugcaccgccagcaacaagaacaagggcaucaucaagaccuucagcaacggcugcgacuacgugagcaacaagggcguggacaccgugagcgugggcaacacccuguacuacgugaacaagcaggagggccagagccuguacgugaagggcgagcccaucaucaacuucuacgacccccugguguuccccagcgacgaguucgacgccagcaucagccaggugaacgagaagaucaaccagagccuggccuucaucagaaagagcgacgagcugcugcacaacgugaacgccggcaagagcaccaccaacaucaugaucaccaccaucaucaucgugaucaucgugauccugcugagccugaucgccgugggccugcugcuguacugcaaggccagaugaggacuagucccuguucccagagcccacuuuuuuuucuuuuuuugaaauaaaauagccugucuuucagaucuaaaaaaaaaaaaaaaaaaaaaaaaaaaaaaaaaaaaaaaaaaaaaaaaaaaaaaaaaaaaaaaaugcaucccccccccccccccccccccccccccccccaaaggcucuuuucagagccaccagaauu

SEQ ID NO: 6567 - RNA, 1843 nt, Artificial Sequence
  mRNA product Design d-1 comprising derived and/or modified sequence from HRSV(A2)__F-del_DSCav1_mut6 (opt5)
gggagacccgugacccggaaguuguacggcuacgcgacuuucccucccacaaacccucgcgcccuuccuuuccuacuugggcccggcagaaagcuuaccauggagcugcucauccugaaggccaacgcuauuaccacaauccuuacggccgugaccuucugcuuugcgagcggccagaauauuacagaagaguucuaccaauccaccuguucugcugucagcaaaggguaucugggagcccucagaacaggcugguacaccuccguuaucacaauugaacugucuaacaucaaggagaauaaaugcaacgggaccgacgccaaggugaaacuuaucaagcaggaacuggauaaguauaaaaaugcugugacggaccuccagaugcugauguguagcacccccgccacaggauccggcucugcuauugccagcggggucgcggugugcaagguucugcaccucgagggagaggugaacaaaaucaaguccgcccugcuuagcaccaauaaagcugucgugucucuguccaacggcguuagcgugcucacauuuaagguccuggaucuuaagaauuacauugacaaacagcugcucccuauccugaacaagcaaucuuguuccauuccgaaucccgaaaccgugauggaguuccagcagaaaaacaaucggcugcucgaaaucacgcgcgaguuuagcgugaacgccggcgucacaaccccuguuucuacauauaugcugaccaauuccgagcuucugagccucauuaacgauaugcccaucaccaacgaccagaagaaacugauguccaauaacgugcaaaucgugagacagcagucuuacagcauuaugugcaucauuaaggaagagguccuugcuuaugugguucagcugccucucuacggggugaucgauacacccuguuggaaacugcauacguccccucugugcaccacaaauaccaaggaaggaagcaacauuugucucacacggaccgaccgcggcugguacugcgauaaugccgggucugucuccuucuuuccgcaagcggagacguguaaggugugcagcaacagaguuuucugcgacacaaugaacucucugacccuucccagcgaagugaaucuguguaaugucgauaucuuuaacccuaaauaugacugcaagaucaugaccuccaaaacagaugugucuagcuccgucauuaccagccucggagccaucgugucuuguuacggcaagacaaaaugcacggcuuccaauaagaacaaggggauuaucaaaaccuucagcaauggaugugacuauguuucuaacaagggcguggacacagucuccgugggcaauacccuguacuauguuaacaaacaggaggggcagagccuuuacgugaagggagagcccauuaucaacuuuuaugauccucuggucuuccccuccgacgaauuugaugccucuaucagccaagugaaugagaaaauuaaccagucccucgcuuucauccggaagucugacgaacugcugcacaaugugaacgccggcaagagcacaaccaauauuaugaucacgaccauuaucauuguuaucaucgucauucuccugucccuuaucgccguggggcugcuccuguacugcaaagcucgcugaggacuagucccuguucccagagcccacuuuuuuuucuuuuuuugaaauaaaauagccugucuuucagaucuaaaaaaaaaaaaaaaaaaaaaaaaaaaaaaaaaaaaaaaaaaaaaaaaaaaaaaaaaaaaaaaaugcaucccccccccccccccccccccccccccccccaaaggcucuuuucagagccaccagaauu

SEQ ID NO: 6568 - RNA, 1843 nt, Artificial Sequence
  mRNA product Design d-1 comprising derived and/or modified sequence from HRSV(A2)__F-del_DSCav1_mut6 (opt6)
gggagacccgugacccggaaguuguacggcuacgcgacuuucccucccacaaacccucgcgcccuuccuuuccuacuugggcccggcagaaagcuuaccauggaacuacucauauuaaaagcaaacgcaauaacaacgauauuaacagcuguaacauucugcuuugcaucaggccaaaauaucaccgaagaauuuuaucaaagcacaugcucugcaguauccaaaggauacuuaggagcauuaagaacaggcugguacacauccguaauaacaauagaacuaucaaacaucaaagaaaacaaaugcaacggcacagacgccaaaguaaaacucauaaaacaagaacuagacaaauauaaaaacgcaguaacagaucuacaaaugcucaugugcuccacaccagcaaccggaucugguucagccauagcauccggcguagccgucugcaaaguauuacaccucgaaggagaaguaaacaaaauaaaaucugcccuauuaucuacaaauaaagccguaguaagucuaaguaacggaguaucaguacuaacauuuaaaguccuagaccugaaaaacuauaucgacaaacaacuauuaccaauacuaaacaaacaauccuguuccaucccuaacccagaaacaguuauggaauuucaacaaaaaaauaaccgccuuuuagaaauaacuagagaauuuucaguaaacgcaggaguuacaacaccaguaucaacauacaugcuaacaaauucagaauuauuaucccuuauaaaugacaugccuaucacaaacgaucaaaaaaaauuaauguccaacaacguacaaauaguaagacaacaaucauauuccaucaugugcaucauaaaagaagaaguccucgcauacguagugcaacuaccacuauacggagucauagauacacccuguuggaaacuucacacaucuccacuaugcacaacaaacacgaaagaaggauccaacauaugccuaacacgaacagacagaggaugguauugcgacaacgcuggaagugugagcuucuucccucaagcagaaacuugcaaaguaugcagcaaucguguauucugcgacacaaugaacucauuaacacucccaagcgaaguaaaccucugcaauguagacaucuuuaauccaaaauacgauuguaaaauaaugacuucaaaaacagacgucucaucaucuguaauaacaucuuuaggagcaauaguuucuugcuacgguaaaacaaaaugcaccgcauccaacaaaaacaaaggaauaauaaaaacauucucuaacggcugcgauuacguaucuaacaaaggaguugacacagucucaguaggaaacacacuauacuacguaaacaaacaagaaggacaaagccuauacguaaaaggagaaccaauaauaaacuucuaugacccauuaguauuuccaagcgaugaauuugacgcuucaauaucacaagucaaugaaaaaauaaaucagagcuuagcauucauaagaaaaucugaugaacuacuacacaauguaaaugcaggaaaauccacuaccaacauaaugauuaccacaauuauaauaguuaucauaguaauacuauuaucacuaauagccguuggauuacuacuauacugcaaagcaagauaaggacuagucccuguucccagagcccacuuuuuuuucuuuuuuugaaauaaaauagccugucuuucagaucuaaaaaaaaaaaaaaaaaaaaaaaaaaaaaaaaaaaaaaaaaaaaaaaaaaaaaaaaaaaaaaaaugcaucccccccccccccccccccccccccccccccaaaggcucuuuucagagccaccagaauu

SEQ ID NO: 6569 - RNA, 1843 nt, Artificial Sequence
  mRNA product Design d-1 comprising derived and/or modified sequence from HRSV(A2)__F-del_DSCav1_mut6 (opt11)
gggagacccgugacccggaaguuguacggcuacgcgacuuucccucccacaaacccucgcgcccuuccuuuccuacuugggcccggcagaaagcuuaccauggaacuacucauccuaaaagcaaacgccaucaccaccauacuaaccgccgucaccuucugcuucgccucgggacaaaacaucaccgaagaguucuaccagucaacgugcuccgccgucucaaaaggcuaccuaggcgcccuccgcaccgggugguauaccuccgucauaacuaucgaacucucuaacaucaaagaaaacaaauguaacggcaccgacgccaaagucaaacuaaucaaacaagaacuggacaaauacaaaaacgccgucaccgaccuacaaaugcucaugugcuccacuccagccaccggcuccgguagcgcaaucgccucaggcguagcuguaugcaaaguccuccaccuagaaggcgaaguaaacaaaauaaaauccgcccuccucucaaccaacaaggccgucgucucacucucaaacggcgucuccguacucaccuuuaaaguccuagaccuuaaaaacuacaucgacaaacaacugcuaccaauccucaacaaacaaucaugcagcaucccaaacccggaaacagucauggaguuccaacagaaaaacaaccgacuccucgaaaucacccgcgaguucuccgucaacgccggagucaccacaccuguaagcacauacaugcuuacuaauuccgaacuccuuucacuaauaaacgacaugccaauaaccaacgaccaaaagaaacucauguccaacaacguacaaaucguacgccaacaauccuacuccaucaugugcaucaucaaagaagaaguccuggccuaugucguacaacucccccuuuacggugucaucgacacacccugcuggaaacuacacaccagcccccucugcacaacaaacaccaaagaaggcuccaacaucugccucacccguaccgaccgaggcugguacugcgacaacgccggcuccgucuccuucuucccccaagccgaaaccugcaaagucugcagcaaccgcgucuucugcgauaccaugaacucccucacacucccaucugaagucaaccucugcaacgucgauauuuucaauccaaaauacgacugcaaaaucaugacuagcaaaaccgacguuagcuccuccgucaucaccucccucggcgccauaguuucaugcuacggcaaaaccaaaugcaccgccuccaacaaaaacaaaggcaucauaaaaaccuucuccaacgggugcgacuacguaucuaauaaaggagucgacaccgucucaguaggaaacacccucuacuaugucaacaaacaagaaggccaaucacuauacguuaaaggcgaaccaaucaucaacuucuacgacccacucgucuuccccagcgacgaguuugacgccucaaucucgcaagucaaugaaaagauuaaccaaucccuagccuucauccgaaaaagugacgaacuccuccacaacguuaacgccggcaaaucuacaaccaacaucaugaucaccacuauaaucaucgucaucauagucauacuucucagccucaucgcagucggacuccuccuuuauugcaaggcacgauaaggacuagucccuguucccagagcccacuuuuuuuucuuuuuuugaaauaaaauagccugucuuucagaucuaaaaaaaaaaaaaaaaaaaaaaaaaaaaaaaaaaaaaaaaaaaaaaaaaaaaaaaaaaaaaaaaugcaucccccccccccccccccccccccccccccccaaaggcucuuuucagagccaccagaauu

SEQ ID NO: 6570 - RNA, 1898 nt, Artificial Sequence
  mRNA product Design d-2 comprising derived and/or modified sequence from HRSV(A2)__F-del_DSCav1_mut6 (opt1)
gggagagcggcucggccauuuugucccagucaguccggaggcugcggcugcagaaguaccgccugcggaguaacugcaaagaagcuuaccauggagcugcucauccugaaggccaacgccaucaccaccauccugacggcggugaccuucugcuucgccagcggccagaacaucaccgaggaguucuaccaguccacgugcagcgccgucuccaagggguaccucggcgcccugcggaccggcugguacaccuccgugaucaccaucgagcugagcaacaucaaggagaacaagugcaacgggaccgacgccaaggugaagcucaucaagcaggagcuggacaaguacaagaacgcggucacggaccugcagaugcugaugugcuccaccccggcaaccggcuccggcuccgccaucgcgagcggcgucgccgugugcaaggugcugcaccucgagggggaggucaacaagaucaagagcgcccugcuguccaccaacaaggccguggugagccucuccaacggcgucagcgugcugaccuucaaggugcuggaccucaagaacuacaucgacaagcagcugcugcccauccugaacaagcagagcugcuccauccccaaccccgagacggugauggaguuccagcagaagaacaaccggcuccuggagaucacccgcgaguucagcgugaacgccggggucaccacccccguguccacguacaugcugaccaacagcgagcuccugucccugaucaacgacaugccgaucaccaacgaccagaagaagcucaugagcaacaacgugcagaucguccggcagcaguccuacagcaucaugugcaucaucaaggaggaggugcuggcguacgugguccagcugccccucuacggcgugaucgacacccccugcuggaagcugcacacgagcccccugugcaccaccaacaccaaggagggguccaacaucugccucacgcgcaccgaccggggcugguacugcgacaacgccggcagcgucuccuucuucccgcaggccgagaccugcaaggugugcagcaaccgcguguucugcgacaccaugaacucccugacgcugcccagcgagguaaaccucugcaacgucgacaucuucaaccccaaguacgacugcaagaucaugaccuccaagaccgacgugagcuccagcgugaucaccucccugggggccaucgucagcugcuacggcaagacgaagugcaccgccagcaacaagaacaaggggaucaucaagaccuucuccaacggcugcgacuacgugagcaacaagggcguggacaccguguccgucgggaacacccuguacuacgugaacaagcaggagggccagagccucuacgugaagggggagcccaucaucaacuucuacgacccgcuggucuuccccuccgacgaguucgacgcgagcaucucccaggugaacgagaagaucaaccagagccuggccuucauccgcaaguccgacgagcugcuccacaacgugaacgccggcaagagcacgaccaacaucaugaucaccaccaucaucaucgucaucaucgugauccugcugucccucaucgccguggggcugcugcucuacugcaaggcccggugaggacuaguaauaaggaaacuguaugaaugucugugggcaggaagugaagagauccuucuguaaagguuuuuggaauuaugucugcugaauaauaaacuuuuuugaaauaauaaaucugguagaaaaaugagaucuaaaaaaaaaaaaaaaaaaaaaaaaaaaaaaaaaaaaaaaaaaaaaaaaaaaaaaaaaaaaaaaaugcaucccccccccccccccccccccccccccccccaaaggcucuuuucagagccaccagaauu

SEQ ID NO: 6571 - RNA, 1898 nt, Artificial Sequence
  mRNA product Design d-2 comprising derived and/or modified sequence from HRSV(A2)__F-del_DSCav1_mut6 (opt1)
gggagagcggcucggccauuuugucccagucaguccggaggcugcggcugcagaaguaccgccugcggaguaacugcaaagaagcuuaccauggagcugcucauccugaaggccaacgccaucaccaccauccugacggcggugaccuucugcuucgccagcggccagaacaucaccgaggaguucuaccaguccacgugcagcgccgucuccaagggguaccucggcgcccugcgcaccgggugguacaccagcgugaucaccaucgagcuguccaacaucaaggagaacaagugcaacggcaccgacgccaaggugaagcucaucaagcaggagcuggacaaguacaagaacgcggucacggaccugcagaugcucaugugcagcacccccgccaccggguccggcagcgccaucgccuccggcguggcggugugcaagguccugcaccuggagggggaggugaacaagaucaagagcgcccuccuguccaccaacaaggccguggucagccuguccaacggcgugagcgugcucacguucaagguccuggaccugaagaacuacaucgacaagcagcuccugccgauccugaacaagcaguccugcagcauccccaaccccgagaccgugauggaguuccagcagaagaacaaccggcuccuggagaucacccgcgaguucuccgugaacgccggggucaccacgcccgugagcaccuacaugcugaccaacuccgagcuccugagccugaucaacgacaugccgaucaccaacgaccagaagaagcucaugagcaacaacgugcagaucguccggcagcaguccuacagcaucaugugcaucaucaaggaggaggugcuggccuacgugguccagcugccccucuacggcgugaucgacacgcccugcuggaagcugcacaccagcccccugugcaccaccaacacgaaggaggggagcaacaucugccucacccgcaccgaccggggcugguacugcgacaacgcgggcuccgugagcuucuucccgcaggccgagaccugcaaggucugcuccaaccgcguguucugcgacacgaugaacagccugacccugcccuccgaggucaaccucugcaacguggacaucuucaaccccaaguacgacugcaagaucaugaccagcaagaccgacguguccagcuccgucaucacgagccugggggccaucguguccugcuacggcaagaccaagugcaccgccagcaacaagaacaaggggaucaucaagaccuucuccaacggcugcgacuacgugagcaacaagggcgucgacacgguguccguggggaacacccuguacuacgucaacaagcaggagggccagagccucuacgugaagggggagcccaucaucaacuucuacgacccgcugguguuccccagcgacgaguucgacgccuccaucagccaggucaacgagaagaucaaccagucccuggcguucauccggaaguccgacgagcuccugcacaacgugaacgccggcaaguccaccaccaacaucaugaucaccacgaucaucaucgugaucaucgucauccugcucagccugaucgccguggggcugcuccuguacugcaaggcccgcugaggacuaguaauaaggaaacuguaugaaugucugugggcaggaagugaagagauccuucuguaaagguuuuuggaauuaugucugcugaauaauaaacuuuuuugaaauaauaaaucugguagaaaaaugagaucuaaaaaaaaaaaaaaaaaaaaaaaaaaaaaaaaaaaaaaaaaaaaaaaaaaaaaaaaaaaaaaaaugcaucccccccccccccccccccccccccccccccaaaggcucuuuucagagccaccagaauu

SEQ ID NO: 6572 - RNA, 1898 nt, Artificial Sequence
  mRNA product Design d-2 comprising derived and/or modified sequence from HRSV(A2)__F-del_DSCav1_mut6 (opt2)
gggagagcggcucggccauuuugucccagucaguccggaggcugcggcugcagaaguaccgccugcggaguaacugcaaagaagcuuaccauggagcuccucauccucaaggccaacgccaucaccaccauccucaccgccgucaccuucugcuucgccuccggccagaacaucaccgaggaguucuaccaguccaccugcuccgccgucuccaagggcuaccucggcgcccuccgcaccggcugguacaccuccgucaucaccaucgagcucuccaacaucaaggagaacaagugcaacggcaccgacgccaaggucaagcucaucaagcaggagcucgacaaguacaagaacgccgucaccgaccuccagaugcucaugugcuccacccccgccaccggcuccggcuccgccaucgccuccggcgucgccgucugcaagguccuccaccucgagggcgaggucaacaagaucaaguccgcccuccucuccaccaacaaggccgucgucucccucuccaacggcgucuccguccucaccuucaagguccucgaccucaagaacuacaucgacaagcagcuccuccccauccucaacaagcaguccugcuccauccccaaccccgagaccgucauggaguuccagcagaagaacaaccgccuccucgagaucacccgcgaguucuccgucaacgccggcgucaccacccccgucuccaccuacaugcucaccaacuccgagcuccucucccucaucaacgacaugcccaucaccaacgaccagaagaagcucauguccaacaacguccagaucguccgccagcaguccuacuccaucaugugcaucaucaaggaggagguccucgccuacgucguccagcucccccucuacggcgucaucgacacccccugcuggaagcuccacaccuccccccucugcaccaccaacaccaaggagggcuccaacaucugccucacccgcaccgaccgcggcugguacugcgacaacgccggcuccgucuccuucuucccccaggccgagaccugcaaggucugcuccaaccgcgucuucugcgacaccaugaacucccucacccuccccuccgaggucaaccucugcaacgucgacaucuucaaccccaaguacgacugcaagaucaugaccuccaagaccgacgucuccuccuccgucaucaccucccucggcgccaucgucuccugcuacggcaagaccaagugcaccgccuccaacaagaacaagggcaucaucaagaccuucuccaacggcugcgacuacgucuccaacaagggcgucgacaccgucuccgucggcaacacccucuacuacgucaacaagcaggagggccagucccucuacgucaagggcgagcccaucaucaacuucuacgacccccucgucuuccccuccgacgaguucgacgccuccaucucccaggucaacgagaagaucaaccagucccucgccuucauccgcaaguccgacgagcuccuccacaacgucaacgccggcaaguccaccaccaacaucaugaucaccaccaucaucaucgucaucaucgucauccuccucucccucaucgccgucggccuccuccucuacugcaaggcccgcugaggacuaguaauaaggaaacuguaugaaugucugugggcaggaagugaagagauccuucuguaaagguuuuuggaauuaugucugcugaauaauaaacuuuuuugaaauaauaaaucugguagaaaaaugagaucuaaaaaaaaaaaaaaaaaaaaaaaaaaaaaaaaaaaaaaaaaaaaaaaaaaaaaaaaaaaaaaaaugcaucccccccccccccccccccccccccccccccaaaggcucuuuucagagccaccagaauu

SEQ ID NO: 6573 - RNA, 1898 nt, Artificial Sequence
  mRNA product Design d-2 comprising derived and/or modified sequence from HRSV(A2)__F-del_DSCav1_mut6 (opt3)
gggagagcggcucggccauuuugucccagucaguccggaggcugcggcugcagaaguaccgccugcggaguaacugcaaagaagcuuaccauggagcugcucauccuuaaggccaacgcuauuaccacaauacugacugcagugacguucugcuuugccagcggccagaauaucaccgaagaguucuaccaauccacauguucugcggucucaaaaggguauuugggagcuuuaagaacugguugguacaccaguguuauuacaaucgaacugagcaacauuaaggagaauaaaugcaacggcaccgacgccaaggugaaacuaaucaagcaggaacucgauaaguauaaaaaugcaguaacugaccugcagaugcuuauguguuccacacccgccaccgggucuggaucggcuauagcaucaggcguggccgucugcaaggugcugcacuuggagggugagguuaacaaaaucaagagcgcucuccugaguacgaauaaagccguggucucccugucuaacggggugagcguacucacuuuuaagguuuuagaucugaagaauuacauugacaaacagcuuuugccuauccugaacaagcaauccuguucaauuccaaauccggaaaccgugauggaguuccagcagaaaaacaauaggcuacucgaaaucacacgggaguuuagugucaacgcgggagugacuacccccgugagcacauauaugcugaccaauucugagcuucuguccuugauaaacgauaugccuauuacgaacgaccagaagaaacucaugucaaauaacguccaaaucguucgccagcagagcuacaguauuaugugcaucaucaaggaagaggugcuggcauauguagugcaguuaccacuguacggcgucauugauacucccuguuggaaacuccauacaucuccucuuugcaccacuaauacaaaggaaggcuccaacauaugucugacccgaacggaccgugggugguacugcgauaaugccggaagcgugucguucuuuccacaagcugagaccuguaagguuugcucuaacagaguguucugcgacacaaugaacuccuugacucuacccucagaagucaaucuguguaauguggauaucuuuaacccuaaauaugacugcaagauuaugaccaguaaaacagauguaagcuccucuguuaucacuagccucggugccauagugucauguuacggcaagaccaaaugcacagcaaguaauaagaacaaggggauuaucaaaaccuucuccaauggaugugacuaugucagcaacaagggcguggacacugucucuguggguaauacgcuguacuauguuaacaaacaggaggggcagucacuuuacgugaagggagagccaaucauuaacuuuuaugauccgcugguauuccccagugacgaauuugaugcuagcaucucccaagucaaugagaaaauuaaccagucuuuggccuucauaaggaagucggacgaacuccugcacaaugugaacgcgggcaagagcacaaccaauaucaugauuacuaccaucaucauuguuauaaucgugauuuuacugucccuaaucgccgucggccuccugcuuuacugcaaagcacggugaggacuaguaauaaggaaacuguaugaaugucugugggcaggaagugaagagauccuucuguaaagguuuuuggaauuaugucugcugaauaauaaacuuuuuugaaauaauaaaucugguagaaaaaugagaucuaaaaaaaaaaaaaaaaaaaaaaaaaaaaaaaaaaaaaaaaaaaaaaaaaaaaaaaaaaaaaaaaugcaucccccccccccccccccccccccccccccccaaaggcucuuuucagagccaccagaauu

SEQ ID NO: 6574 - RNA, 1898 nt, Artificial Sequence
  mRNA product Design d-2 comprising derived and/or modified sequence from HRSV(A2)__F-del_DSCav1_mut6 (opt4)
gggagagcggcucggccauuuugucccagucaguccggaggcugcggcugcagaaguaccgccugcggaguaacugcaaagaagcuuaccauggagcugcugauccugaaggccaacgccaucaccaccauccugaccgccgugaccuucugcuucgccagcggccagaacaucaccgaggaguucuaccagagcaccugcagcgccgugagcaagggcuaccugggcgcccugagaaccggcugguacaccagcgugaucaccaucgagcugagcaacaucaaggagaacaagugcaacggcaccgacgccaaggugaagcugaucaagcaggagcuggacaaguacaagaacgccgugaccgaccugcagaugcugaugugcagcacccccgccaccggcagcggcagcgccaucgccagcggcguggccgugugcaaggugcugcaccuggagggcgaggugaacaagaucaagagcgcccugcugagcaccaacaaggccguggugagccugagcaacggcgugagcgugcugaccuucaaggugcuggaccugaagaacuacaucgacaagcagcugcugcccauccugaacaagcagagcugcagcauccccaaccccgagaccgugauggaguuccagcagaagaacaacagacugcuggagaucaccagagaguucagcgugaacgccggcgugaccacccccgugagcaccuacaugcugaccaacagcgagcugcugagccugaucaacgacaugcccaucaccaacgaccagaagaagcugaugagcaacaacgugcagaucgugagacagcagagcuacagcaucaugugcaucaucaaggaggaggugcuggccuacguggugcagcugccccuguacggcgugaucgacacccccugcuggaagcugcacaccagcccccugugcaccaccaacaccaaggagggcagcaacaucugccugaccagaaccgacagaggcugguacugcgacaacgccggcagcgugagcuucuucccccaggccgagaccugcaaggugugcagcaacagaguguucugcgacaccaugaacagccugacccugcccagcgaggugaaccugugcaacguggacaucuucaaccccaaguacgacugcaagaucaugaccagcaagaccgacgugagcagcagcgugaucaccagccugggcgccaucgugagcugcuacggcaagaccaagugcaccgccagcaacaagaacaagggcaucaucaagaccuucagcaacggcugcgacuacgugagcaacaagggcguggacaccgugagcgugggcaacacccuguacuacgugaacaagcaggagggccagagccuguacgugaagggcgagcccaucaucaacuucuacgacccccugguguuccccagcgacgaguucgacgccagcaucagccaggugaacgagaagaucaaccagagccuggccuucaucagaaagagcgacgagcugcugcacaacgugaacgccggcaagagcaccaccaacaucaugaucaccaccaucaucaucgugaucaucgugauccugcugagccugaucgccgugggccugcugcuguacugcaaggccagaugaggacuaguaauaaggaaacuguaugaaugucugugggcaggaagugaagagauccuucuguaaagguuuuuggaauuaugucugcugaauaauaaacuuuuuugaaauaauaaaucugguagaaaaaugagaucuaaaaaaaaaaaaaaaaaaaaaaaaaaaaaaaaaaaaaaaaaaaaaaaaaaaaaaaaaaaaaaaaugcaucccccccccccccccccccccccccccccccaaaggcucuuuucagagccaccagaauu

SEQ ID NO: 6575 - RNA, 1898 nt, Artificial Sequence
  mRNA product Design d-2 comprising derived and/or modified sequence from HRSV(A2)__F-del_DSCav1_mut6 (opt5)
gggagagcggcucggccauuuugucccagucaguccggaggcugcggcugcagaaguaccgccugcggaguaacugcaaagaagcuuaccauggagcugcucauccugaaggccaacgcuauuaccacaauccuuacggccgugaccuucugcuuugcgagcggccagaauauuacagaagaguucuaccaauccaccuguucugcugucagcaaaggguaucugggagcccucagaacaggcugguacaccuccguuaucacaauugaacugucuaacaucaaggagaauaaaugcaacgggaccgacgccaaggugaaacuuaucaagcaggaacuggauaaguauaaaaaugcugugacggaccuccagaugcugauguguagcacccccgccacaggauccggcucugcuauugccagcggggucgcggugugcaagguucugcaccucgagggagaggugaacaaaaucaaguccgcccugcuuagcaccaauaaagcugucgugucucuguccaacggcguuagcgugcucacauuuaagguccuggaucuuaagaauuacauugacaaacagcugcucccuauccugaacaagcaaucuuguuccauuccgaaucccgaaaccgugauggaguuccagcagaaaaacaaucggcugcucgaaaucacgcgcgaguuuagcgugaacgccggcgucacaaccccuguuucuacauauaugcugaccaauuccgagcuucugagccucauuaacgauaugcccaucaccaacgaccagaagaaacugauguccaauaacgugcaaaucgugagacagcagucuuacagcauuaugugcaucauuaaggaagagguccuugcuuaugugguucagcugccucucuacggggugaucgauacacccuguuggaaacugcauacguccccucugugcaccacaaauaccaaggaaggaagcaacauuugucucacacggaccgaccgcggcugguacugcgauaaugccgggucugucuccuucuuuccgcaagcggagacguguaaggugugcagcaacagaguuuucugcgacacaaugaacucucugacccuucccagcgaagugaaucuguguaaugucgauaucuuuaacccuaaauaugacugcaagaucaugaccuccaaaacagaugugucuagcuccgucauuaccagccucggagccaucgugucuuguuacggcaagacaaaaugcacggcuuccaauaagaacaaggggauuaucaaaaccuucagcaauggaugugacuauguuucuaacaagggcguggacacagucuccgugggcaauacccuguacuauguuaacaaacaggaggggcagagccuuuacgugaagggagagcccauuaucaacuuuuaugauccucuggucuuccccuccgacgaauuugaugccucuaucagccaagugaaugagaaaauuaaccagucccucgcuuucauccggaagucugacgaacugcugcacaaugugaacgccggcaagagcacaaccaauauuaugaucacgaccauuaucauuguuaucaucgucauucuccugucccuuaucgccguggggcugcuccuguacugcaaagcucgcugaggacuaguaauaaggaaacuguaugaaugucugugggcaggaagugaagagauccuucuguaaagguuuuuggaauuaugucugcugaauaauaaacuuuuuugaaauaauaaaucugguagaaaaaugagaucuaaaaaaaaaaaaaaaaaaaaaaaaaaaaaaaaaaaaaaaaaaaaaaaaaaaaaaaaaaaaaaaaugcaucccccccccccccccccccccccccccccccaaaggcucuuuucagagccaccagaauu

SEQ ID NO: 6576 - RNA, 1898 nt, Artificial Sequence
  mRNA product Design d-2 comprising derived and/or modified sequence from HRSV(A2)__F-del_DSCav1_mut6 (opt6)
gggagagcggcucggccauuuugucccagucaguccggaggcugcggcugcagaaguaccgccugcggaguaacugcaaagaagcuuaccauggaacuacucauauuaaaagcaaacgcaauaacaacgauauuaacagcuguaacauucugcuuugcaucaggccaaaauaucaccgaagaauuuuaucaaagcacaugcucugcaguauccaaaggauacuuaggagcauuaagaacaggcugguacacauccguaauaacaauagaacuaucaaacaucaaagaaaacaaaugcaacggcacagacgccaaaguaaaacucauaaaacaagaacuagacaaauauaaaaacgcaguaacagaucuacaaaugcucaugugcuccacaccagcaaccggaucugguucagccauagcauccggcguagccgucugcaaaguauuacaccucgaaggagaaguaaacaaaauaaaaucugcccuauuaucuacaaauaaagccguaguaagucuaaguaacggaguaucaguacuaacauuuaaaguccuagaccugaaaaacuauaucgacaaacaacuauuaccaauacuaaacaaacaauccuguuccaucccuaacccagaaacaguuauggaauuucaacaaaaaaauaaccgccuuuuagaaauaacuagagaauuuucaguaaacgcaggaguuacaacaccaguaucaacauacaugcuaacaaauucagaauuauuaucccuuauaaaugacaugccuaucacaaacgaucaaaaaaaauuaauguccaacaacguacaaauaguaagacaacaaucauauuccaucaugugcaucauaaaagaagaaguccucgcauacguagugcaacuaccacuauacggagucauagauacacccuguuggaaacuucacacaucuccacuaugcacaacaaacacgaaagaaggauccaacauaugccuaacacgaacagacagaggaugguauugcgacaacgcuggaagugugagcuucuucccucaagcagaaacuugcaaaguaugcagcaaucguguauucugcgacacaaugaacucauuaacacucccaagcgaaguaaaccucugcaauguagacaucuuuaauccaaaauacgauuguaaaauaaugacuucaaaaacagacgucucaucaucuguaauaacaucuuuaggagcaauaguuucuugcuacgguaaaacaaaaugcaccgcauccaacaaaaacaaaggaauaauaaaaacauucucuaacggcugcgauuacguaucuaacaaaggaguugacacagucucaguaggaaacacacuauacuacguaaacaaacaagaaggacaaagccuauacguaaaaggagaaccaauaauaaacuucuaugacccauuaguauuuccaagcgaugaauuugacgcuucaauaucacaagucaaugaaaaaauaaaucagagcuuagcauucauaagaaaaucugaugaacuacuacacaauguaaaugcaggaaaauccacuaccaacauaaugauuaccacaauuauaauaguuaucauaguaauacuauuaucacuaauagccguuggauuacuacuauacugcaaagcaagauaaggacuaguaauaaggaaacuguaugaaugucugugggcaggaagugaagagauccuucuguaaagguuuuuggaauuaugucugcugaauaauaaacuuuuuugaaauaauaaaucugguagaaaaaugagaucuaaaaaaaaaaaaaaaaaaaaaaaaaaaaaaaaaaaaaaaaaaaaaaaaaaaaaaaaaaaaaaaaugcaucccccccccccccccccccccccccccccccaaaggcucuuuucagagccaccagaauu

SEQ ID NO: 6577 - RNA, 1898 nt, Artificial Sequence
  mRNA product Design d-2 comprising derived and/or modified sequence from HRSV(A2)__F-del_DSCav1_mut6 (opt11)
gggagagcggcucggccauuuugucccagucaguccggaggcugcggcugcagaaguaccgccugcggaguaacugcaaagaagcuuaccauggaacuacucauccuaaaagcaaacgccaucaccaccauacuaaccgccgucaccuucugcuucgccucgggacaaaacaucaccgaagaguucuaccagucaacgugcuccgccgucucaaaaggcuaccuaggcgcccuccgcaccgggugguauaccuccgucauaacuaucgaacucucuaacaucaaagaaaacaaauguaacggcaccgacgccaaagucaaacuaaucaaacaagaacuggacaaauacaaaaacgccgucaccgaccuacaaaugcucaugugcuccacuccagccaccggcuccgguagcgcaaucgccucaggcguagcuguaugcaaaguccuccaccuagaaggcgaaguaaacaaaauaaaauccgcccuccucucaaccaacaaggccgucgucucacucucaaacggcgucuccguacucaccuuuaaaguccuagaccuuaaaaacuacaucgacaaacaacugcuaccaauccucaacaaacaaucaugcagcaucccaaacccggaaacagucauggaguuccaacagaaaaacaaccgacuccucgaaaucacccgcgaguucuccgucaacgccggagucaccacaccuguaagcacauacaugcuuacuaauuccgaacuccuuucacuaauaaacgacaugccaauaaccaacgaccaaaagaaacucauguccaacaacguacaaaucguacgccaacaauccuacuccaucaugugcaucaucaaagaagaaguccuggccuaugucguacaacucccccuuuacggugucaucgacacacccugcuggaaacuacacaccagcccccucugcacaacaaacaccaaagaaggcuccaacaucugccucacccguaccgaccgaggcugguacugcgacaacgccggcuccgucuccuucuucccccaagccgaaaccugcaaagucugcagcaaccgcgucuucugcgauaccaugaacucccucacacucccaucugaagucaaccucugcaacgucgauauuuucaauccaaaauacgacugcaaaaucaugacuagcaaaaccgacguuagcuccuccgucaucaccucccucggcgccauaguuucaugcuacggcaaaaccaaaugcaccgccuccaacaaaaacaaaggcaucauaaaaaccuucuccaacgggugcgacuacguaucuaauaaaggagucgacaccgucucaguaggaaacacccucuacuaugucaacaaacaagaaggccaaucacuauacguuaaaggcgaaccaaucaucaacuucuacgacccacucgucuuccccagcgacgaguuugacgccucaaucucgcaagucaaugaaaagauuaaccaaucccuagccuucauccgaaaaagugacgaacuccuccacaacguuaacgccggcaaaucuacaaccaacaucaugaucaccacuauaaucaucgucaucauagucauacuucucagccucaucgcagucggacuccuccuuuauugcaaggcacgauaaggacuaguaauaaggaaacuguaugaaugucugugggcaggaagugaagagauccuucuguaaagguuuuuggaauuaugucugcugaauaauaaacuuuuuugaaauaauaaaucugguagaaaaaugagaucuaaaaaaaaaaaaaaaaaaaaaaaaaaaaaaaaaaaaaaaaaaaaaaaaaaaaaaaaaaaaaaaaugcaucccccccccccccccccccccccccccccccaaaggcucuuuucagagccaccagaauu

SEQ ID NO: 6578 - RNA, 2214 nt, Artificial Sequence
  mRNA product Design d-3 comprising derived and/or modified sequence from HRSV(A2)__F-del_DSCav1_mut6 (opt1)
gggagagggcgcuuggcuugcaaggacccugagcugcggcauugaagcacacccaacccaacucgacugaagucagccucacugaaccggaucugagaaucuucucucucugggcuugccagggcucuccgaaccuagcuagcauccucuucaauuccaacuagaaagcuuaccauggagcugcucauccugaaggccaacgccaucaccaccauccugacggcggugaccuucugcuucgccagcggccagaacaucaccgaggaguucuaccaguccacgugcagcgccgucuccaagggguaccucggcgcccugcggaccggcugguacaccuccgugaucaccaucgagcugagcaacaucaaggagaacaagugcaacgggaccgacgccaaggugaagcucaucaagcaggagcuggacaaguacaagaacgcggucacggaccugcagaugcugaugugcuccaccccggcaaccggcuccggcuccgccaucgcgagcggcgucgccgugugcaaggugcugcaccucgagggggaggucaacaagaucaagagcgcccugcuguccaccaacaaggccguggugagccucuccaacggcgucagcgugcugaccuucaaggugcuggaccucaagaacuacaucgacaagcagcugcugcccauccugaacaagcagagcugcuccauccccaaccccgagacggugauggaguuccagcagaagaacaaccggcuccuggagaucacccgcgaguucagcgugaacgccggggucaccacccccguguccacguacaugcugaccaacagcgagcuccugucccugaucaacgacaugccgaucaccaacgaccagaagaagcucaugagcaacaacgugcagaucguccggcagcaguccuacagcaucaugugcaucaucaaggaggaggugcuggcguacgugguccagcugccccucuacggcgugaucgacacccccugcuggaagcugcacacgagcccccugugcaccaccaacaccaaggagggguccaacaucugccucacgcgcaccgaccggggcugguacugcgacaacgccggcagcgucuccuucuucccgcaggccgagaccugcaaggugugcagcaaccgcguguucugcgacaccaugaacucccugacgcugcccagcgagguaaaccucugcaacgucgacaucuucaaccccaaguacgacugcaagaucaugaccuccaagaccgacgugagcuccagcgugaucaccucccugggggccaucgucagcugcuacggcaagacgaagugcaccgccagcaacaagaacaaggggaucaucaagaccuucuccaacggcugcgacuacgugagcaacaagggcguggacaccguguccgucgggaacacccuguacuacgugaacaagcaggagggccagagccucuacgugaagggggagcccaucaucaacuucuacgacccgcuggucuuccccuccgacgaguucgacgcgagcaucucccaggugaacgagaagaucaaccagagccuggccuucauccgcaaguccgacgagcugcuccacaacgugaacgccggcaagagcacgaccaacaucaugaucaccaccaucaucaucgucaucaucgugauccugcugucccucaucgccguggggcugcugcucuacugcaaggcccggugaggacuagugaagggaacacccaaauuuaauucagccuuaagcacaauuaauuaagagugaaacguaauuguacaagcaguuggucacccaccauagggcaugaucaacaccgcaaccuuuccuuuuucccccagugauucugaaaaaccccucuucccuucagcuugcuuagauguuccaaauuuaguaagcuuaaggcggccuacagaagaaaaagaaaaaaaaggccacaaaaguucccucucacuuucaguaaauaaaauaaaagcagcaacagaaauaaagaaauaaaugaaauucaaaaugaaauaaauauuguguugugcagcauuaaaaaaucaauaaaaauuaaaaaugagcaagaucuaaaaaaaaaaaaaaaaaaaaaaaaaaaaaaaaaaaaaaaaaaaaaaaaaaaaaaaaaaaaaaaaugcaucccccccccccccccccccccccccccccccaaaggcucuuuucagagccaccagaauu

SEQ ID NO: 6579 - RNA, 2214 nt, Artificial Sequence
  mRNA product Design d-3 comprising derived and/or modified sequence from HRSV(A2)__F-del_DSCav1_mut6 (opt1)
gggagagggcgcuuggcuugcaaggacccugagcugcggcauugaagcacacccaacccaacucgacugaagucagccucacugaaccggaucugagaaucuucucucucugggcuugccagggcucuccgaaccuagcuagcauccucuucaauuccaacuagaaagcuuaccauggagcugcucauccugaaggccaacgccaucaccaccauccugacggcggugaccuucugcuucgccagcggccagaacaucaccgaggaguucuaccaguccacgugcagcgccgucuccaagggguaccucggcgcccugcgcaccgggugguacaccagcgugaucaccaucgagcuguccaacaucaaggagaacaagugcaacggcaccgacgccaaggugaagcucaucaagcaggagcuggacaaguacaagaacgcggucacggaccugcagaugcucaugugcagcacccccgccaccggguccggcagcgccaucgccuccggcguggcggugugcaagguccugcaccuggagggggaggugaacaagaucaagagcgcccuccuguccaccaacaaggccguggucagccuguccaacggcgugagcgugcucacguucaagguccuggaccugaagaacuacaucgacaagcagcuccugccgauccugaacaagcaguccugcagcauccccaaccccgagaccgugauggaguuccagcagaagaacaaccggcuccuggagaucacccgcgaguucuccgugaacgccggggucaccacgcccgugagcaccuacaugcugaccaacuccgagcuccugagccugaucaacgacaugccgaucaccaacgaccagaagaagcucaugagcaacaacgugcagaucguccggcagcaguccuacagcaucaugugcaucaucaaggaggaggugcuggccuacgugguccagcugccccucuacggcgugaucgacacgcccugcuggaagcugcacaccagcccccugugcaccaccaacacgaaggaggggagcaacaucugccucacccgcaccgaccggggcugguacugcgacaacgcgggcuccgugagcuucuucccgcaggccgagaccugcaaggucugcuccaaccgcguguucugcgacacgaugaacagccugacccugcccuccgaggucaaccucugcaacguggacaucuucaaccccaaguacgacugcaagaucaugaccagcaagaccgacguguccagcuccgucaucacgagccugggggccaucguguccugcuacggcaagaccaagugcaccgccagcaacaagaacaaggggaucaucaagaccuucuccaacggcugcgacuacgugagcaacaagggcgucgacacgguguccguggggaacacccuguacuacgucaacaagcaggagggccagagccucuacgugaagggggagcccaucaucaacuucuacgacccgcugguguuccccagcgacgaguucgacgccuccaucagccaggucaacgagaagaucaaccagucccuggcguucauccggaaguccgacgagcuccugcacaacgugaacgccggcaaguccaccaccaacaucaugaucaccacgaucaucaucgugaucaucgucauccugcucagccugaucgccguggggcugcuccuguacugcaaggcccgcugaggacuagugaagggaacacccaaauuuaauucagccuuaagcacaauuaauuaagagugaaacguaauuguacaagcaguuggucacccaccauagggcaugaucaacaccgcaaccuuuccuuuuucccccagugauucugaaaaaccccucuucccuucagcuugcuuagauguuccaaauuuaguaagcuuaaggcggccuacagaagaaaaagaaaaaaaaggccacaaaaguucccucucacuuucaguaaauaaaauaaaagcagcaacagaaauaaagaaauaaaugaaauucaaaaugaaauaaauauuguguugugcagcauuaaaaaaucaauaaaaauuaaaaaugagcaagaucuaaaaaaaaaaaaaaaaaaaaaaaaaaaaaaaaaaaaaaaaaaaaaaaaaaaaaaaaaaaaaaaaugcaucccccccccccccccccccccccccccccccaaaggcucuuuucagagccaccagaauu

SEQ ID NO: 6580 - RNA, 2214 nt, Artificial Sequence
  mRNA product Design d-3 comprising derived and/or modified sequence from HRSV(A2)__F-del_DSCav1_mut6 (opt2)
gggagagggcgcuuggcuugcaaggacccugagcugcggcauugaagcacacccaacccaacucgacugaagucagccucacugaaccggaucugagaaucuucucucucugggcuugccagggcucuccgaaccuagcuagcauccucuucaauuccaacuagaaagcuuaccauggagcuccucauccucaaggccaacgccaucaccaccauccucaccgccgucaccuucugcuucgccuccggccagaacaucaccgaggaguucuaccaguccaccugcuccgccgucuccaagggcuaccucggcgcccuccgcaccggcugguacaccuccgucaucaccaucgagcucuccaacaucaaggagaacaagugcaacggcaccgacgccaaggucaagcucaucaagcaggagcucgacaaguacaagaacgccgucaccgaccuccagaugcucaugugcuccacccccgccaccggcuccggcuccgccaucgccuccggcgucgccgucugcaagguccuccaccucgagggcgaggucaacaagaucaaguccgcccuccucuccaccaacaaggccgucgucucccucuccaacggcgucuccguccucaccuucaagguccucgaccucaagaacuacaucgacaagcagcuccuccccauccucaacaagcaguccugcuccauccccaaccccgagaccgucauggaguuccagcagaagaacaaccgccuccucgagaucacccgcgaguucuccgucaacgccggcgucaccacccccgucuccaccuacaugcucaccaacuccgagcuccucucccucaucaacgacaugcccaucaccaacgaccagaagaagcucauguccaacaacguccagaucguccgccagcaguccuacuccaucaugugcaucaucaaggaggagguccucgccuacgucguccagcucccccucuacggcgucaucgacacccccugcuggaagcuccacaccuccccccucugcaccaccaacaccaaggagggcuccaacaucugccucacccgcaccgaccgcggcugguacugcgacaacgccggcuccgucuccuucuucccccaggccgagaccugcaaggucugcuccaaccgcgucuucugcgacaccaugaacucccucacccuccccuccgaggucaaccucugcaacgucgacaucuucaaccccaaguacgacugcaagaucaugaccuccaagaccgacgucuccuccuccgucaucaccucccucggcgccaucgucuccugcuacggcaagaccaagugcaccgccuccaacaagaacaagggcaucaucaagaccuucuccaacggcugcgacuacgucuccaacaagggcgucgacaccgucuccgucggcaacacccucuacuacgucaacaagcaggagggccagucccucuacgucaagggcgagcccaucaucaacuucuacgacccccucgucuuccccuccgacgaguucgacgccuccaucucccaggucaacgagaagaucaaccagucccucgccuucauccgcaaguccgacgagcuccuccacaacgucaacgccggcaaguccaccaccaacaucaugaucaccaccaucaucaucgucaucaucgucauccuccucucccucaucgccgucggccuccuccucuacugcaaggcccgcugaggacuagugaagggaacacccaaauuuaauucagccuuaagcacaauuaauuaagagugaaacguaauuguacaagcaguuggucacccaccauagggcaugaucaacaccgcaaccuuuccuuuuucccccagugauucugaaaaaccccucuucccuucagcuugcuuagauguuccaaauuuaguaagcuuaaggcggccuacagaagaaaaagaaaaaaaaggccacaaaaguucccucucacuuucaguaaauaaaauaaaagcagcaacagaaauaaagaaauaaaugaaauucaaaaugaaauaaauauuguguugugcagcauuaaaaaaucaauaaaaauuaaaaaugagcaagaucuaaaaaaaaaaaaaaaaaaaaaaaaaaaaaaaaaaaaaaaaaaaaaaaaaaaaaaaaaaaaaaaaugcaucccccccccccccccccccccccccccccccaaaggcucuuuucagagccaccagaauu

SEQ ID NO: 6581 - RNA, 2214 nt, Artificial Sequence
  mRNA product Design d-3 comprising derived and/or modified sequence from HRSV(A2)__F-del_DSCav1_mut6 (opt3)
gggagagggcgcuuggcuugcaaggacccugagcugcggcauugaagcacacccaacccaacucgacugaagucagccucacugaaccggaucugagaaucuucucucucugggcuugccagggcucuccgaaccuagcuagcauccucuucaauuccaacuagaaagcuuaccauggagcugcucauccuuaaggccaacgcuauuaccacaauacugacugcagugacguucugcuuugccagcggccagaauaucaccgaagaguucuaccaauccacauguucugcggucucaaaaggguauuugggagcuuuaagaacugguugguacaccaguguuauuacaaucgaacugagcaacauuaaggagaauaaaugcaacggcaccgacgccaaggugaaacuaaucaagcaggaacucgauaaguauaaaaaugcaguaacugaccugcagaugcuuauguguuccacacccgccaccgggucuggaucggcuauagcaucaggcguggccgucugcaaggugcugcacuuggagggugagguuaacaaaaucaagagcgcucuccugaguacgaauaaagccguggucucccugucuaacggggugagcguacucacuuuuaagguuuuagaucugaagaauuacauugacaaacagcuuuugccuauccugaacaagcaauccuguucaauuccaaauccggaaaccgugauggaguuccagcagaaaaacaauaggcuacucgaaaucacacgggaguuuagugucaacgcgggagugacuacccccgugagcacauauaugcugaccaauucugagcuucuguccuugauaaacgauaugccuauuacgaacgaccagaagaaacucaugucaaauaacguccaaaucguucgccagcagagcuacaguauuaugugcaucaucaaggaagaggugcuggcauauguagugcaguuaccacuguacggcgucauugauacucccuguuggaaacuccauacaucuccucuuugcaccacuaauacaaaggaaggcuccaacauaugucugacccgaacggaccgugggugguacugcgauaaugccggaagcgugucguucuuuccacaagcugagaccuguaagguuugcucuaacagaguguucugcgacacaaugaacuccuugacucuacccucagaagucaaucuguguaauguggauaucuuuaacccuaaauaugacugcaagauuaugaccaguaaaacagauguaagcuccucuguuaucacuagccucggugccauagugucauguuacggcaagaccaaaugcacagcaaguaauaagaacaaggggauuaucaaaaccuucuccaauggaugugacuaugucagcaacaagggcguggacacugucucuguggguaauacgcuguacuauguuaacaaacaggaggggcagucacuuuacgugaagggagagccaaucauuaacuuuuaugauccgcugguauuccccagugacgaauuugaugcuagcaucucccaagucaaugagaaaauuaaccagucuuuggccuucauaaggaagucggacgaacuccugcacaaugugaacgcgggcaagagcacaaccaauaucaugauuacuaccaucaucauuguuauaaucgugauuuuacugucccuaaucgccgucggccuccugcuuuacugcaaagcacggugaggacuagugaagggaacacccaaauuuaauucagccuuaagcacaauuaauuaagagugaaacguaauuguacaagcaguuggucacccaccauagggcaugaucaacaccgcaaccuuuccuuuuucccccagugauucugaaaaaccccucuucccuucagcuugcuuagauguuccaaauuuaguaagcuuaaggcggccuacagaagaaaaagaaaaaaaaggccacaaaaguucccucucacuuucaguaaauaaaauaaaagcagcaacagaaauaaagaaauaaaugaaauucaaaaugaaauaaauauuguguugugcagcauuaaaaaaucaauaaaaauuaaaaaugagcaagaucuaaaaaaaaaaaaaaaaaaaaaaaaaaaaaaaaaaaaaaaaaaaaaaaaaaaaaaaaaaaaaaaaugcaucccccccccccccccccccccccccccccccaaaggcucuuuucagagccaccagaauu

SEQ ID NO: 6582 - RNA, 2214 nt, Artificial Sequence
  mRNA product Design d-3 comprising derived and/or modified sequence from HRSV(A2)__F-del_DSCav1_mut6 (opt4)
gggagagggcgcuuggcuugcaaggacccugagcugcggcauugaagcacacccaacccaacucgacugaagucagccucacugaaccggaucugagaaucuucucucucugggcuugccagggcucuccgaaccuagcuagcauccucuucaauuccaacuagaaagcuuaccauggagcugcugauccugaaggccaacgccaucaccaccauccugaccgccgugaccuucugcuucgccagcggccagaacaucaccgaggaguucuaccagagcaccugcagcgccgugagcaagggcuaccugggcgcccugagaaccggcugguacaccagcgugaucaccaucgagcugagcaacaucaaggagaacaagugcaacggcaccgacgccaaggugaagcugaucaagcaggagcuggacaaguacaagaacgccgugaccgaccugcagaugcugaugugcagcacccccgccaccggcagcggcagcgccaucgccagcggcguggccgugugcaaggugcugcaccuggagggcgaggugaacaagaucaagagcgcccugcugagcaccaacaaggccguggugagccugagcaacggcgugagcgugcugaccuucaaggugcuggaccugaagaacuacaucgacaagcagcugcugcccauccugaacaagcagagcugcagcauccccaaccccgagaccgugauggaguuccagcagaagaacaacagacugcuggagaucaccagagaguucagcgugaacgccggcgugaccacccccgugagcaccuacaugcugaccaacagcgagcugcugagccugaucaacgacaugcccaucaccaacgaccagaagaagcugaugagcaacaacgugcagaucgugagacagcagagcuacagcaucaugugcaucaucaaggaggaggugcuggccuacguggugcagcugccccuguacggcgugaucgacacccccugcuggaagcugcacaccagcccccugugcaccaccaacaccaaggagggcagcaacaucugccugaccagaaccgacagaggcugguacugcgacaacgccggcagcgugagcuucuucccccaggccgagaccugcaaggugugcagcaacagaguguucugcgacaccaugaacagccugacccugcccagcgaggugaaccugugcaacguggacaucuucaaccccaaguacgacugcaagaucaugaccagcaagaccgacgugagcagcagcgugaucaccagccugggcgccaucgugagcugcuacggcaagaccaagugcaccgccagcaacaagaacaagggcaucaucaagaccuucagcaacggcugcgacuacgugagcaacaagggcguggacaccgugagcgugggcaacacccuguacuacgugaacaagcaggagggccagagccuguacgugaagggcgagcccaucaucaacuucuacgacccccugguguuccccagcgacgaguucgacgccagcaucagccaggugaacgagaagaucaaccagagccuggccuucaucagaaagagcgacgagcugcugcacaacgugaacgccggcaagagcaccaccaacaucaugaucaccaccaucaucaucgugaucaucgugauccugcugagccugaucgccgugggccugcugcuguacugcaaggccagaugaggacuagugaagggaacacccaaauuuaauucagccuuaagcacaauuaauuaagagugaaacguaauuguacaagcaguuggucacccaccauagggcaugaucaacaccgcaaccuuuccuuuuucccccagugauucugaaaaaccccucuucccuucagcuugcuuagauguuccaaauuuaguaagcuuaaggcggccuacagaagaaaaagaaaaaaaaggccacaaaaguucccucucacuuucaguaaauaaaauaaaagcagcaacagaaauaaagaaauaaaugaaauucaaaaugaaauaaauauuguguugugcagcauuaaaaaaucaauaaaaauuaaaaaugagcaagaucuaaaaaaaaaaaaaaaaaaaaaaaaaaaaaaaaaaaaaaaaaaaaaaaaaaaaaaaaaaaaaaaaugcaucccccccccccccccccccccccccccccccaaaggcucuuuucagagccaccagaauu

SEQ ID NO: 6583 - RNA, 2214 nt, Artificial Sequence
  mRNA product Design d-3 comprising derived and/or modified sequence from HRSV(A2)__F-del_DSCav1_mut6 (opt5)
gggagagggcgcuuggcuugcaaggacccugagcugcggcauugaagcacacccaacccaacucgacugaagucagccucacugaaccggaucugagaaucuucucucucugggcuugccagggcucuccgaaccuagcuagcauccucuucaauuccaacuagaaagcuuaccauggagcugcucauccugaaggccaacgcuauuaccacaauccuuacggccgugaccuucugcuuugcgagcggccagaauauuacagaagaguucuaccaauccaccuguucugcugucagcaaaggguaucugggagcccucagaacaggcugguacaccuccguuaucacaauugaacugucuaacaucaaggagaauaaaugcaacgggaccgacgccaaggugaaacuuaucaagcaggaacuggauaaguauaaaaaugcugugacggaccuccagaugcugauguguagcacccccgccacaggauccggcucugcuauugccagcggggucgcggugugcaagguucugcaccucgagggagaggugaacaaaaucaaguccgcccugcuuagcaccaauaaagcugucgugucucuguccaacggcguuagcgugcucacauuuaagguccuggaucuuaagaauuacauugacaaacagcugcucccuauccugaacaagcaaucuuguuccauuccgaaucccgaaaccgugauggaguuccagcagaaaaacaaucggcugcucgaaaucacgcgcgaguuuagcgugaacgccggcgucacaaccccuguuucuacauauaugcugaccaauuccgagcuucugagccucauuaacgauaugcccaucaccaacgaccagaagaaacugauguccaauaacgugcaaaucgugagacagcagucuuacagcauuaugugcaucauuaaggaagagguccuugcuuaugugguucagcugccucucuacggggugaucgauacacccuguuggaaacugcauacguccccucugugcaccacaaauaccaaggaaggaagcaacauuugucucacacggaccgaccgcggcugguacugcgauaaugccgggucugucuccuucuuuccgcaagcggagacguguaaggugugcagcaacagaguuuucugcgacacaaugaacucucugacccuucccagcgaagugaaucuguguaaugucgauaucuuuaacccuaaauaugacugcaagaucaugaccuccaaaacagaugugucuagcuccgucauuaccagccucggagccaucgugucuuguuacggcaagacaaaaugcacggcuuccaauaagaacaaggggauuaucaaaaccuucagcaauggaugugacuauguuucuaacaagggcguggacacagucuccgugggcaauacccuguacuauguuaacaaacaggaggggcagagccuuuacgugaagggagagcccauuaucaacuuuuaugauccucuggucuuccccuccgacgaauuugaugccucuaucagccaagugaaugagaaaauuaaccagucccucgcuuucauccggaagucugacgaacugcugcacaaugugaacgccggcaagagcacaaccaauauuaugaucacgaccauuaucauuguuaucaucgucauucuccugucccuuaucgccguggggcugcuccuguacugcaaagcucgcugaggacuagugaagggaacacccaaauuuaauucagccuuaagcacaauuaauuaagagugaaacguaauuguacaagcaguuggucacccaccauagggcaugaucaacaccgcaaccuuuccuuuuucccccagugauucugaaaaaccccucuucccuucagcuugcuuagauguuccaaauuuaguaagcuuaaggcggccuacagaagaaaaagaaaaaaaaggccacaaaaguucccucucacuuucaguaaauaaaauaaaagcagcaacagaaauaaagaaauaaaugaaauucaaaaugaaauaaauauuguguugugcagcauuaaaaaaucaauaaaaauuaaaaaugagcaagaucuaaaaaaaaaaaaaaaaaaaaaaaaaaaaaaaaaaaaaaaaaaaaaaaaaaaaaaaaaaaaaaaaugcaucccccccccccccccccccccccccccccccaaaggcucuuuucagagccaccagaauu

SEQ ID NO: 6584 - RNA, 2214 nt, Artificial Sequence
  mRNA product Design d-3 comprising derived and/or modified sequence from HRSV(A2)__F-del_DSCav1_mut6 (opt6)
gggagagggcgcuuggcuugcaaggacccugagcugcggcauugaagcacacccaacccaacucgacugaagucagccucacugaaccggaucugagaaucuucucucucugggcuugccagggcucuccgaaccuagcuagcauccucuucaauuccaacuagaaagcuuaccauggaacuacucauauuaaaagcaaacgcaauaacaacgauauuaacagcuguaacauucugcuuugcaucaggccaaaauaucaccgaagaauuuuaucaaagcacaugcucugcaguauccaaaggauacuuaggagcauuaagaacaggcugguacacauccguaauaacaauagaacuaucaaacaucaaagaaaacaaaugcaacggcacagacgccaaaguaaaacucauaaaacaagaacuagacaaauauaaaaacgcaguaacagaucuacaaaugcucaugugcuccacaccagcaaccggaucugguucagccauagcauccggcguagccgucugcaaaguauuacaccucgaaggagaaguaaacaaaauaaaaucugcccuauuaucuacaaauaaagccguaguaagucuaaguaacggaguaucaguacuaacauuuaaaguccuagaccugaaaaacuauaucgacaaacaacuauuaccaauacuaaacaaacaauccuguuccaucccuaacccagaaacaguuauggaauuucaacaaaaaaauaaccgccuuuuagaaauaacuagagaauuuucaguaaacgcaggaguuacaacaccaguaucaacauacaugcuaacaaauucagaauuauuaucccuuauaaaugacaugccuaucacaaacgaucaaaaaaaauuaauguccaacaacguacaaauaguaagacaacaaucauauuccaucaugugcaucauaaaagaagaaguccucgcauacguagugcaacuaccacuauacggagucauagauacacccuguuggaaacuucacacaucuccacuaugcacaacaaacacgaaagaaggauccaacauaugccuaacacgaacagacagaggaugguauugcgacaacgcuggaagugugagcuucuucccucaagcagaaacuugcaaaguaugcagcaaucguguauucugcgacacaaugaacucauuaacacucccaagcgaaguaaaccucugcaauguagacaucuuuaauccaaaauacgauuguaaaauaaugacuucaaaaacagacgucucaucaucuguaauaacaucuuuaggagcaauaguuucuugcuacgguaaaacaaaaugcaccgcauccaacaaaaacaaaggaauaauaaaaacauucucuaacggcugcgauuacguaucuaacaaaggaguugacacagucucaguaggaaacacacuauacuacguaaacaaacaagaaggacaaagccuauacguaaaaggagaaccaauaauaaacuucuaugacccauuaguauuuccaagcgaugaauuugacgcuucaauaucacaagucaaugaaaaaauaaaucagagcuuagcauucauaagaaaaucugaugaacuacuacacaauguaaaugcaggaaaauccacuaccaacauaaugauuaccacaauuauaauaguuaucauaguaauacuauuaucacuaauagccguuggauuacuacuauacugcaaagcaagauaaggacuagugaagggaacacccaaauuuaauucagccuuaagcacaauuaauuaagagugaaacguaauuguacaagcaguuggucacccaccauagggcaugaucaacaccgcaaccuuuccuuuuucccccagugauucugaaaaaccccucuucccuucagcuugcuuagauguuccaaauuuaguaagcuuaaggcggccuacagaagaaaaagaaaaaaaaggccacaaaaguucccucucacuuucaguaaauaaaauaaaagcagcaacagaaauaaagaaauaaaugaaauucaaaaugaaauaaauauuguguugugcagcauuaaaaaaucaauaaaaauuaaaaaugagcaagaucuaaaaaaaaaaaaaaaaaaaaaaaaaaaaaaaaaaaaaaaaaaaaaaaaaaaaaaaaaaaaaaaaugcaucccccccccccccccccccccccccccccccaaaggcucuuuucagagccaccagaauu

SEQ ID NO: 6585 - RNA, 2214 nt, Artificial Sequence
  mRNA product Design d-3 comprising derived and/or modified sequence from HRSV(A2)__F-del_DSCav1_mut6 (opt11)
gggagagggcgcuuggcuugcaaggacccugagcugcggcauugaagcacacccaacccaacucgacugaagucagccucacugaaccggaucugagaaucuucucucucugggcuugccagggcucuccgaaccuagcuagcauccucuucaauuccaacuagaaagcuuaccauggaacuacucauccuaaaagcaaacgccaucaccaccauacuaaccgccgucaccuucugcuucgccucgggacaaaacaucaccgaagaguucuaccagucaacgugcuccgccgucucaaaaggcuaccuaggcgcccuccgcaccgggugguauaccuccgucauaacuaucgaacucucuaacaucaaagaaaacaaauguaacggcaccgacgccaaagucaaacuaaucaaacaagaacuggacaaauacaaaaacgccgucaccgaccuacaaaugcucaugugcuccacuccagccaccggcuccgguagcgcaaucgccucaggcguagcuguaugcaaaguccuccaccuagaaggcgaaguaaacaaaauaaaauccgcccuccucucaaccaacaaggccgucgucucacucucaaacggcgucuccguacucaccuuuaaaguccuagaccuuaaaaacuacaucgacaaacaacugcuaccaauccucaacaaacaaucaugcagcaucccaaacccggaaacagucauggaguuccaacagaaaaacaaccgacuccucgaaaucacccgcgaguucuccgucaacgccggagucaccacaccuguaagcacauacaugcuuacuaauuccgaacuccuuucacuaauaaacgacaugccaauaaccaacgaccaaaagaaacucauguccaacaacguacaaaucguacgccaacaauccuacuccaucaugugcaucaucaaagaagaaguccuggccuaugucguacaacucccccuuuacggugucaucgacacacccugcuggaaacuacacaccagcccccucugcacaacaaacaccaaagaaggcuccaacaucugccucacccguaccgaccgaggcugguacugcgacaacgccggcuccgucuccuucuucccccaagccgaaaccugcaaagucugcagcaaccgcgucuucugcgauaccaugaacucccucacacucccaucugaagucaaccucugcaacgucgauauuuucaauccaaaauacgacugcaaaaucaugacuagcaaaaccgacguuagcuccuccgucaucaccucccucggcgccauaguuucaugcuacggcaaaaccaaaugcaccgccuccaacaaaaacaaaggcaucauaaaaaccuucuccaacgggugcgacuacguaucuaauaaaggagucgacaccgucucaguaggaaacacccucuacuaugucaacaaacaagaaggccaaucacuauacguuaaaggcgaaccaaucaucaacuucuacgacccacucgucuuccccagcgacgaguuugacgccucaaucucgcaagucaaugaaaagauuaaccaaucccuagccuucauccgaaaaagugacgaacuccuccacaacguuaacgccggcaaaucuacaaccaacaucaugaucaccacuauaaucaucgucaucauagucauacuucucagccucaucgcagucggacuccuccuuuauugcaaggcacgauaaggacuagugaagggaacacccaaauuuaauucagccuuaagcacaauuaauuaagagugaaacguaauuguacaagcaguuggucacccaccauagggcaugaucaacaccgcaaccuuuccuuuuucccccagugauucugaaaaaccccucuucccuucagcuugcuuagauguuccaaauuuaguaagcuuaaggcggccuacagaagaaaaagaaaaaaaaggccacaaaaguucccucucacuuucaguaaauaaaauaaaagcagcaacagaaauaaagaaauaaaugaaauucaaaaugaaauaaauauuguguugugcagcauuaaaaaaucaauaaaaauuaaaaaugagcaagaucuaaaaaaaaaaaaaaaaaaaaaaaaaaaaaaaaaaaaaaaaaaaaaaaaaaaaaaaaaaaaaaaaugcaucccccccccccccccccccccccccccccccaaaggcucuuuucagagccaccagaauu

SEQ ID NO: 6586 - RNA, 1897 nt, Artificial Sequence
  mRNA product Design d-4 comprising derived and/or modified sequence from HRSV(A2)__F-del_DSCav1_mut6 (opt1)
gggagagucccgcagucggcguccagcggcucugcuuguucgugugugugucguugcaggccuuauucaagcuuaccauggagcugcucauccugaaggccaacgccaucaccaccauccugacggcggugaccuucugcuucgccagcggccagaacaucaccgaggaguucuaccaguccacgugcagcgccgucuccaagggguaccucggcgcccugcggaccggcugguacaccuccgugaucaccaucgagcugagcaacaucaaggagaacaagugcaacgggaccgacgccaaggugaagcucaucaagcaggagcuggacaaguacaagaacgcggucacggaccugcagaugcugaugugcuccaccccggcaaccggcuccggcuccgccaucgcgagcggcgucgccgugugcaaggugcugcaccucgagggggaggucaacaagaucaagagcgcccugcuguccaccaacaaggccguggugagccucuccaacggcgucagcgugcugaccuucaaggugcuggaccucaagaacuacaucgacaagcagcugcugcccauccugaacaagcagagcugcuccauccccaaccccgagacggugauggaguuccagcagaagaacaaccggcuccuggagaucacccgcgaguucagcgugaacgccggggucaccacccccguguccacguacaugcugaccaacagcgagcuccugucccugaucaacgacaugccgaucaccaacgaccagaagaagcucaugagcaacaacgugcagaucguccggcagcaguccuacagcaucaugugcaucaucaaggaggaggugcuggcguacgugguccagcugccccucuacggcgugaucgacacccccugcuggaagcugcacacgagcccccugugcaccaccaacaccaaggagggguccaacaucugccucacgcgcaccgaccggggcugguacugcgacaacgccggcagcgucuccuucuucccgcaggccgagaccugcaaggugugcagcaaccgcguguucugcgacaccaugaacucccugacgcugcccagcgagguaaaccucugcaacgucgacaucuucaaccccaaguacgacugcaagaucaugaccuccaagaccgacgugagcuccagcgugaucaccucccugggggccaucgucagcugcuacggcaagacgaagugcaccgccagcaacaagaacaaggggaucaucaagaccuucuccaacggcugcgacuacgugagcaacaagggcguggacaccguguccgucgggaacacccuguacuacgugaacaagcaggagggccagagccucuacgugaagggggagcccaucaucaacuucuacgacccgcuggucuuccccuccgacgaguucgacgcgagcaucucccaggugaacgagaagaucaaccagagccuggccuucauccgcaaguccgacgagcugcuccacaacgugaacgccggcaagagcacgaccaacaucaugaucaccaccaucaucaucgucaucaucgugauccugcugucccucaucgccguggggcugcugcucuacugcaaggcccggugaggacuaguggaagcauuuuccuggcugauuaaaagaaauuacucagcuauggucaucuguuccuguuagaaggcuaugcagcauauuauauacuaugcgcauguuaugaaaugcauaauaaaaaauuuuaaaaaaucuaaaagaucuaaaaaaaaaaaaaaaaaaaaaaaaaaaaaaaaaaaaaaaaaaaaaaaaaaaaaaaaaaaaaaaaugcaucccccccccccccccccccccccccccccccaaaggcucuuuucagagccaccagaauu

SEQ ID NO: 6587 - RNA, 1897 nt, Artificial Sequence
  mRNA product Design d-4 comprising derived and/or modified sequence from HRSV(A2)__F-del_DSCav1_mut6 (opt1)
gggagagucccgcagucggcguccagcggcucugcuuguucgugugugugucguugcaggccuuauucaagcuuaccauggagcugcucauccugaaggccaacgccaucaccaccauccugacggcggugaccuucugcuucgccagcggccagaacaucaccgaggaguucuaccaguccacgugcagcgccgucuccaagggguaccucggcgcccugcgcaccgggugguacaccagcgugaucaccaucgagcuguccaacaucaaggagaacaagugcaacggcaccgacgccaaggugaagcucaucaagcaggagcuggacaaguacaagaacgcggucacggaccugcagaugcucaugugcagcacccccgccaccggguccggcagcgccaucgccuccggcguggcggugugcaagguccugcaccuggagggggaggugaacaagaucaagagcgcccuccuguccaccaacaaggccguggucagccuguccaacggcgugagcgugcucacguucaagguccuggaccugaagaacuacaucgacaagcagcuccugccgauccugaacaagcaguccugcagcauccccaaccccgagaccgugauggaguuccagcagaagaacaaccggcuccuggagaucacccgcgaguucuccgugaacgccggggucaccacgcccgugagcaccuacaugcugaccaacuccgagcuccugagccugaucaacgacaugccgaucaccaacgaccagaagaagcucaugagcaacaacgugcagaucguccggcagcaguccuacagcaucaugugcaucaucaaggaggaggugcuggccuacgugguccagcugccccucuacggcgugaucgacacgcccugcuggaagcugcacaccagcccccugugcaccaccaacacgaaggaggggagcaacaucugccucacccgcaccgaccggggcugguacugcgacaacgcgggcuccgugagcuucuucccgcaggccgagaccugcaaggucugcuccaaccgcguguucugcgacacgaugaacagccugacccugcccuccgaggucaaccucugcaacguggacaucuucaaccccaaguacgacugcaagaucaugaccagcaagaccgacguguccagcuccgucaucacgagccugggggccaucguguccugcuacggcaagaccaagugcaccgccagcaacaagaacaaggggaucaucaagaccuucuccaacggcugcgacuacgugagcaacaagggcgucgacacgguguccguggggaacacccuguacuacgucaacaagcaggagggccagagccucuacgugaagggggagcccaucaucaacuucuacgacccgcugguguuccccagcgacgaguucgacgccuccaucagccaggucaacgagaagaucaaccagucccuggcguucauccggaaguccgacgagcuccugcacaacgugaacgccggcaaguccaccaccaacaucaugaucaccacgaucaucaucgugaucaucgucauccugcucagccugaucgccguggggcugcuccuguacugcaaggcccgcugaggacuaguggaagcauuuuccuggcugauuaaaagaaauuacucagcuauggucaucuguuccuguuagaaggcuaugcagcauauuauauacuaugcgcauguuaugaaaugcauaauaaaaaauuuuaaaaaaucuaaaagaucuaaaaaaaaaaaaaaaaaaaaaaaaaaaaaaaaaaaaaaaaaaaaaaaaaaaaaaaaaaaaaaaaugcaucccccccccccccccccccccccccccccccaaaggcucuuuucagagccaccagaauu

SEQ ID NO: 6588 - RNA, 1897 nt, Artificial Sequence
  mRNA product Design d-4 comprising derived and/or modified sequence from HRSV(A2)__F-del_DSCav1_mut6 (opt2)
gggagagucccgcagucggcguccagcggcucugcuuguucgugugugugucguugcaggccuuauucaagcuuaccauggagcuccucauccucaaggccaacgccaucaccaccauccucaccgccgucaccuucugcuucgccuccggccagaacaucaccgaggaguucuaccaguccaccugcuccgccgucuccaagggcuaccucggcgcccuccgcaccggcugguacaccuccgucaucaccaucgagcucuccaacaucaaggagaacaagugcaacggcaccgacgccaaggucaagcucaucaagcaggagcucgacaaguacaagaacgccgucaccgaccuccagaugcucaugugcuccacccccgccaccggcuccggcuccgccaucgccuccggcgucgccgucugcaagguccuccaccucgagggcgaggucaacaagaucaaguccgcccuccucuccaccaacaaggccgucgucucccucuccaacggcgucuccguccucaccuucaagguccucgaccucaagaacuacaucgacaagcagcuccuccccauccucaacaagcaguccugcuccauccccaaccccgagaccgucauggaguuccagcagaagaacaaccgccuccucgagaucacccgcgaguucuccgucaacgccggcgucaccacccccgucuccaccuacaugcucaccaacuccgagcuccucucccucaucaacgacaugcccaucaccaacgaccagaagaagcucauguccaacaacguccagaucguccgccagcaguccuacuccaucaugugcaucaucaaggaggagguccucgccuacgucguccagcucccccucuacggcgucaucgacacccccugcuggaagcuccacaccuccccccucugcaccaccaacaccaaggagggcuccaacaucugccucacccgcaccgaccgcggcugguacugcgacaacgccggcuccgucuccuucuucccccaggccgagaccugcaaggucugcuccaaccgcgucuucugcgacaccaugaacucccucacccuccccuccgaggucaaccucugcaacgucgacaucuucaaccccaaguacgacugcaagaucaugaccuccaagaccgacgucuccuccuccgucaucaccucccucggcgccaucgucuccugcuacggcaagaccaagugcaccgccuccaacaagaacaagggcaucaucaagaccuucuccaacggcugcgacuacgucuccaacaagggcgucgacaccgucuccgucggcaacacccucuacuacgucaacaagcaggagggccagucccucuacgucaagggcgagcccaucaucaacuucuacgacccccucgucuuccccuccgacgaguucgacgccuccaucucccaggucaacgagaagaucaaccagucccucgccuucauccgcaaguccgacgagcuccuccacaacgucaacgccggcaaguccaccaccaacaucaugaucaccaccaucaucaucgucaucaucgucauccuccucucccucaucgccgucggccuccuccucuacugcaaggcccgcugaggacuaguggaagcauuuuccuggcugauuaaaagaaauuacucagcuauggucaucuguuccuguuagaaggcuaugcagcauauuauauacuaugcgcauguuaugaaaugcauaauaaaaaauuuuaaaaaaucuaaaagaucuaaaaaaaaaaaaaaaaaaaaaaaaaaaaaaaaaaaaaaaaaaaaaaaaaaaaaaaaaaaaaaaaugcaucccccccccccccccccccccccccccccccaaaggcucuuuucagagccaccagaauu

SEQ ID NO: 6589 - RNA, 1897 nt, Artificial Sequence
  mRNA product Design d-4 comprising derived and/or modified sequence from HRSV(A2)__F-del_DSCav1_mut6 (opt3)
gggagagucccgcagucggcguccagcggcucugcuuguucgugugugugucguugcaggccuuauucaagcuuaccauggagcugcucauccuuaaggccaacgcuauuaccacaauacugacugcagugacguucugcuuugccagcggccagaauaucaccgaagaguucuaccaauccacauguucugcggucucaaaaggguauuugggagcuuuaagaacugguugguacaccaguguuauuacaaucgaacugagcaacauuaaggagaauaaaugcaacggcaccgacgccaaggugaaacuaaucaagcaggaacucgauaaguauaaaaaugcaguaacugaccugcagaugcuuauguguuccacacccgccaccgggucuggaucggcuauagcaucaggcguggccgucugcaaggugcugcacuuggagggugagguuaacaaaaucaagagcgcucuccugaguacgaauaaagccguggucucccugucuaacggggugagcguacucacuuuuaagguuuuagaucugaagaauuacauugacaaacagcuuuugccuauccugaacaagcaauccuguucaauuccaaauccggaaaccgugauggaguuccagcagaaaaacaauaggcuacucgaaaucacacgggaguuuagugucaacgcgggagugacuacccccgugagcacauauaugcugaccaauucugagcuucuguccuugauaaacgauaugccuauuacgaacgaccagaagaaacucaugucaaauaacguccaaaucguucgccagcagagcuacaguauuaugugcaucaucaaggaagaggugcuggcauauguagugcaguuaccacuguacggcgucauugauacucccuguuggaaacuccauacaucuccucuuugcaccacuaauacaaaggaaggcuccaacauaugucugacccgaacggaccgugggugguacugcgauaaugccggaagcgugucguucuuuccacaagcugagaccuguaagguuugcucuaacagaguguucugcgacacaaugaacuccuugacucuacccucagaagucaaucuguguaauguggauaucuuuaacccuaaauaugacugcaagauuaugaccaguaaaacagauguaagcuccucuguuaucacuagccucggugccauagugucauguuacggcaagaccaaaugcacagcaaguaauaagaacaaggggauuaucaaaaccuucuccaauggaugugacuaugucagcaacaagggcguggacacugucucuguggguaauacgcuguacuauguuaacaaacaggaggggcagucacuuuacgugaagggagagccaaucauuaacuuuuaugauccgcugguauuccccagugacgaauuugaugcuagcaucucccaagucaaugagaaaauuaaccagucuuuggccuucauaaggaagucggacgaacuccugcacaaugugaacgcgggcaagagcacaaccaauaucaugauuacuaccaucaucauuguuauaaucgugauuuuacugucccuaaucgccgucggccuccugcuuuacugcaaagcacggugaggacuaguggaagcauuuuccuggcugauuaaaagaaauuacucagcuauggucaucuguuccuguuagaaggcuaugcagcauauuauauacuaugcgcauguuaugaaaugcauaauaaaaaauuuuaaaaaaucuaaaagaucuaaaaaaaaaaaaaaaaaaaaaaaaaaaaaaaaaaaaaaaaaaaaaaaaaaaaaaaaaaaaaaaaugcaucccccccccccccccccccccccccccccccaaaggcucuuuucagagccaccagaauu

SEQ ID NO: 6590 - RNA, 1897 nt, Artificial Sequence
  mRNA product Design d-4 comprising derived and/or modified sequence from HRSV(A2)__F-del_DSCav1_mut6 (opt4)
gggagagucccgcagucggcguccagcggcucugcuuguucgugugugugucguugcaggccuuauucaagcuuaccauggagcugcugauccugaaggccaacgccaucaccaccauccugaccgccgugaccuucugcuucgccagcggccagaacaucaccgaggaguucuaccagagcaccugcagcgccgugagcaagggcuaccugggcgcccugagaaccggcugguacaccagcgugaucaccaucgagcugagcaacaucaaggagaacaagugcaacggcaccgacgccaaggugaagcugaucaagcaggagcuggacaaguacaagaacgccgugaccgaccugcagaugcugaugugcagcacccccgccaccggcagcggcagcgccaucgccagcggcguggccgugugcaaggugcugcaccuggagggcgaggugaacaagaucaagagcgcccugcugagcaccaacaaggccguggugagccugagcaacggcgugagcgugcugaccuucaaggugcuggaccugaagaacuacaucgacaagcagcugcugcccauccugaacaagcagagcugcagcauccccaaccccgagaccgugauggaguuccagcagaagaacaacagacugcuggagaucaccagagaguucagcgugaacgccggcgugaccacccccgugagcaccuacaugcugaccaacagcgagcugcugagccugaucaacgacaugcccaucaccaacgaccagaagaagcugaugagcaacaacgugcagaucgugagacagcagagcuacagcaucaugugcaucaucaaggaggaggugcuggccuacguggugcagcugccccuguacggcgugaucgacacccccugcuggaagcugcacaccagcccccugugcaccaccaacaccaaggagggcagcaacaucugccugaccagaaccgacagaggcugguacugcgacaacgccggcagcgugagcuucuucccccaggccgagaccugcaaggugugcagcaacagaguguucugcgacaccaugaacagccugacccugcccagcgaggugaaccugugcaacguggacaucuucaaccccaaguacgacugcaagaucaugaccagcaagaccgacgugagcagcagcgugaucaccagccugggcgccaucgugagcugcuacggcaagaccaagugcaccgccagcaacaagaacaagggcaucaucaagaccuucagcaacggcugcgacuacgugagcaacaagggcguggacaccgugagcgugggcaacacccuguacuacgugaacaagcaggagggccagagccuguacgugaagggcgagcccaucaucaacuucuacgacccccugguguuccccagcgacgaguucgacgccagcaucagccaggugaacgagaagaucaaccagagccuggccuucaucagaaagagcgacgagcugcugcacaacgugaacgccggcaagagcaccaccaacaucaugaucaccaccaucaucaucgugaucaucgugauccugcugagccugaucgccgugggccugcugcuguacugcaaggccagaugaggacuaguggaagcauuuuccuggcugauuaaaagaaauuacucagcuauggucaucuguuccuguuagaaggcuaugcagcauauuauauacuaugcgcauguuaugaaaugcauaauaaaaaauuuuaaaaaaucuaaaagaucuaaaaaaaaaaaaaaaaaaaaaaaaaaaaaaaaaaaaaaaaaaaaaaaaaaaaaaaaaaaaaaaaugcaucccccccccccccccccccccccccccccccaaaggcucuuuucagagccaccagaauu

SEQ ID NO: 6591 - RNA, 1897 nt, Artificial Sequence
  mRNA product Design d-4 comprising derived and/or modified sequence from HRSV(A2)__F-del_DSCav1_mut6 (opt5)
gggagagucccgcagucggcguccagcggcucugcuuguucgugugugugucguugcaggccuuauucaagcuuaccauggagcugcucauccugaaggccaacgcuauuaccacaauccuuacggccgugaccuucugcuuugcgagcggccagaauauuacagaagaguucuaccaauccaccuguucugcugucagcaaaggguaucugggagcccucagaacaggcugguacaccuccguuaucacaauugaacugucuaacaucaaggagaauaaaugcaacgggaccgacgccaaggugaaacuuaucaagcaggaacuggauaaguauaaaaaugcugugacggaccuccagaugcugauguguagcacccccgccacaggauccggcucugcuauugccagcggggucgcggugugcaagguucugcaccucgagggagaggugaacaaaaucaaguccgcccugcuuagcaccaauaaagcugucgugucucuguccaacggcguuagcgugcucacauuuaagguccuggaucuuaagaauuacauugacaaacagcugcucccuauccugaacaagcaaucuuguuccauuccgaaucccgaaaccgugauggaguuccagcagaaaaacaaucggcugcucgaaaucacgcgcgaguuuagcgugaacgccggcgucacaaccccuguuucuacauauaugcugaccaauuccgagcuucugagccucauuaacgauaugcccaucaccaacgaccagaagaaacugauguccaauaacgugcaaaucgugagacagcagucuuacagcauuaugugcaucauuaaggaagagguccuugcuuaugugguucagcugccucucuacggggugaucgauacacccuguuggaaacugcauacguccccucugugcaccacaaauaccaaggaaggaagcaacauuugucucacacggaccgaccgcggcugguacugcgauaaugccgggucugucuccuucuuuccgcaagcggagacguguaaggugugcagcaacagaguuuucugcgacacaaugaacucucugacccuucccagcgaagugaaucuguguaaugucgauaucuuuaacccuaaauaugacugcaagaucaugaccuccaaaacagaugugucuagcuccgucauuaccagccucggagccaucgugucuuguuacggcaagacaaaaugcacggcuuccaauaagaacaaggggauuaucaaaaccuucagcaauggaugugacuauguuucuaacaagggcguggacacagucuccgugggcaauacccuguacuauguuaacaaacaggaggggcagagccuuuacgugaagggagagcccauuaucaacuuuuaugauccucuggucuuccccuccgacgaauuugaugccucuaucagccaagugaaugagaaaauuaaccagucccucgcuuucauccggaagucugacgaacugcugcacaaugugaacgccggcaagagcacaaccaauauuaugaucacgaccauuaucauuguuaucaucgucauucuccugucccuuaucgccguggggcugcuccuguacugcaaagcucgcugaggacuaguggaagcauuuuccuggcugauuaaaagaaauuacucagcuauggucaucuguuccuguuagaaggcuaugcagcauauuauauacuaugcgcauguuaugaaaugcauaauaaaaaauuuuaaaaaaucuaaaagaucuaaaaaaaaaaaaaaaaaaaaaaaaaaaaaaaaaaaaaaaaaaaaaaaaaaaaaaaaaaaaaaaaugcaucccccccccccccccccccccccccccccccaaaggcucuuuucagagccaccagaauu

SEQ ID NO: 6592 - RNA, 1897 nt, Artificial Sequence
  mRNA product Design d-4 comprising derived and/or modified sequence from HRSV(A2)__F-del_DSCav1_mut6 (opt6)
gggagagucccgcagucggcguccagcggcucugcuuguucgugugugugucguugcaggccuuauucaagcuuaccauggaacuacucauauuaaaagcaaacgcaauaacaacgauauuaacagcuguaacauucugcuuugcaucaggccaaaauaucaccgaagaauuuuaucaaagcacaugcucugcaguauccaaaggauacuuaggagcauuaagaacaggcugguacacauccguaauaacaauagaacuaucaaacaucaaagaaaacaaaugcaacggcacagacgccaaaguaaaacucauaaaacaagaacuagacaaauauaaaaacgcaguaacagaucuacaaaugcucaugugcuccacaccagcaaccggaucugguucagccauagcauccggcguagccgucugcaaaguauuacaccucgaaggagaaguaaacaaaauaaaaucugcccuauuaucuacaaauaaagccguaguaagucuaaguaacggaguaucaguacuaacauuuaaaguccuagaccugaaaaacuauaucgacaaacaacuauuaccaauacuaaacaaacaauccuguuccaucccuaacccagaaacaguuauggaauuucaacaaaaaaauaaccgccuuuuagaaauaacuagagaauuuucaguaaacgcaggaguuacaacaccaguaucaacauacaugcuaacaaauucagaauuauuaucccuuauaaaugacaugccuaucacaaacgaucaaaaaaaauuaauguccaacaacguacaaauaguaagacaacaaucauauuccaucaugugcaucauaaaagaagaaguccucgcauacguagugcaacuaccacuauacggagucauagauacacccuguuggaaacuucacacaucuccacuaugcacaacaaacacgaaagaaggauccaacauaugccuaacacgaacagacagaggaugguauugcgacaacgcuggaagugugagcuucuucccucaagcagaaacuugcaaaguaugcagcaaucguguauucugcgacacaaugaacucauuaacacucccaagcgaaguaaaccucugcaauguagacaucuuuaauccaaaauacgauuguaaaauaaugacuucaaaaacagacgucucaucaucuguaauaacaucuuuaggagcaauaguuucuugcuacgguaaaacaaaaugcaccgcauccaacaaaaacaaaggaauaauaaaaacauucucuaacggcugcgauuacguaucuaacaaaggaguugacacagucucaguaggaaacacacuauacuacguaaacaaacaagaaggacaaagccuauacguaaaaggagaaccaauaauaaacuucuaugacccauuaguauuuccaagcgaugaauuugacgcuucaauaucacaagucaaugaaaaaauaaaucagagcuuagcauucauaagaaaaucugaugaacuacuacacaauguaaaugcaggaaaauccacuaccaacauaaugauuaccacaauuauaauaguuaucauaguaauacuauuaucacuaauagccguuggauuacuacuauacugcaaagcaagauaaggacuaguggaagcauuuuccuggcugauuaaaagaaauuacucagcuauggucaucuguuccuguuagaaggcuaugcagcauauuauauacuaugcgcauguuaugaaaugcauaauaaaaaauuuuaaaaaaucuaaaagaucuaaaaaaaaaaaaaaaaaaaaaaaaaaaaaaaaaaaaaaaaaaaaaaaaaaaaaaaaaaaaaaaaugcaucccccccccccccccccccccccccccccccaaaggcucuuuucagagccaccagaauu

SEQ ID NO: 6593 - RNA, 1897 nt, Artificial Sequence
  mRNA product Design d-4 comprising derived and/or modified sequence from HRSV(A2)__F-del_DSCav1_mut6 (opt11)
gggagagucccgcagucggcguccagcggcucugcuuguucgugugugugucguugcaggccuuauucaagcuuaccauggaacuacucauccuaaaagcaaacgccaucaccaccauacuaaccgccgucaccuucugcuucgccucgggacaaaacaucaccgaagaguucuaccagucaacgugcuccgccgucucaaaaggcuaccuaggcgcccuccgcaccgggugguauaccuccgucauaacuaucgaacucucuaacaucaaagaaaacaaauguaacggcaccgacgccaaagucaaacuaaucaaacaagaacuggacaaauacaaaaacgccgucaccgaccuacaaaugcucaugugcuccacuccagccaccggcuccgguagcgcaaucgccucaggcguagcuguaugcaaaguccuccaccuagaaggcgaaguaaacaaaauaaaauccgcccuccucucaaccaacaaggccgucgucucacucucaaacggcgucuccguacucaccuuuaaaguccuagaccuuaaaaacuacaucgacaaacaacugcuaccaauccucaacaaacaaucaugcagcaucccaaacccggaaacagucauggaguuccaacagaaaaacaaccgacuccucgaaaucacccgcgaguucuccgucaacgccggagucaccacaccuguaagcacauacaugcuuacuaauuccgaacuccuuucacuaauaaacgacaugccaauaaccaacgaccaaaagaaacucauguccaacaacguacaaaucguacgccaacaauccuacuccaucaugugcaucaucaaagaagaaguccuggccuaugucguacaacucccccuuuacggugucaucgacacacccugcuggaaacuacacaccagcccccucugcacaacaaacaccaaagaaggcuccaacaucugccucacccguaccgaccgaggcugguacugcgacaacgccggcuccgucuccuucuucccccaagccgaaaccugcaaagucugcagcaaccgcgucuucugcgauaccaugaacucccucacacucccaucugaagucaaccucugcaacgucgauauuuucaauccaaaauacgacugcaaaaucaugacuagcaaaaccgacguuagcuccuccgucaucaccucccucggcgccauaguuucaugcuacggcaaaaccaaaugcaccgccuccaacaaaaacaaaggcaucauaaaaaccuucuccaacgggugcgacuacguaucuaauaaaggagucgacaccgucucaguaggaaacacccucuacuaugucaacaaacaagaaggccaaucacuauacguuaaaggcgaaccaaucaucaacuucuacgacccacucgucuuccccagcgacgaguuugacgccucaaucucgcaagucaaugaaaagauuaaccaaucccuagccuucauccgaaaaagugacgaacuccuccacaacguuaacgccggcaaaucuacaaccaacaucaugaucaccacuauaaucaucgucaucauagucauacuucucagccucaucgcagucggacuccuccuuuauugcaaggcacgauaaggacuaguggaagcauuuuccuggcugauuaaaagaaauuacucagcuauggucaucuguuccuguuagaaggcuaugcagcauauuauauacuaugcgcauguuaugaaaugcauaauaaaaaauuuuaaaaaaucuaaaagaucuaaaaaaaaaaaaaaaaaaaaaaaaaaaaaaaaaaaaaaaaaaaaaaaaaaaaaaaaaaaaaaaaugcaucccccccccccccccccccccccccccccccaaaggcucuuuucagagccaccagaauu

SEQ ID NO: 6594 - RNA, 1994 nt, Artificial Sequence
  mRNA product Design d-5 comprising derived and/or modified sequence from HRSV(A2)__F-del_DSCav1_mut6 (opt1)
gggagagggcgcuuggcuugcaaggacccugagcugcggcauugaagcacacccaacccaacucgacugaagucagccucacugaaccggaucugagaaucuucucucucugggcuugccagggcucuccgaaccuagcuagcauccucuucaauuccaacuagaaagcuuaccauggagcugcucauccugaaggccaacgccaucaccaccauccugacggcggugaccuucugcuucgccagcggccagaacaucaccgaggaguucuaccaguccacgugcagcgccgucuccaagggguaccucggcgcccugcggaccggcugguacaccuccgugaucaccaucgagcugagcaacaucaaggagaacaagugcaacgggaccgacgccaaggugaagcucaucaagcaggagcuggacaaguacaagaacgcggucacggaccugcagaugcugaugugcuccaccccggcaaccggcuccggcuccgccaucgcgagcggcgucgccgugugcaaggugcugcaccucgagggggaggucaacaagaucaagagcgcccugcuguccaccaacaaggccguggugagccucuccaacggcgucagcgugcugaccuucaaggugcuggaccucaagaacuacaucgacaagcagcugcugcccauccugaacaagcagagcugcuccauccccaaccccgagacggugauggaguuccagcagaagaacaaccggcuccuggagaucacccgcgaguucagcgugaacgccggggucaccacccccguguccacguacaugcugaccaacagcgagcuccugucccugaucaacgacaugccgaucaccaacgaccagaagaagcucaugagcaacaacgugcagaucguccggcagcaguccuacagcaucaugugcaucaucaaggaggaggugcuggcguacgugguccagcugccccucuacggcgugaucgacacccccugcuggaagcugcacacgagcccccugugcaccaccaacaccaaggagggguccaacaucugccucacgcgcaccgaccggggcugguacugcgacaacgccggcagcgucuccuucuucccgcaggccgagaccugcaaggugugcagcaaccgcguguucugcgacaccaugaacucccugacgcugcccagcgagguaaaccucugcaacgucgacaucuucaaccccaaguacgacugcaagaucaugaccuccaagaccgacgugagcuccagcgugaucaccucccugggggccaucgucagcugcuacggcaagacgaagugcaccgccagcaacaagaacaaggggaucaucaagaccuucuccaacggcugcgacuacgugagcaacaagggcguggacaccguguccgucgggaacacccuguacuacgugaacaagcaggagggccagagccucuacgugaagggggagcccaucaucaacuucuacgacccgcuggucuuccccuccgacgaguucgacgcgagcaucucccaggugaacgagaagaucaaccagagccuggccuucauccgcaaguccgacgagcugcuccacaacgugaacgccggcaagagcacgaccaacaucaugaucaccaccaucaucaucgucaucaucgugauccugcugucccucaucgccguggggcugcugcucuacugcaaggcccggugaggacuaguggaagcauuuuccuggcugauuaaaagaaauuacucagcuauggucaucuguuccuguuagaaggcuaugcagcauauuauauacuaugcgcauguuaugaaaugcauaauaaaaaauuuuaaaaaaucuaaaagaucuaaaaaaaaaaaaaaaaaaaaaaaaaaaaaaaaaaaaaaaaaaaaaaaaaaaaaaaaaaaaaaaaugcaucccccccccccccccccccccccccccccccaaaggcucuuuucagagccaccagaauu

SEQ ID NO: 6595 - RNA, 1994 nt, Artificial Sequence
  mRNA product Design d-5 comprising derived and/or modified sequence from HRSV(A2)__F-del_DSCav1_mut6 (opt1)
gggagagggcgcuuggcuugcaaggacccugagcugcggcauugaagcacacccaacccaacucgacugaagucagccucacugaaccggaucugagaaucuucucucucugggcuugccagggcucuccgaaccuagcuagcauccucuucaauuccaacuagaaagcuuaccauggagcugcucauccugaaggccaacgccaucaccaccauccugacggcggugaccuucugcuucgccagcggccagaacaucaccgaggaguucuaccaguccacgugcagcgccgucuccaagggguaccucggcgcccugcgcaccgggugguacaccagcgugaucaccaucgagcuguccaacaucaaggagaacaagugcaacggcaccgacgccaaggugaagcucaucaagcaggagcuggacaaguacaagaacgcggucacggaccugcagaugcucaugugcagcacccccgccaccggguccggcagcgccaucgccuccggcguggcggugugcaagguccugcaccuggagggggaggugaacaagaucaagagcgcccuccuguccaccaacaaggccguggucagccuguccaacggcgugagcgugcucacguucaagguccuggaccugaagaacuacaucgacaagcagcuccugccgauccugaacaagcaguccugcagcauccccaaccccgagaccgugauggaguuccagcagaagaacaaccggcuccuggagaucacccgcgaguucuccgugaacgccggggucaccacgcccgugagcaccuacaugcugaccaacuccgagcuccugagccugaucaacgacaugccgaucaccaacgaccagaagaagcucaugagcaacaacgugcagaucguccggcagcaguccuacagcaucaugugcaucaucaaggaggaggugcuggccuacgugguccagcugccccucuacggcgugaucgacacgcccugcuggaagcugcacaccagcccccugugcaccaccaacacgaaggaggggagcaacaucugccucacccgcaccgaccggggcugguacugcgacaacgcgggcuccgugagcuucuucccgcaggccgagaccugcaaggucugcuccaaccgcguguucugcgacacgaugaacagccugacccugcccuccgaggucaaccucugcaacguggacaucuucaaccccaaguacgacugcaagaucaugaccagcaagaccgacguguccagcuccgucaucacgagccugggggccaucguguccugcuacggcaagaccaagugcaccgccagcaacaagaacaaggggaucaucaagaccuucuccaacggcugcgacuacgugagcaacaagggcgucgacacgguguccguggggaacacccuguacuacgucaacaagcaggagggccagagccucuacgugaagggggagcccaucaucaacuucuacgacccgcugguguuccccagcgacgaguucgacgccuccaucagccaggucaacgagaagaucaaccagucccuggcguucauccggaaguccgacgagcuccugcacaacgugaacgccggcaaguccaccaccaacaucaugaucaccacgaucaucaucgugaucaucgucauccugcucagccugaucgccguggggcugcuccuguacugcaaggcccgcugaggacuaguggaagcauuuuccuggcugauuaaaagaaauuacucagcuauggucaucuguuccuguuagaaggcuaugcagcauauuauauacuaugcgcauguuaugaaaugcauaauaaaaaauuuuaaaaaaucuaaaagaucuaaaaaaaaaaaaaaaaaaaaaaaaaaaaaaaaaaaaaaaaaaaaaaaaaaaaaaaaaaaaaaaaugcaucccccccccccccccccccccccccccccccaaaggcucuuuucagagccaccagaauu

SEQ ID NO: 6596 - RNA, 1994 nt, Artificial Sequence
  mRNA product Design d-5 comprising derived and/or modified sequence from HRSV(A2)__F-del_DSCav1_mut6 (opt2)
gggagagggcgcuuggcuugcaaggacccugagcugcggcauugaagcacacccaacccaacucgacugaagucagccucacugaaccggaucugagaaucuucucucucugggcuugccagggcucuccgaaccuagcuagcauccucuucaauuccaacuagaaagcuuaccauggagcuccucauccucaaggccaacgccaucaccaccauccucaccgccgucaccuucugcuucgccuccggccagaacaucaccgaggaguucuaccaguccaccugcuccgccgucuccaagggcuaccucggcgcccuccgcaccggcugguacaccuccgucaucaccaucgagcucuccaacaucaaggagaacaagugcaacggcaccgacgccaaggucaagcucaucaagcaggagcucgacaaguacaagaacgccgucaccgaccuccagaugcucaugugcuccacccccgccaccggcuccggcuccgccaucgccuccggcgucgccgucugcaagguccuccaccucgagggcgaggucaacaagaucaaguccgcccuccucuccaccaacaaggccgucgucucccucuccaacggcgucuccguccucaccuucaagguccucgaccucaagaacuacaucgacaagcagcuccuccccauccucaacaagcaguccugcuccauccccaaccccgagaccgucauggaguuccagcagaagaacaaccgccuccucgagaucacccgcgaguucuccgucaacgccggcgucaccacccccgucuccaccuacaugcucaccaacuccgagcuccucucccucaucaacgacaugcccaucaccaacgaccagaagaagcucauguccaacaacguccagaucguccgccagcaguccuacuccaucaugugcaucaucaaggaggagguccucgccuacgucguccagcucccccucuacggcgucaucgacacccccugcuggaagcuccacaccuccccccucugcaccaccaacaccaaggagggcuccaacaucugccucacccgcaccgaccgcggcugguacugcgacaacgccggcuccgucuccuucuucccccaggccgagaccugcaaggucugcuccaaccgcgucuucugcgacaccaugaacucccucacccuccccuccgaggucaaccucugcaacgucgacaucuucaaccccaaguacgacugcaagaucaugaccuccaagaccgacgucuccuccuccgucaucaccucccucggcgccaucgucuccugcuacggcaagaccaagugcaccgccuccaacaagaacaagggcaucaucaagaccuucuccaacggcugcgacuacgucuccaacaagggcgucgacaccgucuccgucggcaacacccucuacuacgucaacaagcaggagggccagucccucuacgucaagggcgagcccaucaucaacuucuacgacccccucgucuuccccuccgacgaguucgacgccuccaucucccaggucaacgagaagaucaaccagucccucgccuucauccgcaaguccgacgagcuccuccacaacgucaacgccggcaaguccaccaccaacaucaugaucaccaccaucaucaucgucaucaucgucauccuccucucccucaucgccgucggccuccuccucuacugcaaggcccgcugaggacuaguggaagcauuuuccuggcugauuaaaagaaauuacucagcuauggucaucuguuccuguuagaaggcuaugcagcauauuauauacuaugcgcauguuaugaaaugcauaauaaaaaauuuuaaaaaaucuaaaagaucuaaaaaaaaaaaaaaaaaaaaaaaaaaaaaaaaaaaaaaaaaaaaaaaaaaaaaaaaaaaaaaaaugcaucccccccccccccccccccccccccccccccaaaggcucuuuucagagccaccagaauu

SEQ ID NO: 6597 - RNA, 1994 nt, Artificial Sequence
  mRNA product Design d-5 comprising derived and/or modified sequence from HRSV(A2)__F-del_DSCav1_mut6 (opt3)
gggagagggcgcuuggcuugcaaggacccugagcugcggcauugaagcacacccaacccaacucgacugaagucagccucacugaaccggaucugagaaucuucucucucugggcuugccagggcucuccgaaccuagcuagcauccucuucaauuccaacuagaaagcuuaccauggagcugcucauccuuaaggccaacgcuauuaccacaauacugacugcagugacguucugcuuugccagcggccagaauaucaccgaagaguucuaccaauccacauguucugcggucucaaaaggguauuugggagcuuuaagaacugguugguacaccaguguuauuacaaucgaacugagcaacauuaaggagaauaaaugcaacggcaccgacgccaaggugaaacuaaucaagcaggaacucgauaaguauaaaaaugcaguaacugaccugcagaugcuuauguguuccacacccgccaccgggucuggaucggcuauagcaucaggcguggccgucugcaaggugcugcacuuggagggugagguuaacaaaaucaagagcgcucuccugaguacgaauaaagccguggucucccugucuaacggggugagcguacucacuuuuaagguuuuagaucugaagaauuacauugacaaacagcuuuugccuauccugaacaagcaauccuguucaauuccaaauccggaaaccgugauggaguuccagcagaaaaacaauaggcuacucgaaaucacacgggaguuuagugucaacgcgggagugacuacccccgugagcacauauaugcugaccaauucugagcuucuguccuugauaaacgauaugccuauuacgaacgaccagaagaaacucaugucaaauaacguccaaaucguucgccagcagagcuacaguauuaugugcaucaucaaggaagaggugcuggcauauguagugcaguuaccacuguacggcgucauugauacucccuguuggaaacuccauacaucuccucuuugcaccacuaauacaaaggaaggcuccaacauaugucugacccgaacggaccgugggugguacugcgauaaugccggaagcgugucguucuuuccacaagcugagaccuguaagguuugcucuaacagaguguucugcgacacaaugaacuccuugacucuacccucagaagucaaucuguguaauguggauaucuuuaacccuaaauaugacugcaagauuaugaccaguaaaacagauguaagcuccucuguuaucacuagccucggugccauagugucauguuacggcaagaccaaaugcacagcaaguaauaagaacaaggggauuaucaaaaccuucuccaauggaugugacuaugucagcaacaagggcguggacacugucucuguggguaauacgcuguacuauguuaacaaacaggaggggcagucacuuuacgugaagggagagccaaucauuaacuuuuaugauccgcugguauuccccagugacgaauuugaugcuagcaucucccaagucaaugagaaaauuaaccagucuuuggccuucauaaggaagucggacgaacuccugcacaaugugaacgcgggcaagagcacaaccaauaucaugauuacuaccaucaucauuguuauaaucgugauuuuacugucccuaaucgccgucggccuccugcuuuacugcaaagcacggugaggacuaguggaagcauuuuccuggcugauuaaaagaaauuacucagcuauggucaucuguuccuguuagaaggcuaugcagcauauuauauacuaugcgcauguuaugaaaugcauaauaaaaaauuuuaaaaaaucuaaaagaucuaaaaaaaaaaaaaaaaaaaaaaaaaaaaaaaaaaaaaaaaaaaaaaaaaaaaaaaaaaaaaaaaugcaucccccccccccccccccccccccccccccccaaaggcucuuuucagagccaccagaauu

SEQ ID NO: 6598 - RNA, 1994 nt, Artificial Sequence
  mRNA product Design d-5 comprising derived and/or modified sequence from HRSV(A2)__F-del_DSCav1_mut6 (opt4)
gggagagggcgcuuggcuugcaaggacccugagcugcggcauugaagcacacccaacccaacucgacugaagucagccucacugaaccggaucugagaaucuucucucucugggcuugccagggcucuccgaaccuagcuagcauccucuucaauuccaacuagaaagcuuaccauggagcugcugauccugaaggccaacgccaucaccaccauccugaccgccgugaccuucugcuucgccagcggccagaacaucaccgaggaguucuaccagagcaccugcagcgccgugagcaagggcuaccugggcgcccugagaaccggcugguacaccagcgugaucaccaucgagcugagcaacaucaaggagaacaagugcaacggcaccgacgccaaggugaagcugaucaagcaggagcuggacaaguacaagaacgccgugaccgaccugcagaugcugaugugcagcacccccgccaccggcagcggcagcgccaucgccagcggcguggccgugugcaaggugcugcaccuggagggcgaggugaacaagaucaagagcgcccugcugagcaccaacaaggccguggugagccugagcaacggcgugagcgugcugaccuucaaggugcuggaccugaagaacuacaucgacaagcagcugcugcccauccugaacaagcagagcugcagcauccccaaccccgagaccgugauggaguuccagcagaagaacaacagacugcuggagaucaccagagaguucagcgugaacgccggcgugaccacccccgugagcaccuacaugcugaccaacagcgagcugcugagccugaucaacgacaugcccaucaccaacgaccagaagaagcugaugagcaacaacgugcagaucgugagacagcagagcuacagcaucaugugcaucaucaaggaggaggugcuggccuacguggugcagcugccccuguacggcgugaucgacacccccugcuggaagcugcacaccagcccccugugcaccaccaacaccaaggagggcagcaacaucugccugaccagaaccgacagaggcugguacugcgacaacgccggcagcgugagcuucuucccccaggccgagaccugcaaggugugcagcaacagaguguucugcgacaccaugaacagccugacccugcccagcgaggugaaccugugcaacguggacaucuucaaccccaaguacgacugcaagaucaugaccagcaagaccgacgugagcagcagcgugaucaccagccugggcgccaucgugagcugcuacggcaagaccaagugcaccgccagcaacaagaacaagggcaucaucaagaccuucagcaacggcugcgacuacgugagcaacaagggcguggacaccgugagcgugggcaacacccuguacuacgugaacaagcaggagggccagagccuguacgugaagggcgagcccaucaucaacuucuacgacccccugguguuccccagcgacgaguucgacgccagcaucagccaggugaacgagaagaucaaccagagccuggccuucaucagaaagagcgacgagcugcugcacaacgugaacgccggcaagagcaccaccaacaucaugaucaccaccaucaucaucgugaucaucgugauccugcugagccugaucgccgugggccugcugcuguacugcaaggccagaugaggacuaguggaagcauuuuccuggcugauuaaaagaaauuacucagcuauggucaucuguuccuguuagaaggcuaugcagcauauuauauacuaugcgcauguuaugaaaugcauaauaaaaaauuuuaaaaaaucuaaaagaucuaaaaaaaaaaaaaaaaaaaaaaaaaaaaaaaaaaaaaaaaaaaaaaaaaaaaaaaaaaaaaaaaugcaucccccccccccccccccccccccccccccccaaaggcucuuuucagagccaccagaauu

SEQ ID NO: 6599 - RNA, 1994 nt, Artificial Sequence
  mRNA product Design d-5 comprising derived and/or modified sequence from HRSV(A2)__F-del_DSCav1_mut6 (opt5)
gggagagggcgcuuggcuugcaaggacccugagcugcggcauugaagcacacccaacccaacucgacugaagucagccucacugaaccggaucugagaaucuucucucucugggcuugccagggcucuccgaaccuagcuagcauccucuucaauuccaacuagaaagcuuaccauggagcugcucauccugaaggccaacgcuauuaccacaauccuuacggccgugaccuucugcuuugcgagcggccagaauauuacagaagaguucuaccaauccaccuguucugcugucagcaaaggguaucugggagcccucagaacaggcugguacaccuccguuaucacaauugaacugucuaacaucaaggagaauaaaugcaacgggaccgacgccaaggugaaacuuaucaagcaggaacuggauaaguauaaaaaugcugugacggaccuccagaugcugauguguagcacccccgccacaggauccggcucugcuauugccagcggggucgcggugugcaagguucugcaccucgagggagaggugaacaaaaucaaguccgcccugcuuagcaccaauaaagcugucgugucucuguccaacggcguuagcgugcucacauuuaagguccuggaucuuaagaauuacauugacaaacagcugcucccuauccugaacaagcaaucuuguuccauuccgaaucccgaaaccgugauggaguuccagcagaaaaacaaucggcugcucgaaaucacgcgcgaguuuagcgugaacgccggcgucacaaccccuguuucuacauauaugcugaccaauuccgagcuucugagccucauuaacgauaugcccaucaccaacgaccagaagaaacugauguccaauaacgugcaaaucgugagacagcagucuuacagcauuaugugcaucauuaaggaagagguccuugcuuaugugguucagcugccucucuacggggugaucgauacacccuguuggaaacugcauacguccccucugugcaccacaaauaccaaggaaggaagcaacauuugucucacacggaccgaccgcggcugguacugcgauaaugccgggucugucuccuucuuuccgcaagcggagacguguaaggugugcagcaacagaguuuucugcgacacaaugaacucucugacccuucccagcgaagugaaucuguguaaugucgauaucuuuaacccuaaauaugacugcaagaucaugaccuccaaaacagaugugucuagcuccgucauuaccagccucggagccaucgugucuuguuacggcaagacaaaaugcacggcuuccaauaagaacaaggggauuaucaaaaccuucagcaauggaugugacuauguuucuaacaagggcguggacacagucuccgugggcaauacccuguacuauguuaacaaacaggaggggcagagccuuuacgugaagggagagcccauuaucaacuuuuaugauccucuggucuuccccuccgacgaauuugaugccucuaucagccaagugaaugagaaaauuaaccagucccucgcuuucauccggaagucugacgaacugcugcacaaugugaacgccggcaagagcacaaccaauauuaugaucacgaccauuaucauuguuaucaucgucauucuccugucccuuaucgccguggggcugcuccuguacugcaaagcucgcugaggacuaguggaagcauuuuccuggcugauuaaaagaaauuacucagcuauggucaucuguuccuguuagaaggcuaugcagcauauuauauacuaugcgcauguuaugaaaugcauaauaaaaaauuuuaaaaaaucuaaaagaucuaaaaaaaaaaaaaaaaaaaaaaaaaaaaaaaaaaaaaaaaaaaaaaaaaaaaaaaaaaaaaaaaugcaucccccccccccccccccccccccccccccccaaaggcucuuuucagagccaccagaauu

SEQ ID NO: 6600 - RNA, 1994 nt, Artificial Sequence
  mRNA product Design d-5 comprising derived and/or modified sequence from HRSV(A2)__F-del_DSCav1_mut6 (opt6)
gggagagggcgcuuggcuugcaaggacccugagcugcggcauugaagcacacccaacccaacucgacugaagucagccucacugaaccggaucugagaaucuucucucucugggcuugccagggcucuccgaaccuagcuagcauccucuucaauuccaacuagaaagcuuaccauggaacuacucauauuaaaagcaaacgcaauaacaacgauauuaacagcuguaacauucugcuuugcaucaggccaaaauaucaccgaagaauuuuaucaaagcacaugcucugcaguauccaaaggauacuuaggagcauuaagaacaggcugguacacauccguaauaacaauagaacuaucaaacaucaaagaaaacaaaugcaacggcacagacgccaaaguaaaacucauaaaacaagaacuagacaaauauaaaaacgcaguaacagaucuacaaaugcucaugugcuccacaccagcaaccggaucugguucagccauagcauccggcguagccgucugcaaaguauuacaccucgaaggagaaguaaacaaaauaaaaucugcccuauuaucuacaaauaaagccguaguaagucuaaguaacggaguaucaguacuaacauuuaaaguccuagaccugaaaaacuauaucgacaaacaacuauuaccaauacuaaacaaacaauccuguuccaucccuaacccagaaacaguuauggaauuucaacaaaaaaauaaccgccuuuuagaaauaacuagagaauuuucaguaaacgcaggaguuacaacaccaguaucaacauacaugcuaacaaauucagaauuauuaucccuuauaaaugacaugccuaucacaaacgaucaaaaaaaauuaauguccaacaacguacaaauaguaagacaacaaucauauuccaucaugugcaucauaaaagaagaaguccucgcauacguagugcaacuaccacuauacggagucauagauacacccuguuggaaacuucacacaucuccacuaugcacaacaaacacgaaagaaggauccaacauaugccuaacacgaacagacagaggaugguauugcgacaacgcuggaagugugagcuucuucccucaagcagaaacuugcaaaguaugcagcaaucguguauucugcgacacaaugaacucauuaacacucccaagcgaaguaaaccucugcaauguagacaucuuuaauccaaaauacgauuguaaaauaaugacuucaaaaacagacgucucaucaucuguaauaacaucuuuaggagcaauaguuucuugcuacgguaaaacaaaaugcaccgcauccaacaaaaacaaaggaauaauaaaaacauucucuaacggcugcgauuacguaucuaacaaaggaguugacacagucucaguaggaaacacacuauacuacguaaacaaacaagaaggacaaagccuauacguaaaaggagaaccaauaauaaacuucuaugacccauuaguauuuccaagcgaugaauuugacgcuucaauaucacaagucaaugaaaaaauaaaucagagcuuagcauucauaagaaaaucugaugaacuacuacacaauguaaaugcaggaaaauccacuaccaacauaaugauuaccacaauuauaauaguuaucauaguaauacuauuaucacuaauagccguuggauuacuacuauacugcaaagcaagauaaggacuaguggaagcauuuuccuggcugauuaaaagaaauuacucagcuauggucaucuguuccuguuagaaggcuaugcagcauauuauauacuaugcgcauguuaugaaaugcauaauaaaaaauuuuaaaaaaucuaaaagaucuaaaaaaaaaaaaaaaaaaaaaaaaaaaaaaaaaaaaaaaaaaaaaaaaaaaaaaaaaaaaaaaaugcaucccccccccccccccccccccccccccccccaaaggcucuuuucagagccaccagaauu

SEQ ID NO: 6601 - RNA, 1994 nt, Artificial Sequence
  mRNA product Design d-5 comprising derived and/or modified sequence from HRSV(A2)__F-del_DSCav1_mut6 (opt11)
gggagagggcgcuuggcuugcaaggacccugagcugcggcauugaagcacacccaacccaacucgacugaagucagccucacugaaccggaucugagaaucuucucucucugggcuugccagggcucuccgaaccuagcuagcauccucuucaauuccaacuagaaagcuuaccauggaacuacucauccuaaaagcaaacgccaucaccaccauacuaaccgccgucaccuucugcuucgccucgggacaaaacaucaccgaagaguucuaccagucaacgugcuccgccgucucaaaaggcuaccuaggcgcccuccgcaccgggugguauaccuccgucauaacuaucgaacucucuaacaucaaagaaaacaaauguaacggcaccgacgccaaagucaaacuaaucaaacaagaacuggacaaauacaaaaacgccgucaccgaccuacaaaugcucaugugcuccacuccagccaccggcuccgguagcgcaaucgccucaggcguagcuguaugcaaaguccuccaccuagaaggcgaaguaaacaaaauaaaauccgcccuccucucaaccaacaaggccgucgucucacucucaaacggcgucuccguacucaccuuuaaaguccuagaccuuaaaaacuacaucgacaaacaacugcuaccaauccucaacaaacaaucaugcagcaucccaaacccggaaacagucauggaguuccaacagaaaaacaaccgacuccucgaaaucacccgcgaguucuccgucaacgccggagucaccacaccuguaagcacauacaugcuuacuaauuccgaacuccuuucacuaauaaacgacaugccaauaaccaacgaccaaaagaaacucauguccaacaacguacaaaucguacgccaacaauccuacuccaucaugugcaucaucaaagaagaaguccuggccuaugucguacaacucccccuuuacggugucaucgacacacccugcuggaaacuacacaccagcccccucugcacaacaaacaccaaagaaggcuccaacaucugccucacccguaccgaccgaggcugguacugcgacaacgccggcuccgucuccuucuucccccaagccgaaaccugcaaagucugcagcaaccgcgucuucugcgauaccaugaacucccucacacucccaucugaagucaaccucugcaacgucgauauuuucaauccaaaauacgacugcaaaaucaugacuagcaaaaccgacguuagcuccuccgucaucaccucccucggcgccauaguuucaugcuacggcaaaaccaaaugcaccgccuccaacaaaaacaaaggcaucauaaaaaccuucuccaacgggugcgacuacguaucuaauaaaggagucgacaccgucucaguaggaaacacccucuacuaugucaacaaacaagaaggccaaucacuauacguuaaaggcgaaccaaucaucaacuucuacgacccacucgucuuccccagcgacgaguuugacgccucaaucucgcaagucaaugaaaagauuaaccaaucccuagccuucauccgaaaaagugacgaacuccuccacaacguuaacgccggcaaaucuacaaccaacaucaugaucaccacuauaaucaucgucaucauagucauacuucucagccucaucgcagucggacuccuccuuuauugcaaggcacgauaaggacuaguggaagcauuuuccuggcugauuaaaagaaauuacucagcuauggucaucuguuccuguuagaaggcuaugcagcauauuauauacuaugcgcauguuaugaaaugcauaauaaaaaauuuuaaaaaaucuaaaagaucuaaaaaaaaaaaaaaaaaaaaaaaaaaaaaaaaaaaaaaaaaaaaaaaaaaaaaaaaaaaaaaaaugcaucccccccccccccccccccccccccccccccaaaggcucuuuucagagccaccagaauu

SEQ ID NO: 6602 - RNA, 1874 nt, Artificial Sequence
  mRNA product Design e-1 comprising derived and/or modified sequence from HRSV(A2)__F-del_DSCav1_mut6 (opt1)
gggagaauauaagcguuggcggagcgucgguuguagcacucugcgcgcccgcucuucugcugcuguuugucuacuuccuccugcuuccccgccgccgccgccgccaucaagcuuaccauggagcugcucauccugaaggccaacgccaucaccaccauccugacggcggugaccuucugcuucgccagcggccagaacaucaccgaggaguucuaccaguccacgugcagcgccgucuccaagggguaccucggcgcccugcggaccggcugguacaccuccgugaucaccaucgagcugagcaacaucaaggagaacaagugcaacgggaccgacgccaaggugaagcucaucaagcaggagcuggacaaguacaagaacgcggucacggaccugcagaugcugaugugcuccaccccggcaaccggcuccggcuccgccaucgcgagcggcgucgccgugugcaaggugcugcaccucgagggggaggucaacaagaucaagagcgcccugcuguccaccaacaaggccguggugagccucuccaacggcgucagcgugcugaccuucaaggugcuggaccucaagaacuacaucgacaagcagcugcugcccauccugaacaagcagagcugcuccauccccaaccccgagacggugauggaguuccagcagaagaacaaccggcuccuggagaucacccgcgaguucagcgugaacgccggggucaccacccccguguccacguacaugcugaccaacagcgagcuccugucccugaucaacgacaugccgaucaccaacgaccagaagaagcucaugagcaacaacgugcagaucguccggcagcaguccuacagcaucaugugcaucaucaaggaggaggugcuggcguacgugguccagcugccccucuacggcgugaucgacacccccugcuggaagcugcacacgagcccccugugcaccaccaacaccaaggagggguccaacaucugccucacgcgcaccgaccggggcugguacugcgacaacgccggcagcgucuccuucuucccgcaggccgagaccugcaaggugugcagcaaccgcguguucugcgacaccaugaacucccugacgcugcccagcgagguaaaccucugcaacgucgacaucuucaaccccaaguacgacugcaagaucaugaccuccaagaccgacgugagcuccagcgugaucaccucccugggggccaucgucagcugcuacggcaagacgaagugcaccgccagcaacaagaacaaggggaucaucaagaccuucuccaacggcugcgacuacgugagcaacaagggcguggacaccguguccgucgggaacacccuguacuacgugaacaagcaggagggccagagccucuacgugaagggggagcccaucaucaacuucuacgacccgcuggucuuccccuccgacgaguucgacgcgagcaucucccaggugaacgagaagaucaaccagagccuggccuucauccgcaaguccgacgagcugcuccacaacgugaacgccggcaagagcacgaccaacaucaugaucaccaccaucaucaucgucaucaucgugauccugcugucccucaucgccguggggcugcugcucuacugcaaggcccggugaggacuaguguccaccugucccuccugggcugcuggauugucucguuuuccugccaaauaaacaggaucagcgcuuuacagaucuaaaaaaaaaaaaaaaaaaaaaaaaaaaaaaaaaaaaaaaaaaaaaaaaaaaaaaaaaaaaaaaaugcaucccccccccccccccccccccccccccccccaaaggcucuuuucagagccaccagaauu

SEQ ID NO: 6603 - RNA, 1874 nt, Artificial Sequence
  mRNA product Design e-1 comprising derived and/or modified sequence from HRSV(A2)__F-del_DSCav1_mut6 (opt1)
gggagaauauaagcguuggcggagcgucgguuguagcacucugcgcgcccgcucuucugcugcuguuugucuacuuccuccugcuuccccgccgccgccgccgccaucaagcuuaccauggagcugcucauccugaaggccaacgccaucaccaccauccugacggcggugaccuucugcuucgccagcggccagaacaucaccgaggaguucuaccaguccacgugcagcgccgucuccaagggguaccucggcgcccugcgcaccgggugguacaccagcgugaucaccaucgagcuguccaacaucaaggagaacaagugcaacggcaccgacgccaaggugaagcucaucaagcaggagcuggacaaguacaagaacgcggucacggaccugcagaugcucaugugcagcacccccgccaccggguccggcagcgccaucgccuccggcguggcggugugcaagguccugcaccuggagggggaggugaacaagaucaagagcgcccuccuguccaccaacaaggccguggucagccuguccaacggcgugagcgugcucacguucaagguccuggaccugaagaacuacaucgacaagcagcuccugccgauccugaacaagcaguccugcagcauccccaaccccgagaccgugauggaguuccagcagaagaacaaccggcuccuggagaucacccgcgaguucuccgugaacgccggggucaccacgcccgugagcaccuacaugcugaccaacuccgagcuccugagccugaucaacgacaugccgaucaccaacgaccagaagaagcucaugagcaacaacgugcagaucguccggcagcaguccuacagcaucaugugcaucaucaaggaggaggugcuggccuacgugguccagcugccccucuacggcgugaucgacacgcccugcuggaagcugcacaccagcccccugugcaccaccaacacgaaggaggggagcaacaucugccucacccgcaccgaccggggcugguacugcgacaacgcgggcuccgugagcuucuucccgcaggccgagaccugcaaggucugcuccaaccgcguguucugcgacacgaugaacagccugacccugcccuccgaggucaaccucugcaacguggacaucuucaaccccaaguacgacugcaagaucaugaccagcaagaccgacguguccagcuccgucaucacgagccugggggccaucguguccugcuacggcaagaccaagugcaccgccagcaacaagaacaaggggaucaucaagaccuucuccaacggcugcgacuacgugagcaacaagggcgucgacacgguguccguggggaacacccuguacuacgucaacaagcaggagggccagagccucuacgugaagggggagcccaucaucaacuucuacgacccgcugguguuccccagcgacgaguucgacgccuccaucagccaggucaacgagaagaucaaccagucccuggcguucauccggaaguccgacgagcuccugcacaacgugaacgccggcaaguccaccaccaacaucaugaucaccacgaucaucaucgugaucaucgucauccugcucagccugaucgccguggggcugcuccuguacugcaaggcccgcugaggacuaguguccaccugucccuccugggcugcuggauugucucguuuuccugccaaauaaacaggaucagcgcuuuacagaucuaaaaaaaaaaaaaaaaaaaaaaaaaaaaaaaaaaaaaaaaaaaaaaaaaaaaaaaaaaaaaaaaugcaucccccccccccccccccccccccccccccccaaaggcucuuuucagagccaccagaauu

SEQ ID NO: 6604 - RNA, 1874 nt, Artificial Sequence
  mRNA product Design e-1 comprising derived and/or modified sequence from HRSV(A2)__F-del_DSCav1_mut6 (opt2)
gggagaauauaagcguuggcggagcgucgguuguagcacucugcgcgcccgcucuucugcugcuguuugucuacuuccuccugcuuccccgccgccgccgccgccaucaagcuuaccauggagcuccucauccucaaggccaacgccaucaccaccauccucaccgccgucaccuucugcuucgccuccggccagaacaucaccgaggaguucuaccaguccaccugcuccgccgucuccaagggcuaccucggcgcccuccgcaccggcugguacaccuccgucaucaccaucgagcucuccaacaucaaggagaacaagugcaacggcaccgacgccaaggucaagcucaucaagcaggagcucgacaaguacaagaacgccgucaccgaccuccagaugcucaugugcuccacccccgccaccggcuccggcuccgccaucgccuccggcgucgccgucugcaagguccuccaccucgagggcgaggucaacaagaucaaguccgcccuccucuccaccaacaaggccgucgucucccucuccaacggcgucuccguccucaccuucaagguccucgaccucaagaacuacaucgacaagcagcuccuccccauccucaacaagcaguccugcuccauccccaaccccgagaccgucauggaguuccagcagaagaacaaccgccuccucgagaucacccgcgaguucuccgucaacgccggcgucaccacccccgucuccaccuacaugcucaccaacuccgagcuccucucccucaucaacgacaugcccaucaccaacgaccagaagaagcucauguccaacaacguccagaucguccgccagcaguccuacuccaucaugugcaucaucaaggaggagguccucgccuacgucguccagcucccccucuacggcgucaucgacacccccugcuggaagcuccacaccuccccccucugcaccaccaacaccaaggagggcuccaacaucugccucacccgcaccgaccgcggcugguacugcgacaacgccggcuccgucuccuucuucccccaggccgagaccugcaaggucugcuccaaccgcgucuucugcgacaccaugaacucccucacccuccccuccgaggucaaccucugcaacgucgacaucuucaaccccaaguacgacugcaagaucaugaccuccaagaccgacgucuccuccuccgucaucaccucccucggcgccaucgucuccugcuacggcaagaccaagugcaccgccuccaacaagaacaagggcaucaucaagaccuucuccaacggcugcgacuacgucuccaacaagggcgucgacaccgucuccgucggcaacacccucuacuacgucaacaagcaggagggccagucccucuacgucaagggcgagcccaucaucaacuucuacgacccccucgucuuccccuccgacgaguucgacgccuccaucucccaggucaacgagaagaucaaccagucccucgccuucauccgcaaguccgacgagcuccuccacaacgucaacgccggcaaguccaccaccaacaucaugaucaccaccaucaucaucgucaucaucgucauccuccucucccucaucgccgucggccuccuccucuacugcaaggcccgcugaggacuaguguccaccugucccuccugggcugcuggauugucucguuuuccugccaaauaaacaggaucagcgcuuuacagaucuaaaaaaaaaaaaaaaaaaaaaaaaaaaaaaaaaaaaaaaaaaaaaaaaaaaaaaaaaaaaaaaaugcaucccccccccccccccccccccccccccccccaaaggcucuuuucagagccaccagaauu

SEQ ID NO: 6605 - RNA, 1874 nt, Artificial Sequence
  mRNA product Design e-1 comprising derived and/or modified sequence from HRSV(A2)__F-del_DSCav1_mut6 (opt3)
gggagaauauaagcguuggcggagcgucgguuguagcacucugcgcgcccgcucuucugcugcuguuugucuacuuccuccugcuuccccgccgccgccgccgccaucaagcuuaccauggagcugcucauccuuaaggccaacgcuauuaccacaauacugacugcagugacguucugcuuugccagcggccagaauaucaccgaagaguucuaccaauccacauguucugcggucucaaaaggguauuugggagcuuuaagaacugguugguacaccaguguuauuacaaucgaacugagcaacauuaaggagaauaaaugcaacggcaccgacgccaaggugaaacuaaucaagcaggaacucgauaaguauaaaaaugcaguaacugaccugcagaugcuuauguguuccacacccgccaccgggucuggaucggcuauagcaucaggcguggccgucugcaaggugcugcacuuggagggugagguuaacaaaaucaagagcgcucuccugaguacgaauaaagccguggucucccugucuaacggggugagcguacucacuuuuaagguuuuagaucugaagaauuacauugacaaacagcuuuugccuauccugaacaagcaauccuguucaauuccaaauccggaaaccgugauggaguuccagcagaaaaacaauaggcuacucgaaaucacacgggaguuuagugucaacgcgggagugacuacccccgugagcacauauaugcugaccaauucugagcuucuguccuugauaaacgauaugccuauuacgaacgaccagaagaaacucaugucaaauaacguccaaaucguucgccagcagagcuacaguauuaugugcaucaucaaggaagaggugcuggcauauguagugcaguuaccacuguacggcgucauugauacucccuguuggaaacuccauacaucuccucuuugcaccacuaauacaaaggaaggcuccaacauaugucugacccgaacggaccgugggugguacugcgauaaugccggaagcgugucguucuuuccacaagcugagaccuguaagguuugcucuaacagaguguucugcgacacaaugaacuccuugacucuacccucagaagucaaucuguguaauguggauaucuuuaacccuaaauaugacugcaagauuaugaccaguaaaacagauguaagcuccucuguuaucacuagccucggugccauagugucauguuacggcaagaccaaaugcacagcaaguaauaagaacaaggggauuaucaaaaccuucuccaauggaugugacuaugucagcaacaagggcguggacacugucucuguggguaauacgcuguacuauguuaacaaacaggaggggcagucacuuuacgugaagggagagccaaucauuaacuuuuaugauccgcugguauuccccagugacgaauuugaugcuagcaucucccaagucaaugagaaaauuaaccagucuuuggccuucauaaggaagucggacgaacuccugcacaaugugaacgcgggcaagagcacaaccaauaucaugauuacuaccaucaucauuguuauaaucgugauuuuacugucccuaaucgccgucggccuccugcuuuacugcaaagcacggugaggacuaguguccaccugucccuccugggcugcuggauugucucguuuuccugccaaauaaacaggaucagcgcuuuacagaucuaaaaaaaaaaaaaaaaaaaaaaaaaaaaaaaaaaaaaaaaaaaaaaaaaaaaaaaaaaaaaaaaugcaucccccccccccccccccccccccccccccccaaaggcucuuuucagagccaccagaauu

SEQ ID NO: 6606 - RNA, 1874 nt, Artificial Sequence
  mRNA product Design e-1 comprising derived and/or modified sequence from HRSV(A2)__F-del_DSCav1_mut6 (opt4)
gggagaauauaagcguuggcggagcgucgguuguagcacucugcgcgcccgcucuucugcugcuguuugucuacuuccuccugcuuccccgccgccgccgccgccaucaagcuuaccauggagcugcugauccugaaggccaacgccaucaccaccauccugaccgccgugaccuucugcuucgccagcggccagaacaucaccgaggaguucuaccagagcaccugcagcgccgugagcaagggcuaccugggcgcccugagaaccggcugguacaccagcgugaucaccaucgagcugagcaacaucaaggagaacaagugcaacggcaccgacgccaaggugaagcugaucaagcaggagcuggacaaguacaagaacgccgugaccgaccugcagaugcugaugugcagcacccccgccaccggcagcggcagcgccaucgccagcggcguggccgugugcaaggugcugcaccuggagggcgaggugaacaagaucaagagcgcccugcugagcaccaacaaggccguggugagccugagcaacggcgugagcgugcugaccuucaaggugcuggaccugaagaacuacaucgacaagcagcugcugcccauccugaacaagcagagcugcagcauccccaaccccgagaccgugauggaguuccagcagaagaacaacagacugcuggagaucaccagagaguucagcgugaacgccggcgugaccacccccgugagcaccuacaugcugaccaacagcgagcugcugagccugaucaacgacaugcccaucaccaacgaccagaagaagcugaugagcaacaacgugcagaucgugagacagcagagcuacagcaucaugugcaucaucaaggaggaggugcuggccuacguggugcagcugccccuguacggcgugaucgacacccccugcuggaagcugcacaccagcccccugugcaccaccaacaccaaggagggcagcaacaucugccugaccagaaccgacagaggcugguacugcgacaacgccggcagcgugagcuucuucccccaggccgagaccugcaaggugugcagcaacagaguguucugcgacaccaugaacagccugacccugcccagcgaggugaaccugugcaacguggacaucuucaaccccaaguacgacugcaagaucaugaccagcaagaccgacgugagcagcagcgugaucaccagccugggcgccaucgugagcugcuacggcaagaccaagugcaccgccagcaacaagaacaagggcaucaucaagaccuucagcaacggcugcgacuacgugagcaacaagggcguggacaccgugagcgugggcaacacccuguacuacgugaacaagcaggagggccagagccuguacgugaagggcgagcccaucaucaacuucuacgacccccugguguuccccagcgacgaguucgacgccagcaucagccaggugaacgagaagaucaaccagagccuggccuucaucagaaagagcgacgagcugcugcacaacgugaacgccggcaagagcaccaccaacaucaugaucaccaccaucaucaucgugaucaucgugauccugcugagccugaucgccgugggccugcugcuguacugcaaggccagaugaggacuaguguccaccugucccuccugggcugcuggauugucucguuuuccugccaaauaaacaggaucagcgcuuuacagaucuaaaaaaaaaaaaaaaaaaaaaaaaaaaaaaaaaaaaaaaaaaaaaaaaaaaaaaaaaaaaaaaaugcaucccccccccccccccccccccccccccccccaaaggcucuuuucagagccaccagaauu

SEQ ID NO: 6607 - RNA, 1874 nt, Artificial Sequence
  mRNA product Design e-1 comprising derived and/or modified sequence from HRSV(A2)__F-del_DSCav1_mut6 (opt5)
gggagaauauaagcguuggcggagcgucgguuguagcacucugcgcgcccgcucuucugcugcuguuugucuacuuccuccugcuuccccgccgccgccgccgccaucaagcuuaccauggagcugcucauccugaaggccaacgcuauuaccacaauccuuacggccgugaccuucugcuuugcgagcggccagaauauuacagaagaguucuaccaauccaccuguucugcugucagcaaaggguaucugggagcccucagaacaggcugguacaccuccguuaucacaauugaacugucuaacaucaaggagaauaaaugcaacgggaccgacgccaaggugaaacuuaucaagcaggaacuggauaaguauaaaaaugcugugacggaccuccagaugcugauguguagcacccccgccacaggauccggcucugcuauugccagcggggucgcggugugcaagguucugcaccucgagggagaggugaacaaaaucaaguccgcccugcuuagcaccaauaaagcugucgugucucuguccaacggcguuagcgugcucacauuuaagguccuggaucuuaagaauuacauugacaaacagcugcucccuauccugaacaagcaaucuuguuccauuccgaaucccgaaaccgugauggaguuccagcagaaaaacaaucggcugcucgaaaucacgcgcgaguuuagcgugaacgccggcgucacaaccccuguuucuacauauaugcugaccaauuccgagcuucugagccucauuaacgauaugcccaucaccaacgaccagaagaaacugauguccaauaacgugcaaaucgugagacagcagucuuacagcauuaugugcaucauuaaggaagagguccuugcuuaugugguucagcugccucucuacggggugaucgauacacccuguuggaaacugcauacguccccucugugcaccacaaauaccaaggaaggaagcaacauuugucucacacggaccgaccgcggcugguacugcgauaaugccgggucugucuccuucuuuccgcaagcggagacguguaaggugugcagcaacagaguuuucugcgacacaaugaacucucugacccuucccagcgaagugaaucuguguaaugucgauaucuuuaacccuaaauaugacugcaagaucaugaccuccaaaacagaugugucuagcuccgucauuaccagccucggagccaucgugucuuguuacggcaagacaaaaugcacggcuuccaauaagaacaaggggauuaucaaaaccuucagcaauggaugugacuauguuucuaacaagggcguggacacagucuccgugggcaauacccuguacuauguuaacaaacaggaggggcagagccuuuacgugaagggagagcccauuaucaacuuuuaugauccucuggucuuccccuccgacgaauuugaugccucuaucagccaagugaaugagaaaauuaaccagucccucgcuuucauccggaagucugacgaacugcugcacaaugugaacgccggcaagagcacaaccaauauuaugaucacgaccauuaucauuguuaucaucgucauucuccugucccuuaucgccguggggcugcuccuguacugcaaagcucgcugaggacuaguguccaccugucccuccugggcugcuggauugucucguuuuccugccaaauaaacaggaucagcgcuuuacagaucuaaaaaaaaaaaaaaaaaaaaaaaaaaaaaaaaaaaaaaaaaaaaaaaaaaaaaaaaaaaaaaaaugcaucccccccccccccccccccccccccccccccaaaggcucuuuucagagccaccagaauu

SEQ ID NO: 6608 - RNA, 1874 nt, Artificial Sequence
  mRNA product Design e-1 comprising derived and/or modified sequence from HRSV(A2)__F-del_DSCav1_mut6 (opt6)
gggagaauauaagcguuggcggagcgucgguuguagcacucugcgcgcccgcucuucugcugcuguuugucuacuuccuccugcuuccccgccgccgccgccgccaucaagcuuaccauggaacuacucauauuaaaagcaaacgcaauaacaacgauauuaacagcuguaacauucugcuuugcaucaggccaaaauaucaccgaagaauuuuaucaaagcacaugcucugcaguauccaaaggauacuuaggagcauuaagaacaggcugguacacauccguaauaacaauagaacuaucaaacaucaaagaaaacaaaugcaacggcacagacgccaaaguaaaacucauaaaacaagaacuagacaaauauaaaaacgcaguaacagaucuacaaaugcucaugugcuccacaccagcaaccggaucugguucagccauagcauccggcguagccgucugcaaaguauuacaccucgaaggagaaguaaacaaaauaaaaucugcccuauuaucuacaaauaaagccguaguaagucuaaguaacggaguaucaguacuaacauuuaaaguccuagaccugaaaaacuauaucgacaaacaacuauuaccaauacuaaacaaacaauccuguuccaucccuaacccagaaacaguuauggaauuucaacaaaaaaauaaccgccuuuuagaaauaacuagagaauuuucaguaaacgcaggaguuacaacaccaguaucaacauacaugcuaacaaauucagaauuauuaucccuuauaaaugacaugccuaucacaaacgaucaaaaaaaauuaauguccaacaacguacaaauaguaagacaacaaucauauuccaucaugugcaucauaaaagaagaaguccucgcauacguagugcaacuaccacuauacggagucauagauacacccuguuggaaacuucacacaucuccacuaugcacaacaaacacgaaagaaggauccaacauaugccuaacacgaacagacagaggaugguauugcgacaacgcuggaagugugagcuucuucccucaagcagaaacuugcaaaguaugcagcaaucguguauucugcgacacaaugaacucauuaacacucccaagcgaaguaaaccucugcaauguagacaucuuuaauccaaaauacgauuguaaaauaaugacuucaaaaacagacgucucaucaucuguaauaacaucuuuaggagcaauaguuucuugcuacgguaaaacaaaaugcaccgcauccaacaaaaacaaaggaauaauaaaaacauucucuaacggcugcgauuacguaucuaacaaaggaguugacacagucucaguaggaaacacacuauacuacguaaacaaacaagaaggacaaagccuauacguaaaaggagaaccaauaauaaacuucuaugacccauuaguauuuccaagcgaugaauuugacgcuucaauaucacaagucaaugaaaaaauaaaucagagcuuagcauucauaagaaaaucugaugaacuacuacacaauguaaaugcaggaaaauccacuaccaacauaaugauuaccacaauuauaauaguuaucauaguaauacuauuaucacuaauagccguuggauuacuacuauacugcaaagcaagauaaggacuaguguccaccugucccuccugggcugcuggauugucucguuuuccugccaaauaaacaggaucagcgcuuuacagaucuaaaaaaaaaaaaaaaaaaaaaaaaaaaaaaaaaaaaaaaaaaaaaaaaaaaaaaaaaaaaaaaaugcaucccccccccccccccccccccccccccccccaaaggcucuuuucagagccaccagaauu

SEQ ID NO: 6609 - RNA, 1874 nt, Artificial Sequence
  mRNA product Design e-1 comprising derived and/or modified sequence from HRSV(A2)__F-del_DSCav1_mut6 (opt11)
gggagaauauaagcguuggcggagcgucgguuguagcacucugcgcgcccgcucuucugcugcuguuugucuacuuccuccugcuuccccgccgccgccgccgccaucaagcuuaccauggaacuacucauccuaaaagcaaacgccaucaccaccauacuaaccgccgucaccuucugcuucgccucgggacaaaacaucaccgaagaguucuaccagucaacgugcuccgccgucucaaaaggcuaccuaggcgcccuccgcaccgggugguauaccuccgucauaacuaucgaacucucuaacaucaaagaaaacaaauguaacggcaccgacgccaaagucaaacuaaucaaacaagaacuggacaaauacaaaaacgccgucaccgaccuacaaaugcucaugugcuccacuccagccaccggcuccgguagcgcaaucgccucaggcguagcuguaugcaaaguccuccaccuagaaggcgaaguaaacaaaauaaaauccgcccuccucucaaccaacaaggccgucgucucacucucaaacggcgucuccguacucaccuuuaaaguccuagaccuuaaaaacuacaucgacaaacaacugcuaccaauccucaacaaacaaucaugcagcaucccaaacccggaaacagucauggaguuccaacagaaaaacaaccgacuccucgaaaucacccgcgaguucuccgucaacgccggagucaccacaccuguaagcacauacaugcuuacuaauuccgaacuccuuucacuaauaaacgacaugccaauaaccaacgaccaaaagaaacucauguccaacaacguacaaaucguacgccaacaauccuacuccaucaugugcaucaucaaagaagaaguccuggccuaugucguacaacucccccuuuacggugucaucgacacacccugcuggaaacuacacaccagcccccucugcacaacaaacaccaaagaaggcuccaacaucugccucacccguaccgaccgaggcugguacugcgacaacgccggcuccgucuccuucuucccccaagccgaaaccugcaaagucugcagcaaccgcgucuucugcgauaccaugaacucccucacacucccaucugaagucaaccucugcaacgucgauauuuucaauccaaaauacgacugcaaaaucaugacuagcaaaaccgacguuagcuccuccgucaucaccucccucggcgccauaguuucaugcuacggcaaaaccaaaugcaccgccuccaacaaaaacaaaggcaucauaaaaaccuucuccaacgggugcgacuacguaucuaauaaaggagucgacaccgucucaguaggaaacacccucuacuaugucaacaaacaagaaggccaaucacuauacguuaaaggcgaaccaaucaucaacuucuacgacccacucgucuuccccagcgacgaguuugacgccucaaucucgcaagucaaugaaaagauuaaccaaucccuagccuucauccgaaaaagugacgaacuccuccacaacguuaacgccggcaaaucuacaaccaacaucaugaucaccacuauaaucaucgucaucauagucauacuucucagccucaucgcagucggacuccuccuuuauugcaaggcacgauaaggacuaguguccaccugucccuccugggcugcuggauugucucguuuuccugccaaauaaacaggaucagcgcuuuacagaucuaaaaaaaaaaaaaaaaaaaaaaaaaaaaaaaaaaaaaaaaaaaaaaaaaaaaaaaaaaaaaaaaugcaucccccccccccccccccccccccccccccccaaaggcucuuuucagagccaccagaauu

SEQ ID NO: 6610 - RNA, 1856 nt, Artificial Sequence
  mRNA product Design e-2 comprising derived and/or modified sequence from HRSV(A2)__F-del_DSCav1_mut6 (opt1)
gggagacccgugacccggaaguuguacggcuacgcgacuuucccucccacaaacccucgcgcccuuccuuuccuacuugggcccggcagaaagcuuaccauggagcugcucauccugaaggccaacgccaucaccaccauccugacggcggugaccuucugcuucgccagcggccagaacaucaccgaggaguucuaccaguccacgugcagcgccgucuccaagggguaccucggcgcccugcggaccggcugguacaccuccgugaucaccaucgagcugagcaacaucaaggagaacaagugcaacgggaccgacgccaaggugaagcucaucaagcaggagcuggacaaguacaagaacgcggucacggaccugcagaugcugaugugcuccaccccggcaaccggcuccggcuccgccaucgcgagcggcgucgccgugugcaaggugcugcaccucgagggggaggucaacaagaucaagagcgcccugcuguccaccaacaaggccguggugagccucuccaacggcgucagcgugcugaccuucaaggugcuggaccucaagaacuacaucgacaagcagcugcugcccauccugaacaagcagagcugcuccauccccaaccccgagacggugauggaguuccagcagaagaacaaccggcuccuggagaucacccgcgaguucagcgugaacgccggggucaccacccccguguccacguacaugcugaccaacagcgagcuccugucccugaucaacgacaugccgaucaccaacgaccagaagaagcucaugagcaacaacgugcagaucguccggcagcaguccuacagcaucaugugcaucaucaaggaggaggugcuggcguacgugguccagcugccccucuacggcgugaucgacacccccugcuggaagcugcacacgagcccccugugcaccaccaacaccaaggagggguccaacaucugccucacgcgcaccgaccggggcugguacugcgacaacgccggcagcgucuccuucuucccgcaggccgagaccugcaaggugugcagcaaccgcguguucugcgacaccaugaacucccugacgcugcccagcgagguaaaccucugcaacgucgacaucuucaaccccaaguacgacugcaagaucaugaccuccaagaccgacgugagcuccagcgugaucaccucccugggggccaucgucagcugcuacggcaagacgaagugcaccgccagcaacaagaacaaggggaucaucaagaccuucuccaacggcugcgacuacgugagcaacaagggcguggacaccguguccgucgggaacacccuguacuacgugaacaagcaggagggccagagccucuacgugaagggggagcccaucaucaacuucuacgacccgcuggucuuccccuccgacgaguucgacgcgagcaucucccaggugaacgagaagaucaaccagagccuggccuucauccgcaaguccgacgagcugcuccacaacgugaacgccggcaagagcacgaccaacaucaugaucaccaccaucaucaucgucaucaucgugauccugcugucccucaucgccguggggcugcugcucuacugcaaggcccggugaggacuaguguccaccugucccuccugggcugcuggauugucucguuuuccugccaaauaaacaggaucagcgcuuuacagaucuaaaaaaaaaaaaaaaaaaaaaaaaaaaaaaaaaaaaaaaaaaaaaaaaaaaaaaaaaaaaaaaaugcaucccccccccccccccccccccccccccccccaaaggcucuuuucagagccaccagaauu

SEQ ID NO: 6611 - RNA, 1856 nt, Artificial Sequence
  mRNA product Design e-2 comprising derived and/or modified sequence from HRSV(A2)__F-del_DSCav1_mut6 (opt1)
gggagacccgugacccggaaguuguacggcuacgcgacuuucccucccacaaacccucgcgcccuuccuuuccuacuugggcccggcagaaagcuuaccauggagcugcucauccugaaggccaacgccaucaccaccauccugacggcggugaccuucugcuucgccagcggccagaacaucaccgaggaguucuaccaguccacgugcagcgccgucuccaagggguaccucggcgcccugcgcaccgggugguacaccagcgugaucaccaucgagcuguccaacaucaaggagaacaagugcaacggcaccgacgccaaggugaagcucaucaagcaggagcuggacaaguacaagaacgcggucacggaccugcagaugcucaugugcagcacccccgccaccggguccggcagcgccaucgccuccggcguggcggugugcaagguccugcaccuggagggggaggugaacaagaucaagagcgcccuccuguccaccaacaaggccguggucagccuguccaacggcgugagcgugcucacguucaagguccuggaccugaagaacuacaucgacaagcagcuccugccgauccugaacaagcaguccugcagcauccccaaccccgagaccgugauggaguuccagcagaagaacaaccggcuccuggagaucacccgcgaguucuccgugaacgccggggucaccacgcccgugagcaccuacaugcugaccaacuccgagcuccugagccugaucaacgacaugccgaucaccaacgaccagaagaagcucaugagcaacaacgugcagaucguccggcagcaguccuacagcaucaugugcaucaucaaggaggaggugcuggccuacgugguccagcugccccucuacggcgugaucgacacgcccugcuggaagcugcacaccagcccccugugcaccaccaacacgaaggaggggagcaacaucugccucacccgcaccgaccggggcugguacugcgacaacgcgggcuccgugagcuucuucccgcaggccgagaccugcaaggucugcuccaaccgcguguucugcgacacgaugaacagccugacccugcccuccgaggucaaccucugcaacguggacaucuucaaccccaaguacgacugcaagaucaugaccagcaagaccgacguguccagcuccgucaucacgagccugggggccaucguguccugcuacggcaagaccaagugcaccgccagcaacaagaacaaggggaucaucaagaccuucuccaacggcugcgacuacgugagcaacaagggcgucgacacgguguccguggggaacacccuguacuacgucaacaagcaggagggccagagccucuacgugaagggggagcccaucaucaacuucuacgacccgcugguguuccccagcgacgaguucgacgccuccaucagccaggucaacgagaagaucaaccagucccuggcguucauccggaaguccgacgagcuccugcacaacgugaacgccggcaaguccaccaccaacaucaugaucaccacgaucaucaucgugaucaucgucauccugcucagccugaucgccguggggcugcuccuguacugcaaggcccgcugaggacuaguguccaccugucccuccugggcugcuggauugucucguuuuccugccaaauaaacaggaucagcgcuuuacagaucuaaaaaaaaaaaaaaaaaaaaaaaaaaaaaaaaaaaaaaaaaaaaaaaaaaaaaaaaaaaaaaaaugcaucccccccccccccccccccccccccccccccaaaggcucuuuucagagccaccagaauu

SEQ ID NO: 6612 - RNA, 1856 nt, Artificial Sequence
  mRNA product Design e-2 comprising derived and/or modified sequence from HRSV(A2)__F-del_DSCav1_mut6 (opt2)
gggagacccgugacccggaaguuguacggcuacgcgacuuucccucccacaaacccucgcgcccuuccuuuccuacuugggcccggcagaaagcuuaccauggagcuccucauccucaaggccaacgccaucaccaccauccucaccgccgucaccuucugcuucgccuccggccagaacaucaccgaggaguucuaccaguccaccugcuccgccgucuccaagggcuaccucggcgcccuccgcaccggcugguacaccuccgucaucaccaucgagcucuccaacaucaaggagaacaagugcaacggcaccgacgccaaggucaagcucaucaagcaggagcucgacaaguacaagaacgccgucaccgaccuccagaugcucaugugcuccacccccgccaccggcuccggcuccgccaucgccuccggcgucgccgucugcaagguccuccaccucgagggcgaggucaacaagaucaaguccgcccuccucuccaccaacaaggccgucgucucccucuccaacggcgucuccguccucaccuucaagguccucgaccucaagaacuacaucgacaagcagcuccuccccauccucaacaagcaguccugcuccauccccaaccccgagaccgucauggaguuccagcagaagaacaaccgccuccucgagaucacccgcgaguucuccgucaacgccggcgucaccacccccgucuccaccuacaugcucaccaacuccgagcuccucucccucaucaacgacaugcccaucaccaacgaccagaagaagcucauguccaacaacguccagaucguccgccagcaguccuacuccaucaugugcaucaucaaggaggagguccucgccuacgucguccagcucccccucuacggcgucaucgacacccccugcuggaagcuccacaccuccccccucugcaccaccaacaccaaggagggcuccaacaucugccucacccgcaccgaccgcggcugguacugcgacaacgccggcuccgucuccuucuucccccaggccgagaccugcaaggucugcuccaaccgcgucuucugcgacaccaugaacucccucacccuccccuccgaggucaaccucugcaacgucgacaucuucaaccccaaguacgacugcaagaucaugaccuccaagaccgacgucuccuccuccgucaucaccucccucggcgccaucgucuccugcuacggcaagaccaagugcaccgccuccaacaagaacaagggcaucaucaagaccuucuccaacggcugcgacuacgucuccaacaagggcgucgacaccgucuccgucggcaacacccucuacuacgucaacaagcaggagggccagucccucuacgucaagggcgagcccaucaucaacuucuacgacccccucgucuuccccuccgacgaguucgacgccuccaucucccaggucaacgagaagaucaaccagucccucgccuucauccgcaaguccgacgagcuccuccacaacgucaacgccggcaaguccaccaccaacaucaugaucaccaccaucaucaucgucaucaucgucauccuccucucccucaucgccgucggccuccuccucuacugcaaggcccgcugaggacuaguguccaccugucccuccugggcugcuggauugucucguuuuccugccaaauaaacaggaucagcgcuuuacagaucuaaaaaaaaaaaaaaaaaaaaaaaaaaaaaaaaaaaaaaaaaaaaaaaaaaaaaaaaaaaaaaaaugcaucccccccccccccccccccccccccccccccaaaggcucuuuucagagccaccagaauu

SEQ ID NO: 6613 - RNA, 1856 nt, Artificial Sequence
  mRNA product Design e-2 comprising derived and/or modified sequence from HRSV(A2)__F-del_DSCav1_mut6 (opt3)
gggagacccgugacccggaaguuguacggcuacgcgacuuucccucccacaaacccucgcgcccuuccuuuccuacuugggcccggcagaaagcuuaccauggagcugcucauccuuaaggccaacgcuauuaccacaauacugacugcagugacguucugcuuugccagcggccagaauaucaccgaagaguucuaccaauccacauguucugcggucucaaaaggguauuugggagcuuuaagaacugguugguacaccaguguuauuacaaucgaacugagcaacauuaaggagaauaaaugcaacggcaccgacgccaaggugaaacuaaucaagcaggaacucgauaaguauaaaaaugcaguaacugaccugcagaugcuuauguguuccacacccgccaccgggucuggaucggcuauagcaucaggcguggccgucugcaaggugcugcacuuggagggugagguuaacaaaaucaagagcgcucuccugaguacgaauaaagccguggucucccugucuaacggggugagcguacucacuuuuaagguuuuagaucugaagaauuacauugacaaacagcuuuugccuauccugaacaagcaauccuguucaauuccaaauccggaaaccgugauggaguuccagcagaaaaacaauaggcuacucgaaaucacacgggaguuuagugucaacgcgggagugacuacccccgugagcacauauaugcugaccaauucugagcuucuguccuugauaaacgauaugccuauuacgaacgaccagaagaaacucaugucaaauaacguccaaaucguucgccagcagagcuacaguauuaugugcaucaucaaggaagaggugcuggcauauguagugcaguuaccacuguacggcgucauugauacucccuguuggaaacuccauacaucuccucuuugcaccacuaauacaaaggaaggcuccaacauaugucugacccgaacggaccgugggugguacugcgauaaugccggaagcgugucguucuuuccacaagcugagaccuguaagguuugcucuaacagaguguucugcgacacaaugaacuccuugacucuacccucagaagucaaucuguguaauguggauaucuuuaacccuaaauaugacugcaagauuaugaccaguaaaacagauguaagcuccucuguuaucacuagccucggugccauagugucauguuacggcaagaccaaaugcacagcaaguaauaagaacaaggggauuaucaaaaccuucuccaauggaugugacuaugucagcaacaagggcguggacacugucucuguggguaauacgcuguacuauguuaacaaacaggaggggcagucacuuuacgugaagggagagccaaucauuaacuuuuaugauccgcugguauuccccagugacgaauuugaugcuagcaucucccaagucaaugagaaaauuaaccagucuuuggccuucauaaggaagucggacgaacuccugcacaaugugaacgcgggcaagagcacaaccaauaucaugauuacuaccaucaucauuguuauaaucgugauuuuacugucccuaaucgccgucggccuccugcuuuacugcaaagcacggugaggacuaguguccaccugucccuccugggcugcuggauugucucguuuuccugccaaauaaacaggaucagcgcuuuacagaucuaaaaaaaaaaaaaaaaaaaaaaaaaaaaaaaaaaaaaaaaaaaaaaaaaaaaaaaaaaaaaaaaugcaucccccccccccccccccccccccccccccccaaaggcucuuuucagagccaccagaauu

SEQ ID NO: 6614 - RNA, 1856 nt, Artificial Sequence
  mRNA product Design e-2 comprising derived and/or modified sequence from HRSV(A2)__F-del_DSCav1_mut6 (opt4)
gggagacccgugacccggaaguuguacggcuacgcgacuuucccucccacaaacccucgcgcccuuccuuuccuacuugggcccggcagaaagcuuaccauggagcugcugauccugaaggccaacgccaucaccaccauccugaccgccgugaccuucugcuucgccagcggccagaacaucaccgaggaguucuaccagagcaccugcagcgccgugagcaagggcuaccugggcgcccugagaaccggcugguacaccagcgugaucaccaucgagcugagcaacaucaaggagaacaagugcaacggcaccgacgccaaggugaagcugaucaagcaggagcuggacaaguacaagaacgccgugaccgaccugcagaugcugaugugcagcacccccgccaccggcagcggcagcgccaucgccagcggcguggccgugugcaaggugcugcaccuggagggcgaggugaacaagaucaagagcgcccugcugagcaccaacaaggccguggugagccugagcaacggcgugagcgugcugaccuucaaggugcuggaccugaagaacuacaucgacaagcagcugcugcccauccugaacaagcagagcugcagcauccccaaccccgagaccgugauggaguuccagcagaagaacaacagacugcuggagaucaccagagaguucagcgugaacgccggcgugaccacccccgugagcaccuacaugcugaccaacagcgagcugcugagccugaucaacgacaugcccaucaccaacgaccagaagaagcugaugagcaacaacgugcagaucgugagacagcagagcuacagcaucaugugcaucaucaaggaggaggugcuggccuacguggugcagcugccccuguacggcgugaucgacacccccugcuggaagcugcacaccagcccccugugcaccaccaacaccaaggagggcagcaacaucugccugaccagaaccgacagaggcugguacugcgacaacgccggcagcgugagcuucuucccccaggccgagaccugcaaggugugcagcaacagaguguucugcgacaccaugaacagccugacccugcccagcgaggugaaccugugcaacguggacaucuucaaccccaaguacgacugcaagaucaugaccagcaagaccgacgugagcagcagcgugaucaccagccugggcgccaucgugagcugcuacggcaagaccaagugcaccgccagcaacaagaacaagggcaucaucaagaccuucagcaacggcugcgacuacgugagcaacaagggcguggacaccgugagcgugggcaacacccuguacuacgugaacaagcaggagggccagagccuguacgugaagggcgagcccaucaucaacuucuacgacccccugguguuccccagcgacgaguucgacgccagcaucagccaggugaacgagaagaucaaccagagccuggccuucaucagaaagagcgacgagcugcugcacaacgugaacgccggcaagagcaccaccaacaucaugaucaccaccaucaucaucgugaucaucgugauccugcugagccugaucgccgugggccugcugcuguacugcaaggccagaugaggacuaguguccaccugucccuccugggcugcuggauugucucguuuuccugccaaauaaacaggaucagcgcuuuacagaucuaaaaaaaaaaaaaaaaaaaaaaaaaaaaaaaaaaaaaaaaaaaaaaaaaaaaaaaaaaaaaaaaugcaucccccccccccccccccccccccccccccccaaaggcucuuuucagagccaccagaauu

SEQ ID NO: 6615 - RNA, 1856 nt, Artificial Sequence
  mRNA product Design e-2 comprising derived and/or modified sequence from HRSV(A2)__F-del_DSCav1_mut6 (opt5)
gggagacccgugacccggaaguuguacggcuacgcgacuuucccucccacaaacccucgcgcccuuccuuuccuacuugggcccggcagaaagcuuaccauggagcugcucauccugaaggccaacgcuauuaccacaauccuuacggccgugaccuucugcuuugcgagcggccagaauauuacagaagaguucuaccaauccaccuguucugcugucagcaaaggguaucugggagcccucagaacaggcugguacaccuccguuaucacaauugaacugucuaacaucaaggagaauaaaugcaacgggaccgacgccaaggugaaacuuaucaagcaggaacuggauaaguauaaaaaugcugugacggaccuccagaugcugauguguagcacccccgccacaggauccggcucugcuauugccagcggggucgcggugugcaagguucugcaccucgagggagaggugaacaaaaucaaguccgcccugcuuagcaccaauaaagcugucgugucucuguccaacggcguuagcgugcucacauuuaagguccuggaucuuaagaauuacauugacaaacagcugcucccuauccugaacaagcaaucuuguuccauuccgaaucccgaaaccgugauggaguuccagcagaaaaacaaucggcugcucgaaaucacgcgcgaguuuagcgugaacgccggcgucacaaccccuguuucuacauauaugcugaccaauuccgagcuucugagccucauuaacgauaugcccaucaccaacgaccagaagaaacugauguccaauaacgugcaaaucgugagacagcagucuuacagcauuaugugcaucauuaaggaagagguccuugcuuaugugguucagcugccucucuacggggugaucgauacacccuguuggaaacugcauacguccccucugugcaccacaaauaccaaggaaggaagcaacauuugucucacacggaccgaccgcggcugguacugcgauaaugccgggucugucuccuucuuuccgcaagcggagacguguaaggugugcagcaacagaguuuucugcgacacaaugaacucucugacccuucccagcgaagugaaucuguguaaugucgauaucuuuaacccuaaauaugacugcaagaucaugaccuccaaaacagaugugucuagcuccgucauuaccagccucggagccaucgugucuuguuacggcaagacaaaaugcacggcuuccaauaagaacaaggggauuaucaaaaccuucagcaauggaugugacuauguuucuaacaagggcguggacacagucuccgugggcaauacccuguacuauguuaacaaacaggaggggcagagccuuuacgugaagggagagcccauuaucaacuuuuaugauccucuggucuuccccuccgacgaauuugaugccucuaucagccaagugaaugagaaaauuaaccagucccucgcuuucauccggaagucugacgaacugcugcacaaugugaacgccggcaagagcacaaccaauauuaugaucacgaccauuaucauuguuaucaucgucauucuccugucccuuaucgccguggggcugcuccuguacugcaaagcucgcugaggacuaguguccaccugucccuccugggcugcuggauugucucguuuuccugccaaauaaacaggaucagcgcuuuacagaucuaaaaaaaaaaaaaaaaaaaaaaaaaaaaaaaaaaaaaaaaaaaaaaaaaaaaaaaaaaaaaaaaugcaucccccccccccccccccccccccccccccccaaaggcucuuuucagagccaccagaauu

SEQ ID NO: 6616 - RNA, 1856 nt, Artificial Sequence
  mRNA product Design e-2 comprising derived and/or modified sequence from HRSV(A2)__F-del_DSCav1_mut6 (opt6)
gggagacccgugacccggaaguuguacggcuacgcgacuuucccucccacaaacccucgcgcccuuccuuuccuacuugggcccggcagaaagcuuaccauggaacuacucauauuaaaagcaaacgcaauaacaacgauauuaacagcuguaacauucugcuuugcaucaggccaaaauaucaccgaagaauuuuaucaaagcacaugcucugcaguauccaaaggauacuuaggagcauuaagaacaggcugguacacauccguaauaacaauagaacuaucaaacaucaaagaaaacaaaugcaacggcacagacgccaaaguaaaacucauaaaacaagaacuagacaaauauaaaaacgcaguaacagaucuacaaaugcucaugugcuccacaccagcaaccggaucugguucagccauagcauccggcguagccgucugcaaaguauuacaccucgaaggagaaguaaacaaaauaaaaucugcccuauuaucuacaaauaaagccguaguaagucuaaguaacggaguaucaguacuaacauuuaaaguccuagaccugaaaaacuauaucgacaaacaacuauuaccaauacuaaacaaacaauccuguuccaucccuaacccagaaacaguuauggaauuucaacaaaaaaauaaccgccuuuuagaaauaacuagagaauuuucaguaaacgcaggaguuacaacaccaguaucaacauacaugcuaacaaauucagaauuauuaucccuuauaaaugacaugccuaucacaaacgaucaaaaaaaauuaauguccaacaacguacaaauaguaagacaacaaucauauuccaucaugugcaucauaaaagaagaaguccucgcauacguagugcaacuaccacuauacggagucauagauacacccuguuggaaacuucacacaucuccacuaugcacaacaaacacgaaagaaggauccaacauaugccuaacacgaacagacagaggaugguauugcgacaacgcuggaagugugagcuucuucccucaagcagaaacuugcaaaguaugcagcaaucguguauucugcgacacaaugaacucauuaacacucccaagcgaaguaaaccucugcaauguagacaucuuuaauccaaaauacgauuguaaaauaaugacuucaaaaacagacgucucaucaucuguaauaacaucuuuaggagcaauaguuucuugcuacgguaaaacaaaaugcaccgcauccaacaaaaacaaaggaauaauaaaaacauucucuaacggcugcgauuacguaucuaacaaaggaguugacacagucucaguaggaaacacacuauacuacguaaacaaacaagaaggacaaagccuauacguaaaaggagaaccaauaauaaacuucuaugacccauuaguauuuccaagcgaugaauuugacgcuucaauaucacaagucaaugaaaaaauaaaucagagcuuagcauucauaagaaaaucugaugaacuacuacacaauguaaaugcaggaaaauccacuaccaacauaaugauuaccacaauuauaauaguuaucauaguaauacuauuaucacuaauagccguuggauuacuacuauacugcaaagcaagauaaggacuaguguccaccugucccuccugggcugcuggauugucucguuuuccugccaaauaaacaggaucagcgcuuuacagaucuaaaaaaaaaaaaaaaaaaaaaaaaaaaaaaaaaaaaaaaaaaaaaaaaaaaaaaaaaaaaaaaaugcaucccccccccccccccccccccccccccccccaaaggcucuuuucagagccaccagaauu

SEQ ID NO: 6617 - RNA, 1856 nt, Artificial Sequence
  mRNA product Design e-2 comprising derived and/or modified sequence from HRSV(A2)__F-del_DSCav1_mut6 (opt11)
gggagacccgugacccggaaguuguacggcuacgcgacuuucccucccacaaacccucgcgcccuuccuuuccuacuugggcccggcagaaagcuuaccauggaacuacucauccuaaaagcaaacgccaucaccaccauacuaaccgccgucaccuucugcuucgccucgggacaaaacaucaccgaagaguucuaccagucaacgugcuccgccgucucaaaaggcuaccuaggcgcccuccgcaccgggugguauaccuccgucauaacuaucgaacucucuaacaucaaagaaaacaaauguaacggcaccgacgccaaagucaaacuaaucaaacaagaacuggacaaauacaaaaacgccgucaccgaccuacaaaugcucaugugcuccacuccagccaccggcuccgguagcgcaaucgccucaggcguagcuguaugcaaaguccuccaccuagaaggcgaaguaaacaaaauaaaauccgcccuccucucaaccaacaaggccgucgucucacucucaaacggcgucuccguacucaccuuuaaaguccuagaccuuaaaaacuacaucgacaaacaacugcuaccaauccucaacaaacaaucaugcagcaucccaaacccggaaacagucauggaguuccaacagaaaaacaaccgacuccucgaaaucacccgcgaguucuccgucaacgccggagucaccacaccuguaagcacauacaugcuuacuaauuccgaacuccuuucacuaauaaacgacaugccaauaaccaacgaccaaaagaaacucauguccaacaacguacaaaucguacgccaacaauccuacuccaucaugugcaucaucaaagaagaaguccuggccuaugucguacaacucccccuuuacggugucaucgacacacccugcuggaaacuacacaccagcccccucugcacaacaaacaccaaagaaggcuccaacaucugccucacccguaccgaccgaggcugguacugcgacaacgccggcuccgucuccuucuucccccaagccgaaaccugcaaagucugcagcaaccgcgucuucugcgauaccaugaacucccucacacucccaucugaagucaaccucugcaacgucgauauuuucaauccaaaauacgacugcaaaaucaugacuagcaaaaccgacguuagcuccuccgucaucaccucccucggcgccauaguuucaugcuacggcaaaaccaaaugcaccgccuccaacaaaaacaaaggcaucauaaaaaccuucuccaacgggugcgacuacguaucuaauaaaggagucgacaccgucucaguaggaaacacccucuacuaugucaacaaacaagaaggccaaucacuauacguuaaaggcgaaccaaucaucaacuucuacgacccacucgucuuccccagcgacgaguuugacgccucaaucucgcaagucaaugaaaagauuaaccaaucccuagccuucauccgaaaaagugacgaacuccuccacaacguuaacgccggcaaaucuacaaccaacaucaugaucaccacuauaaucaucgucaucauagucauacuucucagccucaucgcagucggacuccuccuuuauugcaaggcacgauaaggacuaguguccaccugucccuccugggcugcuggauugucucguuuuccugccaaauaaacaggaucagcgcuuuacagaucuaaaaaaaaaaaaaaaaaaaaaaaaaaaaaaaaaaaaaaaaaaaaaaaaaaaaaaaaaaaaaaaaugcaucccccccccccccccccccccccccccccccaaaggcucuuuucagagccaccagaauu

SEQ ID NO: 6618 - RNA, 1826 nt, Artificial Sequence
  mRNA product Design e-3 comprising derived and/or modified sequence from HRSV(A2)__F-del_DSCav1_mut6 (opt1)
gggagacuuucccauucuguagcagaauuugguguugccuguggucuuggucccgcggagaagcuuaccauggagcugcucauccugaaggccaacgccaucaccaccauccugacggcggugaccuucugcuucgccagcggccagaacaucaccgaggaguucuaccaguccacgugcagcgccgucuccaagggguaccucggcgcccugcggaccggcugguacaccuccgugaucaccaucgagcugagcaacaucaaggagaacaagugcaacgggaccgacgccaaggugaagcucaucaagcaggagcuggacaaguacaagaacgcggucacggaccugcagaugcugaugugcuccaccccggcaaccggcuccggcuccgccaucgcgagcggcgucgccgugugcaaggugcugcaccucgagggggaggucaacaagaucaagagcgcccugcuguccaccaacaaggccguggugagccucuccaacggcgucagcgugcugaccuucaaggugcuggaccucaagaacuacaucgacaagcagcugcugcccauccugaacaagcagagcugcuccauccccaaccccgagacggugauggaguuccagcagaagaacaaccggcuccuggagaucacccgcgaguucagcgugaacgccggggucaccacccccguguccacguacaugcugaccaacagcgagcuccugucccugaucaacgacaugccgaucaccaacgaccagaagaagcucaugagcaacaacgugcagaucguccggcagcaguccuacagcaucaugugcaucaucaaggaggaggugcuggcguacgugguccagcugccccucuacggcgugaucgacacccccugcuggaagcugcacacgagcccccugugcaccaccaacaccaaggagggguccaacaucugccucacgcgcaccgaccggggcugguacugcgacaacgccggcagcgucuccuucuucccgcaggccgagaccugcaaggugugcagcaaccgcguguucugcgacaccaugaacucccugacgcugcccagcgagguaaaccucugcaacgucgacaucuucaaccccaaguacgacugcaagaucaugaccuccaagaccgacgugagcuccagcgugaucaccucccugggggccaucgucagcugcuacggcaagacgaagugcaccgccagcaacaagaacaaggggaucaucaagaccuucuccaacggcugcgacuacgugagcaacaagggcguggacaccguguccgucgggaacacccuguacuacgugaacaagcaggagggccagagccucuacgugaagggggagcccaucaucaacuucuacgacccgcuggucuuccccuccgacgaguucgacgcgagcaucucccaggugaacgagaagaucaaccagagccuggccuucauccgcaaguccgacgagcugcuccacaacgugaacgccggcaagagcacgaccaacaucaugaucaccaccaucaucaucgucaucaucgugauccugcugucccucaucgccguggggcugcugcucuacugcaaggcccggugaggacuaguguccaccugucccuccugggcugcuggauugucucguuuuccugccaaauaaacaggaucagcgcuuuacagaucuaaaaaaaaaaaaaaaaaaaaaaaaaaaaaaaaaaaaaaaaaaaaaaaaaaaaaaaaaaaaaaaaugcaucccccccccccccccccccccccccccccccaaaggcucuuuucagagccaccagaauu

SEQ ID NO: 6619 - RNA, 1826 nt, Artificial Sequence
  mRNA product Design e-3 comprising derived and/or modified sequence from HRSV(A2)__F-del_DSCav1_mut6 (opt1)
gggagacuuucccauucuguagcagaauuugguguugccuguggucuuggucccgcggagaagcuuaccauggagcugcucauccugaaggccaacgccaucaccaccauccugacggcggugaccuucugcuucgccagcggccagaacaucaccgaggaguucuaccaguccacgugcagcgccgucuccaagggguaccucggcgcccugcgcaccgggugguacaccagcgugaucaccaucgagcuguccaacaucaaggagaacaagugcaacggcaccgacgccaaggugaagcucaucaagcaggagcuggacaaguacaagaacgcggucacggaccugcagaugcucaugugcagcacccccgccaccggguccggcagcgccaucgccuccggcguggcggugugcaagguccugcaccuggagggggaggugaacaagaucaagagcgcccuccuguccaccaacaaggccguggucagccuguccaacggcgugagcgugcucacguucaagguccuggaccugaagaacuacaucgacaagcagcuccugccgauccugaacaagcaguccugcagcauccccaaccccgagaccgugauggaguuccagcagaagaacaaccggcuccuggagaucacccgcgaguucuccgugaacgccggggucaccacgcccgugagcaccuacaugcugaccaacuccgagcuccugagccugaucaacgacaugccgaucaccaacgaccagaagaagcucaugagcaacaacgugcagaucguccggcagcaguccuacagcaucaugugcaucaucaaggaggaggugcuggccuacgugguccagcugccccucuacggcgugaucgacacgcccugcuggaagcugcacaccagcccccugugcaccaccaacacgaaggaggggagcaacaucugccucacccgcaccgaccggggcugguacugcgacaacgcgggcuccgugagcuucuucccgcaggccgagaccugcaaggucugcuccaaccgcguguucugcgacacgaugaacagccugacccugcccuccgaggucaaccucugcaacguggacaucuucaaccccaaguacgacugcaagaucaugaccagcaagaccgacguguccagcuccgucaucacgagccugggggccaucguguccugcuacggcaagaccaagugcaccgccagcaacaagaacaaggggaucaucaagaccuucuccaacggcugcgacuacgugagcaacaagggcgucgacacgguguccguggggaacacccuguacuacgucaacaagcaggagggccagagccucuacgugaagggggagcccaucaucaacuucuacgacccgcugguguuccccagcgacgaguucgacgccuccaucagccaggucaacgagaagaucaaccagucccuggcguucauccggaaguccgacgagcuccugcacaacgugaacgccggcaaguccaccaccaacaucaugaucaccacgaucaucaucgugaucaucgucauccugcucagccugaucgccguggggcugcuccuguacugcaaggcccgcugaggacuaguguccaccugucccuccugggcugcuggauugucucguuuuccugccaaauaaacaggaucagcgcuuuacagaucuaaaaaaaaaaaaaaaaaaaaaaaaaaaaaaaaaaaaaaaaaaaaaaaaaaaaaaaaaaaaaaaaugcaucccccccccccccccccccccccccccccccaaaggcucuuuucagagccaccagaauu

SEQ ID NO: 6620 - RNA, 1826 nt, Artificial Sequence
  mRNA product Design e-3 comprising derived and/or modified sequence from HRSV(A2)__F-del_DSCav1_mut6 (opt2)
gggagacuuucccauucuguagcagaauuugguguugccuguggucuuggucccgcggagaagcuuaccauggagcuccucauccucaaggccaacgccaucaccaccauccucaccgccgucaccuucugcuucgccuccggccagaacaucaccgaggaguucuaccaguccaccugcuccgccgucuccaagggcuaccucggcgcccuccgcaccggcugguacaccuccgucaucaccaucgagcucuccaacaucaaggagaacaagugcaacggcaccgacgccaaggucaagcucaucaagcaggagcucgacaaguacaagaacgccgucaccgaccuccagaugcucaugugcuccacccccgccaccggcuccggcuccgccaucgccuccggcgucgccgucugcaagguccuccaccucgagggcgaggucaacaagaucaaguccgcccuccucuccaccaacaaggccgucgucucccucuccaacggcgucuccguccucaccuucaagguccucgaccucaagaacuacaucgacaagcagcuccuccccauccucaacaagcaguccugcuccauccccaaccccgagaccgucauggaguuccagcagaagaacaaccgccuccucgagaucacccgcgaguucuccgucaacgccggcgucaccacccccgucuccaccuacaugcucaccaacuccgagcuccucucccucaucaacgacaugcccaucaccaacgaccagaagaagcucauguccaacaacguccagaucguccgccagcaguccuacuccaucaugugcaucaucaaggaggagguccucgccuacgucguccagcucccccucuacggcgucaucgacacccccugcuggaagcuccacaccuccccccucugcaccaccaacaccaaggagggcuccaacaucugccucacccgcaccgaccgcggcugguacugcgacaacgccggcuccgucuccuucuucccccaggccgagaccugcaaggucugcuccaaccgcgucuucugcgacaccaugaacucccucacccuccccuccgaggucaaccucugcaacgucgacaucuucaaccccaaguacgacugcaagaucaugaccuccaagaccgacgucuccuccuccgucaucaccucccucggcgccaucgucuccugcuacggcaagaccaagugcaccgccuccaacaagaacaagggcaucaucaagaccuucuccaacggcugcgacuacgucuccaacaagggcgucgacaccgucuccgucggcaacacccucuacuacgucaacaagcaggagggccagucccucuacgucaagggcgagcccaucaucaacuucuacgacccccucgucuuccccuccgacgaguucgacgccuccaucucccaggucaacgagaagaucaaccagucccucgccuucauccgcaaguccgacgagcuccuccacaacgucaacgccggcaaguccaccaccaacaucaugaucaccaccaucaucaucgucaucaucgucauccuccucucccucaucgccgucggccuccuccucuacugcaaggcccgcugaggacuaguguccaccugucccuccugggcugcuggauugucucguuuuccugccaaauaaacaggaucagcgcuuuacagaucuaaaaaaaaaaaaaaaaaaaaaaaaaaaaaaaaaaaaaaaaaaaaaaaaaaaaaaaaaaaaaaaaugcaucccccccccccccccccccccccccccccccaaaggcucuuuucagagccaccagaauu

SEQ ID NO: 6621 - RNA, 1826 nt, Artificial Sequence
  mRNA product Design e-3 comprising derived and/or modified sequence from HRSV(A2)__F-del_DSCav1_mut6 (opt3)
gggagacuuucccauucuguagcagaauuugguguugccuguggucuuggucccgcggagaagcuuaccauggagcugcucauccuuaaggccaacgcuauuaccacaauacugacugcagugacguucugcuuugccagcggccagaauaucaccgaagaguucuaccaauccacauguucugcggucucaaaaggguauuugggagcuuuaagaacugguugguacaccaguguuauuacaaucgaacugagcaacauuaaggagaauaaaugcaacggcaccgacgccaaggugaaacuaaucaagcaggaacucgauaaguauaaaaaugcaguaacugaccugcagaugcuuauguguuccacacccgccaccgggucuggaucggcuauagcaucaggcguggccgucugcaaggugcugcacuuggagggugagguuaacaaaaucaagagcgcucuccugaguacgaauaaagccguggucucccugucuaacggggugagcguacucacuuuuaagguuuuagaucugaagaauuacauugacaaacagcuuuugccuauccugaacaagcaauccuguucaauuccaaauccggaaaccgugauggaguuccagcagaaaaacaauaggcuacucgaaaucacacgggaguuuagugucaacgcgggagugacuacccccgugagcacauauaugcugaccaauucugagcuucuguccuugauaaacgauaugccuauuacgaacgaccagaagaaacucaugucaaauaacguccaaaucguucgccagcagagcuacaguauuaugugcaucaucaaggaagaggugcuggcauauguagugcaguuaccacuguacggcgucauugauacucccuguuggaaacuccauacaucuccucuuugcaccacuaauacaaaggaaggcuccaacauaugucugacccgaacggaccgugggugguacugcgauaaugccggaagcgugucguucuuuccacaagcugagaccuguaagguuugcucuaacagaguguucugcgacacaaugaacuccuugacucuacccucagaagucaaucuguguaauguggauaucuuuaacccuaaauaugacugcaagauuaugaccaguaaaacagauguaagcuccucuguuaucacuagccucggugccauagugucauguuacggcaagaccaaaugcacagcaaguaauaagaacaaggggauuaucaaaaccuucuccaauggaugugacuaugucagcaacaagggcguggacacugucucuguggguaauacgcuguacuauguuaacaaacaggaggggcagucacuuuacgugaagggagagccaaucauuaacuuuuaugauccgcugguauuccccagugacgaauuugaugcuagcaucucccaagucaaugagaaaauuaaccagucuuuggccuucauaaggaagucggacgaacuccugcacaaugugaacgcgggcaagagcacaaccaauaucaugauuacuaccaucaucauuguuauaaucgugauuuuacugucccuaaucgccgucggccuccugcuuuacugcaaagcacggugaggacuaguguccaccugucccuccugggcugcuggauugucucguuuuccugccaaauaaacaggaucagcgcuuuacagaucuaaaaaaaaaaaaaaaaaaaaaaaaaaaaaaaaaaaaaaaaaaaaaaaaaaaaaaaaaaaaaaaaugcaucccccccccccccccccccccccccccccccaaaggcucuuuucagagccaccagaauu

SEQ ID NO: 6622 - RNA, 1826 nt, Artificial Sequence
  mRNA product Design e-3 comprising derived and/or modified sequence from HRSV(A2)__F-del_DSCav1_mut6 (opt4)
gggagacuuucccauucuguagcagaauuugguguugccuguggucuuggucccgcggagaagcuuaccauggagcugcugauccugaaggccaacgccaucaccaccauccugaccgccgugaccuucugcuucgccagcggccagaacaucaccgaggaguucuaccagagcaccugcagcgccgugagcaagggcuaccugggcgcccugagaaccggcugguacaccagcgugaucaccaucgagcugagcaacaucaaggagaacaagugcaacggcaccgacgccaaggugaagcugaucaagcaggagcuggacaaguacaagaacgccgugaccgaccugcagaugcugaugugcagcacccccgccaccggcagcggcagcgccaucgccagcggcguggccgugugcaaggugcugcaccuggagggcgaggugaacaagaucaagagcgcccugcugagcaccaacaaggccguggugagccugagcaacggcgugagcgugcugaccuucaaggugcuggaccugaagaacuacaucgacaagcagcugcugcccauccugaacaagcagagcugcagcauccccaaccccgagaccgugauggaguuccagcagaagaacaacagacugcuggagaucaccagagaguucagcgugaacgccggcgugaccacccccgugagcaccuacaugcugaccaacagcgagcugcugagccugaucaacgacaugcccaucaccaacgaccagaagaagcugaugagcaacaacgugcagaucgugagacagcagagcuacagcaucaugugcaucaucaaggaggaggugcuggccuacguggugcagcugccccuguacggcgugaucgacacccccugcuggaagcugcacaccagcccccugugcaccaccaacaccaaggagggcagcaacaucugccugaccagaaccgacagaggcugguacugcgacaacgccggcagcgugagcuucuucccccaggccgagaccugcaaggugugcagcaacagaguguucugcgacaccaugaacagccugacccugcccagcgaggugaaccugugcaacguggacaucuucaaccccaaguacgacugcaagaucaugaccagcaagaccgacgugagcagcagcgugaucaccagccugggcgccaucgugagcugcuacggcaagaccaagugcaccgccagcaacaagaacaagggcaucaucaagaccuucagcaacggcugcgacuacgugagcaacaagggcguggacaccgugagcgugggcaacacccuguacuacgugaacaagcaggagggccagagccuguacgugaagggcgagcccaucaucaacuucuacgacccccugguguuccccagcgacgaguucgacgccagcaucagccaggugaacgagaagaucaaccagagccuggccuucaucagaaagagcgacgagcugcugcacaacgugaacgccggcaagagcaccaccaacaucaugaucaccaccaucaucaucgugaucaucgugauccugcugagccugaucgccgugggccugcugcuguacugcaaggccagaugaggacuaguguccaccugucccuccugggcugcuggauugucucguuuuccugccaaauaaacaggaucagcgcuuuacagaucuaaaaaaaaaaaaaaaaaaaaaaaaaaaaaaaaaaaaaaaaaaaaaaaaaaaaaaaaaaaaaaaaugcaucccccccccccccccccccccccccccccccaaaggcucuuuucagagccaccagaauu

SEQ ID NO: 6623 - RNA, 1826 nt, Artificial Sequence
  mRNA product Design e-3 comprising derived and/or modified sequence from HRSV(A2)__F-del_DSCav1_mut6 (opt5)
gggagacuuucccauucuguagcagaauuugguguugccuguggucuuggucccgcggagaagcuuaccauggagcugcucauccugaaggccaacgcuauuaccacaauccuuacggccgugaccuucugcuuugcgagcggccagaauauuacagaagaguucuaccaauccaccuguucugcugucagcaaaggguaucugggagcccucagaacaggcugguacaccuccguuaucacaauugaacugucuaacaucaaggagaauaaaugcaacgggaccgacgccaaggugaaacuuaucaagcaggaacuggauaaguauaaaaaugcugugacggaccuccagaugcugauguguagcacccccgccacaggauccggcucugcuauugccagcggggucgcggugugcaagguucugcaccucgagggagaggugaacaaaaucaaguccgcccugcuuagcaccaauaaagcugucgugucucuguccaacggcguuagcgugcucacauuuaagguccuggaucuuaagaauuacauugacaaacagcugcucccuauccugaacaagcaaucuuguuccauuccgaaucccgaaaccgugauggaguuccagcagaaaaacaaucggcugcucgaaaucacgcgcgaguuuagcgugaacgccggcgucacaaccccuguuucuacauauaugcugaccaauuccgagcuucugagccucauuaacgauaugcccaucaccaacgaccagaagaaacugauguccaauaacgugcaaaucgugagacagcagucuuacagcauuaugugcaucauuaaggaagagguccuugcuuaugugguucagcugccucucuacggggugaucgauacacccuguuggaaacugcauacguccccucugugcaccacaaauaccaaggaaggaagcaacauuugucucacacggaccgaccgcggcugguacugcgauaaugccgggucugucuccuucuuuccgcaagcggagacguguaaggugugcagcaacagaguuuucugcgacacaaugaacucucugacccuucccagcgaagugaaucuguguaaugucgauaucuuuaacccuaaauaugacugcaagaucaugaccuccaaaacagaugugucuagcuccgucauuaccagccucggagccaucgugucuuguuacggcaagacaaaaugcacggcuuccaauaagaacaaggggauuaucaaaaccuucagcaauggaugugacuauguuucuaacaagggcguggacacagucuccgugggcaauacccuguacuauguuaacaaacaggaggggcagagccuuuacgugaagggagagcccauuaucaacuuuuaugauccucuggucuuccccuccgacgaauuugaugccucuaucagccaagugaaugagaaaauuaaccagucccucgcuuucauccggaagucugacgaacugcugcacaaugugaacgccggcaagagcacaaccaauauuaugaucacgaccauuaucauuguuaucaucgucauucuccugucccuuaucgccguggggcugcuccuguacugcaaagcucgcugaggacuaguguccaccugucccuccugggcugcuggauugucucguuuuccugccaaauaaacaggaucagcgcuuuacagaucuaaaaaaaaaaaaaaaaaaaaaaaaaaaaaaaaaaaaaaaaaaaaaaaaaaaaaaaaaaaaaaaaugcaucccccccccccccccccccccccccccccccaaaggcucuuuucagagccaccagaauu

SEQ ID NO: 6624 - RNA, 1826 nt, Artificial Sequence
  mRNA product Design e-3 comprising derived and/or modified sequence from HRSV(A2)__F-del_DSCav1_mut6 (opt6)
gggagacuuucccauucuguagcagaauuugguguugccuguggucuuggucccgcggagaagcuuaccauggaacuacucauauuaaaagcaaacgcaauaacaacgauauuaacagcuguaacauucugcuuugcaucaggccaaaauaucaccgaagaauuuuaucaaagcacaugcucugcaguauccaaaggauacuuaggagcauuaagaacaggcugguacacauccguaauaacaauagaacuaucaaacaucaaagaaaacaaaugcaacggcacagacgccaaaguaaaacucauaaaacaagaacuagacaaauauaaaaacgcaguaacagaucuacaaaugcucaugugcuccacaccagcaaccggaucugguucagccauagcauccggcguagccgucugcaaaguauuacaccucgaaggagaaguaaacaaaauaaaaucugcccuauuaucuacaaauaaagccguaguaagucuaaguaacggaguaucaguacuaacauuuaaaguccuagaccugaaaaacuauaucgacaaacaacuauuaccaauacuaaacaaacaauccuguuccaucccuaacccagaaacaguuauggaauuucaacaaaaaaauaaccgccuuuuagaaauaacuagagaauuuucaguaaacgcaggaguuacaacaccaguaucaacauacaugcuaacaaauucagaauuauuaucccuuauaaaugacaugccuaucacaaacgaucaaaaaaaauuaauguccaacaacguacaaauaguaagacaacaaucauauuccaucaugugcaucauaaaagaagaaguccucgcauacguagugcaacuaccacuauacggagucauagauacacccuguuggaaacuucacacaucuccacuaugcacaacaaacacgaaagaaggauccaacauaugccuaacacgaacagacagaggaugguauugcgacaacgcuggaagugugagcuucuucccucaagcagaaacuugcaaaguaugcagcaaucguguauucugcgacacaaugaacucauuaacacucccaagcgaaguaaaccucugcaauguagacaucuuuaauccaaaauacgauuguaaaauaaugacuucaaaaacagacgucucaucaucuguaauaacaucuuuaggagcaauaguuucuugcuacgguaaaacaaaaugcaccgcauccaacaaaaacaaaggaauaauaaaaacauucucuaacggcugcgauuacguaucuaacaaaggaguugacacagucucaguaggaaacacacuauacuacguaaacaaacaagaaggacaaagccuauacguaaaaggagaaccaauaauaaacuucuaugacccauuaguauuuccaagcgaugaauuugacgcuucaauaucacaagucaaugaaaaaauaaaucagagcuuagcauucauaagaaaaucugaugaacuacuacacaauguaaaugcaggaaaauccacuaccaacauaaugauuaccacaauuauaauaguuaucauaguaauacuauuaucacuaauagccguuggauuacuacuauacugcaaagcaagauaaggacuaguguccaccugucccuccugggcugcuggauugucucguuuuccugccaaauaaacaggaucagcgcuuuacagaucuaaaaaaaaaaaaaaaaaaaaaaaaaaaaaaaaaaaaaaaaaaaaaaaaaaaaaaaaaaaaaaaaugcaucccccccccccccccccccccccccccccccaaaggcucuuuucagagccaccagaauu

SEQ ID NO: 6625 - RNA, 1826 nt, Artificial Sequence
  mRNA product Design e-3 comprising derived and/or modified sequence from HRSV(A2)__F-del_DSCav1_mut6 (opt11)
gggagacuuucccauucuguagcagaauuugguguugccuguggucuuggucccgcggagaagcuuaccauggaacuacucauccuaaaagcaaacgccaucaccaccauacuaaccgccgucaccuucugcuucgccucgggacaaaacaucaccgaagaguucuaccagucaacgugcuccgccgucucaaaaggcuaccuaggcgcccuccgcaccgggugguauaccuccgucauaacuaucgaacucucuaacaucaaagaaaacaaauguaacggcaccgacgccaaagucaaacuaaucaaacaagaacuggacaaauacaaaaacgccgucaccgaccuacaaaugcucaugugcuccacuccagccaccggcuccgguagcgcaaucgccucaggcguagcuguaugcaaaguccuccaccuagaaggcgaaguaaacaaaauaaaauccgcccuccucucaaccaacaaggccgucgucucacucucaaacggcgucuccguacucaccuuuaaaguccuagaccuuaaaaacuacaucgacaaacaacugcuaccaauccucaacaaacaaucaugcagcaucccaaacccggaaacagucauggaguuccaacagaaaaacaaccgacuccucgaaaucacccgcgaguucuccgucaacgccggagucaccacaccuguaagcacauacaugcuuacuaauuccgaacuccuuucacuaauaaacgacaugccaauaaccaacgaccaaaagaaacucauguccaacaacguacaaaucguacgccaacaauccuacuccaucaugugcaucaucaaagaagaaguccuggccuaugucguacaacucccccuuuacggugucaucgacacacccugcuggaaacuacacaccagcccccucugcacaacaaacaccaaagaaggcuccaacaucugccucacccguaccgaccgaggcugguacugcgacaacgccggcuccgucuccuucuucccccaagccgaaaccugcaaagucugcagcaaccgcgucuucugcgauaccaugaacucccucacacucccaucugaagucaaccucugcaacgucgauauuuucaauccaaaauacgacugcaaaaucaugacuagcaaaaccgacguuagcuccuccgucaucaccucccucggcgccauaguuucaugcuacggcaaaaccaaaugcaccgccuccaacaaaaacaaaggcaucauaaaaaccuucuccaacgggugcgacuacguaucuaauaaaggagucgacaccgucucaguaggaaacacccucuacuaugucaacaaacaagaaggccaaucacuauacguuaaaggcgaaccaaucaucaacuucuacgacccacucgucuuccccagcgacgaguuugacgccucaaucucgcaagucaaugaaaagauuaaccaaucccuagccuucauccgaaaaagugacgaacuccuccacaacguuaacgccggcaaaucuacaaccaacaucaugaucaccacuauaaucaucgucaucauagucauacuucucagccucaucgcagucggacuccuccuuuauugcaaggcacgauaaggacuaguguccaccugucccuccugggcugcuggauugucucguuuuccugccaaauaaacaggaucagcgcuuuacagaucuaaaaaaaaaaaaaaaaaaaaaaaaaaaaaaaaaaaaaaaaaaaaaaaaaaaaaaaaaaaaaaaaugcaucccccccccccccccccccccccccccccccaaaggcucuuuucagagccaccagaauu

SEQ ID NO: 6626 - RNA, 1880 nt, Artificial Sequence
  mRNA product Design e-4 comprising derived and/or modified sequence from HRSV(A2)__F-del_DSCav1_mut6 (opt1)
gggagacuccugucgggcggaaguaggaggaguagaguuuaaaaacaguacucuuuuuccgguucgggacguaguugaagcaacgacaagccggauaaccgcucuugagacaggaagcuuaccauggagcugcucauccugaaggccaacgccaucaccaccauccugacggcggugaccuucugcuucgccagcggccagaacaucaccgaggaguucuaccaguccacgugcagcgccgucuccaagggguaccucggcgcccugcggaccggcugguacaccuccgugaucaccaucgagcugagcaacaucaaggagaacaagugcaacgggaccgacgccaaggugaagcucaucaagcaggagcuggacaaguacaagaacgcggucacggaccugcagaugcugaugugcuccaccccggcaaccggcuccggcuccgccaucgcgagcggcgucgccgugugcaaggugcugcaccucgagggggaggucaacaagaucaagagcgcccugcuguccaccaacaaggccguggugagccucuccaacggcgucagcgugcugaccuucaaggugcuggaccucaagaacuacaucgacaagcagcugcugcccauccugaacaagcagagcugcuccauccccaaccccgagacggugauggaguuccagcagaagaacaaccggcuccuggagaucacccgcgaguucagcgugaacgccggggucaccacccccguguccacguacaugcugaccaacagcgagcuccugucccugaucaacgacaugccgaucaccaacgaccagaagaagcucaugagcaacaacgugcagaucguccggcagcaguccuacagcaucaugugcaucaucaaggaggaggugcuggcguacgugguccagcugccccucuacggcgugaucgacacccccugcuggaagcugcacacgagcccccugugcaccaccaacaccaaggagggguccaacaucugccucacgcgcaccgaccggggcugguacugcgacaacgccggcagcgucuccuucuucccgcaggccgagaccugcaaggugugcagcaaccgcguguucugcgacaccaugaacucccugacgcugcccagcgagguaaaccucugcaacgucgacaucuucaaccccaaguacgacugcaagaucaugaccuccaagaccgacgugagcuccagcgugaucaccucccugggggccaucgucagcugcuacggcaagacgaagugcaccgccagcaacaagaacaaggggaucaucaagaccuucuccaacggcugcgacuacgugagcaacaagggcguggacaccguguccgucgggaacacccuguacuacgugaacaagcaggagggccagagccucuacgugaagggggagcccaucaucaacuucuacgacccgcuggucuuccccuccgacgaguucgacgcgagcaucucccaggugaacgagaagaucaaccagagccuggccuucauccgcaaguccgacgagcugcuccacaacgugaacgccggcaagagcacgaccaacaucaugaucaccaccaucaucaucgucaucaucgugauccugcugucccucaucgccguggggcugcugcucuacugcaaggcccggugaggacuaguguccaccugucccuccugggcugcuggauugucucguuuuccugccaaauaaacaggaucagcgcuuuacagaucuaaaaaaaaaaaaaaaaaaaaaaaaaaaaaaaaaaaaaaaaaaaaaaaaaaaaaaaaaaaaaaaaugcaucccccccccccccccccccccccccccccccaaaggcucuuuucagagccaccagaauu

SEQ ID NO: 6627 - RNA, 1880 nt, Artificial Sequence
  mRNA product Design e-4 comprising derived and/or modified sequence from HRSV(A2)__F-del_DSCav1_mut6 (opt1)
gggagacuccugucgggcggaaguaggaggaguagaguuuaaaaacaguacucuuuuuccgguucgggacguaguugaagcaacgacaagccggauaaccgcucuugagacaggaagcuuaccauggagcugcucauccugaaggccaacgccaucaccaccauccugacggcggugaccuucugcuucgccagcggccagaacaucaccgaggaguucuaccaguccacgugcagcgccgucuccaagggguaccucggcgcccugcgcaccgggugguacaccagcgugaucaccaucgagcuguccaacaucaaggagaacaagugcaacggcaccgacgccaaggugaagcucaucaagcaggagcuggacaaguacaagaacgcggucacggaccugcagaugcucaugugcagcacccccgccaccggguccggcagcgccaucgccuccggcguggcggugugcaagguccugcaccuggagggggaggugaacaagaucaagagcgcccuccuguccaccaacaaggccguggucagccuguccaacggcgugagcgugcucacguucaagguccuggaccugaagaacuacaucgacaagcagcuccugccgauccugaacaagcaguccugcagcauccccaaccccgagaccgugauggaguuccagcagaagaacaaccggcuccuggagaucacccgcgaguucuccgugaacgccggggucaccacgcccgugagcaccuacaugcugaccaacuccgagcuccugagccugaucaacgacaugccgaucaccaacgaccagaagaagcucaugagcaacaacgugcagaucguccggcagcaguccuacagcaucaugugcaucaucaaggaggaggugcuggccuacgugguccagcugccccucuacggcgugaucgacacgcccugcuggaagcugcacaccagcccccugugcaccaccaacacgaaggaggggagcaacaucugccucacccgcaccgaccggggcugguacugcgacaacgcgggcuccgugagcuucuucccgcaggccgagaccugcaaggucugcuccaaccgcguguucugcgacacgaugaacagccugacccugcccuccgaggucaaccucugcaacguggacaucuucaaccccaaguacgacugcaagaucaugaccagcaagaccgacguguccagcuccgucaucacgagccugggggccaucguguccugcuacggcaagaccaagugcaccgccagcaacaagaacaaggggaucaucaagaccuucuccaacggcugcgacuacgugagcaacaagggcgucgacacgguguccguggggaacacccuguacuacgucaacaagcaggagggccagagccucuacgugaagggggagcccaucaucaacuucuacgacccgcugguguuccccagcgacgaguucgacgccuccaucagccaggucaacgagaagaucaaccagucccuggcguucauccggaaguccgacgagcuccugcacaacgugaacgccggcaaguccaccaccaacaucaugaucaccacgaucaucaucgugaucaucgucauccugcucagccugaucgccguggggcugcuccuguacugcaaggcccgcugaggacuaguguccaccugucccuccugggcugcuggauugucucguuuuccugccaaauaaacaggaucagcgcuuuacagaucuaaaaaaaaaaaaaaaaaaaaaaaaaaaaaaaaaaaaaaaaaaaaaaaaaaaaaaaaaaaaaaaaugcaucccccccccccccccccccccccccccccccaaaggcucuuuucagagccaccagaauu

SEQ ID NO: 6628 - RNA, 1880 nt, Artificial Sequence
  mRNA product Design e-4 comprising derived and/or modified sequence from HRSV(A2)__F-del_DSCav1_mut6 (opt2)
gggagacuccugucgggcggaaguaggaggaguagaguuuaaaaacaguacucuuuuuccgguucgggacguaguugaagcaacgacaagccggauaaccgcucuugagacaggaagcuuaccauggagcuccucauccucaaggccaacgccaucaccaccauccucaccgccgucaccuucugcuucgccuccggccagaacaucaccgaggaguucuaccaguccaccugcuccgccgucuccaagggcuaccucggcgcccuccgcaccggcugguacaccuccgucaucaccaucgagcucuccaacaucaaggagaacaagugcaacggcaccgacgccaaggucaagcucaucaagcaggagcucgacaaguacaagaacgccgucaccgaccuccagaugcucaugugcuccacccccgccaccggcuccggcuccgccaucgccuccggcgucgccgucugcaagguccuccaccucgagggcgaggucaacaagaucaaguccgcccuccucuccaccaacaaggccgucgucucccucuccaacggcgucuccguccucaccuucaagguccucgaccucaagaacuacaucgacaagcagcuccuccccauccucaacaagcaguccugcuccauccccaaccccgagaccgucauggaguuccagcagaagaacaaccgccuccucgagaucacccgcgaguucuccgucaacgccggcgucaccacccccgucuccaccuacaugcucaccaacuccgagcuccucucccucaucaacgacaugcccaucaccaacgaccagaagaagcucauguccaacaacguccagaucguccgccagcaguccuacuccaucaugugcaucaucaaggaggagguccucgccuacgucguccagcucccccucuacggcgucaucgacacccccugcuggaagcuccacaccuccccccucugcaccaccaacaccaaggagggcuccaacaucugccucacccgcaccgaccgcggcugguacugcgacaacgccggcuccgucuccuucuucccccaggccgagaccugcaaggucugcuccaaccgcgucuucugcgacaccaugaacucccucacccuccccuccgaggucaaccucugcaacgucgacaucuucaaccccaaguacgacugcaagaucaugaccuccaagaccgacgucuccuccuccgucaucaccucccucggcgccaucgucuccugcuacggcaagaccaagugcaccgccuccaacaagaacaagggcaucaucaagaccuucuccaacggcugcgacuacgucuccaacaagggcgucgacaccgucuccgucggcaacacccucuacuacgucaacaagcaggagggccagucccucuacgucaagggcgagcccaucaucaacuucuacgacccccucgucuuccccuccgacgaguucgacgccuccaucucccaggucaacgagaagaucaaccagucccucgccuucauccgcaaguccgacgagcuccuccacaacgucaacgccggcaaguccaccaccaacaucaugaucaccaccaucaucaucgucaucaucgucauccuccucucccucaucgccgucggccuccuccucuacugcaaggcccgcugaggacuaguguccaccugucccuccugggcugcuggauugucucguuuuccugccaaauaaacaggaucagcgcuuuacagaucuaaaaaaaaaaaaaaaaaaaaaaaaaaaaaaaaaaaaaaaaaaaaaaaaaaaaaaaaaaaaaaaaugcaucccccccccccccccccccccccccccccccaaaggcucuuuucagagccaccagaauu

SEQ ID NO: 6629 - RNA, 1880 nt, Artificial Sequence
  mRNA product Design e-4 comprising derived and/or modified sequence from HRSV(A2)__F-del_DSCav1_mut6 (opt3)
gggagacuccugucgggcggaaguaggaggaguagaguuuaaaaacaguacucuuuuuccgguucgggacguaguugaagcaacgacaagccggauaaccgcucuugagacaggaagcuuaccauggagcugcucauccuuaaggccaacgcuauuaccacaauacugacugcagugacguucugcuuugccagcggccagaauaucaccgaagaguucuaccaauccacauguucugcggucucaaaaggguauuugggagcuuuaagaacugguugguacaccaguguuauuacaaucgaacugagcaacauuaaggagaauaaaugcaacggcaccgacgccaaggugaaacuaaucaagcaggaacucgauaaguauaaaaaugcaguaacugaccugcagaugcuuauguguuccacacccgccaccgggucuggaucggcuauagcaucaggcguggccgucugcaaggugcugcacuuggagggugagguuaacaaaaucaagagcgcucuccugaguacgaauaaagccguggucucccugucuaacggggugagcguacucacuuuuaagguuuuagaucugaagaauuacauugacaaacagcuuuugccuauccugaacaagcaauccuguucaauuccaaauccggaaaccgugauggaguuccagcagaaaaacaauaggcuacucgaaaucacacgggaguuuagugucaacgcgggagugacuacccccgugagcacauauaugcugaccaauucugagcuucuguccuugauaaacgauaugccuauuacgaacgaccagaagaaacucaugucaaauaacguccaaaucguucgccagcagagcuacaguauuaugugcaucaucaaggaagaggugcuggcauauguagugcaguuaccacuguacggcgucauugauacucccuguuggaaacuccauacaucuccucuuugcaccacuaauacaaaggaaggcuccaacauaugucugacccgaacggaccgugggugguacugcgauaaugccggaagcgugucguucuuuccacaagcugagaccuguaagguuugcucuaacagaguguucugcgacacaaugaacuccuugacucuacccucagaagucaaucuguguaauguggauaucuuuaacccuaaauaugacugcaagauuaugaccaguaaaacagauguaagcuccucuguuaucacuagccucggugccauagugucauguuacggcaagaccaaaugcacagcaaguaauaagaacaaggggauuaucaaaaccuucuccaauggaugugacuaugucagcaacaagggcguggacacugucucuguggguaauacgcuguacuauguuaacaaacaggaggggcagucacuuuacgugaagggagagccaaucauuaacuuuuaugauccgcugguauuccccagugacgaauuugaugcuagcaucucccaagucaaugagaaaauuaaccagucuuuggccuucauaaggaagucggacgaacuccugcacaaugugaacgcgggcaagagcacaaccaauaucaugauuacuaccaucaucauuguuauaaucgugauuuuacugucccuaaucgccgucggccuccugcuuuacugcaaagcacggugaggacuaguguccaccugucccuccugggcugcuggauugucucguuuuccugccaaauaaacaggaucagcgcuuuacagaucuaaaaaaaaaaaaaaaaaaaaaaaaaaaaaaaaaaaaaaaaaaaaaaaaaaaaaaaaaaaaaaaaugcaucccccccccccccccccccccccccccccccaaaggcucuuuucagagccaccagaauu

SEQ ID NO: 6630 - RNA, 1880 nt, Artificial Sequence
  mRNA product Design e-4 comprising derived and/or modified sequence from HRSV(A2)__F-del_DSCav1_mut6 (opt4)
gggagacuccugucgggcggaaguaggaggaguagaguuuaaaaacaguacucuuuuuccgguucgggacguaguugaagcaacgacaagccggauaaccgcucuugagacaggaagcuuaccauggagcugcugauccugaaggccaacgccaucaccaccauccugaccgccgugaccuucugcuucgccagcggccagaacaucaccgaggaguucuaccagagcaccugcagcgccgugagcaagggcuaccugggcgcccugagaaccggcugguacaccagcgugaucaccaucgagcugagcaacaucaaggagaacaagugcaacggcaccgacgccaaggugaagcugaucaagcaggagcuggacaaguacaagaacgccgugaccgaccugcagaugcugaugugcagcacccccgccaccggcagcggcagcgccaucgccagcggcguggccgugugcaaggugcugcaccuggagggcgaggugaacaagaucaagagcgcccugcugagcaccaacaaggccguggugagccugagcaacggcgugagcgugcugaccuucaaggugcuggaccugaagaacuacaucgacaagcagcugcugcccauccugaacaagcagagcugcagcauccccaaccccgagaccgugauggaguuccagcagaagaacaacagacugcuggagaucaccagagaguucagcgugaacgccggcgugaccacccccgugagcaccuacaugcugaccaacagcgagcugcugagccugaucaacgacaugcccaucaccaacgaccagaagaagcugaugagcaacaacgugcagaucgugagacagcagagcuacagcaucaugugcaucaucaaggaggaggugcuggccuacguggugcagcugccccuguacggcgugaucgacacccccugcuggaagcugcacaccagcccccugugcaccaccaacaccaaggagggcagcaacaucugccugaccagaaccgacagaggcugguacugcgacaacgccggcagcgugagcuucuucccccaggccgagaccugcaaggugugcagcaacagaguguucugcgacaccaugaacagccugacccugcccagcgaggugaaccugugcaacguggacaucuucaaccccaaguacgacugcaagaucaugaccagcaagaccgacgugagcagcagcgugaucaccagccugggcgccaucgugagcugcuacggcaagaccaagugcaccgccagcaacaagaacaagggcaucaucaagaccuucagcaacggcugcgacuacgugagcaacaagggcguggacaccgugagcgugggcaacacccuguacuacgugaacaagcaggagggccagagccuguacgugaagggcgagcccaucaucaacuucuacgacccccugguguuccccagcgacgaguucgacgccagcaucagccaggugaacgagaagaucaaccagagccuggccuucaucagaaagagcgacgagcugcugcacaacgugaacgccggcaagagcaccaccaacaucaugaucaccaccaucaucaucgugaucaucgugauccugcugagccugaucgccgugggccugcugcuguacugcaaggccagaugaggacuaguguccaccugucccuccugggcugcuggauugucucguuuuccugccaaauaaacaggaucagcgcuuuacagaucuaaaaaaaaaaaaaaaaaaaaaaaaaaaaaaaaaaaaaaaaaaaaaaaaaaaaaaaaaaaaaaaaugcaucccccccccccccccccccccccccccccccaaaggcucuuuucagagccaccagaauu

SEQ ID NO: 6631 - RNA, 1880 nt, Artificial Sequence
  mRNA product Design e-4 comprising derived and/or modified sequence from HRSV(A2)__F-del_DSCav1_mut6 (opt5)
gggagacuccugucgggcggaaguaggaggaguagaguuuaaaaacaguacucuuuuuccgguucgggacguaguugaagcaacgacaagccggauaaccgcucuugagacaggaagcuuaccauggagcugcucauccugaaggccaacgcuauuaccacaauccuuacggccgugaccuucugcuuugcgagcggccagaauauuacagaagaguucuaccaauccaccuguucugcugucagcaaaggguaucugggagcccucagaacaggcugguacaccuccguuaucacaauugaacugucuaacaucaaggagaauaaaugcaacgggaccgacgccaaggugaaacuuaucaagcaggaacuggauaaguauaaaaaugcugugacggaccuccagaugcugauguguagcacccccgccacaggauccggcucugcuauugccagcggggucgcggugugcaagguucugcaccucgagggagaggugaacaaaaucaaguccgcccugcuuagcaccaauaaagcugucgugucucuguccaacggcguuagcgugcucacauuuaagguccuggaucuuaagaauuacauugacaaacagcugcucccuauccugaacaagcaaucuuguuccauuccgaaucccgaaaccgugauggaguuccagcagaaaaacaaucggcugcucgaaaucacgcgcgaguuuagcgugaacgccggcgucacaaccccuguuucuacauauaugcugaccaauuccgagcuucugagccucauuaacgauaugcccaucaccaacgaccagaagaaacugauguccaauaacgugcaaaucgugagacagcagucuuacagcauuaugugcaucauuaaggaagagguccuugcuuaugugguucagcugccucucuacggggugaucgauacacccuguuggaaacugcauacguccccucugugcaccacaaauaccaaggaaggaagcaacauuugucucacacggaccgaccgcggcugguacugcgauaaugccgggucugucuccuucuuuccgcaagcggagacguguaaggugugcagcaacagaguuuucugcgacacaaugaacucucugacccuucccagcgaagugaaucuguguaaugucgauaucuuuaacccuaaauaugacugcaagaucaugaccuccaaaacagaugugucuagcuccgucauuaccagccucggagccaucgugucuuguuacggcaagacaaaaugcacggcuuccaauaagaacaaggggauuaucaaaaccuucagcaauggaugugacuauguuucuaacaagggcguggacacagucuccgugggcaauacccuguacuauguuaacaaacaggaggggcagagccuuuacgugaagggagagcccauuaucaacuuuuaugauccucuggucuuccccuccgacgaauuugaugccucuaucagccaagugaaugagaaaauuaaccagucccucgcuuucauccggaagucugacgaacugcugcacaaugugaacgccggcaagagcacaaccaauauuaugaucacgaccauuaucauuguuaucaucgucauucuccugucccuuaucgccguggggcugcuccuguacugcaaagcucgcugaggacuaguguccaccugucccuccugggcugcuggauugucucguuuuccugccaaauaaacaggaucagcgcuuuacagaucuaaaaaaaaaaaaaaaaaaaaaaaaaaaaaaaaaaaaaaaaaaaaaaaaaaaaaaaaaaaaaaaaugcaucccccccccccccccccccccccccccccccaaaggcucuuuucagagccaccagaauu

SEQ ID NO: 6632 - RNA, 1880 nt, Artificial Sequence
  mRNA product Design e-4 comprising derived and/or modified sequence from HRSV(A2)__F-del_DSCav1_mut6 (opt6)
gggagacuccugucgggcggaaguaggaggaguagaguuuaaaaacaguacucuuuuuccgguucgggacguaguugaagcaacgacaagccggauaaccgcucuugagacaggaagcuuaccauggaacuacucauauuaaaagcaaacgcaauaacaacgauauuaacagcuguaacauucugcuuugcaucaggccaaaauaucaccgaagaauuuuaucaaagcacaugcucugcaguauccaaaggauacuuaggagcauuaagaacaggcugguacacauccguaauaacaauagaacuaucaaacaucaaagaaaacaaaugcaacggcacagacgccaaaguaaaacucauaaaacaagaacuagacaaauauaaaaacgcaguaacagaucuacaaaugcucaugugcuccacaccagcaaccggaucugguucagccauagcauccggcguagccgucugcaaaguauuacaccucgaaggagaaguaaacaaaauaaaaucugcccuauuaucuacaaauaaagccguaguaagucuaaguaacggaguaucaguacuaacauuuaaaguccuagaccugaaaaacuauaucgacaaacaacuauuaccaauacuaaacaaacaauccuguuccaucccuaacccagaaacaguuauggaauuucaacaaaaaaauaaccgccuuuuagaaauaacuagagaauuuucaguaaacgcaggaguuacaacaccaguaucaacauacaugcuaacaaauucagaauuauuaucccuuauaaaugacaugccuaucacaaacgaucaaaaaaaauuaauguccaacaacguacaaauaguaagacaacaaucauauuccaucaugugcaucauaaaagaagaaguccucgcauacguagugcaacuaccacuauacggagucauagauacacccuguuggaaacuucacacaucuccacuaugcacaacaaacacgaaagaaggauccaacauaugccuaacacgaacagacagaggaugguauugcgacaacgcuggaagugugagcuucuucccucaagcagaaacuugcaaaguaugcagcaaucguguauucugcgacacaaugaacucauuaacacucccaagcgaaguaaaccucugcaauguagacaucuuuaauccaaaauacgauuguaaaauaaugacuucaaaaacagacgucucaucaucuguaauaacaucuuuaggagcaauaguuucuugcuacgguaaaacaaaaugcaccgcauccaacaaaaacaaaggaauaauaaaaacauucucuaacggcugcgauuacguaucuaacaaaggaguugacacagucucaguaggaaacacacuauacuacguaaacaaacaagaaggacaaagccuauacguaaaaggagaaccaauaauaaacuucuaugacccauuaguauuuccaagcgaugaauuugacgcuucaauaucacaagucaaugaaaaaauaaaucagagcuuagcauucauaagaaaaucugaugaacuacuacacaauguaaaugcaggaaaauccacuaccaacauaaugauuaccacaauuauaauaguuaucauaguaauacuauuaucacuaauagccguuggauuacuacuauacugcaaagcaagauaaggacuaguguccaccugucccuccugggcugcuggauugucucguuuuccugccaaauaaacaggaucagcgcuuuacagaucuaaaaaaaaaaaaaaaaaaaaaaaaaaaaaaaaaaaaaaaaaaaaaaaaaaaaaaaaaaaaaaaaugcaucccccccccccccccccccccccccccccccaaaggcucuuuucagagccaccagaauu

SEQ ID NO: 6633 - RNA, 1880 nt, Artificial Sequence
  mRNA product Design e-4 comprising derived and/or modified sequence from HRSV(A2)__F-del_DSCav1_mut6 (opt11)
gggagacuccugucgggcggaaguaggaggaguagaguuuaaaaacaguacucuuuuuccgguucgggacguaguugaagcaacgacaagccggauaaccgcucuugagacaggaagcuuaccauggaacuacucauccuaaaagcaaacgccaucaccaccauacuaaccgccgucaccuucugcuucgccucgggacaaaacaucaccgaagaguucuaccagucaacgugcuccgccgucucaaaaggcuaccuaggcgcccuccgcaccgggugguauaccuccgucauaacuaucgaacucucuaacaucaaagaaaacaaauguaacggcaccgacgccaaagucaaacuaaucaaacaagaacuggacaaauacaaaaacgccgucaccgaccuacaaaugcucaugugcuccacuccagccaccggcuccgguagcgcaaucgccucaggcguagcuguaugcaaaguccuccaccuagaaggcgaaguaaacaaaauaaaauccgcccuccucucaaccaacaaggccgucgucucacucucaaacggcgucuccguacucaccuuuaaaguccuagaccuuaaaaacuacaucgacaaacaacugcuaccaauccucaacaaacaaucaugcagcaucccaaacccggaaacagucauggaguuccaacagaaaaacaaccgacuccucgaaaucacccgcgaguucuccgucaacgccggagucaccacaccuguaagcacauacaugcuuacuaauuccgaacuccuuucacuaauaaacgacaugccaauaaccaacgaccaaaagaaacucauguccaacaacguacaaaucguacgccaacaauccuacuccaucaugugcaucaucaaagaagaaguccuggccuaugucguacaacucccccuuuacggugucaucgacacacccugcuggaaacuacacaccagcccccucugcacaacaaacaccaaagaaggcuccaacaucugccucacccguaccgaccgaggcugguacugcgacaacgccggcuccgucuccuucuucccccaagccgaaaccugcaaagucugcagcaaccgcgucuucugcgauaccaugaacucccucacacucccaucugaagucaaccucugcaacgucgauauuuucaauccaaaauacgacugcaaaaucaugacuagcaaaaccgacguuagcuccuccgucaucaccucccucggcgccauaguuucaugcuacggcaaaaccaaaugcaccgccuccaacaaaaacaaaggcaucauaaaaaccuucuccaacgggugcgacuacguaucuaauaaaggagucgacaccgucucaguaggaaacacccucuacuaugucaacaaacaagaaggccaaucacuauacguuaaaggcgaaccaaucaucaacuucuacgacccacucgucuuccccagcgacgaguuugacgccucaaucucgcaagucaaugaaaagauuaaccaaucccuagccuucauccgaaaaagugacgaacuccuccacaacguuaacgccggcaaaucuacaaccaacaucaugaucaccacuauaaucaucgucaucauagucauacuucucagccucaucgcagucggacuccuccuuuauugcaaggcacgauaaggacuaguguccaccugucccuccugggcugcuggauugucucguuuuccugccaaauaaacaggaucagcgcuuuacagaucuaaaaaaaaaaaaaaaaaaaaaaaaaaaaaaaaaaaaaaaaaaaaaaaaaaaaaaaaaaaaaaaaugcaucccccccccccccccccccccccccccccccaaaggcucuuuucagagccaccagaauu

SEQ ID NO: 6634 - RNA, 1847 nt, Artificial Sequence
  mRNA product Design e-5 comprising derived and/or modified sequence from HRSV(A2)__F-del_DSCav1_mut6 (opt1)
gggagagcggcucggccauuuugucccagucaguccggaggcugcggcugcagaaguaccgccugcggaguaacugcaaagaagcuuaccauggagcugcucauccugaaggccaacgccaucaccaccauccugacggcggugaccuucugcuucgccagcggccagaacaucaccgaggaguucuaccaguccacgugcagcgccgucuccaagggguaccucggcgcccugcggaccggcugguacaccuccgugaucaccaucgagcugagcaacaucaaggagaacaagugcaacgggaccgacgccaaggugaagcucaucaagcaggagcuggacaaguacaagaacgcggucacggaccugcagaugcugaugugcuccaccccggcaaccggcuccggcuccgccaucgcgagcggcgucgccgugugcaaggugcugcaccucgagggggaggucaacaagaucaagagcgcccugcuguccaccaacaaggccguggugagccucuccaacggcgucagcgugcugaccuucaaggugcuggaccucaagaacuacaucgacaagcagcugcugcccauccugaacaagcagagcugcuccauccccaaccccgagacggugauggaguuccagcagaagaacaaccggcuccuggagaucacccgcgaguucagcgugaacgccggggucaccacccccguguccacguacaugcugaccaacagcgagcuccugucccugaucaacgacaugccgaucaccaacgaccagaagaagcucaugagcaacaacgugcagaucguccggcagcaguccuacagcaucaugugcaucaucaaggaggaggugcuggcguacgugguccagcugccccucuacggcgugaucgacacccccugcuggaagcugcacacgagcccccugugcaccaccaacaccaaggagggguccaacaucugccucacgcgcaccgaccggggcugguacugcgacaacgccggcagcgucuccuucuucccgcaggccgagaccugcaaggugugcagcaaccgcguguucugcgacaccaugaacucccugacgcugcccagcgagguaaaccucugcaacgucgacaucuucaaccccaaguacgacugcaagaucaugaccuccaagaccgacgugagcuccagcgugaucaccucccugggggccaucgucagcugcuacggcaagacgaagugcaccgccagcaacaagaacaaggggaucaucaagaccuucuccaacggcugcgacuacgugagcaacaagggcguggacaccguguccgucgggaacacccuguacuacgugaacaagcaggagggccagagccucuacgugaagggggagcccaucaucaacuucuacgacccgcuggucuuccccuccgacgaguucgacgcgagcaucucccaggugaacgagaagaucaaccagagccuggccuucauccgcaaguccgacgagcugcuccacaacgugaacgccggcaagagcacgaccaacaucaugaucaccaccaucaucaucgucaucaucgugauccugcugucccucaucgccguggggcugcugcucuacugcaaggcccggugaggacuaguguccaccugucccuccugggcugcuggauugucucguuuuccugccaaauaaacaggaucagcgcuuuacagaucuaaaaaaaaaaaaaaaaaaaaaaaaaaaaaaaaaaaaaaaaaaaaaaaaaaaaaaaaaaaaaaaaugcaucccccccccccccccccccccccccccccccaaaggcucuuuucagagccaccagaauu

SEQ ID NO: 6635 - RNA, 1847 nt, Artificial Sequence
  mRNA product Design e-5 comprising derived and/or modified sequence from HRSV(A2)__F-del_DSCav1_mut6 (opt1)
gggagagcggcucggccauuuugucccagucaguccggaggcugcggcugcagaaguaccgccugcggaguaacugcaaagaagcuuaccauggagcugcucauccugaaggccaacgccaucaccaccauccugacggcggugaccuucugcuucgccagcggccagaacaucaccgaggaguucuaccaguccacgugcagcgccgucuccaagggguaccucggcgcccugcgcaccgggugguacaccagcgugaucaccaucgagcuguccaacaucaaggagaacaagugcaacggcaccgacgccaaggugaagcucaucaagcaggagcuggacaaguacaagaacgcggucacggaccugcagaugcucaugugcagcacccccgccaccggguccggcagcgccaucgccuccggcguggcggugugcaagguccugcaccuggagggggaggugaacaagaucaagagcgcccuccuguccaccaacaaggccguggucagccuguccaacggcgugagcgugcucacguucaagguccuggaccugaagaacuacaucgacaagcagcuccugccgauccugaacaagcaguccugcagcauccccaaccccgagaccgugauggaguuccagcagaagaacaaccggcuccuggagaucacccgcgaguucuccgugaacgccggggucaccacgcccgugagcaccuacaugcugaccaacuccgagcuccugagccugaucaacgacaugccgaucaccaacgaccagaagaagcucaugagcaacaacgugcagaucguccggcagcaguccuacagcaucaugugcaucaucaaggaggaggugcuggccuacgugguccagcugccccucuacggcgugaucgacacgcccugcuggaagcugcacaccagcccccugugcaccaccaacacgaaggaggggagcaacaucugccucacccgcaccgaccggggcugguacugcgacaacgcgggcuccgugagcuucuucccgcaggccgagaccugcaaggucugcuccaaccgcguguucugcgacacgaugaacagccugacccugcccuccgaggucaaccucugcaacguggacaucuucaaccccaaguacgacugcaagaucaugaccagcaagaccgacguguccagcuccgucaucacgagccugggggccaucguguccugcuacggcaagaccaagugcaccgccagcaacaagaacaaggggaucaucaagaccuucuccaacggcugcgacuacgugagcaacaagggcgucgacacgguguccguggggaacacccuguacuacgucaacaagcaggagggccagagccucuacgugaagggggagcccaucaucaacuucuacgacccgcugguguuccccagcgacgaguucgacgccuccaucagccaggucaacgagaagaucaaccagucccuggcguucauccggaaguccgacgagcuccugcacaacgugaacgccggcaaguccaccaccaacaucaugaucaccacgaucaucaucgugaucaucgucauccugcucagccugaucgccguggggcugcuccuguacugcaaggcccgcugaggacuaguguccaccugucccuccugggcugcuggauugucucguuuuccugccaaauaaacaggaucagcgcuuuacagaucuaaaaaaaaaaaaaaaaaaaaaaaaaaaaaaaaaaaaaaaaaaaaaaaaaaaaaaaaaaaaaaaaugcaucccccccccccccccccccccccccccccccaaaggcucuuuucagagccaccagaauu

SEQ ID NO: 6636 - RNA, 1847 nt, Artificial Sequence
  mRNA product Design e-5 comprising derived and/or modified sequence from HRSV(A2)__F-del_DSCav1_mut6 (opt2)
gggagagcggcucggccauuuugucccagucaguccggaggcugcggcugcagaaguaccgccugcggaguaacugcaaagaagcuuaccauggagcuccucauccucaaggccaacgccaucaccaccauccucaccgccgucaccuucugcuucgccuccggccagaacaucaccgaggaguucuaccaguccaccugcuccgccgucuccaagggcuaccucggcgcccuccgcaccggcugguacaccuccgucaucaccaucgagcucuccaacaucaaggagaacaagugcaacggcaccgacgccaaggucaagcucaucaagcaggagcucgacaaguacaagaacgccgucaccgaccuccagaugcucaugugcuccacccccgccaccggcuccggcuccgccaucgccuccggcgucgccgucugcaagguccuccaccucgagggcgaggucaacaagaucaaguccgcccuccucuccaccaacaaggccgucgucucccucuccaacggcgucuccguccucaccuucaagguccucgaccucaagaacuacaucgacaagcagcuccuccccauccucaacaagcaguccugcuccauccccaaccccgagaccgucauggaguuccagcagaagaacaaccgccuccucgagaucacccgcgaguucuccgucaacgccggcgucaccacccccgucuccaccuacaugcucaccaacuccgagcuccucucccucaucaacgacaugcccaucaccaacgaccagaagaagcucauguccaacaacguccagaucguccgccagcaguccuacuccaucaugugcaucaucaaggaggagguccucgccuacgucguccagcucccccucuacggcgucaucgacacccccugcuggaagcuccacaccuccccccucugcaccaccaacaccaaggagggcuccaacaucugccucacccgcaccgaccgcggcugguacugcgacaacgccggcuccgucuccuucuucccccaggccgagaccugcaaggucugcuccaaccgcgucuucugcgacaccaugaacucccucacccuccccuccgaggucaaccucugcaacgucgacaucuucaaccccaaguacgacugcaagaucaugaccuccaagaccgacgucuccuccuccgucaucaccucccucggcgccaucgucuccugcuacggcaagaccaagugcaccgccuccaacaagaacaagggcaucaucaagaccuucuccaacggcugcgacuacgucuccaacaagggcgucgacaccgucuccgucggcaacacccucuacuacgucaacaagcaggagggccagucccucuacgucaagggcgagcccaucaucaacuucuacgacccccucgucuuccccuccgacgaguucgacgccuccaucucccaggucaacgagaagaucaaccagucccucgccuucauccgcaaguccgacgagcuccuccacaacgucaacgccggcaaguccaccaccaacaucaugaucaccaccaucaucaucgucaucaucgucauccuccucucccucaucgccgucggccuccuccucuacugcaaggcccgcugaggacuaguguccaccugucccuccugggcugcuggauugucucguuuuccugccaaauaaacaggaucagcgcuuuacagaucuaaaaaaaaaaaaaaaaaaaaaaaaaaaaaaaaaaaaaaaaaaaaaaaaaaaaaaaaaaaaaaaaugcaucccccccccccccccccccccccccccccccaaaggcucuuuucagagccaccagaauu

SEQ ID NO: 6637 - RNA, 1847 nt, Artificial Sequence
  mRNA product Design e-5 comprising derived and/or modified sequence from HRSV(A2)__F-del_DSCav1_mut6 (opt3)
gggagagcggcucggccauuuugucccagucaguccggaggcugcggcugcagaaguaccgccugcggaguaacugcaaagaagcuuaccauggagcugcucauccuuaaggccaacgcuauuaccacaauacugacugcagugacguucugcuuugccagcggccagaauaucaccgaagaguucuaccaauccacauguucugcggucucaaaaggguauuugggagcuuuaagaacugguugguacaccaguguuauuacaaucgaacugagcaacauuaaggagaauaaaugcaacggcaccgacgccaaggugaaacuaaucaagcaggaacucgauaaguauaaaaaugcaguaacugaccugcagaugcuuauguguuccacacccgccaccgggucuggaucggcuauagcaucaggcguggccgucugcaaggugcugcacuuggagggugagguuaacaaaaucaagagcgcucuccugaguacgaauaaagccguggucucccugucuaacggggugagcguacucacuuuuaagguuuuagaucugaagaauuacauugacaaacagcuuuugccuauccugaacaagcaauccuguucaauuccaaauccggaaaccgugauggaguuccagcagaaaaacaauaggcuacucgaaaucacacgggaguuuagugucaacgcgggagugacuacccccgugagcacauauaugcugaccaauucugagcuucuguccuugauaaacgauaugccuauuacgaacgaccagaagaaacucaugucaaauaacguccaaaucguucgccagcagagcuacaguauuaugugcaucaucaaggaagaggugcuggcauauguagugcaguuaccacuguacggcgucauugauacucccuguuggaaacuccauacaucuccucuuugcaccacuaauacaaaggaaggcuccaacauaugucugacccgaacggaccgugggugguacugcgauaaugccggaagcgugucguucuuuccacaagcugagaccuguaagguuugcucuaacagaguguucugcgacacaaugaacuccuugacucuacccucagaagucaaucuguguaauguggauaucuuuaacccuaaauaugacugcaagauuaugaccaguaaaacagauguaagcuccucuguuaucacuagccucggugccauagugucauguuacggcaagaccaaaugcacagcaaguaauaagaacaaggggauuaucaaaaccuucuccaauggaugugacuaugucagcaacaagggcguggacacugucucuguggguaauacgcuguacuauguuaacaaacaggaggggcagucacuuuacgugaagggagagccaaucauuaacuuuuaugauccgcugguauuccccagugacgaauuugaugcuagcaucucccaagucaaugagaaaauuaaccagucuuuggccuucauaaggaagucggacgaacuccugcacaaugugaacgcgggcaagagcacaaccaauaucaugauuacuaccaucaucauuguuauaaucgugauuuuacugucccuaaucgccgucggccuccugcuuuacugcaaagcacggugaggacuaguguccaccugucccuccugggcugcuggauugucucguuuuccugccaaauaaacaggaucagcgcuuuacagaucuaaaaaaaaaaaaaaaaaaaaaaaaaaaaaaaaaaaaaaaaaaaaaaaaaaaaaaaaaaaaaaaaugcaucccccccccccccccccccccccccccccccaaaggcucuuuucagagccaccagaauu

SEQ ID NO: 6638 - RNA, 1847 nt, Artificial Sequence
  mRNA product Design e-5 comprising derived and/or modified sequence from HRSV(A2)__F-del_DSCav1_mut6 (opt4)
gggagagcggcucggccauuuugucccagucaguccggaggcugcggcugcagaaguaccgccugcggaguaacugcaaagaagcuuaccauggagcugcugauccugaaggccaacgccaucaccaccauccugaccgccgugaccuucugcuucgccagcggccagaacaucaccgaggaguucuaccagagcaccugcagcgccgugagcaagggcuaccugggcgcccugagaaccggcugguacaccagcgugaucaccaucgagcugagcaacaucaaggagaacaagugcaacggcaccgacgccaaggugaagcugaucaagcaggagcuggacaaguacaagaacgccgugaccgaccugcagaugcugaugugcagcacccccgccaccggcagcggcagcgccaucgccagcggcguggccgugugcaaggugcugcaccuggagggcgaggugaacaagaucaagagcgcccugcugagcaccaacaaggccguggugagccugagcaacggcgugagcgugcugaccuucaaggugcuggaccugaagaacuacaucgacaagcagcugcugcccauccugaacaagcagagcugcagcauccccaaccccgagaccgugauggaguuccagcagaagaacaacagacugcuggagaucaccagagaguucagcgugaacgccggcgugaccacccccgugagcaccuacaugcugaccaacagcgagcugcugagccugaucaacgacaugcccaucaccaacgaccagaagaagcugaugagcaacaacgugcagaucgugagacagcagagcuacagcaucaugugcaucaucaaggaggaggugcuggccuacguggugcagcugccccuguacggcgugaucgacacccccugcuggaagcugcacaccagcccccugugcaccaccaacaccaaggagggcagcaacaucugccugaccagaaccgacagaggcugguacugcgacaacgccggcagcgugagcuucuucccccaggccgagaccugcaaggugugcagcaacagaguguucugcgacaccaugaacagccugacccugcccagcgaggugaaccugugcaacguggacaucuucaaccccaaguacgacugcaagaucaugaccagcaagaccgacgugagcagcagcgugaucaccagccugggcgccaucgugagcugcuacggcaagaccaagugcaccgccagcaacaagaacaagggcaucaucaagaccuucagcaacggcugcgacuacgugagcaacaagggcguggacaccgugagcgugggcaacacccuguacuacgugaacaagcaggagggccagagccuguacgugaagggcgagcccaucaucaacuucuacgacccccugguguuccccagcgacgaguucgacgccagcaucagccaggugaacgagaagaucaaccagagccuggccuucaucagaaagagcgacgagcugcugcacaacgugaacgccggcaagagcaccaccaacaucaugaucaccaccaucaucaucgugaucaucgugauccugcugagccugaucgccgugggccugcugcuguacugcaaggccagaugaggacuaguguccaccugucccuccugggcugcuggauugucucguuuuccugccaaauaaacaggaucagcgcuuuacagaucuaaaaaaaaaaaaaaaaaaaaaaaaaaaaaaaaaaaaaaaaaaaaaaaaaaaaaaaaaaaaaaaaugcaucccccccccccccccccccccccccccccccaaaggcucuuuucagagccaccagaauu

SEQ ID NO: 6639 - RNA, 1847 nt, Artificial Sequence
  mRNA product Design e-5 comprising derived and/or modified sequence from HRSV(A2)__F-del_DSCav1_mut6 (opt5)
gggagagcggcucggccauuuugucccagucaguccggaggcugcggcugcagaaguaccgccugcggaguaacugcaaagaagcuuaccauggagcugcucauccugaaggccaacgcuauuaccacaauccuuacggccgugaccuucugcuuugcgagcggccagaauauuacagaagaguucuaccaauccaccuguucugcugucagcaaaggguaucugggagcccucagaacaggcugguacaccuccguuaucacaauugaacugucuaacaucaaggagaauaaaugcaacgggaccgacgccaaggugaaacuuaucaagcaggaacuggauaaguauaaaaaugcugugacggaccuccagaugcugauguguagcacccccgccacaggauccggcucugcuauugccagcggggucgcggugugcaagguucugcaccucgagggagaggugaacaaaaucaaguccgcccugcuuagcaccaauaaagcugucgugucucuguccaacggcguuagcgugcucacauuuaagguccuggaucuuaagaauuacauugacaaacagcugcucccuauccugaacaagcaaucuuguuccauuccgaaucccgaaaccgugauggaguuccagcagaaaaacaaucggcugcucgaaaucacgcgcgaguuuagcgugaacgccggcgucacaaccccuguuucuacauauaugcugaccaauuccgagcuucugagccucauuaacgauaugcccaucaccaacgaccagaagaaacugauguccaauaacgugcaaaucgugagacagcagucuuacagcauuaugugcaucauuaaggaagagguccuugcuuaugugguucagcugccucucuacggggugaucgauacacccuguuggaaacugcauacguccccucugugcaccacaaauaccaaggaaggaagcaacauuugucucacacggaccgaccgcggcugguacugcgauaaugccgggucugucuccuucuuuccgcaagcggagacguguaaggugugcagcaacagaguuuucugcgacacaaugaacucucugacccuucccagcgaagugaaucuguguaaugucgauaucuuuaacccuaaauaugacugcaagaucaugaccuccaaaacagaugugucuagcuccgucauuaccagccucggagccaucgugucuuguuacggcaagacaaaaugcacggcuuccaauaagaacaaggggauuaucaaaaccuucagcaauggaugugacuauguuucuaacaagggcguggacacagucuccgugggcaauacccuguacuauguuaacaaacaggaggggcagagccuuuacgugaagggagagcccauuaucaacuuuuaugauccucuggucuuccccuccgacgaauuugaugccucuaucagccaagugaaugagaaaauuaaccagucccucgcuuucauccggaagucugacgaacugcugcacaaugugaacgccggcaagagcacaaccaauauuaugaucacgaccauuaucauuguuaucaucgucauucuccugucccuuaucgccguggggcugcuccuguacugcaaagcucgcugaggacuaguguccaccugucccuccugggcugcuggauugucucguuuuccugccaaauaaacaggaucagcgcuuuacagaucuaaaaaaaaaaaaaaaaaaaaaaaaaaaaaaaaaaaaaaaaaaaaaaaaaaaaaaaaaaaaaaaaugcaucccccccccccccccccccccccccccccccaaaggcucuuuucagagccaccagaauu

SEQ ID NO: 6640 - RNA, 1847 nt, Artificial Sequence
  mRNA product Design e-5 comprising derived and/or modified sequence from HRSV(A2)__F-del_DSCav1_mut6 (opt6)
gggagagcggcucggccauuuugucccagucaguccggaggcugcggcugcagaaguaccgccugcggaguaacugcaaagaagcuuaccauggaacuacucauauuaaaagcaaacgcaauaacaacgauauuaacagcuguaacauucugcuuugcaucaggccaaaauaucaccgaagaauuuuaucaaagcacaugcucugcaguauccaaaggauacuuaggagcauuaagaacaggcugguacacauccguaauaacaauagaacuaucaaacaucaaagaaaacaaaugcaacggcacagacgccaaaguaaaacucauaaaacaagaacuagacaaauauaaaaacgcaguaacagaucuacaaaugcucaugugcuccacaccagcaaccggaucugguucagccauagcauccggcguagccgucugcaaaguauuacaccucgaaggagaaguaaacaaaauaaaaucugcccuauuaucuacaaauaaagccguaguaagucuaaguaacggaguaucaguacuaacauuuaaaguccuagaccugaaaaacuauaucgacaaacaacuauuaccaauacuaaacaaacaauccuguuccaucccuaacccagaaacaguuauggaauuucaacaaaaaaauaaccgccuuuuagaaauaacuagagaauuuucaguaaacgcaggaguuacaacaccaguaucaacauacaugcuaacaaauucagaauuauuaucccuuauaaaugacaugccuaucacaaacgaucaaaaaaaauuaauguccaacaacguacaaauaguaagacaacaaucauauuccaucaugugcaucauaaaagaagaaguccucgcauacguagugcaacuaccacuauacggagucauagauacacccuguuggaaacuucacacaucuccacuaugcacaacaaacacgaaagaaggauccaacauaugccuaacacgaacagacagaggaugguauugcgacaacgcuggaagugugagcuucuucccucaagcagaaacuugcaaaguaugcagcaaucguguauucugcgacacaaugaacucauuaacacucccaagcgaaguaaaccucugcaauguagacaucuuuaauccaaaauacgauuguaaaauaaugacuucaaaaacagacgucucaucaucuguaauaacaucuuuaggagcaauaguuucuugcuacgguaaaacaaaaugcaccgcauccaacaaaaacaaaggaauaauaaaaacauucucuaacggcugcgauuacguaucuaacaaaggaguugacacagucucaguaggaaacacacuauacuacguaaacaaacaagaaggacaaagccuauacguaaaaggagaaccaauaauaaacuucuaugacccauuaguauuuccaagcgaugaauuugacgcuucaauaucacaagucaaugaaaaaauaaaucagagcuuagcauucauaagaaaaucugaugaacuacuacacaauguaaaugcaggaaaauccacuaccaacauaaugauuaccacaauuauaauaguuaucauaguaauacuauuaucacuaauagccguuggauuacuacuauacugcaaagcaagauaaggacuaguguccaccugucccuccugggcugcuggauugucucguuuuccugccaaauaaacaggaucagcgcuuuacagaucuaaaaaaaaaaaaaaaaaaaaaaaaaaaaaaaaaaaaaaaaaaaaaaaaaaaaaaaaaaaaaaaaugcaucccccccccccccccccccccccccccccccaaaggcucuuuucagagccaccagaauu

SEQ ID NO: 6641 - RNA, 1847 nt, Artificial Sequence
  mRNA product Design e-5 comprising derived and/or modified sequence from HRSV(A2)__F-del_DSCav1_mut6 (opt11)
gggagagcggcucggccauuuugucccagucaguccggaggcugcggcugcagaaguaccgccugcggaguaacugcaaagaagcuuaccauggaacuacucauccuaaaagcaaacgccaucaccaccauacuaaccgccgucaccuucugcuucgccucgggacaaaacaucaccgaagaguucuaccagucaacgugcuccgccgucucaaaaggcuaccuaggcgcccuccgcaccgggugguauaccuccgucauaacuaucgaacucucuaacaucaaagaaaacaaauguaacggcaccgacgccaaagucaaacuaaucaaacaagaacuggacaaauacaaaaacgccgucaccgaccuacaaaugcucaugugcuccacuccagccaccggcuccgguagcgcaaucgccucaggcguagcuguaugcaaaguccuccaccuagaaggcgaaguaaacaaaauaaaauccgcccuccucucaaccaacaaggccgucgucucacucucaaacggcgucuccguacucaccuuuaaaguccuagaccuuaaaaacuacaucgacaaacaacugcuaccaauccucaacaaacaaucaugcagcaucccaaacccggaaacagucauggaguuccaacagaaaaacaaccgacuccucgaaaucacccgcgaguucuccgucaacgccggagucaccacaccuguaagcacauacaugcuuacuaauuccgaacuccuuucacuaauaaacgacaugccaauaaccaacgaccaaaagaaacucauguccaacaacguacaaaucguacgccaacaauccuacuccaucaugugcaucaucaaagaagaaguccuggccuaugucguacaacucccccuuuacggugucaucgacacacccugcuggaaacuacacaccagcccccucugcacaacaaacaccaaagaaggcuccaacaucugccucacccguaccgaccgaggcugguacugcgacaacgccggcuccgucuccuucuucccccaagccgaaaccugcaaagucugcagcaaccgcgucuucugcgauaccaugaacucccucacacucccaucugaagucaaccucugcaacgucgauauuuucaauccaaaauacgacugcaaaaucaugacuagcaaaaccgacguuagcuccuccgucaucaccucccucggcgccauaguuucaugcuacggcaaaaccaaaugcaccgccuccaacaaaaacaaaggcaucauaaaaaccuucuccaacgggugcgacuacguaucuaauaaaggagucgacaccgucucaguaggaaacacccucuacuaugucaacaaacaagaaggccaaucacuauacguuaaaggcgaaccaaucaucaacuucuacgacccacucgucuuccccagcgacgaguuugacgccucaaucucgcaagucaaugaaaagauuaaccaaucccuagccuucauccgaaaaagugacgaacuccuccacaacguuaacgccggcaaaucuacaaccaacaucaugaucaccacuauaaucaucgucaucauagucauacuucucagccucaucgcagucggacuccuccuuuauugcaaggcacgauaaggacuaguguccaccugucccuccugggcugcuggauugucucguuuuccugccaaauaaacaggaucagcgcuuuacagaucuaaaaaaaaaaaaaaaaaaaaaaaaaaaaaaaaaaaaaaaaaaaaaaaaaaaaaaaaaaaaaaaaugcaucccccccccccccccccccccccccccccccaaaggcucuuuucagagccaccagaauu

SEQ ID NO: 6642 - RNA, 1914 nt, Artificial Sequence
  mRNA product Design e-6 comprising derived and/or modified sequence from HRSV(A2)__F-del_DSCav1_mut6 (opt1)
gggagagcggcucggccauuuugucccagucaguccggaggcugcggcugcagaaguaccgccugcggaguaacugcaaagaagcuuaccauggagcugcucauccugaaggccaacgccaucaccaccauccugacggcggugaccuucugcuucgccagcggccagaacaucaccgaggaguucuaccaguccacgugcagcgccgucuccaagggguaccucggcgcccugcggaccggcugguacaccuccgugaucaccaucgagcugagcaacaucaaggagaacaagugcaacgggaccgacgccaaggugaagcucaucaagcaggagcuggacaaguacaagaacgcggucacggaccugcagaugcugaugugcuccaccccggcaaccggcuccggcuccgccaucgcgagcggcgucgccgugugcaaggugcugcaccucgagggggaggucaacaagaucaagagcgcccugcuguccaccaacaaggccguggugagccucuccaacggcgucagcgugcugaccuucaaggugcuggaccucaagaacuacaucgacaagcagcugcugcccauccugaacaagcagagcugcuccauccccaaccccgagacggugauggaguuccagcagaagaacaaccggcuccuggagaucacccgcgaguucagcgugaacgccggggucaccacccccguguccacguacaugcugaccaacagcgagcuccugucccugaucaacgacaugccgaucaccaacgaccagaagaagcucaugagcaacaacgugcagaucguccggcagcaguccuacagcaucaugugcaucaucaaggaggaggugcuggcguacgugguccagcugccccucuacggcgugaucgacacccccugcuggaagcugcacacgagcccccugugcaccaccaacaccaaggagggguccaacaucugccucacgcgcaccgaccggggcugguacugcgacaacgccggcagcgucuccuucuucccgcaggccgagaccugcaaggugugcagcaaccgcguguucugcgacaccaugaacucccugacgcugcccagcgagguaaaccucugcaacgucgacaucuucaaccccaaguacgacugcaagaucaugaccuccaagaccgacgugagcuccagcgugaucaccucccugggggccaucgucagcugcuacggcaagacgaagugcaccgccagcaacaagaacaaggggaucaucaagaccuucuccaacggcugcgacuacgugagcaacaagggcguggacaccguguccgucgggaacacccuguacuacgugaacaagcaggagggccagagccucuacgugaagggggagcccaucaucaacuucuacgacccgcuggucuuccccuccgacgaguucgacgcgagcaucucccaggugaacgagaagaucaaccagagccuggccuucauccgcaaguccgacgagcugcuccacaacgugaacgccggcaagagcacgaccaacaucaugaucaccaccaucaucaucgucaucaucgugauccugcugucccucaucgccguggggcugcugcucuacugcaaggcccggugaggacuaguacuggcugcaucucccuuuccucuguccuccauccuucucccaggauggugaagggggaccugguacccagugauccccaccccaggauccuaaaucaugacuuaccugcuaauaaaaacucauuggaaaagugagaagaucuaaaaaaaaaaaaaaaaaaaaaaaaaaaaaaaaaaaaaaaaaaaaaaaaaaaaaaaaaaaaaaaaugcaucccccccccccccccccccccccccccccccaaaggcucuuuucagagccaccagaauu

SEQ ID NO: 6643 - RNA, 1914 nt, Artificial Sequence
  mRNA product Design e-6 comprising derived and/or modified sequence from HRSV(A2)__F-del_DSCav1_mut6 (opt1)
gggagagcggcucggccauuuugucccagucaguccggaggcugcggcugcagaaguaccgccugcggaguaacugcaaagaagcuuaccauggagcugcucauccugaaggccaacgccaucaccaccauccugacggcggugaccuucugcuucgccagcggccagaacaucaccgaggaguucuaccaguccacgugcagcgccgucuccaagggguaccucggcgcccugcgcaccgggugguacaccagcgugaucaccaucgagcuguccaacaucaaggagaacaagugcaacggcaccgacgccaaggugaagcucaucaagcaggagcuggacaaguacaagaacgcggucacggaccugcagaugcucaugugcagcacccccgccaccggguccggcagcgccaucgccuccggcguggcggugugcaagguccugcaccuggagggggaggugaacaagaucaagagcgcccuccuguccaccaacaaggccguggucagccuguccaacggcgugagcgugcucacguucaagguccuggaccugaagaacuacaucgacaagcagcuccugccgauccugaacaagcaguccugcagcauccccaaccccgagaccgugauggaguuccagcagaagaacaaccggcuccuggagaucacccgcgaguucuccgugaacgccggggucaccacgcccgugagcaccuacaugcugaccaacuccgagcuccugagccugaucaacgacaugccgaucaccaacgaccagaagaagcucaugagcaacaacgugcagaucguccggcagcaguccuacagcaucaugugcaucaucaaggaggaggugcuggccuacgugguccagcugccccucuacggcgugaucgacacgcccugcuggaagcugcacaccagcccccugugcaccaccaacacgaaggaggggagcaacaucugccucacccgcaccgaccggggcugguacugcgacaacgcgggcuccgugagcuucuucccgcaggccgagaccugcaaggucugcuccaaccgcguguucugcgacacgaugaacagccugacccugcccuccgaggucaaccucugcaacguggacaucuucaaccccaaguacgacugcaagaucaugaccagcaagaccgacguguccagcuccgucaucacgagccugggggccaucguguccugcuacggcaagaccaagugcaccgccagcaacaagaacaaggggaucaucaagaccuucuccaacggcugcgacuacgugagcaacaagggcgucgacacgguguccguggggaacacccuguacuacgucaacaagcaggagggccagagccucuacgugaagggggagcccaucaucaacuucuacgacccgcugguguuccccagcgacgaguucgacgccuccaucagccaggucaacgagaagaucaaccagucccuggcguucauccggaaguccgacgagcuccugcacaacgugaacgccggcaaguccaccaccaacaucaugaucaccacgaucaucaucgugaucaucgucauccugcucagccugaucgccguggggcugcuccuguacugcaaggcccgcugaggacuaguacuggcugcaucucccuuuccucuguccuccauccuucucccaggauggugaagggggaccugguacccagugauccccaccccaggauccuaaaucaugacuuaccugcuaauaaaaacucauuggaaaagugagaagaucuaaaaaaaaaaaaaaaaaaaaaaaaaaaaaaaaaaaaaaaaaaaaaaaaaaaaaaaaaaaaaaaaugcaucccccccccccccccccccccccccccccccaaaggcucuuuucagagccaccagaauu

SEQ ID NO: 6644 - RNA, 1914 nt, Artificial Sequence
  mRNA product Design e-6 comprising derived and/or modified sequence from HRSV(A2)__F-del_DSCav1_mut6 (opt2)
gggagagcggcucggccauuuugucccagucaguccggaggcugcggcugcagaaguaccgccugcggaguaacugcaaagaagcuuaccauggagcuccucauccucaaggccaacgccaucaccaccauccucaccgccgucaccuucugcuucgccuccggccagaacaucaccgaggaguucuaccaguccaccugcuccgccgucuccaagggcuaccucggcgcccuccgcaccggcugguacaccuccgucaucaccaucgagcucuccaacaucaaggagaacaagugcaacggcaccgacgccaaggucaagcucaucaagcaggagcucgacaaguacaagaacgccgucaccgaccuccagaugcucaugugcuccacccccgccaccggcuccggcuccgccaucgccuccggcgucgccgucugcaagguccuccaccucgagggcgaggucaacaagaucaaguccgcccuccucuccaccaacaaggccgucgucucccucuccaacggcgucuccguccucaccuucaagguccucgaccucaagaacuacaucgacaagcagcuccuccccauccucaacaagcaguccugcuccauccccaaccccgagaccgucauggaguuccagcagaagaacaaccgccuccucgagaucacccgcgaguucuccgucaacgccggcgucaccacccccgucuccaccuacaugcucaccaacuccgagcuccucucccucaucaacgacaugcccaucaccaacgaccagaagaagcucauguccaacaacguccagaucguccgccagcaguccuacuccaucaugugcaucaucaaggaggagguccucgccuacgucguccagcucccccucuacggcgucaucgacacccccugcuggaagcuccacaccuccccccucugcaccaccaacaccaaggagggcuccaacaucugccucacccgcaccgaccgcggcugguacugcgacaacgccggcuccgucuccuucuucccccaggccgagaccugcaaggucugcuccaaccgcgucuucugcgacaccaugaacucccucacccuccccuccgaggucaaccucugcaacgucgacaucuucaaccccaaguacgacugcaagaucaugaccuccaagaccgacgucuccuccuccgucaucaccucccucggcgccaucgucuccugcuacggcaagaccaagugcaccgccuccaacaagaacaagggcaucaucaagaccuucuccaacggcugcgacuacgucuccaacaagggcgucgacaccgucuccgucggcaacacccucuacuacgucaacaagcaggagggccagucccucuacgucaagggcgagcccaucaucaacuucuacgacccccucgucuuccccuccgacgaguucgacgccuccaucucccaggucaacgagaagaucaaccagucccucgccuucauccgcaaguccgacgagcuccuccacaacgucaacgccggcaaguccaccaccaacaucaugaucaccaccaucaucaucgucaucaucgucauccuccucucccucaucgccgucggccuccuccucuacugcaaggcccgcugaggacuaguacuggcugcaucucccuuuccucuguccuccauccuucucccaggauggugaagggggaccugguacccagugauccccaccccaggauccuaaaucaugacuuaccugcuaauaaaaacucauuggaaaagugagaagaucuaaaaaaaaaaaaaaaaaaaaaaaaaaaaaaaaaaaaaaaaaaaaaaaaaaaaaaaaaaaaaaaaugcaucccccccccccccccccccccccccccccccaaaggcucuuuucagagccaccagaauu

SEQ ID NO: 6645 - RNA, 1914 nt, Artificial Sequence
  mRNA product Design e-6 comprising derived and/or modified sequence from HRSV(A2)__F-del_DSCav1_mut6 (opt3)
gggagagcggcucggccauuuugucccagucaguccggaggcugcggcugcagaaguaccgccugcggaguaacugcaaagaagcuuaccauggagcugcucauccuuaaggccaacgcuauuaccacaauacugacugcagugacguucugcuuugccagcggccagaauaucaccgaagaguucuaccaauccacauguucugcggucucaaaaggguauuugggagcuuuaagaacugguugguacaccaguguuauuacaaucgaacugagcaacauuaaggagaauaaaugcaacggcaccgacgccaaggugaaacuaaucaagcaggaacucgauaaguauaaaaaugcaguaacugaccugcagaugcuuauguguuccacacccgccaccgggucuggaucggcuauagcaucaggcguggccgucugcaaggugcugcacuuggagggugagguuaacaaaaucaagagcgcucuccugaguacgaauaaagccguggucucccugucuaacggggugagcguacucacuuuuaagguuuuagaucugaagaauuacauugacaaacagcuuuugccuauccugaacaagcaauccuguucaauuccaaauccggaaaccgugauggaguuccagcagaaaaacaauaggcuacucgaaaucacacgggaguuuagugucaacgcgggagugacuacccccgugagcacauauaugcugaccaauucugagcuucuguccuugauaaacgauaugccuauuacgaacgaccagaagaaacucaugucaaauaacguccaaaucguucgccagcagagcuacaguauuaugugcaucaucaaggaagaggugcuggcauauguagugcaguuaccacuguacggcgucauugauacucccuguuggaaacuccauacaucuccucuuugcaccacuaauacaaaggaaggcuccaacauaugucugacccgaacggaccgugggugguacugcgauaaugccggaagcgugucguucuuuccacaagcugagaccuguaagguuugcucuaacagaguguucugcgacacaaugaacuccuugacucuacccucagaagucaaucuguguaauguggauaucuuuaacccuaaauaugacugcaagauuaugaccaguaaaacagauguaagcuccucuguuaucacuagccucggugccauagugucauguuacggcaagaccaaaugcacagcaaguaauaagaacaaggggauuaucaaaaccuucuccaauggaugugacuaugucagcaacaagggcguggacacugucucuguggguaauacgcuguacuauguuaacaaacaggaggggcagucacuuuacgugaagggagagccaaucauuaacuuuuaugauccgcugguauuccccagugacgaauuugaugcuagcaucucccaagucaaugagaaaauuaaccagucuuuggccuucauaaggaagucggacgaacuccugcacaaugugaacgcgggcaagagcacaaccaauaucaugauuacuaccaucaucauuguuauaaucgugauuuuacugucccuaaucgccgucggccuccugcuuuacugcaaagcacggugaggacuaguacuggcugcaucucccuuuccucuguccuccauccuucucccaggauggugaagggggaccugguacccagugauccccaccccaggauccuaaaucaugacuuaccugcuaauaaaaacucauuggaaaagugagaagaucuaaaaaaaaaaaaaaaaaaaaaaaaaaaaaaaaaaaaaaaaaaaaaaaaaaaaaaaaaaaaaaaaugcaucccccccccccccccccccccccccccccccaaaggcucuuuucagagccaccagaauu

SEQ ID NO: 6646 - RNA, 1914 nt, Artificial Sequence
  mRNA product Design e-6 comprising derived and/or modified sequence from HRSV(A2)__F-del_DSCav1_mut6 (opt4)
gggagagcggcucggccauuuugucccagucaguccggaggcugcggcugcagaaguaccgccugcggaguaacugcaaagaagcuuaccauggagcugcugauccugaaggccaacgccaucaccaccauccugaccgccgugaccuucugcuucgccagcggccagaacaucaccgaggaguucuaccagagcaccugcagcgccgugagcaagggcuaccugggcgcccugagaaccggcugguacaccagcgugaucaccaucgagcugagcaacaucaaggagaacaagugcaacggcaccgacgccaaggugaagcugaucaagcaggagcuggacaaguacaagaacgccgugaccgaccugcagaugcugaugugcagcacccccgccaccggcagcggcagcgccaucgccagcggcguggccgugugcaaggugcugcaccuggagggcgaggugaacaagaucaagagcgcccugcugagcaccaacaaggccguggugagccugagcaacggcgugagcgugcugaccuucaaggugcuggaccugaagaacuacaucgacaagcagcugcugcccauccugaacaagcagagcugcagcauccccaaccccgagaccgugauggaguuccagcagaagaacaacagacugcuggagaucaccagagaguucagcgugaacgccggcgugaccacccccgugagcaccuacaugcugaccaacagcgagcugcugagccugaucaacgacaugcccaucaccaacgaccagaagaagcugaugagcaacaacgugcagaucgugagacagcagagcuacagcaucaugugcaucaucaaggaggaggugcuggccuacguggugcagcugccccuguacggcgugaucgacacccccugcuggaagcugcacaccagcccccugugcaccaccaacaccaaggagggcagcaacaucugccugaccagaaccgacagaggcugguacugcgacaacgccggcagcgugagcuucuucccccaggccgagaccugcaaggugugcagcaacagaguguucugcgacaccaugaacagccugacccugcccagcgaggugaaccugugcaacguggacaucuucaaccccaaguacgacugcaagaucaugaccagcaagaccgacgugagcagcagcgugaucaccagccugggcgccaucgugagcugcuacggcaagaccaagugcaccgccagcaacaagaacaagggcaucaucaagaccuucagcaacggcugcgacuacgugagcaacaagggcguggacaccgugagcgugggcaacacccuguacuacgugaacaagcaggagggccagagccuguacgugaagggcgagcccaucaucaacuucuacgacccccugguguuccccagcgacgaguucgacgccagcaucagccaggugaacgagaagaucaaccagagccuggccuucaucagaaagagcgacgagcugcugcacaacgugaacgccggcaagagcaccaccaacaucaugaucaccaccaucaucaucgugaucaucgugauccugcugagccugaucgccgugggccugcugcuguacugcaaggccagaugaggacuaguacuggcugcaucucccuuuccucuguccuccauccuucucccaggauggugaagggggaccugguacccagugauccccaccccaggauccuaaaucaugacuuaccugcuaauaaaaacucauuggaaaagugagaagaucuaaaaaaaaaaaaaaaaaaaaaaaaaaaaaaaaaaaaaaaaaaaaaaaaaaaaaaaaaaaaaaaaugcaucccccccccccccccccccccccccccccccaaaggcucuuuucagagccaccagaauu

SEQ ID NO: 6647 - RNA, 1914 nt, Artificial Sequence
  mRNA product Design e-6 comprising derived and/or modified sequence from HRSV(A2)__F-del_DSCav1_mut6 (opt5)
gggagagcggcucggccauuuugucccagucaguccggaggcugcggcugcagaaguaccgccugcggaguaacugcaaagaagcuuaccauggagcugcucauccugaaggccaacgcuauuaccacaauccuuacggccgugaccuucugcuuugcgagcggccagaauauuacagaagaguucuaccaauccaccuguucugcugucagcaaaggguaucugggagcccucagaacaggcugguacaccuccguuaucacaauugaacugucuaacaucaaggagaauaaaugcaacgggaccgacgccaaggugaaacuuaucaagcaggaacuggauaaguauaaaaaugcugugacggaccuccagaugcugauguguagcacccccgccacaggauccggcucugcuauugccagcggggucgcggugugcaagguucugcaccucgagggagaggugaacaaaaucaaguccgcccugcuuagcaccaauaaagcugucgugucucuguccaacggcguuagcgugcucacauuuaagguccuggaucuuaagaauuacauugacaaacagcugcucccuauccugaacaagcaaucuuguuccauuccgaaucccgaaaccgugauggaguuccagcagaaaaacaaucggcugcucgaaaucacgcgcgaguuuagcgugaacgccggcgucacaaccccuguuucuacauauaugcugaccaauuccgagcuucugagccucauuaacgauaugcccaucaccaacgaccagaagaaacugauguccaauaacgugcaaaucgugagacagcagucuuacagcauuaugugcaucauuaaggaagagguccuugcuuaugugguucagcugccucucuacggggugaucgauacacccuguuggaaacugcauacguccccucugugcaccacaaauaccaaggaaggaagcaacauuugucucacacggaccgaccgcggcugguacugcgauaaugccgggucugucuccuucuuuccgcaagcggagacguguaaggugugcagcaacagaguuuucugcgacacaaugaacucucugacccuucccagcgaagugaaucuguguaaugucgauaucuuuaacccuaaauaugacugcaagaucaugaccuccaaaacagaugugucuagcuccgucauuaccagccucggagccaucgugucuuguuacggcaagacaaaaugcacggcuuccaauaagaacaaggggauuaucaaaaccuucagcaauggaugugacuauguuucuaacaagggcguggacacagucuccgugggcaauacccuguacuauguuaacaaacaggaggggcagagccuuuacgugaagggagagcccauuaucaacuuuuaugauccucuggucuuccccuccgacgaauuugaugccucuaucagccaagugaaugagaaaauuaaccagucccucgcuuucauccggaagucugacgaacugcugcacaaugugaacgccggcaagagcacaaccaauauuaugaucacgaccauuaucauuguuaucaucgucauucuccugucccuuaucgccguggggcugcuccuguacugcaaagcucgcugaggacuaguacuggcugcaucucccuuuccucuguccuccauccuucucccaggauggugaagggggaccugguacccagugauccccaccccaggauccuaaaucaugacuuaccugcuaauaaaaacucauuggaaaagugagaagaucuaaaaaaaaaaaaaaaaaaaaaaaaaaaaaaaaaaaaaaaaaaaaaaaaaaaaaaaaaaaaaaaaugcaucccccccccccccccccccccccccccccccaaaggcucuuuucagagccaccagaauu

SEQ ID NO: 6648 - RNA, 1914 nt, Artificial Sequence
  mRNA product Design e-6 comprising derived and/or modified sequence from HRSV(A2)__F-del_DSCav1_mut6 (opt6)
gggagagcggcucggccauuuugucccagucaguccggaggcugcggcugcagaaguaccgccugcggaguaacugcaaagaagcuuaccauggaacuacucauauuaaaagcaaacgcaauaacaacgauauuaacagcuguaacauucugcuuugcaucaggccaaaauaucaccgaagaauuuuaucaaagcacaugcucugcaguauccaaaggauacuuaggagcauuaagaacaggcugguacacauccguaauaacaauagaacuaucaaacaucaaagaaaacaaaugcaacggcacagacgccaaaguaaaacucauaaaacaagaacuagacaaauauaaaaacgcaguaacagaucuacaaaugcucaugugcuccacaccagcaaccggaucugguucagccauagcauccggcguagccgucugcaaaguauuacaccucgaaggagaaguaaacaaaauaaaaucugcccuauuaucuacaaauaaagccguaguaagucuaaguaacggaguaucaguacuaacauuuaaaguccuagaccugaaaaacuauaucgacaaacaacuauuaccaauacuaaacaaacaauccuguuccaucccuaacccagaaacaguuauggaauuucaacaaaaaaauaaccgccuuuuagaaauaacuagagaauuuucaguaaacgcaggaguuacaacaccaguaucaacauacaugcuaacaaauucagaauuauuaucccuuauaaaugacaugccuaucacaaacgaucaaaaaaaauuaauguccaacaacguacaaauaguaagacaacaaucauauuccaucaugugcaucauaaaagaagaaguccucgcauacguagugcaacuaccacuauacggagucauagauacacccuguuggaaacuucacacaucuccacuaugcacaacaaacacgaaagaaggauccaacauaugccuaacacgaacagacagaggaugguauugcgacaacgcuggaagugugagcuucuucccucaagcagaaacuugcaaaguaugcagcaaucguguauucugcgacacaaugaacucauuaacacucccaagcgaaguaaaccucugcaauguagacaucuuuaauccaaaauacgauuguaaaauaaugacuucaaaaacagacgucucaucaucuguaauaacaucuuuaggagcaauaguuucuugcuacgguaaaacaaaaugcaccgcauccaacaaaaacaaaggaauaauaaaaacauucucuaacggcugcgauuacguaucuaacaaaggaguugacacagucucaguaggaaacacacuauacuacguaaacaaacaagaaggacaaagccuauacguaaaaggagaaccaauaauaaacuucuaugacccauuaguauuuccaagcgaugaauuugacgcuucaauaucacaagucaaugaaaaaauaaaucagagcuuagcauucauaagaaaaucugaugaacuacuacacaauguaaaugcaggaaaauccacuaccaacauaaugauuaccacaauuauaauaguuaucauaguaauacuauuaucacuaauagccguuggauuacuacuauacugcaaagcaagauaaggacuaguacuggcugcaucucccuuuccucuguccuccauccuucucccaggauggugaagggggaccugguacccagugauccccaccccaggauccuaaaucaugacuuaccugcuaauaaaaacucauuggaaaagugagaagaucuaaaaaaaaaaaaaaaaaaaaaaaaaaaaaaaaaaaaaaaaaaaaaaaaaaaaaaaaaaaaaaaaugcaucccccccccccccccccccccccccccccccaaaggcucuuuucagagccaccagaauu

SEQ ID NO: 6649 - RNA, 1914 nt, Artificial Sequence
  mRNA product Design e-6 comprising derived and/or modified sequence from HRSV(A2)__F-del_DSCav1_mut6 (opt11)
gggagagcggcucggccauuuugucccagucaguccggaggcugcggcugcagaaguaccgccugcggaguaacugcaaagaagcuuaccauggaacuacucauccuaaaagcaaacgccaucaccaccauacuaaccgccgucaccuucugcuucgccucgggacaaaacaucaccgaagaguucuaccagucaacgugcuccgccgucucaaaaggcuaccuaggcgcccuccgcaccgggugguauaccuccgucauaacuaucgaacucucuaacaucaaagaaaacaaauguaacggcaccgacgccaaagucaaacuaaucaaacaagaacuggacaaauacaaaaacgccgucaccgaccuacaaaugcucaugugcuccacuccagccaccggcuccgguagcgcaaucgccucaggcguagcuguaugcaaaguccuccaccuagaaggcgaaguaaacaaaauaaaauccgcccuccucucaaccaacaaggccgucgucucacucucaaacggcgucuccguacucaccuuuaaaguccuagaccuuaaaaacuacaucgacaaacaacugcuaccaauccucaacaaacaaucaugcagcaucccaaacccggaaacagucauggaguuccaacagaaaaacaaccgacuccucgaaaucacccgcgaguucuccgucaacgccggagucaccacaccuguaagcacauacaugcuuacuaauuccgaacuccuuucacuaauaaacgacaugccaauaaccaacgaccaaaagaaacucauguccaacaacguacaaaucguacgccaacaauccuacuccaucaugugcaucaucaaagaagaaguccuggccuaugucguacaacucccccuuuacggugucaucgacacacccugcuggaaacuacacaccagcccccucugcacaacaaacaccaaagaaggcuccaacaucugccucacccguaccgaccgaggcugguacugcgacaacgccggcuccgucuccuucuucccccaagccgaaaccugcaaagucugcagcaaccgcgucuucugcgauaccaugaacucccucacacucccaucugaagucaaccucugcaacgucgauauuuucaauccaaaauacgacugcaaaaucaugacuagcaaaaccgacguuagcuccuccgucaucaccucccucggcgccauaguuucaugcuacggcaaaaccaaaugcaccgccuccaacaaaaacaaaggcaucauaaaaaccuucuccaacgggugcgacuacguaucuaauaaaggagucgacaccgucucaguaggaaacacccucuacuaugucaacaaacaagaaggccaaucacuauacguuaaaggcgaaccaaucaucaacuucuacgacccacucgucuuccccagcgacgaguuugacgccucaaucucgcaagucaaugaaaagauuaaccaaucccuagccuucauccgaaaaagugacgaacuccuccacaacguuaacgccggcaaaucuacaaccaacaucaugaucaccacuauaaucaucgucaucauagucauacuucucagccucaucgcagucggacuccuccuuuauugcaaggcacgauaaggacuaguacuggcugcaucucccuuuccucuguccuccauccuucucccaggauggugaagggggaccugguacccagugauccccaccccaggauccuaaaucaugacuuaccugcuaauaaaaacucauuggaaaagugagaagaucuaaaaaaaaaaaaaaaaaaaaaaaaaaaaaaaaaaaaaaaaaaaaaaaaaaaaaaaaaaaaaaaaugcaucccccccccccccccccccccccccccccccaaaggcucuuuucagagccaccagaauu

SEQ ID NO: 6650 - RNA, 2130 nt, Artificial Sequence
  mRNA product Design f-1 comprising derived and/or modified sequence from HRSV(A2)__F-del_DSCav1_mut6 (opt1)
gggagagcggcucggccauuuugucccagucaguccggaggcugcggcugcagaaguaccgccugcggaguaacugcaaagaagcuuaccauggagcugcucauccugaaggccaacgccaucaccaccauccugacggcggugaccuucugcuucgccagcggccagaacaucaccgaggaguucuaccaguccacgugcagcgccgucuccaagggguaccucggcgcccugcggaccggcugguacaccuccgugaucaccaucgagcugagcaacaucaaggagaacaagugcaacgggaccgacgccaaggugaagcucaucaagcaggagcuggacaaguacaagaacgcggucacggaccugcagaugcugaugugcuccaccccggcaaccggcuccggcuccgccaucgcgagcggcgucgccgugugcaaggugcugcaccucgagggggaggucaacaagaucaagagcgcccugcuguccaccaacaaggccguggugagccucuccaacggcgucagcgugcugaccuucaaggugcuggaccucaagaacuacaucgacaagcagcugcugcccauccugaacaagcagagcugcuccauccccaaccccgagacggugauggaguuccagcagaagaacaaccggcuccuggagaucacccgcgaguucagcgugaacgccggggucaccacccccguguccacguacaugcugaccaacagcgagcuccugucccugaucaacgacaugccgaucaccaacgaccagaagaagcucaugagcaacaacgugcagaucguccggcagcaguccuacagcaucaugugcaucaucaaggaggaggugcuggcguacgugguccagcugccccucuacggcgugaucgacacccccugcuggaagcugcacacgagcccccugugcaccaccaacaccaaggagggguccaacaucugccucacgcgcaccgaccggggcugguacugcgacaacgccggcagcgucuccuucuucccgcaggccgagaccugcaaggugugcagcaaccgcguguucugcgacaccaugaacucccugacgcugcccagcgagguaaaccucugcaacgucgacaucuucaaccccaaguacgacugcaagaucaugaccuccaagaccgacgugagcuccagcgugaucaccucccugggggccaucgucagcugcuacggcaagacgaagugcaccgccagcaacaagaacaaggggaucaucaagaccuucuccaacggcugcgacuacgugagcaacaagggcguggacaccguguccgucgggaacacccuguacuacgugaacaagcaggagggccagagccucuacgugaagggggagcccaucaucaacuucuacgacccgcuggucuuccccuccgacgaguucgacgcgagcaucucccaggugaacgagaagaucaaccagagccuggccuucauccgcaaguccgacgagcugcuccacaacgugaacgccggcaagagcacgaccaacaucaugaucaccaccaucaucaucgucaucaucgugauccugcugucccucaucgccguggggcugcugcucuacugcaaggcccggugaggacuagugaagggaacacccaaauuuaauucagccuuaagcacaauuaauuaagagugaaacguaauuguacaagcaguuggucacccaccauagggcaugaucaacaccgcaaccuuuccuuuuucccccagugauucugaaaaaccccucuucccuucagcuugcuuagauguuccaaauuuaguaagcuuaaggcggccuacagaagaaaaagaaaaaaaaggccacaaaaguucccucucacuuucaguaaauaaaauaaaagcagcaacagaaauaaagaaauaaaugaaauucaaaaugaaauaaauauuguguugugcagcauuaaaaaaucaauaaaaauuaaaaaugagcaagaucuaaaaaaaaaaaaaaaaaaaaaaaaaaaaaaaaaaaaaaaaaaaaaaaaaaaaaaaaaaaaaaaaugcaucccccccccccccccccccccccccccccccaaaggcucuuuucagagccaccagaauu

SEQ ID NO: 6651 - RNA, 2130 nt, Artificial Sequence
  mRNA product Design f-1 comprising derived and/or modified sequence from HRSV(A2)__F-del_DSCav1_mut6 (opt1)
gggagagcggcucggccauuuugucccagucaguccggaggcugcggcugcagaaguaccgccugcggaguaacugcaaagaagcuuaccauggagcugcucauccugaaggccaacgccaucaccaccauccugacggcggugaccuucugcuucgccagcggccagaacaucaccgaggaguucuaccaguccacgugcagcgccgucuccaagggguaccucggcgcccugcgcaccgggugguacaccagcgugaucaccaucgagcuguccaacaucaaggagaacaagugcaacggcaccgacgccaaggugaagcucaucaagcaggagcuggacaaguacaagaacgcggucacggaccugcagaugcucaugugcagcacccccgccaccggguccggcagcgccaucgccuccggcguggcggugugcaagguccugcaccuggagggggaggugaacaagaucaagagcgcccuccuguccaccaacaaggccguggucagccuguccaacggcgugagcgugcucacguucaagguccuggaccugaagaacuacaucgacaagcagcuccugccgauccugaacaagcaguccugcagcauccccaaccccgagaccgugauggaguuccagcagaagaacaaccggcuccuggagaucacccgcgaguucuccgugaacgccggggucaccacgcccgugagcaccuacaugcugaccaacuccgagcuccugagccugaucaacgacaugccgaucaccaacgaccagaagaagcucaugagcaacaacgugcagaucguccggcagcaguccuacagcaucaugugcaucaucaaggaggaggugcuggccuacgugguccagcugccccucuacggcgugaucgacacgcccugcuggaagcugcacaccagcccccugugcaccaccaacacgaaggaggggagcaacaucugccucacccgcaccgaccggggcugguacugcgacaacgcgggcuccgugagcuucuucccgcaggccgagaccugcaaggucugcuccaaccgcguguucugcgacacgaugaacagccugacccugcccuccgaggucaaccucugcaacguggacaucuucaaccccaaguacgacugcaagaucaugaccagcaagaccgacguguccagcuccgucaucacgagccugggggccaucguguccugcuacggcaagaccaagugcaccgccagcaacaagaacaaggggaucaucaagaccuucuccaacggcugcgacuacgugagcaacaagggcgucgacacgguguccguggggaacacccuguacuacgucaacaagcaggagggccagagccucuacgugaagggggagcccaucaucaacuucuacgacccgcugguguuccccagcgacgaguucgacgccuccaucagccaggucaacgagaagaucaaccagucccuggcguucauccggaaguccgacgagcuccugcacaacgugaacgccggcaaguccaccaccaacaucaugaucaccacgaucaucaucgugaucaucgucauccugcucagccugaucgccguggggcugcuccuguacugcaaggcccgcugaggacuagugaagggaacacccaaauuuaauucagccuuaagcacaauuaauuaagagugaaacguaauuguacaagcaguuggucacccaccauagggcaugaucaacaccgcaaccuuuccuuuuucccccagugauucugaaaaaccccucuucccuucagcuugcuuagauguuccaaauuuaguaagcuuaaggcggccuacagaagaaaaagaaaaaaaaggccacaaaaguucccucucacuuucaguaaauaaaauaaaagcagcaacagaaauaaagaaauaaaugaaauucaaaaugaaauaaauauuguguugugcagcauuaaaaaaucaauaaaaauuaaaaaugagcaagaucuaaaaaaaaaaaaaaaaaaaaaaaaaaaaaaaaaaaaaaaaaaaaaaaaaaaaaaaaaaaaaaaaugcaucccccccccccccccccccccccccccccccaaaggcucuuuucagagccaccagaauu

SEQ ID NO: 6652 - RNA, 2130 nt, Artificial Sequence
  mRNA product Design f-1 comprising derived and/or modified sequence from HRSV(A2)__F-del_DSCav1_mut6 (opt2)
gggagagcggcucggccauuuugucccagucaguccggaggcugcggcugcagaaguaccgccugcggaguaacugcaaagaagcuuaccauggagcuccucauccucaaggccaacgccaucaccaccauccucaccgccgucaccuucugcuucgccuccggccagaacaucaccgaggaguucuaccaguccaccugcuccgccgucuccaagggcuaccucggcgcccuccgcaccggcugguacaccuccgucaucaccaucgagcucuccaacaucaaggagaacaagugcaacggcaccgacgccaaggucaagcucaucaagcaggagcucgacaaguacaagaacgccgucaccgaccuccagaugcucaugugcuccacccccgccaccggcuccggcuccgccaucgccuccggcgucgccgucugcaagguccuccaccucgagggcgaggucaacaagaucaaguccgcccuccucuccaccaacaaggccgucgucucccucuccaacggcgucuccguccucaccuucaagguccucgaccucaagaacuacaucgacaagcagcuccuccccauccucaacaagcaguccugcuccauccccaaccccgagaccgucauggaguuccagcagaagaacaaccgccuccucgagaucacccgcgaguucuccgucaacgccggcgucaccacccccgucuccaccuacaugcucaccaacuccgagcuccucucccucaucaacgacaugcccaucaccaacgaccagaagaagcucauguccaacaacguccagaucguccgccagcaguccuacuccaucaugugcaucaucaaggaggagguccucgccuacgucguccagcucccccucuacggcgucaucgacacccccugcuggaagcuccacaccuccccccucugcaccaccaacaccaaggagggcuccaacaucugccucacccgcaccgaccgcggcugguacugcgacaacgccggcuccgucuccuucuucccccaggccgagaccugcaaggucugcuccaaccgcgucuucugcgacaccaugaacucccucacccuccccuccgaggucaaccucugcaacgucgacaucuucaaccccaaguacgacugcaagaucaugaccuccaagaccgacgucuccuccuccgucaucaccucccucggcgccaucgucuccugcuacggcaagaccaagugcaccgccuccaacaagaacaagggcaucaucaagaccuucuccaacggcugcgacuacgucuccaacaagggcgucgacaccgucuccgucggcaacacccucuacuacgucaacaagcaggagggccagucccucuacgucaagggcgagcccaucaucaacuucuacgacccccucgucuuccccuccgacgaguucgacgccuccaucucccaggucaacgagaagaucaaccagucccucgccuucauccgcaaguccgacgagcuccuccacaacgucaacgccggcaaguccaccaccaacaucaugaucaccaccaucaucaucgucaucaucgucauccuccucucccucaucgccgucggccuccuccucuacugcaaggcccgcugaggacuagugaagggaacacccaaauuuaauucagccuuaagcacaauuaauuaagagugaaacguaauuguacaagcaguuggucacccaccauagggcaugaucaacaccgcaaccuuuccuuuuucccccagugauucugaaaaaccccucuucccuucagcuugcuuagauguuccaaauuuaguaagcuuaaggcggccuacagaagaaaaagaaaaaaaaggccacaaaaguucccucucacuuucaguaaauaaaauaaaagcagcaacagaaauaaagaaauaaaugaaauucaaaaugaaauaaauauuguguugugcagcauuaaaaaaucaauaaaaauuaaaaaugagcaagaucuaaaaaaaaaaaaaaaaaaaaaaaaaaaaaaaaaaaaaaaaaaaaaaaaaaaaaaaaaaaaaaaaugcaucccccccccccccccccccccccccccccccaaaggcucuuuucagagccaccagaauu

SEQ ID NO: 6653 - RNA, 2130 nt, Artificial Sequence
  mRNA product Design f-1 comprising derived and/or modified sequence from HRSV(A2)__F-del_DSCav1_mut6 (opt3)
gggagagcggcucggccauuuugucccagucaguccggaggcugcggcugcagaaguaccgccugcggaguaacugcaaagaagcuuaccauggagcugcucauccuuaaggccaacgcuauuaccacaauacugacugcagugacguucugcuuugccagcggccagaauaucaccgaagaguucuaccaauccacauguucugcggucucaaaaggguauuugggagcuuuaagaacugguugguacaccaguguuauuacaaucgaacugagcaacauuaaggagaauaaaugcaacggcaccgacgccaaggugaaacuaaucaagcaggaacucgauaaguauaaaaaugcaguaacugaccugcagaugcuuauguguuccacacccgccaccgggucuggaucggcuauagcaucaggcguggccgucugcaaggugcugcacuuggagggugagguuaacaaaaucaagagcgcucuccugaguacgaauaaagccguggucucccugucuaacggggugagcguacucacuuuuaagguuuuagaucugaagaauuacauugacaaacagcuuuugccuauccugaacaagcaauccuguucaauuccaaauccggaaaccgugauggaguuccagcagaaaaacaauaggcuacucgaaaucacacgggaguuuagugucaacgcgggagugacuacccccgugagcacauauaugcugaccaauucugagcuucuguccuugauaaacgauaugccuauuacgaacgaccagaagaaacucaugucaaauaacguccaaaucguucgccagcagagcuacaguauuaugugcaucaucaaggaagaggugcuggcauauguagugcaguuaccacuguacggcgucauugauacucccuguuggaaacuccauacaucuccucuuugcaccacuaauacaaaggaaggcuccaacauaugucugacccgaacggaccgugggugguacugcgauaaugccggaagcgugucguucuuuccacaagcugagaccuguaagguuugcucuaacagaguguucugcgacacaaugaacuccuugacucuacccucagaagucaaucuguguaauguggauaucuuuaacccuaaauaugacugcaagauuaugaccaguaaaacagauguaagcuccucuguuaucacuagccucggugccauagugucauguuacggcaagaccaaaugcacagcaaguaauaagaacaaggggauuaucaaaaccuucuccaauggaugugacuaugucagcaacaagggcguggacacugucucuguggguaauacgcuguacuauguuaacaaacaggaggggcagucacuuuacgugaagggagagccaaucauuaacuuuuaugauccgcugguauuccccagugacgaauuugaugcuagcaucucccaagucaaugagaaaauuaaccagucuuuggccuucauaaggaagucggacgaacuccugcacaaugugaacgcgggcaagagcacaaccaauaucaugauuacuaccaucaucauuguuauaaucgugauuuuacugucccuaaucgccgucggccuccugcuuuacugcaaagcacggugaggacuagugaagggaacacccaaauuuaauucagccuuaagcacaauuaauuaagagugaaacguaauuguacaagcaguuggucacccaccauagggcaugaucaacaccgcaaccuuuccuuuuucccccagugauucugaaaaaccccucuucccuucagcuugcuuagauguuccaaauuuaguaagcuuaaggcggccuacagaagaaaaagaaaaaaaaggccacaaaaguucccucucacuuucaguaaauaaaauaaaagcagcaacagaaauaaagaaauaaaugaaauucaaaaugaaauaaauauuguguugugcagcauuaaaaaaucaauaaaaauuaaaaaugagcaagaucuaaaaaaaaaaaaaaaaaaaaaaaaaaaaaaaaaaaaaaaaaaaaaaaaaaaaaaaaaaaaaaaaugcaucccccccccccccccccccccccccccccccaaaggcucuuuucagagccaccagaauu

SEQ ID NO: 6654 - RNA, 2130 nt, Artificial Sequence
  mRNA product Design f-1 comprising derived and/or modified sequence from HRSV(A2)__F-del_DSCav1_mut6 (opt4)
gggagagcggcucggccauuuugucccagucaguccggaggcugcggcugcagaaguaccgccugcggaguaacugcaaagaagcuuaccauggagcugcugauccugaaggccaacgccaucaccaccauccugaccgccgugaccuucugcuucgccagcggccagaacaucaccgaggaguucuaccagagcaccugcagcgccgugagcaagggcuaccugggcgcccugagaaccggcugguacaccagcgugaucaccaucgagcugagcaacaucaaggagaacaagugcaacggcaccgacgccaaggugaagcugaucaagcaggagcuggacaaguacaagaacgccgugaccgaccugcagaugcugaugugcagcacccccgccaccggcagcggcagcgccaucgccagcggcguggccgugugcaaggugcugcaccuggagggcgaggugaacaagaucaagagcgcccugcugagcaccaacaaggccguggugagccugagcaacggcgugagcgugcugaccuucaaggugcuggaccugaagaacuacaucgacaagcagcugcugcccauccugaacaagcagagcugcagcauccccaaccccgagaccgugauggaguuccagcagaagaacaacagacugcuggagaucaccagagaguucagcgugaacgccggcgugaccacccccgugagcaccuacaugcugaccaacagcgagcugcugagccugaucaacgacaugcccaucaccaacgaccagaagaagcugaugagcaacaacgugcagaucgugagacagcagagcuacagcaucaugugcaucaucaaggaggaggugcuggccuacguggugcagcugccccuguacggcgugaucgacacccccugcuggaagcugcacaccagcccccugugcaccaccaacaccaaggagggcagcaacaucugccugaccagaaccgacagaggcugguacugcgacaacgccggcagcgugagcuucuucccccaggccgagaccugcaaggugugcagcaacagaguguucugcgacaccaugaacagccugacccugcccagcgaggugaaccugugcaacguggacaucuucaaccccaaguacgacugcaagaucaugaccagcaagaccgacgugagcagcagcgugaucaccagccugggcgccaucgugagcugcuacggcaagaccaagugcaccgccagcaacaagaacaagggcaucaucaagaccuucagcaacggcugcgacuacgugagcaacaagggcguggacaccgugagcgugggcaacacccuguacuacgugaacaagcaggagggccagagccuguacgugaagggcgagcccaucaucaacuucuacgacccccugguguuccccagcgacgaguucgacgccagcaucagccaggugaacgagaagaucaaccagagccuggccuucaucagaaagagcgacgagcugcugcacaacgugaacgccggcaagagcaccaccaacaucaugaucaccaccaucaucaucgugaucaucgugauccugcugagccugaucgccgugggccugcugcuguacugcaaggccagaugaggacuagugaagggaacacccaaauuuaauucagccuuaagcacaauuaauuaagagugaaacguaauuguacaagcaguuggucacccaccauagggcaugaucaacaccgcaaccuuuccuuuuucccccagugauucugaaaaaccccucuucccuucagcuugcuuagauguuccaaauuuaguaagcuuaaggcggccuacagaagaaaaagaaaaaaaaggccacaaaaguucccucucacuuucaguaaauaaaauaaaagcagcaacagaaauaaagaaauaaaugaaauucaaaaugaaauaaauauuguguugugcagcauuaaaaaaucaauaaaaauuaaaaaugagcaagaucuaaaaaaaaaaaaaaaaaaaaaaaaaaaaaaaaaaaaaaaaaaaaaaaaaaaaaaaaaaaaaaaaugcaucccccccccccccccccccccccccccccccaaaggcucuuuucagagccaccagaauu

SEQ ID NO: 6655 - RNA, 2130 nt, Artificial Sequence
  mRNA product Design f-1 comprising derived and/or modified sequence from HRSV(A2)__F-del_DSCav1_mut6 (opt5)
gggagagcggcucggccauuuugucccagucaguccggaggcugcggcugcagaaguaccgccugcggaguaacugcaaagaagcuuaccauggagcugcucauccugaaggccaacgcuauuaccacaauccuuacggccgugaccuucugcuuugcgagcggccagaauauuacagaagaguucuaccaauccaccuguucugcugucagcaaaggguaucugggagcccucagaacaggcugguacaccuccguuaucacaauugaacugucuaacaucaaggagaauaaaugcaacgggaccgacgccaaggugaaacuuaucaagcaggaacuggauaaguauaaaaaugcugugacggaccuccagaugcugauguguagcacccccgccacaggauccggcucugcuauugccagcggggucgcggugugcaagguucugcaccucgagggagaggugaacaaaaucaaguccgcccugcuuagcaccaauaaagcugucgugucucuguccaacggcguuagcgugcucacauuuaagguccuggaucuuaagaauuacauugacaaacagcugcucccuauccugaacaagcaaucuuguuccauuccgaaucccgaaaccgugauggaguuccagcagaaaaacaaucggcugcucgaaaucacgcgcgaguuuagcgugaacgccggcgucacaaccccuguuucuacauauaugcugaccaauuccgagcuucugagccucauuaacgauaugcccaucaccaacgaccagaagaaacugauguccaauaacgugcaaaucgugagacagcagucuuacagcauuaugugcaucauuaaggaagagguccuugcuuaugugguucagcugccucucuacggggugaucgauacacccuguuggaaacugcauacguccccucugugcaccacaaauaccaaggaaggaagcaacauuugucucacacggaccgaccgcggcugguacugcgauaaugccgggucugucuccuucuuuccgcaagcggagacguguaaggugugcagcaacagaguuuucugcgacacaaugaacucucugacccuucccagcgaagugaaucuguguaaugucgauaucuuuaacccuaaauaugacugcaagaucaugaccuccaaaacagaugugucuagcuccgucauuaccagccucggagccaucgugucuuguuacggcaagacaaaaugcacggcuuccaauaagaacaaggggauuaucaaaaccuucagcaauggaugugacuauguuucuaacaagggcguggacacagucuccgugggcaauacccuguacuauguuaacaaacaggaggggcagagccuuuacgugaagggagagcccauuaucaacuuuuaugauccucuggucuuccccuccgacgaauuugaugccucuaucagccaagugaaugagaaaauuaaccagucccucgcuuucauccggaagucugacgaacugcugcacaaugugaacgccggcaagagcacaaccaauauuaugaucacgaccauuaucauuguuaucaucgucauucuccugucccuuaucgccguggggcugcuccuguacugcaaagcucgcugaggacuagugaagggaacacccaaauuuaauucagccuuaagcacaauuaauuaagagugaaacguaauuguacaagcaguuggucacccaccauagggcaugaucaacaccgcaaccuuuccuuuuucccccagugauucugaaaaaccccucuucccuucagcuugcuuagauguuccaaauuuaguaagcuuaaggcggccuacagaagaaaaagaaaaaaaaggccacaaaaguucccucucacuuucaguaaauaaaauaaaagcagcaacagaaauaaagaaauaaaugaaauucaaaaugaaauaaauauuguguugugcagcauuaaaaaaucaauaaaaauuaaaaaugagcaagaucuaaaaaaaaaaaaaaaaaaaaaaaaaaaaaaaaaaaaaaaaaaaaaaaaaaaaaaaaaaaaaaaaugcaucccccccccccccccccccccccccccccccaaaggcucuuuucagagccaccagaauu

SEQ ID NO: 6656 - RNA, 2130 nt, Artificial Sequence
  mRNA product Design f-1 comprising derived and/or modified sequence from HRSV(A2)__F-del_DSCav1_mut6 (opt6)
gggagagcggcucggccauuuugucccagucaguccggaggcugcggcugcagaaguaccgccugcggaguaacugcaaagaagcuuaccauggaacuacucauauuaaaagcaaacgcaauaacaacgauauuaacagcuguaacauucugcuuugcaucaggccaaaauaucaccgaagaauuuuaucaaagcacaugcucugcaguauccaaaggauacuuaggagcauuaagaacaggcugguacacauccguaauaacaauagaacuaucaaacaucaaagaaaacaaaugcaacggcacagacgccaaaguaaaacucauaaaacaagaacuagacaaauauaaaaacgcaguaacagaucuacaaaugcucaugugcuccacaccagcaaccggaucugguucagccauagcauccggcguagccgucugcaaaguauuacaccucgaaggagaaguaaacaaaauaaaaucugcccuauuaucuacaaauaaagccguaguaagucuaaguaacggaguaucaguacuaacauuuaaaguccuagaccugaaaaacuauaucgacaaacaacuauuaccaauacuaaacaaacaauccuguuccaucccuaacccagaaacaguuauggaauuucaacaaaaaaauaaccgccuuuuagaaauaacuagagaauuuucaguaaacgcaggaguuacaacaccaguaucaacauacaugcuaacaaauucagaauuauuaucccuuauaaaugacaugccuaucacaaacgaucaaaaaaaauuaauguccaacaacguacaaauaguaagacaacaaucauauuccaucaugugcaucauaaaagaagaaguccucgcauacguagugcaacuaccacuauacggagucauagauacacccuguuggaaacuucacacaucuccacuaugcacaacaaacacgaaagaaggauccaacauaugccuaacacgaacagacagaggaugguauugcgacaacgcuggaagugugagcuucuucccucaagcagaaacuugcaaaguaugcagcaaucguguauucugcgacacaaugaacucauuaacacucccaagcgaaguaaaccucugcaauguagacaucuuuaauccaaaauacgauuguaaaauaaugacuucaaaaacagacgucucaucaucuguaauaacaucuuuaggagcaauaguuucuugcuacgguaaaacaaaaugcaccgcauccaacaaaaacaaaggaauaauaaaaacauucucuaacggcugcgauuacguaucuaacaaaggaguugacacagucucaguaggaaacacacuauacuacguaaacaaacaagaaggacaaagccuauacguaaaaggagaaccaauaauaaacuucuaugacccauuaguauuuccaagcgaugaauuugacgcuucaauaucacaagucaaugaaaaaauaaaucagagcuuagcauucauaagaaaaucugaugaacuacuacacaauguaaaugcaggaaaauccacuaccaacauaaugauuaccacaauuauaauaguuaucauaguaauacuauuaucacuaauagccguuggauuacuacuauacugcaaagcaagauaaggacuagugaagggaacacccaaauuuaauucagccuuaagcacaauuaauuaagagugaaacguaauuguacaagcaguuggucacccaccauagggcaugaucaacaccgcaaccuuuccuuuuucccccagugauucugaaaaaccccucuucccuucagcuugcuuagauguuccaaauuuaguaagcuuaaggcggccuacagaagaaaaagaaaaaaaaggccacaaaaguucccucucacuuucaguaaauaaaauaaaagcagcaacagaaauaaagaaauaaaugaaauucaaaaugaaauaaauauuguguugugcagcauuaaaaaaucaauaaaaauuaaaaaugagcaagaucuaaaaaaaaaaaaaaaaaaaaaaaaaaaaaaaaaaaaaaaaaaaaaaaaaaaaaaaaaaaaaaaaugcaucccccccccccccccccccccccccccccccaaaggcucuuuucagagccaccagaauu

SEQ ID NO: 6657 - RNA, 2130 nt, Artificial Sequence
  mRNA product Design f-1 comprising derived and/or modified sequence from HRSV(A2)__F-del_DSCav1_mut6 (opt11)
gggagagcggcucggccauuuugucccagucaguccggaggcugcggcugcagaaguaccgccugcggaguaacugcaaagaagcuuaccauggaacuacucauccuaaaagcaaacgccaucaccaccauacuaaccgccgucaccuucugcuucgccucgggacaaaacaucaccgaagaguucuaccagucaacgugcuccgccgucucaaaaggcuaccuaggcgcccuccgcaccgggugguauaccuccgucauaacuaucgaacucucuaacaucaaagaaaacaaauguaacggcaccgacgccaaagucaaacuaaucaaacaagaacuggacaaauacaaaaacgccgucaccgaccuacaaaugcucaugugcuccacuccagccaccggcuccgguagcgcaaucgccucaggcguagcuguaugcaaaguccuccaccuagaaggcgaaguaaacaaaauaaaauccgcccuccucucaaccaacaaggccgucgucucacucucaaacggcgucuccguacucaccuuuaaaguccuagaccuuaaaaacuacaucgacaaacaacugcuaccaauccucaacaaacaaucaugcagcaucccaaacccggaaacagucauggaguuccaacagaaaaacaaccgacuccucgaaaucacccgcgaguucuccgucaacgccggagucaccacaccuguaagcacauacaugcuuacuaauuccgaacuccuuucacuaauaaacgacaugccaauaaccaacgaccaaaagaaacucauguccaacaacguacaaaucguacgccaacaauccuacuccaucaugugcaucaucaaagaagaaguccuggccuaugucguacaacucccccuuuacggugucaucgacacacccugcuggaaacuacacaccagcccccucugcacaacaaacaccaaagaaggcuccaacaucugccucacccguaccgaccgaggcugguacugcgacaacgccggcuccgucuccuucuucccccaagccgaaaccugcaaagucugcagcaaccgcgucuucugcgauaccaugaacucccucacacucccaucugaagucaaccucugcaacgucgauauuuucaauccaaaauacgacugcaaaaucaugacuagcaaaaccgacguuagcuccuccgucaucaccucccucggcgccauaguuucaugcuacggcaaaaccaaaugcaccgccuccaacaaaaacaaaggcaucauaaaaaccuucuccaacgggugcgacuacguaucuaauaaaggagucgacaccgucucaguaggaaacacccucuacuaugucaacaaacaagaaggccaaucacuauacguuaaaggcgaaccaaucaucaacuucuacgacccacucgucuuccccagcgacgaguuugacgccucaaucucgcaagucaaugaaaagauuaaccaaucccuagccuucauccgaaaaagugacgaacuccuccacaacguuaacgccggcaaaucuacaaccaacaucaugaucaccacuauaaucaucgucaucauagucauacuucucagccucaucgcagucggacuccuccuuuauugcaaggcacgauaaggacuagugaagggaacacccaaauuuaauucagccuuaagcacaauuaauuaagagugaaacguaauuguacaagcaguuggucacccaccauagggcaugaucaacaccgcaaccuuuccuuuuucccccagugauucugaaaaaccccucuucccuucagcuugcuuagauguuccaaauuuaguaagcuuaaggcggccuacagaagaaaaagaaaaaaaaggccacaaaaguucccucucacuuucaguaaauaaaauaaaagcagcaacagaaauaaagaaauaaaugaaauucaaaaugaaauaaauauuguguugugcagcauuaaaaaaucaauaaaaauuaaaaaugagcaagaucuaaaaaaaaaaaaaaaaaaaaaaaaaaaaaaaaaaaaaaaaaaaaaaaaaaaaaaaaaaaaaaaaugcaucccccccccccccccccccccccccccccccaaaggcucuuuucagagccaccagaauu

SEQ ID NO: 6658 - RNA, 1910 nt, Artificial Sequence
  mRNA product Design f-2 comprising derived and/or modified sequence from HRSV(A2)__F-del_DSCav1_mut6 (opt1)
gggagagcggcucggccauuuugucccagucaguccggaggcugcggcugcagaaguaccgccugcggaguaacugcaaagaagcuuaccauggagcugcucauccugaaggccaacgccaucaccaccauccugacggcggugaccuucugcuucgccagcggccagaacaucaccgaggaguucuaccaguccacgugcagcgccgucuccaagggguaccucggcgcccugcggaccggcugguacaccuccgugaucaccaucgagcugagcaacaucaaggagaacaagugcaacgggaccgacgccaaggugaagcucaucaagcaggagcuggacaaguacaagaacgcggucacggaccugcagaugcugaugugcuccaccccggcaaccggcuccggcuccgccaucgcgagcggcgucgccgugugcaaggugcugcaccucgagggggaggucaacaagaucaagagcgcccugcuguccaccaacaaggccguggugagccucuccaacggcgucagcgugcugaccuucaaggugcuggaccucaagaacuacaucgacaagcagcugcugcccauccugaacaagcagagcugcuccauccccaaccccgagacggugauggaguuccagcagaagaacaaccggcuccuggagaucacccgcgaguucagcgugaacgccggggucaccacccccguguccacguacaugcugaccaacagcgagcuccugucccugaucaacgacaugccgaucaccaacgaccagaagaagcucaugagcaacaacgugcagaucguccggcagcaguccuacagcaucaugugcaucaucaaggaggaggugcuggcguacgugguccagcugccccucuacggcgugaucgacacccccugcuggaagcugcacacgagcccccugugcaccaccaacaccaaggagggguccaacaucugccucacgcgcaccgaccggggcugguacugcgacaacgccggcagcgucuccuucuucccgcaggccgagaccugcaaggugugcagcaaccgcguguucugcgacaccaugaacucccugacgcugcccagcgagguaaaccucugcaacgucgacaucuucaaccccaaguacgacugcaagaucaugaccuccaagaccgacgugagcuccagcgugaucaccucccugggggccaucgucagcugcuacggcaagacgaagugcaccgccagcaacaagaacaaggggaucaucaagaccuucuccaacggcugcgacuacgugagcaacaagggcguggacaccguguccgucgggaacacccuguacuacgugaacaagcaggagggccagagccucuacgugaagggggagcccaucaucaacuucuacgacccgcuggucuuccccuccgacgaguucgacgcgagcaucucccaggugaacgagaagaucaaccagagccuggccuucauccgcaaguccgacgagcugcuccacaacgugaacgccggcaagagcacgaccaacaucaugaucaccaccaucaucaucgucaucaucgugauccugcugucccucaucgccguggggcugcugcucuacugcaaggcccggugaggacuaguggaagcauuuuccuggcugauuaaaagaaauuacucagcuauggucaucuguuccuguuagaaggcuaugcagcauauuauauacuaugcgcauguuaugaaaugcauaauaaaaaauuuuaaaaaaucuaaaagaucuaaaaaaaaaaaaaaaaaaaaaaaaaaaaaaaaaaaaaaaaaaaaaaaaaaaaaaaaaaaaaaaaugcaucccccccccccccccccccccccccccccccaaaggcucuuuucagagccaccagaauu

SEQ ID NO: 6659 - RNA, 1910 nt, Artificial Sequence
  mRNA product Design f-2 comprising derived and/or modified sequence from HRSV(A2)__F-del_DSCav1_mut6 (opt1)
gggagagcggcucggccauuuugucccagucaguccggaggcugcggcugcagaaguaccgccugcggaguaacugcaaagaagcuuaccauggagcugcucauccugaaggccaacgccaucaccaccauccugacggcggugaccuucugcuucgccagcggccagaacaucaccgaggaguucuaccaguccacgugcagcgccgucuccaagggguaccucggcgcccugcgcaccgggugguacaccagcgugaucaccaucgagcuguccaacaucaaggagaacaagugcaacggcaccgacgccaaggugaagcucaucaagcaggagcuggacaaguacaagaacgcggucacggaccugcagaugcucaugugcagcacccccgccaccggguccggcagcgccaucgccuccggcguggcggugugcaagguccugcaccuggagggggaggugaacaagaucaagagcgcccuccuguccaccaacaaggccguggucagccuguccaacggcgugagcgugcucacguucaagguccuggaccugaagaacuacaucgacaagcagcuccugccgauccugaacaagcaguccugcagcauccccaaccccgagaccgugauggaguuccagcagaagaacaaccggcuccuggagaucacccgcgaguucuccgugaacgccggggucaccacgcccgugagcaccuacaugcugaccaacuccgagcuccugagccugaucaacgacaugccgaucaccaacgaccagaagaagcucaugagcaacaacgugcagaucguccggcagcaguccuacagcaucaugugcaucaucaaggaggaggugcuggccuacgugguccagcugccccucuacggcgugaucgacacgcccugcuggaagcugcacaccagcccccugugcaccaccaacacgaaggaggggagcaacaucugccucacccgcaccgaccggggcugguacugcgacaacgcgggcuccgugagcuucuucccgcaggccgagaccugcaaggucugcuccaaccgcguguucugcgacacgaugaacagccugacccugcccuccgaggucaaccucugcaacguggacaucuucaaccccaaguacgacugcaagaucaugaccagcaagaccgacguguccagcuccgucaucacgagccugggggccaucguguccugcuacggcaagaccaagugcaccgccagcaacaagaacaaggggaucaucaagaccuucuccaacggcugcgacuacgugagcaacaagggcgucgacacgguguccguggggaacacccuguacuacgucaacaagcaggagggccagagccucuacgugaagggggagcccaucaucaacuucuacgacccgcugguguuccccagcgacgaguucgacgccuccaucagccaggucaacgagaagaucaaccagucccuggcguucauccggaaguccgacgagcuccugcacaacgugaacgccggcaaguccaccaccaacaucaugaucaccacgaucaucaucgugaucaucgucauccugcucagccugaucgccguggggcugcuccuguacugcaaggcccgcugaggacuaguggaagcauuuuccuggcugauuaaaagaaauuacucagcuauggucaucuguuccuguuagaaggcuaugcagcauauuauauacuaugcgcauguuaugaaaugcauaauaaaaaauuuuaaaaaaucuaaaagaucuaaaaaaaaaaaaaaaaaaaaaaaaaaaaaaaaaaaaaaaaaaaaaaaaaaaaaaaaaaaaaaaaugcaucccccccccccccccccccccccccccccccaaaggcucuuuucagagccaccagaauu

SEQ ID NO: 6660 - RNA, 1910 nt, Artificial Sequence
  mRNA product Design f-2 comprising derived and/or modified sequence from HRSV(A2)__F-del_DSCav1_mut6 (opt2)
gggagagcggcucggccauuuugucccagucaguccggaggcugcggcugcagaaguaccgccugcggaguaacugcaaagaagcuuaccauggagcuccucauccucaaggccaacgccaucaccaccauccucaccgccgucaccuucugcuucgccuccggccagaacaucaccgaggaguucuaccaguccaccugcuccgccgucuccaagggcuaccucggcgcccuccgcaccggcugguacaccuccgucaucaccaucgagcucuccaacaucaaggagaacaagugcaacggcaccgacgccaaggucaagcucaucaagcaggagcucgacaaguacaagaacgccgucaccgaccuccagaugcucaugugcuccacccccgccaccggcuccggcuccgccaucgccuccggcgucgccgucugcaagguccuccaccucgagggcgaggucaacaagaucaaguccgcccuccucuccaccaacaaggccgucgucucccucuccaacggcgucuccguccucaccuucaagguccucgaccucaagaacuacaucgacaagcagcuccuccccauccucaacaagcaguccugcuccauccccaaccccgagaccgucauggaguuccagcagaagaacaaccgccuccucgagaucacccgcgaguucuccgucaacgccggcgucaccacccccgucuccaccuacaugcucaccaacuccgagcuccucucccucaucaacgacaugcccaucaccaacgaccagaagaagcucauguccaacaacguccagaucguccgccagcaguccuacuccaucaugugcaucaucaaggaggagguccucgccuacgucguccagcucccccucuacggcgucaucgacacccccugcuggaagcuccacaccuccccccucugcaccaccaacaccaaggagggcuccaacaucugccucacccgcaccgaccgcggcugguacugcgacaacgccggcuccgucuccuucuucccccaggccgagaccugcaaggucugcuccaaccgcgucuucugcgacaccaugaacucccucacccuccccuccgaggucaaccucugcaacgucgacaucuucaaccccaaguacgacugcaagaucaugaccuccaagaccgacgucuccuccuccgucaucaccucccucggcgccaucgucuccugcuacggcaagaccaagugcaccgccuccaacaagaacaagggcaucaucaagaccuucuccaacggcugcgacuacgucuccaacaagggcgucgacaccgucuccgucggcaacacccucuacuacgucaacaagcaggagggccagucccucuacgucaagggcgagcccaucaucaacuucuacgacccccucgucuuccccuccgacgaguucgacgccuccaucucccaggucaacgagaagaucaaccagucccucgccuucauccgcaaguccgacgagcuccuccacaacgucaacgccggcaaguccaccaccaacaucaugaucaccaccaucaucaucgucaucaucgucauccuccucucccucaucgccgucggccuccuccucuacugcaaggcccgcugaggacuaguggaagcauuuuccuggcugauuaaaagaaauuacucagcuauggucaucuguuccuguuagaaggcuaugcagcauauuauauacuaugcgcauguuaugaaaugcauaauaaaaaauuuuaaaaaaucuaaaagaucuaaaaaaaaaaaaaaaaaaaaaaaaaaaaaaaaaaaaaaaaaaaaaaaaaaaaaaaaaaaaaaaaugcaucccccccccccccccccccccccccccccccaaaggcucuuuucagagccaccagaauu

SEQ ID NO: 6661 - RNA, 1910 nt, Artificial Sequence
  mRNA product Design f-2 comprising derived and/or modified sequence from HRSV(A2)__F-del_DSCav1_mut6 (opt3)
gggagagcggcucggccauuuugucccagucaguccggaggcugcggcugcagaaguaccgccugcggaguaacugcaaagaagcuuaccauggagcugcucauccuuaaggccaacgcuauuaccacaauacugacugcagugacguucugcuuugccagcggccagaauaucaccgaagaguucuaccaauccacauguucugcggucucaaaaggguauuugggagcuuuaagaacugguugguacaccaguguuauuacaaucgaacugagcaacauuaaggagaauaaaugcaacggcaccgacgccaaggugaaacuaaucaagcaggaacucgauaaguauaaaaaugcaguaacugaccugcagaugcuuauguguuccacacccgccaccgggucuggaucggcuauagcaucaggcguggccgucugcaaggugcugcacuuggagggugagguuaacaaaaucaagagcgcucuccugaguacgaauaaagccguggucucccugucuaacggggugagcguacucacuuuuaagguuuuagaucugaagaauuacauugacaaacagcuuuugccuauccugaacaagcaauccuguucaauuccaaauccggaaaccgugauggaguuccagcagaaaaacaauaggcuacucgaaaucacacgggaguuuagugucaacgcgggagugacuacccccgugagcacauauaugcugaccaauucugagcuucuguccuugauaaacgauaugccuauuacgaacgaccagaagaaacucaugucaaauaacguccaaaucguucgccagcagagcuacaguauuaugugcaucaucaaggaagaggugcuggcauauguagugcaguuaccacuguacggcgucauugauacucccuguuggaaacuccauacaucuccucuuugcaccacuaauacaaaggaaggcuccaacauaugucugacccgaacggaccgugggugguacugcgauaaugccggaagcgugucguucuuuccacaagcugagaccuguaagguuugcucuaacagaguguucugcgacacaaugaacuccuugacucuacccucagaagucaaucuguguaauguggauaucuuuaacccuaaauaugacugcaagauuaugaccaguaaaacagauguaagcuccucuguuaucacuagccucggugccauagugucauguuacggcaagaccaaaugcacagcaaguaauaagaacaaggggauuaucaaaaccuucuccaauggaugugacuaugucagcaacaagggcguggacacugucucuguggguaauacgcuguacuauguuaacaaacaggaggggcagucacuuuacgugaagggagagccaaucauuaacuuuuaugauccgcugguauuccccagugacgaauuugaugcuagcaucucccaagucaaugagaaaauuaaccagucuuuggccuucauaaggaagucggacgaacuccugcacaaugugaacgcgggcaagagcacaaccaauaucaugauuacuaccaucaucauuguuauaaucgugauuuuacugucccuaaucgccgucggccuccugcuuuacugcaaagcacggugaggacuaguggaagcauuuuccuggcugauuaaaagaaauuacucagcuauggucaucuguuccuguuagaaggcuaugcagcauauuauauacuaugcgcauguuaugaaaugcauaauaaaaaauuuuaaaaaaucuaaaagaucuaaaaaaaaaaaaaaaaaaaaaaaaaaaaaaaaaaaaaaaaaaaaaaaaaaaaaaaaaaaaaaaaugcaucccccccccccccccccccccccccccccccaaaggcucuuuucagagccaccagaauu

SEQ ID NO: 6662 - RNA, 1910 nt, Artificial Sequence
  mRNA product Design f-2 comprising derived and/or modified sequence from HRSV(A2)__F-del_DSCav1_mut6 (opt4)
gggagagcggcucggccauuuugucccagucaguccggaggcugcggcugcagaaguaccgccugcggaguaacugcaaagaagcuuaccauggagcugcugauccugaaggccaacgccaucaccaccauccugaccgccgugaccuucugcuucgccagcggccagaacaucaccgaggaguucuaccagagcaccugcagcgccgugagcaagggcuaccugggcgcccugagaaccggcugguacaccagcgugaucaccaucgagcugagcaacaucaaggagaacaagugcaacggcaccgacgccaaggugaagcugaucaagcaggagcuggacaaguacaagaacgccgugaccgaccugcagaugcugaugugcagcacccccgccaccggcagcggcagcgccaucgccagcggcguggccgugugcaaggugcugcaccuggagggcgaggugaacaagaucaagagcgcccugcugagcaccaacaaggccguggugagccugagcaacggcgugagcgugcugaccuucaaggugcuggaccugaagaacuacaucgacaagcagcugcugcccauccugaacaagcagagcugcagcauccccaaccccgagaccgugauggaguuccagcagaagaacaacagacugcuggagaucaccagagaguucagcgugaacgccggcgugaccacccccgugagcaccuacaugcugaccaacagcgagcugcugagccugaucaacgacaugcccaucaccaacgaccagaagaagcugaugagcaacaacgugcagaucgugagacagcagagcuacagcaucaugugcaucaucaaggaggaggugcuggccuacguggugcagcugccccuguacggcgugaucgacacccccugcuggaagcugcacaccagcccccugugcaccaccaacaccaaggagggcagcaacaucugccugaccagaaccgacagaggcugguacugcgacaacgccggcagcgugagcuucuucccccaggccgagaccugcaaggugugcagcaacagaguguucugcgacaccaugaacagccugacccugcccagcgaggugaaccugugcaacguggacaucuucaaccccaaguacgacugcaagaucaugaccagcaagaccgacgugagcagcagcgugaucaccagccugggcgccaucgugagcugcuacggcaagaccaagugcaccgccagcaacaagaacaagggcaucaucaagaccuucagcaacggcugcgacuacgugagcaacaagggcguggacaccgugagcgugggcaacacccuguacuacgugaacaagcaggagggccagagccuguacgugaagggcgagcccaucaucaacuucuacgacccccugguguuccccagcgacgaguucgacgccagcaucagccaggugaacgagaagaucaaccagagccuggccuucaucagaaagagcgacgagcugcugcacaacgugaacgccggcaagagcaccaccaacaucaugaucaccaccaucaucaucgugaucaucgugauccugcugagccugaucgccgugggccugcugcuguacugcaaggccagaugaggacuaguggaagcauuuuccuggcugauuaaaagaaauuacucagcuauggucaucuguuccuguuagaaggcuaugcagcauauuauauacuaugcgcauguuaugaaaugcauaauaaaaaauuuuaaaaaaucuaaaagaucuaaaaaaaaaaaaaaaaaaaaaaaaaaaaaaaaaaaaaaaaaaaaaaaaaaaaaaaaaaaaaaaaugcaucccccccccccccccccccccccccccccccaaaggcucuuuucagagccaccagaauu

SEQ ID NO: 6663 - RNA, 1910 nt, Artificial Sequence
  mRNA product Design f-2 comprising derived and/or modified sequence from HRSV(A2)__F-del_DSCav1_mut6 (opt5)
gggagagcggcucggccauuuugucccagucaguccggaggcugcggcugcagaaguaccgccugcggaguaacugcaaagaagcuuaccauggagcugcucauccugaaggccaacgcuauuaccacaauccuuacggccgugaccuucugcuuugcgagcggccagaauauuacagaagaguucuaccaauccaccuguucugcugucagcaaaggguaucugggagcccucagaacaggcugguacaccuccguuaucacaauugaacugucuaacaucaaggagaauaaaugcaacgggaccgacgccaaggugaaacuuaucaagcaggaacuggauaaguauaaaaaugcugugacggaccuccagaugcugauguguagcacccccgccacaggauccggcucugcuauugccagcggggucgcggugugcaagguucugcaccucgagggagaggugaacaaaaucaaguccgcccugcuuagcaccaauaaagcugucgugucucuguccaacggcguuagcgugcucacauuuaagguccuggaucuuaagaauuacauugacaaacagcugcucccuauccugaacaagcaaucuuguuccauuccgaaucccgaaaccgugauggaguuccagcagaaaaacaaucggcugcucgaaaucacgcgcgaguuuagcgugaacgccggcgucacaaccccuguuucuacauauaugcugaccaauuccgagcuucugagccucauuaacgauaugcccaucaccaacgaccagaagaaacugauguccaauaacgugcaaaucgugagacagcagucuuacagcauuaugugcaucauuaaggaagagguccuugcuuaugugguucagcugccucucuacggggugaucgauacacccuguuggaaacugcauacguccccucugugcaccacaaauaccaaggaaggaagcaacauuugucucacacggaccgaccgcggcugguacugcgauaaugccgggucugucuccuucuuuccgcaagcggagacguguaaggugugcagcaacagaguuuucugcgacacaaugaacucucugacccuucccagcgaagugaaucuguguaaugucgauaucuuuaacccuaaauaugacugcaagaucaugaccuccaaaacagaugugucuagcuccgucauuaccagccucggagccaucgugucuuguuacggcaagacaaaaugcacggcuuccaauaagaacaaggggauuaucaaaaccuucagcaauggaugugacuauguuucuaacaagggcguggacacagucuccgugggcaauacccuguacuauguuaacaaacaggaggggcagagccuuuacgugaagggagagcccauuaucaacuuuuaugauccucuggucuuccccuccgacgaauuugaugccucuaucagccaagugaaugagaaaauuaaccagucccucgcuuucauccggaagucugacgaacugcugcacaaugugaacgccggcaagagcacaaccaauauuaugaucacgaccauuaucauuguuaucaucgucauucuccugucccuuaucgccguggggcugcuccuguacugcaaagcucgcugaggacuaguggaagcauuuuccuggcugauuaaaagaaauuacucagcuauggucaucuguuccuguuagaaggcuaugcagcauauuauauacuaugcgcauguuaugaaaugcauaauaaaaaauuuuaaaaaaucuaaaagaucuaaaaaaaaaaaaaaaaaaaaaaaaaaaaaaaaaaaaaaaaaaaaaaaaaaaaaaaaaaaaaaaaugcaucccccccccccccccccccccccccccccccaaaggcucuuuucagagccaccagaauu

SEQ ID NO: 6664 - RNA, 1910 nt, Artificial Sequence
  mRNA product Design f-2 comprising derived and/or modified sequence from HRSV(A2)__F-del_DSCav1_mut6 (opt6)
gggagagcggcucggccauuuugucccagucaguccggaggcugcggcugcagaaguaccgccugcggaguaacugcaaagaagcuuaccauggaacuacucauauuaaaagcaaacgcaauaacaacgauauuaacagcuguaacauucugcuuugcaucaggccaaaauaucaccgaagaauuuuaucaaagcacaugcucugcaguauccaaaggauacuuaggagcauuaagaacaggcugguacacauccguaauaacaauagaacuaucaaacaucaaagaaaacaaaugcaacggcacagacgccaaaguaaaacucauaaaacaagaacuagacaaauauaaaaacgcaguaacagaucuacaaaugcucaugugcuccacaccagcaaccggaucugguucagccauagcauccggcguagccgucugcaaaguauuacaccucgaaggagaaguaaacaaaauaaaaucugcccuauuaucuacaaauaaagccguaguaagucuaaguaacggaguaucaguacuaacauuuaaaguccuagaccugaaaaacuauaucgacaaacaacuauuaccaauacuaaacaaacaauccuguuccaucccuaacccagaaacaguuauggaauuucaacaaaaaaauaaccgccuuuuagaaauaacuagagaauuuucaguaaacgcaggaguuacaacaccaguaucaacauacaugcuaacaaauucagaauuauuaucccuuauaaaugacaugccuaucacaaacgaucaaaaaaaauuaauguccaacaacguacaaauaguaagacaacaaucauauuccaucaugugcaucauaaaagaagaaguccucgcauacguagugcaacuaccacuauacggagucauagauacacccuguuggaaacuucacacaucuccacuaugcacaacaaacacgaaagaaggauccaacauaugccuaacacgaacagacagaggaugguauugcgacaacgcuggaagugugagcuucuucccucaagcagaaacuugcaaaguaugcagcaaucguguauucugcgacacaaugaacucauuaacacucccaagcgaaguaaaccucugcaauguagacaucuuuaauccaaaauacgauuguaaaauaaugacuucaaaaacagacgucucaucaucuguaauaacaucuuuaggagcaauaguuucuugcuacgguaaaacaaaaugcaccgcauccaacaaaaacaaaggaauaauaaaaacauucucuaacggcugcgauuacguaucuaacaaaggaguugacacagucucaguaggaaacacacuauacuacguaaacaaacaagaaggacaaagccuauacguaaaaggagaaccaauaauaaacuucuaugacccauuaguauuuccaagcgaugaauuugacgcuucaauaucacaagucaaugaaaaaauaaaucagagcuuagcauucauaagaaaaucugaugaacuacuacacaauguaaaugcaggaaaauccacuaccaacauaaugauuaccacaauuauaauaguuaucauaguaauacuauuaucacuaauagccguuggauuacuacuauacugcaaagcaagauaaggacuaguggaagcauuuuccuggcugauuaaaagaaauuacucagcuauggucaucuguuccuguuagaaggcuaugcagcauauuauauacuaugcgcauguuaugaaaugcauaauaaaaaauuuuaaaaaaucuaaaagaucuaaaaaaaaaaaaaaaaaaaaaaaaaaaaaaaaaaaaaaaaaaaaaaaaaaaaaaaaaaaaaaaaugcaucccccccccccccccccccccccccccccccaaaggcucuuuucagagccaccagaauu

SEQ ID NO: 6665 - RNA, 1910 nt, Artificial Sequence
  mRNA product Design f-2 comprising derived and/or modified sequence from HRSV(A2)__F-del_DSCav1_mut6 (opt11)
gggagagcggcucggccauuuugucccagucaguccggaggcugcggcugcagaaguaccgccugcggaguaacugcaaagaagcuuaccauggaacuacucauccuaaaagcaaacgccaucaccaccauacuaaccgccgucaccuucugcuucgccucgggacaaaacaucaccgaagaguucuaccagucaacgugcuccgccgucucaaaaggcuaccuaggcgcccuccgcaccgggugguauaccuccgucauaacuaucgaacucucuaacaucaaagaaaacaaauguaacggcaccgacgccaaagucaaacuaaucaaacaagaacuggacaaauacaaaaacgccgucaccgaccuacaaaugcucaugugcuccacuccagccaccggcuccgguagcgcaaucgccucaggcguagcuguaugcaaaguccuccaccuagaaggcgaaguaaacaaaauaaaauccgcccuccucucaaccaacaaggccgucgucucacucucaaacggcgucuccguacucaccuuuaaaguccuagaccuuaaaaacuacaucgacaaacaacugcuaccaauccucaacaaacaaucaugcagcaucccaaacccggaaacagucauggaguuccaacagaaaaacaaccgacuccucgaaaucacccgcgaguucuccgucaacgccggagucaccacaccuguaagcacauacaugcuuacuaauuccgaacuccuuucacuaauaaacgacaugccaauaaccaacgaccaaaagaaacucauguccaacaacguacaaaucguacgccaacaauccuacuccaucaugugcaucaucaaagaagaaguccuggccuaugucguacaacucccccuuuacggugucaucgacacacccugcuggaaacuacacaccagcccccucugcacaacaaacaccaaagaaggcuccaacaucugccucacccguaccgaccgaggcugguacugcgacaacgccggcuccgucuccuucuucccccaagccgaaaccugcaaagucugcagcaaccgcgucuucugcgauaccaugaacucccucacacucccaucugaagucaaccucugcaacgucgauauuuucaauccaaaauacgacugcaaaaucaugacuagcaaaaccgacguuagcuccuccgucaucaccucccucggcgccauaguuucaugcuacggcaaaaccaaaugcaccgccuccaacaaaaacaaaggcaucauaaaaaccuucuccaacgggugcgacuacguaucuaauaaaggagucgacaccgucucaguaggaaacacccucuacuaugucaacaaacaagaaggccaaucacuauacguuaaaggcgaaccaaucaucaacuucuacgacccacucgucuuccccagcgacgaguuugacgccucaaucucgcaagucaaugaaaagauuaaccaaucccuagccuucauccgaaaaagugacgaacuccuccacaacguuaacgccggcaaaucuacaaccaacaucaugaucaccacuauaaucaucgucaucauagucauacuucucagccucaucgcagucggacuccuccuuuauugcaaggcacgauaaggacuaguggaagcauuuuccuggcugauuaaaagaaauuacucagcuauggucaucuguuccuguuagaaggcuaugcagcauauuauauacuaugcgcauguuaugaaaugcauaauaaaaaauuuuaaaaaaucuaaaagaucuaaaaaaaaaaaaaaaaaaaaaaaaaaaaaaaaaaaaaaaaaaaaaaaaaaaaaaaaaaaaaaaaugcaucccccccccccccccccccccccccccccccaaaggcucuuuucagagccaccagaauu

SEQ ID NO: 6666 - RNA, 1901 nt, Artificial Sequence
  mRNA product Design f-3 comprising derived and/or modified sequence from HRSV(A2)__F-del_DSCav1_mut6 (opt1)
gggagagucccgcagucggcguccagcggcucugcuuguucgugugugugucguugcaggccuuauucaagcuuaccauggagcugcucauccugaaggccaacgccaucaccaccauccugacggcggugaccuucugcuucgccagcggccagaacaucaccgaggaguucuaccaguccacgugcagcgccgucuccaagggguaccucggcgcccugcggaccggcugguacaccuccgugaucaccaucgagcugagcaacaucaaggagaacaagugcaacgggaccgacgccaaggugaagcucaucaagcaggagcuggacaaguacaagaacgcggucacggaccugcagaugcugaugugcuccaccccggcaaccggcuccggcuccgccaucgcgagcggcgucgccgugugcaaggugcugcaccucgagggggaggucaacaagaucaagagcgcccugcuguccaccaacaaggccguggugagccucuccaacggcgucagcgugcugaccuucaaggugcuggaccucaagaacuacaucgacaagcagcugcugcccauccugaacaagcagagcugcuccauccccaaccccgagacggugauggaguuccagcagaagaacaaccggcuccuggagaucacccgcgaguucagcgugaacgccggggucaccacccccguguccacguacaugcugaccaacagcgagcuccugucccugaucaacgacaugccgaucaccaacgaccagaagaagcucaugagcaacaacgugcagaucguccggcagcaguccuacagcaucaugugcaucaucaaggaggaggugcuggcguacgugguccagcugccccucuacggcgugaucgacacccccugcuggaagcugcacacgagcccccugugcaccaccaacaccaaggagggguccaacaucugccucacgcgcaccgaccggggcugguacugcgacaacgccggcagcgucuccuucuucccgcaggccgagaccugcaaggugugcagcaaccgcguguucugcgacaccaugaacucccugacgcugcccagcgagguaaaccucugcaacgucgacaucuucaaccccaaguacgacugcaagaucaugaccuccaagaccgacgugagcuccagcgugaucaccucccugggggccaucgucagcugcuacggcaagacgaagugcaccgccagcaacaagaacaaggggaucaucaagaccuucuccaacggcugcgacuacgugagcaacaagggcguggacaccguguccgucgggaacacccuguacuacgugaacaagcaggagggccagagccucuacgugaagggggagcccaucaucaacuucuacgacccgcuggucuuccccuccgacgaguucgacgcgagcaucucccaggugaacgagaagaucaaccagagccuggccuucauccgcaaguccgacgagcugcuccacaacgugaacgccggcaagagcacgaccaacaucaugaucaccaccaucaucaucgucaucaucgugauccugcugucccucaucgccguggggcugcugcucuacugcaaggcccggugaggacuaguacuggcugcaucucccuuuccucuguccuccauccuucucccaggauggugaagggggaccugguacccagugauccccaccccaggauccuaaaucaugacuuaccugcuaauaaaaacucauuggaaaagugagaagaucuaaaaaaaaaaaaaaaaaaaaaaaaaaaaaaaaaaaaaaaaaaaaaaaaaaaaaaaaaaaaaaaaugcaucccccccccccccccccccccccccccccccaaaggcucuuuucagagccaccagaauu

SEQ ID NO: 6667 - RNA, 1901 nt, Artificial Sequence
  mRNA product Design f-3 comprising derived and/or modified sequence from HRSV(A2)__F-del_DSCav1_mut6 (opt1)
gggagagucccgcagucggcguccagcggcucugcuuguucgugugugugucguugcaggccuuauucaagcuuaccauggagcugcucauccugaaggccaacgccaucaccaccauccugacggcggugaccuucugcuucgccagcggccagaacaucaccgaggaguucuaccaguccacgugcagcgccgucuccaagggguaccucggcgcccugcgcaccgggugguacaccagcgugaucaccaucgagcuguccaacaucaaggagaacaagugcaacggcaccgacgccaaggugaagcucaucaagcaggagcuggacaaguacaagaacgcggucacggaccugcagaugcucaugugcagcacccccgccaccggguccggcagcgccaucgccuccggcguggcggugugcaagguccugcaccuggagggggaggugaacaagaucaagagcgcccuccuguccaccaacaaggccguggucagccuguccaacggcgugagcgugcucacguucaagguccuggaccugaagaacuacaucgacaagcagcuccugccgauccugaacaagcaguccugcagcauccccaaccccgagaccgugauggaguuccagcagaagaacaaccggcuccuggagaucacccgcgaguucuccgugaacgccggggucaccacgcccgugagcaccuacaugcugaccaacuccgagcuccugagccugaucaacgacaugccgaucaccaacgaccagaagaagcucaugagcaacaacgugcagaucguccggcagcaguccuacagcaucaugugcaucaucaaggaggaggugcuggccuacgugguccagcugccccucuacggcgugaucgacacgcccugcuggaagcugcacaccagcccccugugcaccaccaacacgaaggaggggagcaacaucugccucacccgcaccgaccggggcugguacugcgacaacgcgggcuccgugagcuucuucccgcaggccgagaccugcaaggucugcuccaaccgcguguucugcgacacgaugaacagccugacccugcccuccgaggucaaccucugcaacguggacaucuucaaccccaaguacgacugcaagaucaugaccagcaagaccgacguguccagcuccgucaucacgagccugggggccaucguguccugcuacggcaagaccaagugcaccgccagcaacaagaacaaggggaucaucaagaccuucuccaacggcugcgacuacgugagcaacaagggcgucgacacgguguccguggggaacacccuguacuacgucaacaagcaggagggccagagccucuacgugaagggggagcccaucaucaacuucuacgacccgcugguguuccccagcgacgaguucgacgccuccaucagccaggucaacgagaagaucaaccagucccuggcguucauccggaaguccgacgagcuccugcacaacgugaacgccggcaaguccaccaccaacaucaugaucaccacgaucaucaucgugaucaucgucauccugcucagccugaucgccguggggcugcuccuguacugcaaggcccgcugaggacuaguacuggcugcaucucccuuuccucuguccuccauccuucucccaggauggugaagggggaccugguacccagugauccccaccccaggauccuaaaucaugacuuaccugcuaauaaaaacucauuggaaaagugagaagaucuaaaaaaaaaaaaaaaaaaaaaaaaaaaaaaaaaaaaaaaaaaaaaaaaaaaaaaaaaaaaaaaaugcaucccccccccccccccccccccccccccccccaaaggcucuuuucagagccaccagaauu

SEQ ID NO: 6668 - RNA, 1901 nt, Artificial Sequence
  mRNA product Design f-3 comprising derived and/or modified sequence from HRSV(A2)__F-del_DSCav1_mut6 (opt2)
gggagagucccgcagucggcguccagcggcucugcuuguucgugugugugucguugcaggccuuauucaagcuuaccauggagcuccucauccucaaggccaacgccaucaccaccauccucaccgccgucaccuucugcuucgccuccggccagaacaucaccgaggaguucuaccaguccaccugcuccgccgucuccaagggcuaccucggcgcccuccgcaccggcugguacaccuccgucaucaccaucgagcucuccaacaucaaggagaacaagugcaacggcaccgacgccaaggucaagcucaucaagcaggagcucgacaaguacaagaacgccgucaccgaccuccagaugcucaugugcuccacccccgccaccggcuccggcuccgccaucgccuccggcgucgccgucugcaagguccuccaccucgagggcgaggucaacaagaucaaguccgcccuccucuccaccaacaaggccgucgucucccucuccaacggcgucuccguccucaccuucaagguccucgaccucaagaacuacaucgacaagcagcuccuccccauccucaacaagcaguccugcuccauccccaaccccgagaccgucauggaguuccagcagaagaacaaccgccuccucgagaucacccgcgaguucuccgucaacgccggcgucaccacccccgucuccaccuacaugcucaccaacuccgagcuccucucccucaucaacgacaugcccaucaccaacgaccagaagaagcucauguccaacaacguccagaucguccgccagcaguccuacuccaucaugugcaucaucaaggaggagguccucgccuacgucguccagcucccccucuacggcgucaucgacacccccugcuggaagcuccacaccuccccccucugcaccaccaacaccaaggagggcuccaacaucugccucacccgcaccgaccgcggcugguacugcgacaacgccggcuccgucuccuucuucccccaggccgagaccugcaaggucugcuccaaccgcgucuucugcgacaccaugaacucccucacccuccccuccgaggucaaccucugcaacgucgacaucuucaaccccaaguacgacugcaagaucaugaccuccaagaccgacgucuccuccuccgucaucaccucccucggcgccaucgucuccugcuacggcaagaccaagugcaccgccuccaacaagaacaagggcaucaucaagaccuucuccaacggcugcgacuacgucuccaacaagggcgucgacaccgucuccgucggcaacacccucuacuacgucaacaagcaggagggccagucccucuacgucaagggcgagcccaucaucaacuucuacgacccccucgucuuccccuccgacgaguucgacgccuccaucucccaggucaacgagaagaucaaccagucccucgccuucauccgcaaguccgacgagcuccuccacaacgucaacgccggcaaguccaccaccaacaucaugaucaccaccaucaucaucgucaucaucgucauccuccucucccucaucgccgucggccuccuccucuacugcaaggcccgcugaggacuaguacuggcugcaucucccuuuccucuguccuccauccuucucccaggauggugaagggggaccugguacccagugauccccaccccaggauccuaaaucaugacuuaccugcuaauaaaaacucauuggaaaagugagaagaucuaaaaaaaaaaaaaaaaaaaaaaaaaaaaaaaaaaaaaaaaaaaaaaaaaaaaaaaaaaaaaaaaugcaucccccccccccccccccccccccccccccccaaaggcucuuuucagagccaccagaauu

SEQ ID NO: 6669 - RNA, 1901 nt, Artificial Sequence
  mRNA product Design f-3 comprising derived and/or modified sequence from HRSV(A2)__F-del_DSCav1_mut6 (opt3)
gggagagucccgcagucggcguccagcggcucugcuuguucgugugugugucguugcaggccuuauucaagcuuaccauggagcugcucauccuuaaggccaacgcuauuaccacaauacugacugcagugacguucugcuuugccagcggccagaauaucaccgaagaguucuaccaauccacauguucugcggucucaaaaggguauuugggagcuuuaagaacugguugguacaccaguguuauuacaaucgaacugagcaacauuaaggagaauaaaugcaacggcaccgacgccaaggugaaacuaaucaagcaggaacucgauaaguauaaaaaugcaguaacugaccugcagaugcuuauguguuccacacccgccaccgggucuggaucggcuauagcaucaggcguggccgucugcaaggugcugcacuuggagggugagguuaacaaaaucaagagcgcucuccugaguacgaauaaagccguggucucccugucuaacggggugagcguacucacuuuuaagguuuuagaucugaagaauuacauugacaaacagcuuuugccuauccugaacaagcaauccuguucaauuccaaauccggaaaccgugauggaguuccagcagaaaaacaauaggcuacucgaaaucacacgggaguuuagugucaacgcgggagugacuacccccgugagcacauauaugcugaccaauucugagcuucuguccuugauaaacgauaugccuauuacgaacgaccagaagaaacucaugucaaauaacguccaaaucguucgccagcagagcuacaguauuaugugcaucaucaaggaagaggugcuggcauauguagugcaguuaccacuguacggcgucauugauacucccuguuggaaacuccauacaucuccucuuugcaccacuaauacaaaggaaggcuccaacauaugucugacccgaacggaccgugggugguacugcgauaaugccggaagcgugucguucuuuccacaagcugagaccuguaagguuugcucuaacagaguguucugcgacacaaugaacuccuugacucuacccucagaagucaaucuguguaauguggauaucuuuaacccuaaauaugacugcaagauuaugaccaguaaaacagauguaagcuccucuguuaucacuagccucggugccauagugucauguuacggcaagaccaaaugcacagcaaguaauaagaacaaggggauuaucaaaaccuucuccaauggaugugacuaugucagcaacaagggcguggacacugucucuguggguaauacgcuguacuauguuaacaaacaggaggggcagucacuuuacgugaagggagagccaaucauuaacuuuuaugauccgcugguauuccccagugacgaauuugaugcuagcaucucccaagucaaugagaaaauuaaccagucuuuggccuucauaaggaagucggacgaacuccugcacaaugugaacgcgggcaagagcacaaccaauaucaugauuacuaccaucaucauuguuauaaucgugauuuuacugucccuaaucgccgucggccuccugcuuuacugcaaagcacggugaggacuaguacuggcugcaucucccuuuccucuguccuccauccuucucccaggauggugaagggggaccugguacccagugauccccaccccaggauccuaaaucaugacuuaccugcuaauaaaaacucauuggaaaagugagaagaucuaaaaaaaaaaaaaaaaaaaaaaaaaaaaaaaaaaaaaaaaaaaaaaaaaaaaaaaaaaaaaaaaugcaucccccccccccccccccccccccccccccccaaaggcucuuuucagagccaccagaauu

SEQ ID NO: 6670 - RNA, 1901 nt, Artificial Sequence
  mRNA product Design f-3 comprising derived and/or modified sequence from HRSV(A2)__F-del_DSCav1_mut6 (opt4)
gggagagucccgcagucggcguccagcggcucugcuuguucgugugugugucguugcaggccuuauucaagcuuaccauggagcugcugauccugaaggccaacgccaucaccaccauccugaccgccgugaccuucugcuucgccagcggccagaacaucaccgaggaguucuaccagagcaccugcagcgccgugagcaagggcuaccugggcgcccugagaaccggcugguacaccagcgugaucaccaucgagcugagcaacaucaaggagaacaagugcaacggcaccgacgccaaggugaagcugaucaagcaggagcuggacaaguacaagaacgccgugaccgaccugcagaugcugaugugcagcacccccgccaccggcagcggcagcgccaucgccagcggcguggccgugugcaaggugcugcaccuggagggcgaggugaacaagaucaagagcgcccugcugagcaccaacaaggccguggugagccugagcaacggcgugagcgugcugaccuucaaggugcuggaccugaagaacuacaucgacaagcagcugcugcccauccugaacaagcagagcugcagcauccccaaccccgagaccgugauggaguuccagcagaagaacaacagacugcuggagaucaccagagaguucagcgugaacgccggcgugaccacccccgugagcaccuacaugcugaccaacagcgagcugcugagccugaucaacgacaugcccaucaccaacgaccagaagaagcugaugagcaacaacgugcagaucgugagacagcagagcuacagcaucaugugcaucaucaaggaggaggugcuggccuacguggugcagcugccccuguacggcgugaucgacacccccugcuggaagcugcacaccagcccccugugcaccaccaacaccaaggagggcagcaacaucugccugaccagaaccgacagaggcugguacugcgacaacgccggcagcgugagcuucuucccccaggccgagaccugcaaggugugcagcaacagaguguucugcgacaccaugaacagccugacccugcccagcgaggugaaccugugcaacguggacaucuucaaccccaaguacgacugcaagaucaugaccagcaagaccgacgugagcagcagcgugaucaccagccugggcgccaucgugagcugcuacggcaagaccaagugcaccgccagcaacaagaacaagggcaucaucaagaccuucagcaacggcugcgacuacgugagcaacaagggcguggacaccgugagcgugggcaacacccuguacuacgugaacaagcaggagggccagagccuguacgugaagggcgagcccaucaucaacuucuacgacccccugguguuccccagcgacgaguucgacgccagcaucagccaggugaacgagaagaucaaccagagccuggccuucaucagaaagagcgacgagcugcugcacaacgugaacgccggcaagagcaccaccaacaucaugaucaccaccaucaucaucgugaucaucgugauccugcugagccugaucgccgugggccugcugcuguacugcaaggccagaugaggacuaguacuggcugcaucucccuuuccucuguccuccauccuucucccaggauggugaagggggaccugguacccagugauccccaccccaggauccuaaaucaugacuuaccugcuaauaaaaacucauuggaaaagugagaagaucuaaaaaaaaaaaaaaaaaaaaaaaaaaaaaaaaaaaaaaaaaaaaaaaaaaaaaaaaaaaaaaaaugcaucccccccccccccccccccccccccccccccaaaggcucuuuucagagccaccagaauu

SEQ ID NO: 6671 - RNA, 1901 nt, Artificial Sequence
  mRNA product Design f-3 comprising derived and/or modified sequence from HRSV(A2)__F-del_DSCav1_mut6 (opt5)
gggagagucccgcagucggcguccagcggcucugcuuguucgugugugugucguugcaggccuuauucaagcuuaccauggagcugcucauccugaaggccaacgcuauuaccacaauccuuacggccgugaccuucugcuuugcgagcggccagaauauuacagaagaguucuaccaauccaccuguucugcugucagcaaaggguaucugggagcccucagaacaggcugguacaccuccguuaucacaauugaacugucuaacaucaaggagaauaaaugcaacgggaccgacgccaaggugaaacuuaucaagcaggaacuggauaaguauaaaaaugcugugacggaccuccagaugcugauguguagcacccccgccacaggauccggcucugcuauugccagcggggucgcggugugcaagguucugcaccucgagggagaggugaacaaaaucaaguccgcccugcuuagcaccaauaaagcugucgugucucuguccaacggcguuagcgugcucacauuuaagguccuggaucuuaagaauuacauugacaaacagcugcucccuauccugaacaagcaaucuuguuccauuccgaaucccgaaaccgugauggaguuccagcagaaaaacaaucggcugcucgaaaucacgcgcgaguuuagcgugaacgccggcgucacaaccccuguuucuacauauaugcugaccaauuccgagcuucugagccucauuaacgauaugcccaucaccaacgaccagaagaaacugauguccaauaacgugcaaaucgugagacagcagucuuacagcauuaugugcaucauuaaggaagagguccuugcuuaugugguucagcugccucucuacggggugaucgauacacccuguuggaaacugcauacguccccucugugcaccacaaauaccaaggaaggaagcaacauuugucucacacggaccgaccgcggcugguacugcgauaaugccgggucugucuccuucuuuccgcaagcggagacguguaaggugugcagcaacagaguuuucugcgacacaaugaacucucugacccuucccagcgaagugaaucuguguaaugucgauaucuuuaacccuaaauaugacugcaagaucaugaccuccaaaacagaugugucuagcuccgucauuaccagccucggagccaucgugucuuguuacggcaagacaaaaugcacggcuuccaauaagaacaaggggauuaucaaaaccuucagcaauggaugugacuauguuucuaacaagggcguggacacagucuccgugggcaauacccuguacuauguuaacaaacaggaggggcagagccuuuacgugaagggagagcccauuaucaacuuuuaugauccucuggucuuccccuccgacgaauuugaugccucuaucagccaagugaaugagaaaauuaaccagucccucgcuuucauccggaagucugacgaacugcugcacaaugugaacgccggcaagagcacaaccaauauuaugaucacgaccauuaucauuguuaucaucgucauucuccugucccuuaucgccguggggcugcuccuguacugcaaagcucgcugaggacuaguacuggcugcaucucccuuuccucuguccuccauccuucucccaggauggugaagggggaccugguacccagugauccccaccccaggauccuaaaucaugacuuaccugcuaauaaaaacucauuggaaaagugagaagaucuaaaaaaaaaaaaaaaaaaaaaaaaaaaaaaaaaaaaaaaaaaaaaaaaaaaaaaaaaaaaaaaaugcaucccccccccccccccccccccccccccccccaaaggcucuuuucagagccaccagaauu

SEQ ID NO: 6672 - RNA, 1901 nt, Artificial Sequence
  mRNA product Design f-3 comprising derived and/or modified sequence from HRSV(A2)__F-del_DSCav1_mut6 (opt6)
gggagagucccgcagucggcguccagcggcucugcuuguucgugugugugucguugcaggccuuauucaagcuuaccauggaacuacucauauuaaaagcaaacgcaauaacaacgauauuaacagcuguaacauucugcuuugcaucaggccaaaauaucaccgaagaauuuuaucaaagcacaugcucugcaguauccaaaggauacuuaggagcauuaagaacaggcugguacacauccguaauaacaauagaacuaucaaacaucaaagaaaacaaaugcaacggcacagacgccaaaguaaaacucauaaaacaagaacuagacaaauauaaaaacgcaguaacagaucuacaaaugcucaugugcuccacaccagcaaccggaucugguucagccauagcauccggcguagccgucugcaaaguauuacaccucgaaggagaaguaaacaaaauaaaaucugcccuauuaucuacaaauaaagccguaguaagucuaaguaacggaguaucaguacuaacauuuaaaguccuagaccugaaaaacuauaucgacaaacaacuauuaccaauacuaaacaaacaauccuguuccaucccuaacccagaaacaguuauggaauuucaacaaaaaaauaaccgccuuuuagaaauaacuagagaauuuucaguaaacgcaggaguuacaacaccaguaucaacauacaugcuaacaaauucagaauuauuaucccuuauaaaugacaugccuaucacaaacgaucaaaaaaaauuaauguccaacaacguacaaauaguaagacaacaaucauauuccaucaugugcaucauaaaagaagaaguccucgcauacguagugcaacuaccacuauacggagucauagauacacccuguuggaaacuucacacaucuccacuaugcacaacaaacacgaaagaaggauccaacauaugccuaacacgaacagacagaggaugguauugcgacaacgcuggaagugugagcuucuucccucaagcagaaacuugcaaaguaugcagcaaucguguauucugcgacacaaugaacucauuaacacucccaagcgaaguaaaccucugcaauguagacaucuuuaauccaaaauacgauuguaaaauaaugacuucaaaaacagacgucucaucaucuguaauaacaucuuuaggagcaauaguuucuugcuacgguaaaacaaaaugcaccgcauccaacaaaaacaaaggaauaauaaaaacauucucuaacggcugcgauuacguaucuaacaaaggaguugacacagucucaguaggaaacacacuauacuacguaaacaaacaagaaggacaaagccuauacguaaaaggagaaccaauaauaaacuucuaugacccauuaguauuuccaagcgaugaauuugacgcuucaauaucacaagucaaugaaaaaauaaaucagagcuuagcauucauaagaaaaucugaugaacuacuacacaauguaaaugcaggaaaauccacuaccaacauaaugauuaccacaauuauaauaguuaucauaguaauacuauuaucacuaauagccguuggauuacuacuauacugcaaagcaagauaaggacuaguacuggcugcaucucccuuuccucuguccuccauccuucucccaggauggugaagggggaccugguacccagugauccccaccccaggauccuaaaucaugacuuaccugcuaauaaaaacucauuggaaaagugagaagaucuaaaaaaaaaaaaaaaaaaaaaaaaaaaaaaaaaaaaaaaaaaaaaaaaaaaaaaaaaaaaaaaaugcaucccccccccccccccccccccccccccccccaaaggcucuuuucagagccaccagaauu

SEQ ID NO: 6673 - RNA, 1901 nt, Artificial Sequence
  mRNA product Design f-3 comprising derived and/or modified sequence from HRSV(A2)__F-del_DSCav1_mut6 (opt11)
gggagagucccgcagucggcguccagcggcucugcuuguucgugugugugucguugcaggccuuauucaagcuuaccauggaacuacucauccuaaaagcaaacgccaucaccaccauacuaaccgccgucaccuucugcuucgccucgggacaaaacaucaccgaagaguucuaccagucaacgugcuccgccgucucaaaaggcuaccuaggcgcccuccgcaccgggugguauaccuccgucauaacuaucgaacucucuaacaucaaagaaaacaaauguaacggcaccgacgccaaagucaaacuaaucaaacaagaacuggacaaauacaaaaacgccgucaccgaccuacaaaugcucaugugcuccacuccagccaccggcuccgguagcgcaaucgccucaggcguagcuguaugcaaaguccuccaccuagaaggcgaaguaaacaaaauaaaauccgcccuccucucaaccaacaaggccgucgucucacucucaaacggcgucuccguacucaccuuuaaaguccuagaccuuaaaaacuacaucgacaaacaacugcuaccaauccucaacaaacaaucaugcagcaucccaaacccggaaacagucauggaguuccaacagaaaaacaaccgacuccucgaaaucacccgcgaguucuccgucaacgccggagucaccacaccuguaagcacauacaugcuuacuaauuccgaacuccuuucacuaauaaacgacaugccaauaaccaacgaccaaaagaaacucauguccaacaacguacaaaucguacgccaacaauccuacuccaucaugugcaucaucaaagaagaaguccuggccuaugucguacaacucccccuuuacggugucaucgacacacccugcuggaaacuacacaccagcccccucugcacaacaaacaccaaagaaggcuccaacaucugccucacccguaccgaccgaggcugguacugcgacaacgccggcuccgucuccuucuucccccaagccgaaaccugcaaagucugcagcaaccgcgucuucugcgauaccaugaacucccucacacucccaucugaagucaaccucugcaacgucgauauuuucaauccaaaauacgacugcaaaaucaugacuagcaaaaccgacguuagcuccuccgucaucaccucccucggcgccauaguuucaugcuacggcaaaaccaaaugcaccgccuccaacaaaaacaaaggcaucauaaaaaccuucuccaacgggugcgacuacguaucuaauaaaggagucgacaccgucucaguaggaaacacccucuacuaugucaacaaacaagaaggccaaucacuauacguuaaaggcgaaccaaucaucaacuucuacgacccacucgucuuccccagcgacgaguuugacgccucaaucucgcaagucaaugaaaagauuaaccaaucccuagccuucauccgaaaaagugacgaacuccuccacaacguuaacgccggcaaaucuacaaccaacaucaugaucaccacuauaaucaucgucaucauagucauacuucucagccucaucgcagucggacuccuccuuuauugcaaggcacgauaaggacuaguacuggcugcaucucccuuuccucuguccuccauccuucucccaggauggugaagggggaccugguacccagugauccccaccccaggauccuaaaucaugacuuaccugcuaauaaaaacucauuggaaaagugagaagaucuaaaaaaaaaaaaaaaaaaaaaaaaaaaaaaaaaaaaaaaaaaaaaaaaaaaaaaaaaaaaaaaaugcaucccccccccccccccccccccccccccccccaaaggcucuuuucagagccaccagaauu

SEQ ID NO: 6674 - RNA, 2117 nt, Artificial Sequence
  mRNA product Design f-4 comprising derived and/or modified sequence from HRSV(A2)__F-del_DSCav1_mut6 (opt1)
gggagagucccgcagucggcguccagcggcucugcuuguucgugugugugucguugcaggccuuauucaagcuuaccauggagcugcucauccugaaggccaacgccaucaccaccauccugacggcggugaccuucugcuucgccagcggccagaacaucaccgaggaguucuaccaguccacgugcagcgccgucuccaagggguaccucggcgcccugcggaccggcugguacaccuccgugaucaccaucgagcugagcaacaucaaggagaacaagugcaacgggaccgacgccaaggugaagcucaucaagcaggagcuggacaaguacaagaacgcggucacggaccugcagaugcugaugugcuccaccccggcaaccggcuccggcuccgccaucgcgagcggcgucgccgugugcaaggugcugcaccucgagggggaggucaacaagaucaagagcgcccugcuguccaccaacaaggccguggugagccucuccaacggcgucagcgugcugaccuucaaggugcuggaccucaagaacuacaucgacaagcagcugcugcccauccugaacaagcagagcugcuccauccccaaccccgagacggugauggaguuccagcagaagaacaaccggcuccuggagaucacccgcgaguucagcgugaacgccggggucaccacccccguguccacguacaugcugaccaacagcgagcuccugucccugaucaacgacaugccgaucaccaacgaccagaagaagcucaugagcaacaacgugcagaucguccggcagcaguccuacagcaucaugugcaucaucaaggaggaggugcuggcguacgugguccagcugccccucuacggcgugaucgacacccccugcuggaagcugcacacgagcccccugugcaccaccaacaccaaggagggguccaacaucugccucacgcgcaccgaccggggcugguacugcgacaacgccggcagcgucuccuucuucccgcaggccgagaccugcaaggugugcagcaaccgcguguucugcgacaccaugaacucccugacgcugcccagcgagguaaaccucugcaacgucgacaucuucaaccccaaguacgacugcaagaucaugaccuccaagaccgacgugagcuccagcgugaucaccucccugggggccaucgucagcugcuacggcaagacgaagugcaccgccagcaacaagaacaaggggaucaucaagaccuucuccaacggcugcgacuacgugagcaacaagggcguggacaccguguccgucgggaacacccuguacuacgugaacaagcaggagggccagagccucuacgugaagggggagcccaucaucaacuucuacgacccgcuggucuuccccuccgacgaguucgacgcgagcaucucccaggugaacgagaagaucaaccagagccuggccuucauccgcaaguccgacgagcugcuccacaacgugaacgccggcaagagcacgaccaacaucaugaucaccaccaucaucaucgucaucaucgugauccugcugucccucaucgccguggggcugcugcucuacugcaaggcccggugaggacuagugaagggaacacccaaauuuaauucagccuuaagcacaauuaauuaagagugaaacguaauuguacaagcaguuggucacccaccauagggcaugaucaacaccgcaaccuuuccuuuuucccccagugauucugaaaaaccccucuucccuucagcuugcuuagauguuccaaauuuaguaagcuuaaggcggccuacagaagaaaaagaaaaaaaaggccacaaaaguucccucucacuuucaguaaauaaaauaaaagcagcaacagaaauaaagaaauaaaugaaauucaaaaugaaauaaauauuguguugugcagcauuaaaaaaucaauaaaaauuaaaaaugagcaagaucuaaaaaaaaaaaaaaaaaaaaaaaaaaaaaaaaaaaaaaaaaaaaaaaaaaaaaaaaaaaaaaaaugcaucccccccccccccccccccccccccccccccaaaggcucuuuucagagccaccagaauu

SEQ ID NO: 6675 - RNA, 2117 nt, Artificial Sequence
  mRNA product Design f-4 comprising derived and/or modified sequence from HRSV(A2)__F-del_DSCav1_mut6 (opt1)
gggagagucccgcagucggcguccagcggcucugcuuguucgugugugugucguugcaggccuuauucaagcuuaccauggagcugcucauccugaaggccaacgccaucaccaccauccugacggcggugaccuucugcuucgccagcggccagaacaucaccgaggaguucuaccaguccacgugcagcgccgucuccaagggguaccucggcgcccugcgcaccgggugguacaccagcgugaucaccaucgagcuguccaacaucaaggagaacaagugcaacggcaccgacgccaaggugaagcucaucaagcaggagcuggacaaguacaagaacgcggucacggaccugcagaugcucaugugcagcacccccgccaccggguccggcagcgccaucgccuccggcguggcggugugcaagguccugcaccuggagggggaggugaacaagaucaagagcgcccuccuguccaccaacaaggccguggucagccuguccaacggcgugagcgugcucacguucaagguccuggaccugaagaacuacaucgacaagcagcuccugccgauccugaacaagcaguccugcagcauccccaaccccgagaccgugauggaguuccagcagaagaacaaccggcuccuggagaucacccgcgaguucuccgugaacgccggggucaccacgcccgugagcaccuacaugcugaccaacuccgagcuccugagccugaucaacgacaugccgaucaccaacgaccagaagaagcucaugagcaacaacgugcagaucguccggcagcaguccuacagcaucaugugcaucaucaaggaggaggugcuggccuacgugguccagcugccccucuacggcgugaucgacacgcccugcuggaagcugcacaccagcccccugugcaccaccaacacgaaggaggggagcaacaucugccucacccgcaccgaccggggcugguacugcgacaacgcgggcuccgugagcuucuucccgcaggccgagaccugcaaggucugcuccaaccgcguguucugcgacacgaugaacagccugacccugcccuccgaggucaaccucugcaacguggacaucuucaaccccaaguacgacugcaagaucaugaccagcaagaccgacguguccagcuccgucaucacgagccugggggccaucguguccugcuacggcaagaccaagugcaccgccagcaacaagaacaaggggaucaucaagaccuucuccaacggcugcgacuacgugagcaacaagggcgucgacacgguguccguggggaacacccuguacuacgucaacaagcaggagggccagagccucuacgugaagggggagcccaucaucaacuucuacgacccgcugguguuccccagcgacgaguucgacgccuccaucagccaggucaacgagaagaucaaccagucccuggcguucauccggaaguccgacgagcuccugcacaacgugaacgccggcaaguccaccaccaacaucaugaucaccacgaucaucaucgugaucaucgucauccugcucagccugaucgccguggggcugcuccuguacugcaaggcccgcugaggacuagugaagggaacacccaaauuuaauucagccuuaagcacaauuaauuaagagugaaacguaauuguacaagcaguuggucacccaccauagggcaugaucaacaccgcaaccuuuccuuuuucccccagugauucugaaaaaccccucuucccuucagcuugcuuagauguuccaaauuuaguaagcuuaaggcggccuacagaagaaaaagaaaaaaaaggccacaaaaguucccucucacuuucaguaaauaaaauaaaagcagcaacagaaauaaagaaauaaaugaaauucaaaaugaaauaaauauuguguugugcagcauuaaaaaaucaauaaaaauuaaaaaugagcaagaucuaaaaaaaaaaaaaaaaaaaaaaaaaaaaaaaaaaaaaaaaaaaaaaaaaaaaaaaaaaaaaaaaugcaucccccccccccccccccccccccccccccccaaaggcucuuuucagagccaccagaauu

SEQ ID NO: 6676 - RNA, 2117 nt, Artificial Sequence
  mRNA product Design f-4 comprising derived and/or modified sequence from HRSV(A2)__F-del_DSCav1_mut6 (opt2)
gggagagucccgcagucggcguccagcggcucugcuuguucgugugugugucguugcaggccuuauucaagcuuaccauggagcuccucauccucaaggccaacgccaucaccaccauccucaccgccgucaccuucugcuucgccuccggccagaacaucaccgaggaguucuaccaguccaccugcuccgccgucuccaagggcuaccucggcgcccuccgcaccggcugguacaccuccgucaucaccaucgagcucuccaacaucaaggagaacaagugcaacggcaccgacgccaaggucaagcucaucaagcaggagcucgacaaguacaagaacgccgucaccgaccuccagaugcucaugugcuccacccccgccaccggcuccggcuccgccaucgccuccggcgucgccgucugcaagguccuccaccucgagggcgaggucaacaagaucaaguccgcccuccucuccaccaacaaggccgucgucucccucuccaacggcgucuccguccucaccuucaagguccucgaccucaagaacuacaucgacaagcagcuccuccccauccucaacaagcaguccugcuccauccccaaccccgagaccgucauggaguuccagcagaagaacaaccgccuccucgagaucacccgcgaguucuccgucaacgccggcgucaccacccccgucuccaccuacaugcucaccaacuccgagcuccucucccucaucaacgacaugcccaucaccaacgaccagaagaagcucauguccaacaacguccagaucguccgccagcaguccuacuccaucaugugcaucaucaaggaggagguccucgccuacgucguccagcucccccucuacggcgucaucgacacccccugcuggaagcuccacaccuccccccucugcaccaccaacaccaaggagggcuccaacaucugccucacccgcaccgaccgcggcugguacugcgacaacgccggcuccgucuccuucuucccccaggccgagaccugcaaggucugcuccaaccgcgucuucugcgacaccaugaacucccucacccuccccuccgaggucaaccucugcaacgucgacaucuucaaccccaaguacgacugcaagaucaugaccuccaagaccgacgucuccuccuccgucaucaccucccucggcgccaucgucuccugcuacggcaagaccaagugcaccgccuccaacaagaacaagggcaucaucaagaccuucuccaacggcugcgacuacgucuccaacaagggcgucgacaccgucuccgucggcaacacccucuacuacgucaacaagcaggagggccagucccucuacgucaagggcgagcccaucaucaacuucuacgacccccucgucuuccccuccgacgaguucgacgccuccaucucccaggucaacgagaagaucaaccagucccucgccuucauccgcaaguccgacgagcuccuccacaacgucaacgccggcaaguccaccaccaacaucaugaucaccaccaucaucaucgucaucaucgucauccuccucucccucaucgccgucggccuccuccucuacugcaaggcccgcugaggacuagugaagggaacacccaaauuuaauucagccuuaagcacaauuaauuaagagugaaacguaauuguacaagcaguuggucacccaccauagggcaugaucaacaccgcaaccuuuccuuuuucccccagugauucugaaaaaccccucuucccuucagcuugcuuagauguuccaaauuuaguaagcuuaaggcggccuacagaagaaaaagaaaaaaaaggccacaaaaguucccucucacuuucaguaaauaaaauaaaagcagcaacagaaauaaagaaauaaaugaaauucaaaaugaaauaaauauuguguugugcagcauuaaaaaaucaauaaaaauuaaaaaugagcaagaucuaaaaaaaaaaaaaaaaaaaaaaaaaaaaaaaaaaaaaaaaaaaaaaaaaaaaaaaaaaaaaaaaugcaucccccccccccccccccccccccccccccccaaaggcucuuuucagagccaccagaauu

SEQ ID NO: 6677 - RNA, 2117 nt, Artificial Sequence
  mRNA product Design f-4 comprising derived and/or modified sequence from HRSV(A2)__F-del_DSCav1_mut6 (opt3)
gggagagucccgcagucggcguccagcggcucugcuuguucgugugugugucguugcaggccuuauucaagcuuaccauggagcugcucauccuuaaggccaacgcuauuaccacaauacugacugcagugacguucugcuuugccagcggccagaauaucaccgaagaguucuaccaauccacauguucugcggucucaaaaggguauuugggagcuuuaagaacugguugguacaccaguguuauuacaaucgaacugagcaacauuaaggagaauaaaugcaacggcaccgacgccaaggugaaacuaaucaagcaggaacucgauaaguauaaaaaugcaguaacugaccugcagaugcuuauguguuccacacccgccaccgggucuggaucggcuauagcaucaggcguggccgucugcaaggugcugcacuuggagggugagguuaacaaaaucaagagcgcucuccugaguacgaauaaagccguggucucccugucuaacggggugagcguacucacuuuuaagguuuuagaucugaagaauuacauugacaaacagcuuuugccuauccugaacaagcaauccuguucaauuccaaauccggaaaccgugauggaguuccagcagaaaaacaauaggcuacucgaaaucacacgggaguuuagugucaacgcgggagugacuacccccgugagcacauauaugcugaccaauucugagcuucuguccuugauaaacgauaugccuauuacgaacgaccagaagaaacucaugucaaauaacguccaaaucguucgccagcagagcuacaguauuaugugcaucaucaaggaagaggugcuggcauauguagugcaguuaccacuguacggcgucauugauacucccuguuggaaacuccauacaucuccucuuugcaccacuaauacaaaggaaggcuccaacauaugucugacccgaacggaccgugggugguacugcgauaaugccggaagcgugucguucuuuccacaagcugagaccuguaagguuugcucuaacagaguguucugcgacacaaugaacuccuugacucuacccucagaagucaaucuguguaauguggauaucuuuaacccuaaauaugacugcaagauuaugaccaguaaaacagauguaagcuccucuguuaucacuagccucggugccauagugucauguuacggcaagaccaaaugcacagcaaguaauaagaacaaggggauuaucaaaaccuucuccaauggaugugacuaugucagcaacaagggcguggacacugucucuguggguaauacgcuguacuauguuaacaaacaggaggggcagucacuuuacgugaagggagagccaaucauuaacuuuuaugauccgcugguauuccccagugacgaauuugaugcuagcaucucccaagucaaugagaaaauuaaccagucuuuggccuucauaaggaagucggacgaacuccugcacaaugugaacgcgggcaagagcacaaccaauaucaugauuacuaccaucaucauuguuauaaucgugauuuuacugucccuaaucgccgucggccuccugcuuuacugcaaagcacggugaggacuagugaagggaacacccaaauuuaauucagccuuaagcacaauuaauuaagagugaaacguaauuguacaagcaguuggucacccaccauagggcaugaucaacaccgcaaccuuuccuuuuucccccagugauucugaaaaaccccucuucccuucagcuugcuuagauguuccaaauuuaguaagcuuaaggcggccuacagaagaaaaagaaaaaaaaggccacaaaaguucccucucacuuucaguaaauaaaauaaaagcagcaacagaaauaaagaaauaaaugaaauucaaaaugaaauaaauauuguguugugcagcauuaaaaaaucaauaaaaauuaaaaaugagcaagaucuaaaaaaaaaaaaaaaaaaaaaaaaaaaaaaaaaaaaaaaaaaaaaaaaaaaaaaaaaaaaaaaaugcaucccccccccccccccccccccccccccccccaaaggcucuuuucagagccaccagaauu

SEQ ID NO: 6678 - RNA, 2117 nt, Artificial Sequence
  mRNA product Design f-4 comprising derived and/or modified sequence from HRSV(A2)__F-del_DSCav1_mut6 (opt4)
gggagagucccgcagucggcguccagcggcucugcuuguucgugugugugucguugcaggccuuauucaagcuuaccauggagcugcugauccugaaggccaacgccaucaccaccauccugaccgccgugaccuucugcuucgccagcggccagaacaucaccgaggaguucuaccagagcaccugcagcgccgugagcaagggcuaccugggcgcccugagaaccggcugguacaccagcgugaucaccaucgagcugagcaacaucaaggagaacaagugcaacggcaccgacgccaaggugaagcugaucaagcaggagcuggacaaguacaagaacgccgugaccgaccugcagaugcugaugugcagcacccccgccaccggcagcggcagcgccaucgccagcggcguggccgugugcaaggugcugcaccuggagggcgaggugaacaagaucaagagcgcccugcugagcaccaacaaggccguggugagccugagcaacggcgugagcgugcugaccuucaaggugcuggaccugaagaacuacaucgacaagcagcugcugcccauccugaacaagcagagcugcagcauccccaaccccgagaccgugauggaguuccagcagaagaacaacagacugcuggagaucaccagagaguucagcgugaacgccggcgugaccacccccgugagcaccuacaugcugaccaacagcgagcugcugagccugaucaacgacaugcccaucaccaacgaccagaagaagcugaugagcaacaacgugcagaucgugagacagcagagcuacagcaucaugugcaucaucaaggaggaggugcuggccuacguggugcagcugccccuguacggcgugaucgacacccccugcuggaagcugcacaccagcccccugugcaccaccaacaccaaggagggcagcaacaucugccugaccagaaccgacagaggcugguacugcgacaacgccggcagcgugagcuucuucccccaggccgagaccugcaaggugugcagcaacagaguguucugcgacaccaugaacagccugacccugcccagcgaggugaaccugugcaacguggacaucuucaaccccaaguacgacugcaagaucaugaccagcaagaccgacgugagcagcagcgugaucaccagccugggcgccaucgugagcugcuacggcaagaccaagugcaccgccagcaacaagaacaagggcaucaucaagaccuucagcaacggcugcgacuacgugagcaacaagggcguggacaccgugagcgugggcaacacccuguacuacgugaacaagcaggagggccagagccuguacgugaagggcgagcccaucaucaacuucuacgacccccugguguuccccagcgacgaguucgacgccagcaucagccaggugaacgagaagaucaaccagagccuggccuucaucagaaagagcgacgagcugcugcacaacgugaacgccggcaagagcaccaccaacaucaugaucaccaccaucaucaucgugaucaucgugauccugcugagccugaucgccgugggccugcugcuguacugcaaggccagaugaggacuagugaagggaacacccaaauuuaauucagccuuaagcacaauuaauuaagagugaaacguaauuguacaagcaguuggucacccaccauagggcaugaucaacaccgcaaccuuuccuuuuucccccagugauucugaaaaaccccucuucccuucagcuugcuuagauguuccaaauuuaguaagcuuaaggcggccuacagaagaaaaagaaaaaaaaggccacaaaaguucccucucacuuucaguaaauaaaauaaaagcagcaacagaaauaaagaaauaaaugaaauucaaaaugaaauaaauauuguguugugcagcauuaaaaaaucaauaaaaauuaaaaaugagcaagaucuaaaaaaaaaaaaaaaaaaaaaaaaaaaaaaaaaaaaaaaaaaaaaaaaaaaaaaaaaaaaaaaaugcaucccccccccccccccccccccccccccccccaaaggcucuuuucagagccaccagaauu

SEQ ID NO: 6679 - RNA, 2117 nt, Artificial Sequence
  mRNA product Design f-4 comprising derived and/or modified sequence from HRSV(A2)__F-del_DSCav1_mut6 (opt5)
gggagagucccgcagucggcguccagcggcucugcuuguucgugugugugucguugcaggccuuauucaagcuuaccauggagcugcucauccugaaggccaacgcuauuaccacaauccuuacggccgugaccuucugcuuugcgagcggccagaauauuacagaagaguucuaccaauccaccuguucugcugucagcaaaggguaucugggagcccucagaacaggcugguacaccuccguuaucacaauugaacugucuaacaucaaggagaauaaaugcaacgggaccgacgccaaggugaaacuuaucaagcaggaacuggauaaguauaaaaaugcugugacggaccuccagaugcugauguguagcacccccgccacaggauccggcucugcuauugccagcggggucgcggugugcaagguucugcaccucgagggagaggugaacaaaaucaaguccgcccugcuuagcaccaauaaagcugucgugucucuguccaacggcguuagcgugcucacauuuaagguccuggaucuuaagaauuacauugacaaacagcugcucccuauccugaacaagcaaucuuguuccauuccgaaucccgaaaccgugauggaguuccagcagaaaaacaaucggcugcucgaaaucacgcgcgaguuuagcgugaacgccggcgucacaaccccuguuucuacauauaugcugaccaauuccgagcuucugagccucauuaacgauaugcccaucaccaacgaccagaagaaacugauguccaauaacgugcaaaucgugagacagcagucuuacagcauuaugugcaucauuaaggaagagguccuugcuuaugugguucagcugccucucuacggggugaucgauacacccuguuggaaacugcauacguccccucugugcaccacaaauaccaaggaaggaagcaacauuugucucacacggaccgaccgcggcugguacugcgauaaugccgggucugucuccuucuuuccgcaagcggagacguguaaggugugcagcaacagaguuuucugcgacacaaugaacucucugacccuucccagcgaagugaaucuguguaaugucgauaucuuuaacccuaaauaugacugcaagaucaugaccuccaaaacagaugugucuagcuccgucauuaccagccucggagccaucgugucuuguuacggcaagacaaaaugcacggcuuccaauaagaacaaggggauuaucaaaaccuucagcaauggaugugacuauguuucuaacaagggcguggacacagucuccgugggcaauacccuguacuauguuaacaaacaggaggggcagagccuuuacgugaagggagagcccauuaucaacuuuuaugauccucuggucuuccccuccgacgaauuugaugccucuaucagccaagugaaugagaaaauuaaccagucccucgcuuucauccggaagucugacgaacugcugcacaaugugaacgccggcaagagcacaaccaauauuaugaucacgaccauuaucauuguuaucaucgucauucuccugucccuuaucgccguggggcugcuccuguacugcaaagcucgcugaggacuagugaagggaacacccaaauuuaauucagccuuaagcacaauuaauuaagagugaaacguaauuguacaagcaguuggucacccaccauagggcaugaucaacaccgcaaccuuuccuuuuucccccagugauucugaaaaaccccucuucccuucagcuugcuuagauguuccaaauuuaguaagcuuaaggcggccuacagaagaaaaagaaaaaaaaggccacaaaaguucccucucacuuucaguaaauaaaauaaaagcagcaacagaaauaaagaaauaaaugaaauucaaaaugaaauaaauauuguguugugcagcauuaaaaaaucaauaaaaauuaaaaaugagcaagaucuaaaaaaaaaaaaaaaaaaaaaaaaaaaaaaaaaaaaaaaaaaaaaaaaaaaaaaaaaaaaaaaaugcaucccccccccccccccccccccccccccccccaaaggcucuuuucagagccaccagaauu

SEQ ID NO: 6680 - RNA, 2117 nt, Artificial Sequence
  mRNA product Design f-4 comprising derived and/or modified sequence from HRSV(A2)__F-del_DSCav1_mut6 (opt6)
gggagagucccgcagucggcguccagcggcucugcuuguucgugugugugucguugcaggccuuauucaagcuuaccauggaacuacucauauuaaaagcaaacgcaauaacaacgauauuaacagcuguaacauucugcuuugcaucaggccaaaauaucaccgaagaauuuuaucaaagcacaugcucugcaguauccaaaggauacuuaggagcauuaagaacaggcugguacacauccguaauaacaauagaacuaucaaacaucaaagaaaacaaaugcaacggcacagacgccaaaguaaaacucauaaaacaagaacuagacaaauauaaaaacgcaguaacagaucuacaaaugcucaugugcuccacaccagcaaccggaucugguucagccauagcauccggcguagccgucugcaaaguauuacaccucgaaggagaaguaaacaaaauaaaaucugcccuauuaucuacaaauaaagccguaguaagucuaaguaacggaguaucaguacuaacauuuaaaguccuagaccugaaaaacuauaucgacaaacaacuauuaccaauacuaaacaaacaauccuguuccaucccuaacccagaaacaguuauggaauuucaacaaaaaaauaaccgccuuuuagaaauaacuagagaauuuucaguaaacgcaggaguuacaacaccaguaucaacauacaugcuaacaaauucagaauuauuaucccuuauaaaugacaugccuaucacaaacgaucaaaaaaaauuaauguccaacaacguacaaauaguaagacaacaaucauauuccaucaugugcaucauaaaagaagaaguccucgcauacguagugcaacuaccacuauacggagucauagauacacccuguuggaaacuucacacaucuccacuaugcacaacaaacacgaaagaaggauccaacauaugccuaacacgaacagacagaggaugguauugcgacaacgcuggaagugugagcuucuucccucaagcagaaacuugcaaaguaugcagcaaucguguauucugcgacacaaugaacucauuaacacucccaagcgaaguaaaccucugcaauguagacaucuuuaauccaaaauacgauuguaaaauaaugacuucaaaaacagacgucucaucaucuguaauaacaucuuuaggagcaauaguuucuugcuacgguaaaacaaaaugcaccgcauccaacaaaaacaaaggaauaauaaaaacauucucuaacggcugcgauuacguaucuaacaaaggaguugacacagucucaguaggaaacacacuauacuacguaaacaaacaagaaggacaaagccuauacguaaaaggagaaccaauaauaaacuucuaugacccauuaguauuuccaagcgaugaauuugacgcuucaauaucacaagucaaugaaaaaauaaaucagagcuuagcauucauaagaaaaucugaugaacuacuacacaauguaaaugcaggaaaauccacuaccaacauaaugauuaccacaauuauaauaguuaucauaguaauacuauuaucacuaauagccguuggauuacuacuauacugcaaagcaagauaaggacuagugaagggaacacccaaauuuaauucagccuuaagcacaauuaauuaagagugaaacguaauuguacaagcaguuggucacccaccauagggcaugaucaacaccgcaaccuuuccuuuuucccccagugauucugaaaaaccccucuucccuucagcuugcuuagauguuccaaauuuaguaagcuuaaggcggccuacagaagaaaaagaaaaaaaaggccacaaaaguucccucucacuuucaguaaauaaaauaaaagcagcaacagaaauaaagaaauaaaugaaauucaaaaugaaauaaauauuguguugugcagcauuaaaaaaucaauaaaaauuaaaaaugagcaagaucuaaaaaaaaaaaaaaaaaaaaaaaaaaaaaaaaaaaaaaaaaaaaaaaaaaaaaaaaaaaaaaaaugcaucccccccccccccccccccccccccccccccaaaggcucuuuucagagccaccagaauu

SEQ ID NO: 6681 - RNA, 2117 nt, Artificial Sequence
  mRNA product Design f-4 comprising derived and/or modified sequence from HRSV(A2)__F-del_DSCav1_mut6 (opt11)
gggagagucccgcagucggcguccagcggcucugcuuguucgugugugugucguugcaggccuuauucaagcuuaccauggaacuacucauccuaaaagcaaacgccaucaccaccauacuaaccgccgucaccuucugcuucgccucgggacaaaacaucaccgaagaguucuaccagucaacgugcuccgccgucucaaaaggcuaccuaggcgcccuccgcaccgggugguauaccuccgucauaacuaucgaacucucuaacaucaaagaaaacaaauguaacggcaccgacgccaaagucaaacuaaucaaacaagaacuggacaaauacaaaaacgccgucaccgaccuacaaaugcucaugugcuccacuccagccaccggcuccgguagcgcaaucgccucaggcguagcuguaugcaaaguccuccaccuagaaggcgaaguaaacaaaauaaaauccgcccuccucucaaccaacaaggccgucgucucacucucaaacggcgucuccguacucaccuuuaaaguccuagaccuuaaaaacuacaucgacaaacaacugcuaccaauccucaacaaacaaucaugcagcaucccaaacccggaaacagucauggaguuccaacagaaaaacaaccgacuccucgaaaucacccgcgaguucuccgucaacgccggagucaccacaccuguaagcacauacaugcuuacuaauuccgaacuccuuucacuaauaaacgacaugccaauaaccaacgaccaaaagaaacucauguccaacaacguacaaaucguacgccaacaauccuacuccaucaugugcaucaucaaagaagaaguccuggccuaugucguacaacucccccuuuacggugucaucgacacacccugcuggaaacuacacaccagcccccucugcacaacaaacaccaaagaaggcuccaacaucugccucacccguaccgaccgaggcugguacugcgacaacgccggcuccgucuccuucuucccccaagccgaaaccugcaaagucugcagcaaccgcgucuucugcgauaccaugaacucccucacacucccaucugaagucaaccucugcaacgucgauauuuucaauccaaaauacgacugcaaaaucaugacuagcaaaaccgacguuagcuccuccgucaucaccucccucggcgccauaguuucaugcuacggcaaaaccaaaugcaccgccuccaacaaaaacaaaggcaucauaaaaaccuucuccaacgggugcgacuacguaucuaauaaaggagucgacaccgucucaguaggaaacacccucuacuaugucaacaaacaagaaggccaaucacuauacguuaaaggcgaaccaaucaucaacuucuacgacccacucgucuuccccagcgacgaguuugacgccucaaucucgcaagucaaugaaaagauuaaccaaucccuagccuucauccgaaaaagugacgaacuccuccacaacguuaacgccggcaaaucuacaaccaacaucaugaucaccacuauaaucaucgucaucauagucauacuucucagccucaucgcagucggacuccuccuuuauugcaaggcacgauaaggacuagugaagggaacacccaaauuuaauucagccuuaagcacaauuaauuaagagugaaacguaauuguacaagcaguuggucacccaccauagggcaugaucaacaccgcaaccuuuccuuuuucccccagugauucugaaaaaccccucuucccuucagcuugcuuagauguuccaaauuuaguaagcuuaaggcggccuacagaagaaaaagaaaaaaaaggccacaaaaguucccucucacuuucaguaaauaaaauaaaagcagcaacagaaauaaagaaauaaaugaaauucaaaaugaaauaaauauuguguugugcagcauuaaaaaaucaauaaaaauuaaaaaugagcaagaucuaaaaaaaaaaaaaaaaaaaaaaaaaaaaaaaaaaaaaaaaaaaaaaaaaaaaaaaaaaaaaaaaugcaucccccccccccccccccccccccccccccccaaaggcucuuuucagagccaccagaauu

SEQ ID NO: 6682 - RNA, 1893 nt, Artificial Sequence
  mRNA product Design f-5 comprising derived and/or modified sequence from HRSV(A2)__F-del_DSCav1_mut6 (opt1)
gggagacuuucccauucuguagcagaauuugguguugccuguggucuuggucccgcggagaagcuuaccauggagcugcucauccugaaggccaacgccaucaccaccauccugacggcggugaccuucugcuucgccagcggccagaacaucaccgaggaguucuaccaguccacgugcagcgccgucuccaagggguaccucggcgcccugcggaccggcugguacaccuccgugaucaccaucgagcugagcaacaucaaggagaacaagugcaacgggaccgacgccaaggugaagcucaucaagcaggagcuggacaaguacaagaacgcggucacggaccugcagaugcugaugugcuccaccccggcaaccggcuccggcuccgccaucgcgagcggcgucgccgugugcaaggugcugcaccucgagggggaggucaacaagaucaagagcgcccugcuguccaccaacaaggccguggugagccucuccaacggcgucagcgugcugaccuucaaggugcuggaccucaagaacuacaucgacaagcagcugcugcccauccugaacaagcagagcugcuccauccccaaccccgagacggugauggaguuccagcagaagaacaaccggcuccuggagaucacccgcgaguucagcgugaacgccggggucaccacccccguguccacguacaugcugaccaacagcgagcuccugucccugaucaacgacaugccgaucaccaacgaccagaagaagcucaugagcaacaacgugcagaucguccggcagcaguccuacagcaucaugugcaucaucaaggaggaggugcuggcguacgugguccagcugccccucuacggcgugaucgacacccccugcuggaagcugcacacgagcccccugugcaccaccaacaccaaggagggguccaacaucugccucacgcgcaccgaccggggcugguacugcgacaacgccggcagcgucuccuucuucccgcaggccgagaccugcaaggugugcagcaaccgcguguucugcgacaccaugaacucccugacgcugcccagcgagguaaaccucugcaacgucgacaucuucaaccccaaguacgacugcaagaucaugaccuccaagaccgacgugagcuccagcgugaucaccucccugggggccaucgucagcugcuacggcaagacgaagugcaccgccagcaacaagaacaaggggaucaucaagaccuucuccaacggcugcgacuacgugagcaacaagggcguggacaccguguccgucgggaacacccuguacuacgugaacaagcaggagggccagagccucuacgugaagggggagcccaucaucaacuucuacgacccgcuggucuuccccuccgacgaguucgacgcgagcaucucccaggugaacgagaagaucaaccagagccuggccuucauccgcaaguccgacgagcugcuccacaacgugaacgccggcaagagcacgaccaacaucaugaucaccaccaucaucaucgucaucaucgugauccugcugucccucaucgccguggggcugcugcucuacugcaaggcccggugaggacuaguacuggcugcaucucccuuuccucuguccuccauccuucucccaggauggugaagggggaccugguacccagugauccccaccccaggauccuaaaucaugacuuaccugcuaauaaaaacucauuggaaaagugagaagaucuaaaaaaaaaaaaaaaaaaaaaaaaaaaaaaaaaaaaaaaaaaaaaaaaaaaaaaaaaaaaaaaaugcaucccccccccccccccccccccccccccccccaaaggcucuuuucagagccaccagaauu

SEQ ID NO: 6683 - RNA, 1893 nt, Artificial Sequence
  mRNA product Design f-5 comprising derived and/or modified sequence from HRSV(A2)__F-del_DSCav1_mut6 (opt1)
gggagacuuucccauucuguagcagaauuugguguugccuguggucuuggucccgcggagaagcuuaccauggagcugcucauccugaaggccaacgccaucaccaccauccugacggcggugaccuucugcuucgccagcggccagaacaucaccgaggaguucuaccaguccacgugcagcgccgucuccaagggguaccucggcgcccugcgcaccgggugguacaccagcgugaucaccaucgagcuguccaacaucaaggagaacaagugcaacggcaccgacgccaaggugaagcucaucaagcaggagcuggacaaguacaagaacgcggucacggaccugcagaugcucaugugcagcacccccgccaccggguccggcagcgccaucgccuccggcguggcggugugcaagguccugcaccuggagggggaggugaacaagaucaagagcgcccuccuguccaccaacaaggccguggucagccuguccaacggcgugagcgugcucacguucaagguccuggaccugaagaacuacaucgacaagcagcuccugccgauccugaacaagcaguccugcagcauccccaaccccgagaccgugauggaguuccagcagaagaacaaccggcuccuggagaucacccgcgaguucuccgugaacgccggggucaccacgcccgugagcaccuacaugcugaccaacuccgagcuccugagccugaucaacgacaugccgaucaccaacgaccagaagaagcucaugagcaacaacgugcagaucguccggcagcaguccuacagcaucaugugcaucaucaaggaggaggugcuggccuacgugguccagcugccccucuacggcgugaucgacacgcccugcuggaagcugcacaccagcccccugugcaccaccaacacgaaggaggggagcaacaucugccucacccgcaccgaccggggcugguacugcgacaacgcgggcuccgugagcuucuucccgcaggccgagaccugcaaggucugcuccaaccgcguguucugcgacacgaugaacagccugacccugcccuccgaggucaaccucugcaacguggacaucuucaaccccaaguacgacugcaagaucaugaccagcaagaccgacguguccagcuccgucaucacgagccugggggccaucguguccugcuacggcaagaccaagugcaccgccagcaacaagaacaaggggaucaucaagaccuucuccaacggcugcgacuacgugagcaacaagggcgucgacacgguguccguggggaacacccuguacuacgucaacaagcaggagggccagagccucuacgugaagggggagcccaucaucaacuucuacgacccgcugguguuccccagcgacgaguucgacgccuccaucagccaggucaacgagaagaucaaccagucccuggcguucauccggaaguccgacgagcuccugcacaacgugaacgccggcaaguccaccaccaacaucaugaucaccacgaucaucaucgugaucaucgucauccugcucagccugaucgccguggggcugcuccuguacugcaaggcccgcugaggacuaguacuggcugcaucucccuuuccucuguccuccauccuucucccaggauggugaagggggaccugguacccagugauccccaccccaggauccuaaaucaugacuuaccugcuaauaaaaacucauuggaaaagugagaagaucuaaaaaaaaaaaaaaaaaaaaaaaaaaaaaaaaaaaaaaaaaaaaaaaaaaaaaaaaaaaaaaaaugcaucccccccccccccccccccccccccccccccaaaggcucuuuucagagccaccagaauu

SEQ ID NO: 6684 - RNA, 1893 nt, Artificial Sequence
  mRNA product Design f-5 comprising derived and/or modified sequence from HRSV(A2)__F-del_DSCav1_mut6 (opt2)
gggagacuuucccauucuguagcagaauuugguguugccuguggucuuggucccgcggagaagcuuaccauggagcuccucauccucaaggccaacgccaucaccaccauccucaccgccgucaccuucugcuucgccuccggccagaacaucaccgaggaguucuaccaguccaccugcuccgccgucuccaagggcuaccucggcgcccuccgcaccggcugguacaccuccgucaucaccaucgagcucuccaacaucaaggagaacaagugcaacggcaccgacgccaaggucaagcucaucaagcaggagcucgacaaguacaagaacgccgucaccgaccuccagaugcucaugugcuccacccccgccaccggcuccggcuccgccaucgccuccggcgucgccgucugcaagguccuccaccucgagggcgaggucaacaagaucaaguccgcccuccucuccaccaacaaggccgucgucucccucuccaacggcgucuccguccucaccuucaagguccucgaccucaagaacuacaucgacaagcagcuccuccccauccucaacaagcaguccugcuccauccccaaccccgagaccgucauggaguuccagcagaagaacaaccgccuccucgagaucacccgcgaguucuccgucaacgccggcgucaccacccccgucuccaccuacaugcucaccaacuccgagcuccucucccucaucaacgacaugcccaucaccaacgaccagaagaagcucauguccaacaacguccagaucguccgccagcaguccuacuccaucaugugcaucaucaaggaggagguccucgccuacgucguccagcucccccucuacggcgucaucgacacccccugcuggaagcuccacaccuccccccucugcaccaccaacaccaaggagggcuccaacaucugccucacccgcaccgaccgcggcugguacugcgacaacgccggcuccgucuccuucuucccccaggccgagaccugcaaggucugcuccaaccgcgucuucugcgacaccaugaacucccucacccuccccuccgaggucaaccucugcaacgucgacaucuucaaccccaaguacgacugcaagaucaugaccuccaagaccgacgucuccuccuccgucaucaccucccucggcgccaucgucuccugcuacggcaagaccaagugcaccgccuccaacaagaacaagggcaucaucaagaccuucuccaacggcugcgacuacgucuccaacaagggcgucgacaccgucuccgucggcaacacccucuacuacgucaacaagcaggagggccagucccucuacgucaagggcgagcccaucaucaacuucuacgacccccucgucuuccccuccgacgaguucgacgccuccaucucccaggucaacgagaagaucaaccagucccucgccuucauccgcaaguccgacgagcuccuccacaacgucaacgccggcaaguccaccaccaacaucaugaucaccaccaucaucaucgucaucaucgucauccuccucucccucaucgccgucggccuccuccucuacugcaaggcccgcugaggacuaguacuggcugcaucucccuuuccucuguccuccauccuucucccaggauggugaagggggaccugguacccagugauccccaccccaggauccuaaaucaugacuuaccugcuaauaaaaacucauuggaaaagugagaagaucuaaaaaaaaaaaaaaaaaaaaaaaaaaaaaaaaaaaaaaaaaaaaaaaaaaaaaaaaaaaaaaaaugcaucccccccccccccccccccccccccccccccaaaggcucuuuucagagccaccagaauu

SEQ ID NO: 6685 - RNA, 1893 nt, Artificial Sequence
  mRNA product Design f-5 comprising derived and/or modified sequence from HRSV(A2)__F-del_DSCav1_mut6 (opt3)
gggagacuuucccauucuguagcagaauuugguguugccuguggucuuggucccgcggagaagcuuaccauggagcugcucauccuuaaggccaacgcuauuaccacaauacugacugcagugacguucugcuuugccagcggccagaauaucaccgaagaguucuaccaauccacauguucugcggucucaaaaggguauuugggagcuuuaagaacugguugguacaccaguguuauuacaaucgaacugagcaacauuaaggagaauaaaugcaacggcaccgacgccaaggugaaacuaaucaagcaggaacucgauaaguauaaaaaugcaguaacugaccugcagaugcuuauguguuccacacccgccaccgggucuggaucggcuauagcaucaggcguggccgucugcaaggugcugcacuuggagggugagguuaacaaaaucaagagcgcucuccugaguacgaauaaagccguggucucccugucuaacggggugagcguacucacuuuuaagguuuuagaucugaagaauuacauugacaaacagcuuuugccuauccugaacaagcaauccuguucaauuccaaauccggaaaccgugauggaguuccagcagaaaaacaauaggcuacucgaaaucacacgggaguuuagugucaacgcgggagugacuacccccgugagcacauauaugcugaccaauucugagcuucuguccuugauaaacgauaugccuauuacgaacgaccagaagaaacucaugucaaauaacguccaaaucguucgccagcagagcuacaguauuaugugcaucaucaaggaagaggugcuggcauauguagugcaguuaccacuguacggcgucauugauacucccuguuggaaacuccauacaucuccucuuugcaccacuaauacaaaggaaggcuccaacauaugucugacccgaacggaccgugggugguacugcgauaaugccggaagcgugucguucuuuccacaagcugagaccuguaagguuugcucuaacagaguguucugcgacacaaugaacuccuugacucuacccucagaagucaaucuguguaauguggauaucuuuaacccuaaauaugacugcaagauuaugaccaguaaaacagauguaagcuccucuguuaucacuagccucggugccauagugucauguuacggcaagaccaaaugcacagcaaguaauaagaacaaggggauuaucaaaaccuucuccaauggaugugacuaugucagcaacaagggcguggacacugucucuguggguaauacgcuguacuauguuaacaaacaggaggggcagucacuuuacgugaagggagagccaaucauuaacuuuuaugauccgcugguauuccccagugacgaauuugaugcuagcaucucccaagucaaugagaaaauuaaccagucuuuggccuucauaaggaagucggacgaacuccugcacaaugugaacgcgggcaagagcacaaccaauaucaugauuacuaccaucaucauuguuauaaucgugauuuuacugucccuaaucgccgucggccuccugcuuuacugcaaagcacggugaggacuaguacuggcugcaucucccuuuccucuguccuccauccuucucccaggauggugaagggggaccugguacccagugauccccaccccaggauccuaaaucaugacuuaccugcuaauaaaaacucauuggaaaagugagaagaucuaaaaaaaaaaaaaaaaaaaaaaaaaaaaaaaaaaaaaaaaaaaaaaaaaaaaaaaaaaaaaaaaugcaucccccccccccccccccccccccccccccccaaaggcucuuuucagagccaccagaauu

SEQ ID NO: 6686 - RNA, 1893 nt, Artificial Sequence
  mRNA product Design f-5 comprising derived and/or modified sequence from HRSV(A2)__F-del_DSCav1_mut6 (opt4)
gggagacuuucccauucuguagcagaauuugguguugccuguggucuuggucccgcggagaagcuuaccauggagcugcugauccugaaggccaacgccaucaccaccauccugaccgccgugaccuucugcuucgccagcggccagaacaucaccgaggaguucuaccagagcaccugcagcgccgugagcaagggcuaccugggcgcccugagaaccggcugguacaccagcgugaucaccaucgagcugagcaacaucaaggagaacaagugcaacggcaccgacgccaaggugaagcugaucaagcaggagcuggacaaguacaagaacgccgugaccgaccugcagaugcugaugugcagcacccccgccaccggcagcggcagcgccaucgccagcggcguggccgugugcaaggugcugcaccuggagggcgaggugaacaagaucaagagcgcccugcugagcaccaacaaggccguggugagccugagcaacggcgugagcgugcugaccuucaaggugcuggaccugaagaacuacaucgacaagcagcugcugcccauccugaacaagcagagcugcagcauccccaaccccgagaccgugauggaguuccagcagaagaacaacagacugcuggagaucaccagagaguucagcgugaacgccggcgugaccacccccgugagcaccuacaugcugaccaacagcgagcugcugagccugaucaacgacaugcccaucaccaacgaccagaagaagcugaugagcaacaacgugcagaucgugagacagcagagcuacagcaucaugugcaucaucaaggaggaggugcuggccuacguggugcagcugccccuguacggcgugaucgacacccccugcuggaagcugcacaccagcccccugugcaccaccaacaccaaggagggcagcaacaucugccugaccagaaccgacagaggcugguacugcgacaacgccggcagcgugagcuucuucccccaggccgagaccugcaaggugugcagcaacagaguguucugcgacaccaugaacagccugacccugcccagcgaggugaaccugugcaacguggacaucuucaaccccaaguacgacugcaagaucaugaccagcaagaccgacgugagcagcagcgugaucaccagccugggcgccaucgugagcugcuacggcaagaccaagugcaccgccagcaacaagaacaagggcaucaucaagaccuucagcaacggcugcgacuacgugagcaacaagggcguggacaccgugagcgugggcaacacccuguacuacgugaacaagcaggagggccagagccuguacgugaagggcgagcccaucaucaacuucuacgacccccugguguuccccagcgacgaguucgacgccagcaucagccaggugaacgagaagaucaaccagagccuggccuucaucagaaagagcgacgagcugcugcacaacgugaacgccggcaagagcaccaccaacaucaugaucaccaccaucaucaucgugaucaucgugauccugcugagccugaucgccgugggccugcugcuguacugcaaggccagaugaggacuaguacuggcugcaucucccuuuccucuguccuccauccuucucccaggauggugaagggggaccugguacccagugauccccaccccaggauccuaaaucaugacuuaccugcuaauaaaaacucauuggaaaagugagaagaucuaaaaaaaaaaaaaaaaaaaaaaaaaaaaaaaaaaaaaaaaaaaaaaaaaaaaaaaaaaaaaaaaugcaucccccccccccccccccccccccccccccccaaaggcucuuuucagagccaccagaauu

SEQ ID NO: 6687 - RNA, 1893 nt, Artificial Sequence
  mRNA product Design f-5 comprising derived and/or modified sequence from HRSV(A2)__F-del_DSCav1_mut6 (opt5)
gggagacuuucccauucuguagcagaauuugguguugccuguggucuuggucccgcggagaagcuuaccauggagcugcucauccugaaggccaacgcuauuaccacaauccuuacggccgugaccuucugcuuugcgagcggccagaauauuacagaagaguucuaccaauccaccuguucugcugucagcaaaggguaucugggagcccucagaacaggcugguacaccuccguuaucacaauugaacugucuaacaucaaggagaauaaaugcaacgggaccgacgccaaggugaaacuuaucaagcaggaacuggauaaguauaaaaaugcugugacggaccuccagaugcugauguguagcacccccgccacaggauccggcucugcuauugccagcggggucgcggugugcaagguucugcaccucgagggagaggugaacaaaaucaaguccgcccugcuuagcaccaauaaagcugucgugucucuguccaacggcguuagcgugcucacauuuaagguccuggaucuuaagaauuacauugacaaacagcugcucccuauccugaacaagcaaucuuguuccauuccgaaucccgaaaccgugauggaguuccagcagaaaaacaaucggcugcucgaaaucacgcgcgaguuuagcgugaacgccggcgucacaaccccuguuucuacauauaugcugaccaauuccgagcuucugagccucauuaacgauaugcccaucaccaacgaccagaagaaacugauguccaauaacgugcaaaucgugagacagcagucuuacagcauuaugugcaucauuaaggaagagguccuugcuuaugugguucagcugccucucuacggggugaucgauacacccuguuggaaacugcauacguccccucugugcaccacaaauaccaaggaaggaagcaacauuugucucacacggaccgaccgcggcugguacugcgauaaugccgggucugucuccuucuuuccgcaagcggagacguguaaggugugcagcaacagaguuuucugcgacacaaugaacucucugacccuucccagcgaagugaaucuguguaaugucgauaucuuuaacccuaaauaugacugcaagaucaugaccuccaaaacagaugugucuagcuccgucauuaccagccucggagccaucgugucuuguuacggcaagacaaaaugcacggcuuccaauaagaacaaggggauuaucaaaaccuucagcaauggaugugacuauguuucuaacaagggcguggacacagucuccgugggcaauacccuguacuauguuaacaaacaggaggggcagagccuuuacgugaagggagagcccauuaucaacuuuuaugauccucuggucuuccccuccgacgaauuugaugccucuaucagccaagugaaugagaaaauuaaccagucccucgcuuucauccggaagucugacgaacugcugcacaaugugaacgccggcaagagcacaaccaauauuaugaucacgaccauuaucauuguuaucaucgucauucuccugucccuuaucgccguggggcugcuccuguacugcaaagcucgcugaggacuaguacuggcugcaucucccuuuccucuguccuccauccuucucccaggauggugaagggggaccugguacccagugauccccaccccaggauccuaaaucaugacuuaccugcuaauaaaaacucauuggaaaagugagaagaucuaaaaaaaaaaaaaaaaaaaaaaaaaaaaaaaaaaaaaaaaaaaaaaaaaaaaaaaaaaaaaaaaugcaucccccccccccccccccccccccccccccccaaaggcucuuuucagagccaccagaauu

SEQ ID NO: 6688 - RNA, 1893 nt, Artificial Sequence
  mRNA product Design f-5 comprising derived and/or modified sequence from HRSV(A2)__F-del_DSCav1_mut6 (opt6)
gggagacuuucccauucuguagcagaauuugguguugccuguggucuuggucccgcggagaagcuuaccauggaacuacucauauuaaaagcaaacgcaauaacaacgauauuaacagcuguaacauucugcuuugcaucaggccaaaauaucaccgaagaauuuuaucaaagcacaugcucugcaguauccaaaggauacuuaggagcauuaagaacaggcugguacacauccguaauaacaauagaacuaucaaacaucaaagaaaacaaaugcaacggcacagacgccaaaguaaaacucauaaaacaagaacuagacaaauauaaaaacgcaguaacagaucuacaaaugcucaugugcuccacaccagcaaccggaucugguucagccauagcauccggcguagccgucugcaaaguauuacaccucgaaggagaaguaaacaaaauaaaaucugcccuauuaucuacaaauaaagccguaguaagucuaaguaacggaguaucaguacuaacauuuaaaguccuagaccugaaaaacuauaucgacaaacaacuauuaccaauacuaaacaaacaauccuguuccaucccuaacccagaaacaguuauggaauuucaacaaaaaaauaaccgccuuuuagaaauaacuagagaauuuucaguaaacgcaggaguuacaacaccaguaucaacauacaugcuaacaaauucagaauuauuaucccuuauaaaugacaugccuaucacaaacgaucaaaaaaaauuaauguccaacaacguacaaauaguaagacaacaaucauauuccaucaugugcaucauaaaagaagaaguccucgcauacguagugcaacuaccacuauacggagucauagauacacccuguuggaaacuucacacaucuccacuaugcacaacaaacacgaaagaaggauccaacauaugccuaacacgaacagacagaggaugguauugcgacaacgcuggaagugugagcuucuucccucaagcagaaacuugcaaaguaugcagcaaucguguauucugcgacacaaugaacucauuaacacucccaagcgaaguaaaccucugcaauguagacaucuuuaauccaaaauacgauuguaaaauaaugacuucaaaaacagacgucucaucaucuguaauaacaucuuuaggagcaauaguuucuugcuacgguaaaacaaaaugcaccgcauccaacaaaaacaaaggaauaauaaaaacauucucuaacggcugcgauuacguaucuaacaaaggaguugacacagucucaguaggaaacacacuauacuacguaaacaaacaagaaggacaaagccuauacguaaaaggagaaccaauaauaaacuucuaugacccauuaguauuuccaagcgaugaauuugacgcuucaauaucacaagucaaugaaaaaauaaaucagagcuuagcauucauaagaaaaucugaugaacuacuacacaauguaaaugcaggaaaauccacuaccaacauaaugauuaccacaauuauaauaguuaucauaguaauacuauuaucacuaauagccguuggauuacuacuauacugcaaagcaagauaaggacuaguacuggcugcaucucccuuuccucuguccuccauccuucucccaggauggugaagggggaccugguacccagugauccccaccccaggauccuaaaucaugacuuaccugcuaauaaaaacucauuggaaaagugagaagaucuaaaaaaaaaaaaaaaaaaaaaaaaaaaaaaaaaaaaaaaaaaaaaaaaaaaaaaaaaaaaaaaaugcaucccccccccccccccccccccccccccccccaaaggcucuuuucagagccaccagaauu

SEQ ID NO: 6689 - RNA, 1893 nt, Artificial Sequence
  mRNA product Design f-5 comprising derived and/or modified sequence from HRSV(A2)__F-del_DSCav1_mut6 (opt11)
gggagacuuucccauucuguagcagaauuugguguugccuguggucuuggucccgcggagaagcuuaccauggaacuacucauccuaaaagcaaacgccaucaccaccauacuaaccgccgucaccuucugcuucgccucgggacaaaacaucaccgaagaguucuaccagucaacgugcuccgccgucucaaaaggcuaccuaggcgcccuccgcaccgggugguauaccuccgucauaacuaucgaacucucuaacaucaaagaaaacaaauguaacggcaccgacgccaaagucaaacuaaucaaacaagaacuggacaaauacaaaaacgccgucaccgaccuacaaaugcucaugugcuccacuccagccaccggcuccgguagcgcaaucgccucaggcguagcuguaugcaaaguccuccaccuagaaggcgaaguaaacaaaauaaaauccgcccuccucucaaccaacaaggccgucgucucacucucaaacggcgucuccguacucaccuuuaaaguccuagaccuuaaaaacuacaucgacaaacaacugcuaccaauccucaacaaacaaucaugcagcaucccaaacccggaaacagucauggaguuccaacagaaaaacaaccgacuccucgaaaucacccgcgaguucuccgucaacgccggagucaccacaccuguaagcacauacaugcuuacuaauuccgaacuccuuucacuaauaaacgacaugccaauaaccaacgaccaaaagaaacucauguccaacaacguacaaaucguacgccaacaauccuacuccaucaugugcaucaucaaagaagaaguccuggccuaugucguacaacucccccuuuacggugucaucgacacacccugcuggaaacuacacaccagcccccucugcacaacaaacaccaaagaaggcuccaacaucugccucacccguaccgaccgaggcugguacugcgacaacgccggcuccgucuccuucuucccccaagccgaaaccugcaaagucugcagcaaccgcgucuucugcgauaccaugaacucccucacacucccaucugaagucaaccucugcaacgucgauauuuucaauccaaaauacgacugcaaaaucaugacuagcaaaaccgacguuagcuccuccgucaucaccucccucggcgccauaguuucaugcuacggcaaaaccaaaugcaccgccuccaacaaaaacaaaggcaucauaaaaaccuucuccaacgggugcgacuacguaucuaauaaaggagucgacaccgucucaguaggaaacacccucuacuaugucaacaaacaagaaggccaaucacuauacguuaaaggcgaaccaaucaucaacuucuacgacccacucgucuuccccagcgacgaguuugacgccucaaucucgcaagucaaugaaaagauuaaccaaucccuagccuucauccgaaaaagugacgaacuccuccacaacguuaacgccggcaaaucuacaaccaacaucaugaucaccacuauaaucaucgucaucauagucauacuucucagccucaucgcagucggacuccuccuuuauugcaaggcacgauaaggacuaguacuggcugcaucucccuuuccucuguccuccauccuucucccaggauggugaagggggaccugguacccagugauccccaccccaggauccuaaaucaugacuuaccugcuaauaaaaacucauuggaaaagugagaagaucuaaaaaaaaaaaaaaaaaaaaaaaaaaaaaaaaaaaaaaaaaaaaaaaaaaaaaaaaaaaaaaaaugcaucccccccccccccccccccccccccccccccaaaggcucuuuucagagccaccagaauu

SEQ ID NO: 6690 - RNA, 1889 nt, Artificial Sequence
  mRNA product Design g-1 comprising derived and/or modified sequence from HRSV(A2)__F-del_DSCav1_mut6 (opt1)
gggagacuuucccauucuguagcagaauuugguguugccuguggucuuggucccgcggagaagcuuaccauggagcugcucauccugaaggccaacgccaucaccaccauccugacggcggugaccuucugcuucgccagcggccagaacaucaccgaggaguucuaccaguccacgugcagcgccgucuccaagggguaccucggcgcccugcggaccggcugguacaccuccgugaucaccaucgagcugagcaacaucaaggagaacaagugcaacgggaccgacgccaaggugaagcucaucaagcaggagcuggacaaguacaagaacgcggucacggaccugcagaugcugaugugcuccaccccggcaaccggcuccggcuccgccaucgcgagcggcgucgccgugugcaaggugcugcaccucgagggggaggucaacaagaucaagagcgcccugcuguccaccaacaaggccguggugagccucuccaacggcgucagcgugcugaccuucaaggugcuggaccucaagaacuacaucgacaagcagcugcugcccauccugaacaagcagagcugcuccauccccaaccccgagacggugauggaguuccagcagaagaacaaccggcuccuggagaucacccgcgaguucagcgugaacgccggggucaccacccccguguccacguacaugcugaccaacagcgagcuccugucccugaucaacgacaugccgaucaccaacgaccagaagaagcucaugagcaacaacgugcagaucguccggcagcaguccuacagcaucaugugcaucaucaaggaggaggugcuggcguacgugguccagcugccccucuacggcgugaucgacacccccugcuggaagcugcacacgagcccccugugcaccaccaacaccaaggagggguccaacaucugccucacgcgcaccgaccggggcugguacugcgacaacgccggcagcgucuccuucuucccgcaggccgagaccugcaaggugugcagcaaccgcguguucugcgacaccaugaacucccugacgcugcccagcgagguaaaccucugcaacgucgacaucuucaaccccaaguacgacugcaagaucaugaccuccaagaccgacgugagcuccagcgugaucaccucccugggggccaucgucagcugcuacggcaagacgaagugcaccgccagcaacaagaacaaggggaucaucaagaccuucuccaacggcugcgacuacgugagcaacaagggcguggacaccguguccgucgggaacacccuguacuacgugaacaagcaggagggccagagccucuacgugaagggggagcccaucaucaacuucuacgacccgcuggucuuccccuccgacgaguucgacgcgagcaucucccaggugaacgagaagaucaaccagagccuggccuucauccgcaaguccgacgagcugcuccacaacgugaacgccggcaagagcacgaccaacaucaugaucaccaccaucaucaucgucaucaucgugauccugcugucccucaucgccguggggcugcugcucuacugcaaggcccggugaggacuaguggaagcauuuuccuggcugauuaaaagaaauuacucagcuauggucaucuguuccuguuagaaggcuaugcagcauauuauauacuaugcgcauguuaugaaaugcauaauaaaaaauuuuaaaaaaucuaaaagaucuaaaaaaaaaaaaaaaaaaaaaaaaaaaaaaaaaaaaaaaaaaaaaaaaaaaaaaaaaaaaaaaaugcaucccccccccccccccccccccccccccccccaaaggcucuuuucagagccaccagaauu

SEQ ID NO: 6691 - RNA, 1889 nt, Artificial Sequence
  mRNA product Design g-1 comprising derived and/or modified sequence from HRSV(A2)__F-del_DSCav1_mut6 (opt1)
gggagacuuucccauucuguagcagaauuugguguugccuguggucuuggucccgcggagaagcuuaccauggagcugcucauccugaaggccaacgccaucaccaccauccugacggcggugaccuucugcuucgccagcggccagaacaucaccgaggaguucuaccaguccacgugcagcgccgucuccaagggguaccucggcgcccugcgcaccgggugguacaccagcgugaucaccaucgagcuguccaacaucaaggagaacaagugcaacggcaccgacgccaaggugaagcucaucaagcaggagcuggacaaguacaagaacgcggucacggaccugcagaugcucaugugcagcacccccgccaccggguccggcagcgccaucgccuccggcguggcggugugcaagguccugcaccuggagggggaggugaacaagaucaagagcgcccuccuguccaccaacaaggccguggucagccuguccaacggcgugagcgugcucacguucaagguccuggaccugaagaacuacaucgacaagcagcuccugccgauccugaacaagcaguccugcagcauccccaaccccgagaccgugauggaguuccagcagaagaacaaccggcuccuggagaucacccgcgaguucuccgugaacgccggggucaccacgcccgugagcaccuacaugcugaccaacuccgagcuccugagccugaucaacgacaugccgaucaccaacgaccagaagaagcucaugagcaacaacgugcagaucguccggcagcaguccuacagcaucaugugcaucaucaaggaggaggugcuggccuacgugguccagcugccccucuacggcgugaucgacacgcccugcuggaagcugcacaccagcccccugugcaccaccaacacgaaggaggggagcaacaucugccucacccgcaccgaccggggcugguacugcgacaacgcgggcuccgugagcuucuucccgcaggccgagaccugcaaggucugcuccaaccgcguguucugcgacacgaugaacagccugacccugcccuccgaggucaaccucugcaacguggacaucuucaaccccaaguacgacugcaagaucaugaccagcaagaccgacguguccagcuccgucaucacgagccugggggccaucguguccugcuacggcaagaccaagugcaccgccagcaacaagaacaaggggaucaucaagaccuucuccaacggcugcgacuacgugagcaacaagggcgucgacacgguguccguggggaacacccuguacuacgucaacaagcaggagggccagagccucuacgugaagggggagcccaucaucaacuucuacgacccgcugguguuccccagcgacgaguucgacgccuccaucagccaggucaacgagaagaucaaccagucccuggcguucauccggaaguccgacgagcuccugcacaacgugaacgccggcaaguccaccaccaacaucaugaucaccacgaucaucaucgugaucaucgucauccugcucagccugaucgccguggggcugcuccuguacugcaaggcccgcugaggacuaguggaagcauuuuccuggcugauuaaaagaaauuacucagcuauggucaucuguuccuguuagaaggcuaugcagcauauuauauacuaugcgcauguuaugaaaugcauaauaaaaaauuuuaaaaaaucuaaaagaucuaaaaaaaaaaaaaaaaaaaaaaaaaaaaaaaaaaaaaaaaaaaaaaaaaaaaaaaaaaaaaaaaugcaucccccccccccccccccccccccccccccccaaaggcucuuuucagagccaccagaauu

SEQ ID NO: 6692 - RNA, 1889 nt, Artificial Sequence
  mRNA product Design g-1 comprising derived and/or modified sequence from HRSV(A2)__F-del_DSCav1_mut6 (opt2)
gggagacuuucccauucuguagcagaauuugguguugccuguggucuuggucccgcggagaagcuuaccauggagcuccucauccucaaggccaacgccaucaccaccauccucaccgccgucaccuucugcuucgccuccggccagaacaucaccgaggaguucuaccaguccaccugcuccgccgucuccaagggcuaccucggcgcccuccgcaccggcugguacaccuccgucaucaccaucgagcucuccaacaucaaggagaacaagugcaacggcaccgacgccaaggucaagcucaucaagcaggagcucgacaaguacaagaacgccgucaccgaccuccagaugcucaugugcuccacccccgccaccggcuccggcuccgccaucgccuccggcgucgccgucugcaagguccuccaccucgagggcgaggucaacaagaucaaguccgcccuccucuccaccaacaaggccgucgucucccucuccaacggcgucuccguccucaccuucaagguccucgaccucaagaacuacaucgacaagcagcuccuccccauccucaacaagcaguccugcuccauccccaaccccgagaccgucauggaguuccagcagaagaacaaccgccuccucgagaucacccgcgaguucuccgucaacgccggcgucaccacccccgucuccaccuacaugcucaccaacuccgagcuccucucccucaucaacgacaugcccaucaccaacgaccagaagaagcucauguccaacaacguccagaucguccgccagcaguccuacuccaucaugugcaucaucaaggaggagguccucgccuacgucguccagcucccccucuacggcgucaucgacacccccugcuggaagcuccacaccuccccccucugcaccaccaacaccaaggagggcuccaacaucugccucacccgcaccgaccgcggcugguacugcgacaacgccggcuccgucuccuucuucccccaggccgagaccugcaaggucugcuccaaccgcgucuucugcgacaccaugaacucccucacccuccccuccgaggucaaccucugcaacgucgacaucuucaaccccaaguacgacugcaagaucaugaccuccaagaccgacgucuccuccuccgucaucaccucccucggcgccaucgucuccugcuacggcaagaccaagugcaccgccuccaacaagaacaagggcaucaucaagaccuucuccaacggcugcgacuacgucuccaacaagggcgucgacaccgucuccgucggcaacacccucuacuacgucaacaagcaggagggccagucccucuacgucaagggcgagcccaucaucaacuucuacgacccccucgucuuccccuccgacgaguucgacgccuccaucucccaggucaacgagaagaucaaccagucccucgccuucauccgcaaguccgacgagcuccuccacaacgucaacgccggcaaguccaccaccaacaucaugaucaccaccaucaucaucgucaucaucgucauccuccucucccucaucgccgucggccuccuccucuacugcaaggcccgcugaggacuaguggaagcauuuuccuggcugauuaaaagaaauuacucagcuauggucaucuguuccuguuagaaggcuaugcagcauauuauauacuaugcgcauguuaugaaaugcauaauaaaaaauuuuaaaaaaucuaaaagaucuaaaaaaaaaaaaaaaaaaaaaaaaaaaaaaaaaaaaaaaaaaaaaaaaaaaaaaaaaaaaaaaaugcaucccccccccccccccccccccccccccccccaaaggcucuuuucagagccaccagaauu

SEQ ID NO: 6693 - RNA, 1889 nt, Artificial Sequence
  mRNA product Design g-1 comprising derived and/or modified sequence from HRSV(A2)__F-del_DSCav1_mut6 (opt3)
gggagacuuucccauucuguagcagaauuugguguugccuguggucuuggucccgcggagaagcuuaccauggagcugcucauccuuaaggccaacgcuauuaccacaauacugacugcagugacguucugcuuugccagcggccagaauaucaccgaagaguucuaccaauccacauguucugcggucucaaaaggguauuugggagcuuuaagaacugguugguacaccaguguuauuacaaucgaacugagcaacauuaaggagaauaaaugcaacggcaccgacgccaaggugaaacuaaucaagcaggaacucgauaaguauaaaaaugcaguaacugaccugcagaugcuuauguguuccacacccgccaccgggucuggaucggcuauagcaucaggcguggccgucugcaaggugcugcacuuggagggugagguuaacaaaaucaagagcgcucuccugaguacgaauaaagccguggucucccugucuaacggggugagcguacucacuuuuaagguuuuagaucugaagaauuacauugacaaacagcuuuugccuauccugaacaagcaauccuguucaauuccaaauccggaaaccgugauggaguuccagcagaaaaacaauaggcuacucgaaaucacacgggaguuuagugucaacgcgggagugacuacccccgugagcacauauaugcugaccaauucugagcuucuguccuugauaaacgauaugccuauuacgaacgaccagaagaaacucaugucaaauaacguccaaaucguucgccagcagagcuacaguauuaugugcaucaucaaggaagaggugcuggcauauguagugcaguuaccacuguacggcgucauugauacucccuguuggaaacuccauacaucuccucuuugcaccacuaauacaaaggaaggcuccaacauaugucugacccgaacggaccgugggugguacugcgauaaugccggaagcgugucguucuuuccacaagcugagaccuguaagguuugcucuaacagaguguucugcgacacaaugaacuccuugacucuacccucagaagucaaucuguguaauguggauaucuuuaacccuaaauaugacugcaagauuaugaccaguaaaacagauguaagcuccucuguuaucacuagccucggugccauagugucauguuacggcaagaccaaaugcacagcaaguaauaagaacaaggggauuaucaaaaccuucuccaauggaugugacuaugucagcaacaagggcguggacacugucucuguggguaauacgcuguacuauguuaacaaacaggaggggcagucacuuuacgugaagggagagccaaucauuaacuuuuaugauccgcugguauuccccagugacgaauuugaugcuagcaucucccaagucaaugagaaaauuaaccagucuuuggccuucauaaggaagucggacgaacuccugcacaaugugaacgcgggcaagagcacaaccaauaucaugauuacuaccaucaucauuguuauaaucgugauuuuacugucccuaaucgccgucggccuccugcuuuacugcaaagcacggugaggacuaguggaagcauuuuccuggcugauuaaaagaaauuacucagcuauggucaucuguuccuguuagaaggcuaugcagcauauuauauacuaugcgcauguuaugaaaugcauaauaaaaaauuuuaaaaaaucuaaaagaucuaaaaaaaaaaaaaaaaaaaaaaaaaaaaaaaaaaaaaaaaaaaaaaaaaaaaaaaaaaaaaaaaugcaucccccccccccccccccccccccccccccccaaaggcucuuuucagagccaccagaauu

SEQ ID NO: 6694 - RNA, 1889 nt, Artificial Sequence
  mRNA product Design g-1 comprising derived and/or modified sequence from HRSV(A2)__F-del_DSCav1_mut6 (opt4)
gggagacuuucccauucuguagcagaauuugguguugccuguggucuuggucccgcggagaagcuuaccauggagcugcugauccugaaggccaacgccaucaccaccauccugaccgccgugaccuucugcuucgccagcggccagaacaucaccgaggaguucuaccagagcaccugcagcgccgugagcaagggcuaccugggcgcccugagaaccggcugguacaccagcgugaucaccaucgagcugagcaacaucaaggagaacaagugcaacggcaccgacgccaaggugaagcugaucaagcaggagcuggacaaguacaagaacgccgugaccgaccugcagaugcugaugugcagcacccccgccaccggcagcggcagcgccaucgccagcggcguggccgugugcaaggugcugcaccuggagggcgaggugaacaagaucaagagcgcccugcugagcaccaacaaggccguggugagccugagcaacggcgugagcgugcugaccuucaaggugcuggaccugaagaacuacaucgacaagcagcugcugcccauccugaacaagcagagcugcagcauccccaaccccgagaccgugauggaguuccagcagaagaacaacagacugcuggagaucaccagagaguucagcgugaacgccggcgugaccacccccgugagcaccuacaugcugaccaacagcgagcugcugagccugaucaacgacaugcccaucaccaacgaccagaagaagcugaugagcaacaacgugcagaucgugagacagcagagcuacagcaucaugugcaucaucaaggaggaggugcuggccuacguggugcagcugccccuguacggcgugaucgacacccccugcuggaagcugcacaccagcccccugugcaccaccaacaccaaggagggcagcaacaucugccugaccagaaccgacagaggcugguacugcgacaacgccggcagcgugagcuucuucccccaggccgagaccugcaaggugugcagcaacagaguguucugcgacaccaugaacagccugacccugcccagcgaggugaaccugugcaacguggacaucuucaaccccaaguacgacugcaagaucaugaccagcaagaccgacgugagcagcagcgugaucaccagccugggcgccaucgugagcugcuacggcaagaccaagugcaccgccagcaacaagaacaagggcaucaucaagaccuucagcaacggcugcgacuacgugagcaacaagggcguggacaccgugagcgugggcaacacccuguacuacgugaacaagcaggagggccagagccuguacgugaagggcgagcccaucaucaacuucuacgacccccugguguuccccagcgacgaguucgacgccagcaucagccaggugaacgagaagaucaaccagagccuggccuucaucagaaagagcgacgagcugcugcacaacgugaacgccggcaagagcaccaccaacaucaugaucaccaccaucaucaucgugaucaucgugauccugcugagccugaucgccgugggccugcugcuguacugcaaggccagaugaggacuaguggaagcauuuuccuggcugauuaaaagaaauuacucagcuauggucaucuguuccuguuagaaggcuaugcagcauauuauauacuaugcgcauguuaugaaaugcauaauaaaaaauuuuaaaaaaucuaaaagaucuaaaaaaaaaaaaaaaaaaaaaaaaaaaaaaaaaaaaaaaaaaaaaaaaaaaaaaaaaaaaaaaaugcaucccccccccccccccccccccccccccccccaaaggcucuuuucagagccaccagaauu

SEQ ID NO: 6695 - RNA, 1889 nt, Artificial Sequence
  mRNA product Design g-1 comprising derived and/or modified sequence from HRSV(A2)__F-del_DSCav1_mut6 (opt5)
gggagacuuucccauucuguagcagaauuugguguugccuguggucuuggucccgcggagaagcuuaccauggagcugcucauccugaaggccaacgcuauuaccacaauccuuacggccgugaccuucugcuuugcgagcggccagaauauuacagaagaguucuaccaauccaccuguucugcugucagcaaaggguaucugggagcccucagaacaggcugguacaccuccguuaucacaauugaacugucuaacaucaaggagaauaaaugcaacgggaccgacgccaaggugaaacuuaucaagcaggaacuggauaaguauaaaaaugcugugacggaccuccagaugcugauguguagcacccccgccacaggauccggcucugcuauugccagcggggucgcggugugcaagguucugcaccucgagggagaggugaacaaaaucaaguccgcccugcuuagcaccaauaaagcugucgugucucuguccaacggcguuagcgugcucacauuuaagguccuggaucuuaagaauuacauugacaaacagcugcucccuauccugaacaagcaaucuuguuccauuccgaaucccgaaaccgugauggaguuccagcagaaaaacaaucggcugcucgaaaucacgcgcgaguuuagcgugaacgccggcgucacaaccccuguuucuacauauaugcugaccaauuccgagcuucugagccucauuaacgauaugcccaucaccaacgaccagaagaaacugauguccaauaacgugcaaaucgugagacagcagucuuacagcauuaugugcaucauuaaggaagagguccuugcuuaugugguucagcugccucucuacggggugaucgauacacccuguuggaaacugcauacguccccucugugcaccacaaauaccaaggaaggaagcaacauuugucucacacggaccgaccgcggcugguacugcgauaaugccgggucugucuccuucuuuccgcaagcggagacguguaaggugugcagcaacagaguuuucugcgacacaaugaacucucugacccuucccagcgaagugaaucuguguaaugucgauaucuuuaacccuaaauaugacugcaagaucaugaccuccaaaacagaugugucuagcuccgucauuaccagccucggagccaucgugucuuguuacggcaagacaaaaugcacggcuuccaauaagaacaaggggauuaucaaaaccuucagcaauggaugugacuauguuucuaacaagggcguggacacagucuccgugggcaauacccuguacuauguuaacaaacaggaggggcagagccuuuacgugaagggagagcccauuaucaacuuuuaugauccucuggucuuccccuccgacgaauuugaugccucuaucagccaagugaaugagaaaauuaaccagucccucgcuuucauccggaagucugacgaacugcugcacaaugugaacgccggcaagagcacaaccaauauuaugaucacgaccauuaucauuguuaucaucgucauucuccugucccuuaucgccguggggcugcuccuguacugcaaagcucgcugaggacuaguggaagcauuuuccuggcugauuaaaagaaauuacucagcuauggucaucuguuccuguuagaaggcuaugcagcauauuauauacuaugcgcauguuaugaaaugcauaauaaaaaauuuuaaaaaaucuaaaagaucuaaaaaaaaaaaaaaaaaaaaaaaaaaaaaaaaaaaaaaaaaaaaaaaaaaaaaaaaaaaaaaaaugcaucccccccccccccccccccccccccccccccaaaggcucuuuucagagccaccagaauu

SEQ ID NO: 6696 - RNA, 1889 nt, Artificial Sequence
  mRNA product Design g-1 comprising derived and/or modified sequence from HRSV(A2)__F-del_DSCav1_mut6 (opt6)
gggagacuuucccauucuguagcagaauuugguguugccuguggucuuggucccgcggagaagcuuaccauggaacuacucauauuaaaagcaaacgcaauaacaacgauauuaacagcuguaacauucugcuuugcaucaggccaaaauaucaccgaagaauuuuaucaaagcacaugcucugcaguauccaaaggauacuuaggagcauuaagaacaggcugguacacauccguaauaacaauagaacuaucaaacaucaaagaaaacaaaugcaacggcacagacgccaaaguaaaacucauaaaacaagaacuagacaaauauaaaaacgcaguaacagaucuacaaaugcucaugugcuccacaccagcaaccggaucugguucagccauagcauccggcguagccgucugcaaaguauuacaccucgaaggagaaguaaacaaaauaaaaucugcccuauuaucuacaaauaaagccguaguaagucuaaguaacggaguaucaguacuaacauuuaaaguccuagaccugaaaaacuauaucgacaaacaacuauuaccaauacuaaacaaacaauccuguuccaucccuaacccagaaacaguuauggaauuucaacaaaaaaauaaccgccuuuuagaaauaacuagagaauuuucaguaaacgcaggaguuacaacaccaguaucaacauacaugcuaacaaauucagaauuauuaucccuuauaaaugacaugccuaucacaaacgaucaaaaaaaauuaauguccaacaacguacaaauaguaagacaacaaucauauuccaucaugugcaucauaaaagaagaaguccucgcauacguagugcaacuaccacuauacggagucauagauacacccuguuggaaacuucacacaucuccacuaugcacaacaaacacgaaagaaggauccaacauaugccuaacacgaacagacagaggaugguauugcgacaacgcuggaagugugagcuucuucccucaagcagaaacuugcaaaguaugcagcaaucguguauucugcgacacaaugaacucauuaacacucccaagcgaaguaaaccucugcaauguagacaucuuuaauccaaaauacgauuguaaaauaaugacuucaaaaacagacgucucaucaucuguaauaacaucuuuaggagcaauaguuucuugcuacgguaaaacaaaaugcaccgcauccaacaaaaacaaaggaauaauaaaaacauucucuaacggcugcgauuacguaucuaacaaaggaguugacacagucucaguaggaaacacacuauacuacguaaacaaacaagaaggacaaagccuauacguaaaaggagaaccaauaauaaacuucuaugacccauuaguauuuccaagcgaugaauuugacgcuucaauaucacaagucaaugaaaaaauaaaucagagcuuagcauucauaagaaaaucugaugaacuacuacacaauguaaaugcaggaaaauccacuaccaacauaaugauuaccacaauuauaauaguuaucauaguaauacuauuaucacuaauagccguuggauuacuacuauacugcaaagcaagauaaggacuaguggaagcauuuuccuggcugauuaaaagaaauuacucagcuauggucaucuguuccuguuagaaggcuaugcagcauauuauauacuaugcgcauguuaugaaaugcauaauaaaaaauuuuaaaaaaucuaaaagaucuaaaaaaaaaaaaaaaaaaaaaaaaaaaaaaaaaaaaaaaaaaaaaaaaaaaaaaaaaaaaaaaaugcaucccccccccccccccccccccccccccccccaaaggcucuuuucagagccaccagaauu

SEQ ID NO: 6697 - RNA, 1889 nt, Artificial Sequence
  mRNA product Design g-1 comprising derived and/or modified sequence from HRSV(A2)__F-del_DSCav1_mut6 (opt11)
gggagacuuucccauucuguagcagaauuugguguugccuguggucuuggucccgcggagaagcuuaccauggaacuacucauccuaaaagcaaacgccaucaccaccauacuaaccgccgucaccuucugcuucgccucgggacaaaacaucaccgaagaguucuaccagucaacgugcuccgccgucucaaaaggcuaccuaggcgcccuccgcaccgggugguauaccuccgucauaacuaucgaacucucuaacaucaaagaaaacaaauguaacggcaccgacgccaaagucaaacuaaucaaacaagaacuggacaaauacaaaaacgccgucaccgaccuacaaaugcucaugugcuccacuccagccaccggcuccgguagcgcaaucgccucaggcguagcuguaugcaaaguccuccaccuagaaggcgaaguaaacaaaauaaaauccgcccuccucucaaccaacaaggccgucgucucacucucaaacggcgucuccguacucaccuuuaaaguccuagaccuuaaaaacuacaucgacaaacaacugcuaccaauccucaacaaacaaucaugcagcaucccaaacccggaaacagucauggaguuccaacagaaaaacaaccgacuccucgaaaucacccgcgaguucuccgucaacgccggagucaccacaccuguaagcacauacaugcuuacuaauuccgaacuccuuucacuaauaaacgacaugccaauaaccaacgaccaaaagaaacucauguccaacaacguacaaaucguacgccaacaauccuacuccaucaugugcaucaucaaagaagaaguccuggccuaugucguacaacucccccuuuacggugucaucgacacacccugcuggaaacuacacaccagcccccucugcacaacaaacaccaaagaaggcuccaacaucugccucacccguaccgaccgaggcugguacugcgacaacgccggcuccgucuccuucuucccccaagccgaaaccugcaaagucugcagcaaccgcgucuucugcgauaccaugaacucccucacacucccaucugaagucaaccucugcaacgucgauauuuucaauccaaaauacgacugcaaaaucaugacuagcaaaaccgacguuagcuccuccgucaucaccucccucggcgccauaguuucaugcuacggcaaaaccaaaugcaccgccuccaacaaaaacaaaggcaucauaaaaaccuucuccaacgggugcgacuacguaucuaauaaaggagucgacaccgucucaguaggaaacacccucuacuaugucaacaaacaagaaggccaaucacuauacguuaaaggcgaaccaaucaucaacuucuacgacccacucgucuuccccagcgacgaguuugacgccucaaucucgcaagucaaugaaaagauuaaccaaucccuagccuucauccgaaaaagugacgaacuccuccacaacguuaacgccggcaaaucuacaaccaacaucaugaucaccacuauaaucaucgucaucauagucauacuucucagccucaucgcagucggacuccuccuuuauugcaaggcacgauaaggacuaguggaagcauuuuccuggcugauuaaaagaaauuacucagcuauggucaucuguuccuguuagaaggcuaugcagcauauuauauacuaugcgcauguuaugaaaugcauaauaaaaaauuuuaaaaaaucuaaaagaucuaaaaaaaaaaaaaaaaaaaaaaaaaaaaaaaaaaaaaaaaaaaaaaaaaaaaaaaaaaaaaaaaugcaucccccccccccccccccccccccccccccccaaaggcucuuuucagagccaccagaauu

SEQ ID NO: 6698 - RNA, 1904 nt, Artificial Sequence
  mRNA product Design g-2 comprising derived and/or modified sequence from HRSV(A2)__F-del_DSCav1_mut6 (opt1)
gggagaguccgcucagccagguugcagaagcggcuuagcguguguccuaaucuucucucugcguguagguaggccugugccgcaaacaagcuuaccauggagcugcucauccugaaggccaacgccaucaccaccauccugacggcggugaccuucugcuucgccagcggccagaacaucaccgaggaguucuaccaguccacgugcagcgccgucuccaagggguaccucggcgcccugcggaccggcugguacaccuccgugaucaccaucgagcugagcaacaucaaggagaacaagugcaacgggaccgacgccaaggugaagcucaucaagcaggagcuggacaaguacaagaacgcggucacggaccugcagaugcugaugugcuccaccccggcaaccggcuccggcuccgccaucgcgagcggcgucgccgugugcaaggugcugcaccucgagggggaggucaacaagaucaagagcgcccugcuguccaccaacaaggccguggugagccucuccaacggcgucagcgugcugaccuucaaggugcuggaccucaagaacuacaucgacaagcagcugcugcccauccugaacaagcagagcugcuccauccccaaccccgagacggugauggaguuccagcagaagaacaaccggcuccuggagaucacccgcgaguucagcgugaacgccggggucaccacccccguguccacguacaugcugaccaacagcgagcuccugucccugaucaacgacaugccgaucaccaacgaccagaagaagcucaugagcaacaacgugcagaucguccggcagcaguccuacagcaucaugugcaucaucaaggaggaggugcuggcguacgugguccagcugccccucuacggcgugaucgacacccccugcuggaagcugcacacgagcccccugugcaccaccaacaccaaggagggguccaacaucugccucacgcgcaccgaccggggcugguacugcgacaacgccggcagcgucuccuucuucccgcaggccgagaccugcaaggugugcagcaaccgcguguucugcgacaccaugaacucccugacgcugcccagcgagguaaaccucugcaacgucgacaucuucaaccccaaguacgacugcaagaucaugaccuccaagaccgacgugagcuccagcgugaucaccucccugggggccaucgucagcugcuacggcaagacgaagugcaccgccagcaacaagaacaaggggaucaucaagaccuucuccaacggcugcgacuacgugagcaacaagggcguggacaccguguccgucgggaacacccuguacuacgugaacaagcaggagggccagagccucuacgugaagggggagcccaucaucaacuucuacgacccgcuggucuuccccuccgacgaguucgacgcgagcaucucccaggugaacgagaagaucaaccagagccuggccuucauccgcaaguccgacgagcugcuccacaacgugaacgccggcaagagcacgaccaacaucaugaucaccaccaucaucaucgucaucaucgugauccugcugucccucaucgccguggggcugcugcucuacugcaaggcccggugaggacuaguaauaaggaaacuguaugaaugucugugggcaggaagugaagagauccuucuguaaagguuuuuggaauuaugucugcugaauaauaaacuuuuuugaaauaauaaaucugguagaaaaaugagaucuaaaaaaaaaaaaaaaaaaaaaaaaaaaaaaaaaaaaaaaaaaaaaaaaaaaaaaaaaaaaaaaaugcaucccccccccccccccccccccccccccccccaaaggcucuuuucagagccaccagaauu

SEQ ID NO: 6699 - RNA, 1904 nt, Artificial Sequence
  mRNA product Design g-2 comprising derived and/or modified sequence from HRSV(A2)__F-del_DSCav1_mut6 (opt1)
gggagaguccgcucagccagguugcagaagcggcuuagcguguguccuaaucuucucucugcguguagguaggccugugccgcaaacaagcuuaccauggagcugcucauccugaaggccaacgccaucaccaccauccugacggcggugaccuucugcuucgccagcggccagaacaucaccgaggaguucuaccaguccacgugcagcgccgucuccaagggguaccucggcgcccugcgcaccgggugguacaccagcgugaucaccaucgagcuguccaacaucaaggagaacaagugcaacggcaccgacgccaaggugaagcucaucaagcaggagcuggacaaguacaagaacgcggucacggaccugcagaugcucaugugcagcacccccgccaccggguccggcagcgccaucgccuccggcguggcggugugcaagguccugcaccuggagggggaggugaacaagaucaagagcgcccuccuguccaccaacaaggccguggucagccuguccaacggcgugagcgugcucacguucaagguccuggaccugaagaacuacaucgacaagcagcuccugccgauccugaacaagcaguccugcagcauccccaaccccgagaccgugauggaguuccagcagaagaacaaccggcuccuggagaucacccgcgaguucuccgugaacgccggggucaccacgcccgugagcaccuacaugcugaccaacuccgagcuccugagccugaucaacgacaugccgaucaccaacgaccagaagaagcucaugagcaacaacgugcagaucguccggcagcaguccuacagcaucaugugcaucaucaaggaggaggugcuggccuacgugguccagcugccccucuacggcgugaucgacacgcccugcuggaagcugcacaccagcccccugugcaccaccaacacgaaggaggggagcaacaucugccucacccgcaccgaccggggcugguacugcgacaacgcgggcuccgugagcuucuucccgcaggccgagaccugcaaggucugcuccaaccgcguguucugcgacacgaugaacagccugacccugcccuccgaggucaaccucugcaacguggacaucuucaaccccaaguacgacugcaagaucaugaccagcaagaccgacguguccagcuccgucaucacgagccugggggccaucguguccugcuacggcaagaccaagugcaccgccagcaacaagaacaaggggaucaucaagaccuucuccaacggcugcgacuacgugagcaacaagggcgucgacacgguguccguggggaacacccuguacuacgucaacaagcaggagggccagagccucuacgugaagggggagcccaucaucaacuucuacgacccgcugguguuccccagcgacgaguucgacgccuccaucagccaggucaacgagaagaucaaccagucccuggcguucauccggaaguccgacgagcuccugcacaacgugaacgccggcaaguccaccaccaacaucaugaucaccacgaucaucaucgugaucaucgucauccugcucagccugaucgccguggggcugcuccuguacugcaaggcccgcugaggacuaguaauaaggaaacuguaugaaugucugugggcaggaagugaagagauccuucuguaaagguuuuuggaauuaugucugcugaauaauaaacuuuuuugaaauaauaaaucugguagaaaaaugagaucuaaaaaaaaaaaaaaaaaaaaaaaaaaaaaaaaaaaaaaaaaaaaaaaaaaaaaaaaaaaaaaaaugcaucccccccccccccccccccccccccccccccaaaggcucuuuucagagccaccagaauu

SEQ ID NO: 6700 - RNA, 1904 nt, Artificial Sequence
  mRNA product Design g-2 comprising derived and/or modified sequence from HRSV(A2)__F-del_DSCav1_mut6 (opt2)
gggagaguccgcucagccagguugcagaagcggcuuagcguguguccuaaucuucucucugcguguagguaggccugugccgcaaacaagcuuaccauggagcuccucauccucaaggccaacgccaucaccaccauccucaccgccgucaccuucugcuucgccuccggccagaacaucaccgaggaguucuaccaguccaccugcuccgccgucuccaagggcuaccucggcgcccuccgcaccggcugguacaccuccgucaucaccaucgagcucuccaacaucaaggagaacaagugcaacggcaccgacgccaaggucaagcucaucaagcaggagcucgacaaguacaagaacgccgucaccgaccuccagaugcucaugugcuccacccccgccaccggcuccggcuccgccaucgccuccggcgucgccgucugcaagguccuccaccucgagggcgaggucaacaagaucaaguccgcccuccucuccaccaacaaggccgucgucucccucuccaacggcgucuccguccucaccuucaagguccucgaccucaagaacuacaucgacaagcagcuccuccccauccucaacaagcaguccugcuccauccccaaccccgagaccgucauggaguuccagcagaagaacaaccgccuccucgagaucacccgcgaguucuccgucaacgccggcgucaccacccccgucuccaccuacaugcucaccaacuccgagcuccucucccucaucaacgacaugcccaucaccaacgaccagaagaagcucauguccaacaacguccagaucguccgccagcaguccuacuccaucaugugcaucaucaaggaggagguccucgccuacgucguccagcucccccucuacggcgucaucgacacccccugcuggaagcuccacaccuccccccucugcaccaccaacaccaaggagggcuccaacaucugccucacccgcaccgaccgcggcugguacugcgacaacgccggcuccgucuccuucuucccccaggccgagaccugcaaggucugcuccaaccgcgucuucugcgacaccaugaacucccucacccuccccuccgaggucaaccucugcaacgucgacaucuucaaccccaaguacgacugcaagaucaugaccuccaagaccgacgucuccuccuccgucaucaccucccucggcgccaucgucuccugcuacggcaagaccaagugcaccgccuccaacaagaacaagggcaucaucaagaccuucuccaacggcugcgacuacgucuccaacaagggcgucgacaccgucuccgucggcaacacccucuacuacgucaacaagcaggagggccagucccucuacgucaagggcgagcccaucaucaacuucuacgacccccucgucuuccccuccgacgaguucgacgccuccaucucccaggucaacgagaagaucaaccagucccucgccuucauccgcaaguccgacgagcuccuccacaacgucaacgccggcaaguccaccaccaacaucaugaucaccaccaucaucaucgucaucaucgucauccuccucucccucaucgccgucggccuccuccucuacugcaaggcccgcugaggacuaguaauaaggaaacuguaugaaugucugugggcaggaagugaagagauccuucuguaaagguuuuuggaauuaugucugcugaauaauaaacuuuuuugaaauaauaaaucugguagaaaaaugagaucuaaaaaaaaaaaaaaaaaaaaaaaaaaaaaaaaaaaaaaaaaaaaaaaaaaaaaaaaaaaaaaaaugcaucccccccccccccccccccccccccccccccaaaggcucuuuucagagccaccagaauu

SEQ ID NO: 6701 - RNA, 1904 nt, Artificial Sequence
  mRNA product Design g-2 comprising derived and/or modified sequence from HRSV(A2)__F-del_DSCav1_mut6 (opt3)
gggagaguccgcucagccagguugcagaagcggcuuagcguguguccuaaucuucucucugcguguagguaggccugugccgcaaacaagcuuaccauggagcugcucauccuuaaggccaacgcuauuaccacaauacugacugcagugacguucugcuuugccagcggccagaauaucaccgaagaguucuaccaauccacauguucugcggucucaaaaggguauuugggagcuuuaagaacugguugguacaccaguguuauuacaaucgaacugagcaacauuaaggagaauaaaugcaacggcaccgacgccaaggugaaacuaaucaagcaggaacucgauaaguauaaaaaugcaguaacugaccugcagaugcuuauguguuccacacccgccaccgggucuggaucggcuauagcaucaggcguggccgucugcaaggugcugcacuuggagggugagguuaacaaaaucaagagcgcucuccugaguacgaauaaagccguggucucccugucuaacggggugagcguacucacuuuuaagguuuuagaucugaagaauuacauugacaaacagcuuuugccuauccugaacaagcaauccuguucaauuccaaauccggaaaccgugauggaguuccagcagaaaaacaauaggcuacucgaaaucacacgggaguuuagugucaacgcgggagugacuacccccgugagcacauauaugcugaccaauucugagcuucuguccuugauaaacgauaugccuauuacgaacgaccagaagaaacucaugucaaauaacguccaaaucguucgccagcagagcuacaguauuaugugcaucaucaaggaagaggugcuggcauauguagugcaguuaccacuguacggcgucauugauacucccuguuggaaacuccauacaucuccucuuugcaccacuaauacaaaggaaggcuccaacauaugucugacccgaacggaccgugggugguacugcgauaaugccggaagcgugucguucuuuccacaagcugagaccuguaagguuugcucuaacagaguguucugcgacacaaugaacuccuugacucuacccucagaagucaaucuguguaauguggauaucuuuaacccuaaauaugacugcaagauuaugaccaguaaaacagauguaagcuccucuguuaucacuagccucggugccauagugucauguuacggcaagaccaaaugcacagcaaguaauaagaacaaggggauuaucaaaaccuucuccaauggaugugacuaugucagcaacaagggcguggacacugucucuguggguaauacgcuguacuauguuaacaaacaggaggggcagucacuuuacgugaagggagagccaaucauuaacuuuuaugauccgcugguauuccccagugacgaauuugaugcuagcaucucccaagucaaugagaaaauuaaccagucuuuggccuucauaaggaagucggacgaacuccugcacaaugugaacgcgggcaagagcacaaccaauaucaugauuacuaccaucaucauuguuauaaucgugauuuuacugucccuaaucgccgucggccuccugcuuuacugcaaagcacggugaggacuaguaauaaggaaacuguaugaaugucugugggcaggaagugaagagauccuucuguaaagguuuuuggaauuaugucugcugaauaauaaacuuuuuugaaauaauaaaucugguagaaaaaugagaucuaaaaaaaaaaaaaaaaaaaaaaaaaaaaaaaaaaaaaaaaaaaaaaaaaaaaaaaaaaaaaaaaugcaucccccccccccccccccccccccccccccccaaaggcucuuuucagagccaccagaauu

SEQ ID NO: 6702 - RNA, 1904 nt, Artificial Sequence
  mRNA product Design g-2 comprising derived and/or modified sequence from HRSV(A2)__F-del_DSCav1_mut6 (opt4)
gggagaguccgcucagccagguugcagaagcggcuuagcguguguccuaaucuucucucugcguguagguaggccugugccgcaaacaagcuuaccauggagcugcugauccugaaggccaacgccaucaccaccauccugaccgccgugaccuucugcuucgccagcggccagaacaucaccgaggaguucuaccagagcaccugcagcgccgugagcaagggcuaccugggcgcccugagaaccggcugguacaccagcgugaucaccaucgagcugagcaacaucaaggagaacaagugcaacggcaccgacgccaaggugaagcugaucaagcaggagcuggacaaguacaagaacgccgugaccgaccugcagaugcugaugugcagcacccccgccaccggcagcggcagcgccaucgccagcggcguggccgugugcaaggugcugcaccuggagggcgaggugaacaagaucaagagcgcccugcugagcaccaacaaggccguggugagccugagcaacggcgugagcgugcugaccuucaaggugcuggaccugaagaacuacaucgacaagcagcugcugcccauccugaacaagcagagcugcagcauccccaaccccgagaccgugauggaguuccagcagaagaacaacagacugcuggagaucaccagagaguucagcgugaacgccggcgugaccacccccgugagcaccuacaugcugaccaacagcgagcugcugagccugaucaacgacaugcccaucaccaacgaccagaagaagcugaugagcaacaacgugcagaucgugagacagcagagcuacagcaucaugugcaucaucaaggaggaggugcuggccuacguggugcagcugccccuguacggcgugaucgacacccccugcuggaagcugcacaccagcccccugugcaccaccaacaccaaggagggcagcaacaucugccugaccagaaccgacagaggcugguacugcgacaacgccggcagcgugagcuucuucccccaggccgagaccugcaaggugugcagcaacagaguguucugcgacaccaugaacagccugacccugcccagcgaggugaaccugugcaacguggacaucuucaaccccaaguacgacugcaagaucaugaccagcaagaccgacgugagcagcagcgugaucaccagccugggcgccaucgugagcugcuacggcaagaccaagugcaccgccagcaacaagaacaagggcaucaucaagaccuucagcaacggcugcgacuacgugagcaacaagggcguggacaccgugagcgugggcaacacccuguacuacgugaacaagcaggagggccagagccuguacgugaagggcgagcccaucaucaacuucuacgacccccugguguuccccagcgacgaguucgacgccagcaucagccaggugaacgagaagaucaaccagagccuggccuucaucagaaagagcgacgagcugcugcacaacgugaacgccggcaagagcaccaccaacaucaugaucaccaccaucaucaucgugaucaucgugauccugcugagccugaucgccgugggccugcugcuguacugcaaggccagaugaggacuaguaauaaggaaacuguaugaaugucugugggcaggaagugaagagauccuucuguaaagguuuuuggaauuaugucugcugaauaauaaacuuuuuugaaauaauaaaucugguagaaaaaugagaucuaaaaaaaaaaaaaaaaaaaaaaaaaaaaaaaaaaaaaaaaaaaaaaaaaaaaaaaaaaaaaaaaugcaucccccccccccccccccccccccccccccccaaaggcucuuuucagagccaccagaauu

SEQ ID NO: 6703 - RNA, 1904 nt, Artificial Sequence
  mRNA product Design g-2 comprising derived and/or modified sequence from HRSV(A2)__F-del_DSCav1_mut6 (opt5)
gggagaguccgcucagccagguugcagaagcggcuuagcguguguccuaaucuucucucugcguguagguaggccugugccgcaaacaagcuuaccauggagcugcucauccugaaggccaacgcuauuaccacaauccuuacggccgugaccuucugcuuugcgagcggccagaauauuacagaagaguucuaccaauccaccuguucugcugucagcaaaggguaucugggagcccucagaacaggcugguacaccuccguuaucacaauugaacugucuaacaucaaggagaauaaaugcaacgggaccgacgccaaggugaaacuuaucaagcaggaacuggauaaguauaaaaaugcugugacggaccuccagaugcugauguguagcacccccgccacaggauccggcucugcuauugccagcggggucgcggugugcaagguucugcaccucgagggagaggugaacaaaaucaaguccgcccugcuuagcaccaauaaagcugucgugucucuguccaacggcguuagcgugcucacauuuaagguccuggaucuuaagaauuacauugacaaacagcugcucccuauccugaacaagcaaucuuguuccauuccgaaucccgaaaccgugauggaguuccagcagaaaaacaaucggcugcucgaaaucacgcgcgaguuuagcgugaacgccggcgucacaaccccuguuucuacauauaugcugaccaauuccgagcuucugagccucauuaacgauaugcccaucaccaacgaccagaagaaacugauguccaauaacgugcaaaucgugagacagcagucuuacagcauuaugugcaucauuaaggaagagguccuugcuuaugugguucagcugccucucuacggggugaucgauacacccuguuggaaacugcauacguccccucugugcaccacaaauaccaaggaaggaagcaacauuugucucacacggaccgaccgcggcugguacugcgauaaugccgggucugucuccuucuuuccgcaagcggagacguguaaggugugcagcaacagaguuuucugcgacacaaugaacucucugacccuucccagcgaagugaaucuguguaaugucgauaucuuuaacccuaaauaugacugcaagaucaugaccuccaaaacagaugugucuagcuccgucauuaccagccucggagccaucgugucuuguuacggcaagacaaaaugcacggcuuccaauaagaacaaggggauuaucaaaaccuucagcaauggaugugacuauguuucuaacaagggcguggacacagucuccgugggcaauacccuguacuauguuaacaaacaggaggggcagagccuuuacgugaagggagagcccauuaucaacuuuuaugauccucuggucuuccccuccgacgaauuugaugccucuaucagccaagugaaugagaaaauuaaccagucccucgcuuucauccggaagucugacgaacugcugcacaaugugaacgccggcaagagcacaaccaauauuaugaucacgaccauuaucauuguuaucaucgucauucuccugucccuuaucgccguggggcugcuccuguacugcaaagcucgcugaggacuaguaauaaggaaacuguaugaaugucugugggcaggaagugaagagauccuucuguaaagguuuuuggaauuaugucugcugaauaauaaacuuuuuugaaauaauaaaucugguagaaaaaugagaucuaaaaaaaaaaaaaaaaaaaaaaaaaaaaaaaaaaaaaaaaaaaaaaaaaaaaaaaaaaaaaaaaugcaucccccccccccccccccccccccccccccccaaaggcucuuuucagagccaccagaauu

SEQ ID NO: 6704 - RNA, 1904 nt, Artificial Sequence
  mRNA product Design g-2 comprising derived and/or modified sequence from HRSV(A2)__F-del_DSCav1_mut6 (opt6)
gggagaguccgcucagccagguugcagaagcggcuuagcguguguccuaaucuucucucugcguguagguaggccugugccgcaaacaagcuuaccauggaacuacucauauuaaaagcaaacgcaauaacaacgauauuaacagcuguaacauucugcuuugcaucaggccaaaauaucaccgaagaauuuuaucaaagcacaugcucugcaguauccaaaggauacuuaggagcauuaagaacaggcugguacacauccguaauaacaauagaacuaucaaacaucaaagaaaacaaaugcaacggcacagacgccaaaguaaaacucauaaaacaagaacuagacaaauauaaaaacgcaguaacagaucuacaaaugcucaugugcuccacaccagcaaccggaucugguucagccauagcauccggcguagccgucugcaaaguauuacaccucgaaggagaaguaaacaaaauaaaaucugcccuauuaucuacaaauaaagccguaguaagucuaaguaacggaguaucaguacuaacauuuaaaguccuagaccugaaaaacuauaucgacaaacaacuauuaccaauacuaaacaaacaauccuguuccaucccuaacccagaaacaguuauggaauuucaacaaaaaaauaaccgccuuuuagaaauaacuagagaauuuucaguaaacgcaggaguuacaacaccaguaucaacauacaugcuaacaaauucagaauuauuaucccuuauaaaugacaugccuaucacaaacgaucaaaaaaaauuaauguccaacaacguacaaauaguaagacaacaaucauauuccaucaugugcaucauaaaagaagaaguccucgcauacguagugcaacuaccacuauacggagucauagauacacccuguuggaaacuucacacaucuccacuaugcacaacaaacacgaaagaaggauccaacauaugccuaacacgaacagacagaggaugguauugcgacaacgcuggaagugugagcuucuucccucaagcagaaacuugcaaaguaugcagcaaucguguauucugcgacacaaugaacucauuaacacucccaagcgaaguaaaccucugcaauguagacaucuuuaauccaaaauacgauuguaaaauaaugacuucaaaaacagacgucucaucaucuguaauaacaucuuuaggagcaauaguuucuugcuacgguaaaacaaaaugcaccgcauccaacaaaaacaaaggaauaauaaaaacauucucuaacggcugcgauuacguaucuaacaaaggaguugacacagucucaguaggaaacacacuauacuacguaaacaaacaagaaggacaaagccuauacguaaaaggagaaccaauaauaaacuucuaugacccauuaguauuuccaagcgaugaauuugacgcuucaauaucacaagucaaugaaaaaauaaaucagagcuuagcauucauaagaaaaucugaugaacuacuacacaauguaaaugcaggaaaauccacuaccaacauaaugauuaccacaauuauaauaguuaucauaguaauacuauuaucacuaauagccguuggauuacuacuauacugcaaagcaagauaaggacuaguaauaaggaaacuguaugaaugucugugggcaggaagugaagagauccuucuguaaagguuuuuggaauuaugucugcugaauaauaaacuuuuuugaaauaauaaaucugguagaaaaaugagaucuaaaaaaaaaaaaaaaaaaaaaaaaaaaaaaaaaaaaaaaaaaaaaaaaaaaaaaaaaaaaaaaaugcaucccccccccccccccccccccccccccccccaaaggcucuuuucagagccaccagaauu

SEQ ID NO: 6705 - RNA, 1904 nt, Artificial Sequence
  mRNA product Design g-2 comprising derived and/or modified sequence from HRSV(A2)__F-del_DSCav1_mut6 (opt11)
gggagaguccgcucagccagguugcagaagcggcuuagcguguguccuaaucuucucucugcguguagguaggccugugccgcaaacaagcuuaccauggaacuacucauccuaaaagcaaacgccaucaccaccauacuaaccgccgucaccuucugcuucgccucgggacaaaacaucaccgaagaguucuaccagucaacgugcuccgccgucucaaaaggcuaccuaggcgcccuccgcaccgggugguauaccuccgucauaacuaucgaacucucuaacaucaaagaaaacaaauguaacggcaccgacgccaaagucaaacuaaucaaacaagaacuggacaaauacaaaaacgccgucaccgaccuacaaaugcucaugugcuccacuccagccaccggcuccgguagcgcaaucgccucaggcguagcuguaugcaaaguccuccaccuagaaggcgaaguaaacaaaauaaaauccgcccuccucucaaccaacaaggccgucgucucacucucaaacggcgucuccguacucaccuuuaaaguccuagaccuuaaaaacuacaucgacaaacaacugcuaccaauccucaacaaacaaucaugcagcaucccaaacccggaaacagucauggaguuccaacagaaaaacaaccgacuccucgaaaucacccgcgaguucuccgucaacgccggagucaccacaccuguaagcacauacaugcuuacuaauuccgaacuccuuucacuaauaaacgacaugccaauaaccaacgaccaaaagaaacucauguccaacaacguacaaaucguacgccaacaauccuacuccaucaugugcaucaucaaagaagaaguccuggccuaugucguacaacucccccuuuacggugucaucgacacacccugcuggaaacuacacaccagcccccucugcacaacaaacaccaaagaaggcuccaacaucugccucacccguaccgaccgaggcugguacugcgacaacgccggcuccgucuccuucuucccccaagccgaaaccugcaaagucugcagcaaccgcgucuucugcgauaccaugaacucccucacacucccaucugaagucaaccucugcaacgucgauauuuucaauccaaaauacgacugcaaaaucaugacuagcaaaaccgacguuagcuccuccgucaucaccucccucggcgccauaguuucaugcuacggcaaaaccaaaugcaccgccuccaacaaaaacaaaggcaucauaaaaaccuucuccaacgggugcgacuacguaucuaauaaaggagucgacaccgucucaguaggaaacacccucuacuaugucaacaaacaagaaggccaaucacuauacguuaaaggcgaaccaaucaucaacuucuacgacccacucgucuuccccagcgacgaguuugacgccucaaucucgcaagucaaugaaaagauuaaccaaucccuagccuucauccgaaaaagugacgaacuccuccacaacguuaacgccggcaaaucuacaaccaacaucaugaucaccacuauaaucaucgucaucauagucauacuucucagccucaucgcagucggacuccuccuuuauugcaaggcacgauaaggacuaguaauaaggaaacuguaugaaugucugugggcaggaagugaagagauccuucuguaaagguuuuuggaauuaugucugcugaauaauaaacuuuuuugaaauaauaaaucugguagaaaaaugagaucuaaaaaaaaaaaaaaaaaaaaaaaaaaaaaaaaaaaaaaaaaaaaaaaaaaaaaaaaaaaaaaaaugcaucccccccccccccccccccccccccccccccaaaggcucuuuucagagccaccagaauu

SEQ ID NO: 6706 - RNA, 2136 nt, Artificial Sequence
  mRNA product Design g-3 comprising derived and/or modified sequence from HRSV(A2)__F-del_DSCav1_mut6 (opt1)
gggagaguccgcucagccagguugcagaagcggcuuagcguguguccuaaucuucucucugcguguagguaggccugugccgcaaacaagcuuaccauggagcugcucauccugaaggccaacgccaucaccaccauccugacggcggugaccuucugcuucgccagcggccagaacaucaccgaggaguucuaccaguccacgugcagcgccgucuccaagggguaccucggcgcccugcggaccggcugguacaccuccgugaucaccaucgagcugagcaacaucaaggagaacaagugcaacgggaccgacgccaaggugaagcucaucaagcaggagcuggacaaguacaagaacgcggucacggaccugcagaugcugaugugcuccaccccggcaaccggcuccggcuccgccaucgcgagcggcgucgccgugugcaaggugcugcaccucgagggggaggucaacaagaucaagagcgcccugcuguccaccaacaaggccguggugagccucuccaacggcgucagcgugcugaccuucaaggugcuggaccucaagaacuacaucgacaagcagcugcugcccauccugaacaagcagagcugcuccauccccaaccccgagacggugauggaguuccagcagaagaacaaccggcuccuggagaucacccgcgaguucagcgugaacgccggggucaccacccccguguccacguacaugcugaccaacagcgagcuccugucccugaucaacgacaugccgaucaccaacgaccagaagaagcucaugagcaacaacgugcagaucguccggcagcaguccuacagcaucaugugcaucaucaaggaggaggugcuggcguacgugguccagcugccccucuacggcgugaucgacacccccugcuggaagcugcacacgagcccccugugcaccaccaacaccaaggagggguccaacaucugccucacgcgcaccgaccggggcugguacugcgacaacgccggcagcgucuccuucuucccgcaggccgagaccugcaaggugugcagcaaccgcguguucugcgacaccaugaacucccugacgcugcccagcgagguaaaccucugcaacgucgacaucuucaaccccaaguacgacugcaagaucaugaccuccaagaccgacgugagcuccagcgugaucaccucccugggggccaucgucagcugcuacggcaagacgaagugcaccgccagcaacaagaacaaggggaucaucaagaccuucuccaacggcugcgacuacgugagcaacaagggcguggacaccguguccgucgggaacacccuguacuacgugaacaagcaggagggccagagccucuacgugaagggggagcccaucaucaacuucuacgacccgcuggucuuccccuccgacgaguucgacgcgagcaucucccaggugaacgagaagaucaaccagagccuggccuucauccgcaaguccgacgagcugcuccacaacgugaacgccggcaagagcacgaccaacaucaugaucaccaccaucaucaucgucaucaucgugauccugcugucccucaucgccguggggcugcugcucuacugcaaggcccggugaggacuagugaagggaacacccaaauuuaauucagccuuaagcacaauuaauuaagagugaaacguaauuguacaagcaguuggucacccaccauagggcaugaucaacaccgcaaccuuuccuuuuucccccagugauucugaaaaaccccucuucccuucagcuugcuuagauguuccaaauuuaguaagcuuaaggcggccuacagaagaaaaagaaaaaaaaggccacaaaaguucccucucacuuucaguaaauaaaauaaaagcagcaacagaaauaaagaaauaaaugaaauucaaaaugaaauaaauauuguguugugcagcauuaaaaaaucaauaaaaauuaaaaaugagcaagaucuaaaaaaaaaaaaaaaaaaaaaaaaaaaaaaaaaaaaaaaaaaaaaaaaaaaaaaaaaaaaaaaaugcaucccccccccccccccccccccccccccccccaaaggcucuuuucagagccaccagaauu

SEQ ID NO: 6707 - RNA, 2136 nt, Artificial Sequence
  mRNA product Design g-3 comprising derived and/or modified sequence from HRSV(A2)__F-del_DSCav1_mut6 (opt1)
gggagaguccgcucagccagguugcagaagcggcuuagcguguguccuaaucuucucucugcguguagguaggccugugccgcaaacaagcuuaccauggagcugcucauccugaaggccaacgccaucaccaccauccugacggcggugaccuucugcuucgccagcggccagaacaucaccgaggaguucuaccaguccacgugcagcgccgucuccaagggguaccucggcgcccugcgcaccgggugguacaccagcgugaucaccaucgagcuguccaacaucaaggagaacaagugcaacggcaccgacgccaaggugaagcucaucaagcaggagcuggacaaguacaagaacgcggucacggaccugcagaugcucaugugcagcacccccgccaccggguccggcagcgccaucgccuccggcguggcggugugcaagguccugcaccuggagggggaggugaacaagaucaagagcgcccuccuguccaccaacaaggccguggucagccuguccaacggcgugagcgugcucacguucaagguccuggaccugaagaacuacaucgacaagcagcuccugccgauccugaacaagcaguccugcagcauccccaaccccgagaccgugauggaguuccagcagaagaacaaccggcuccuggagaucacccgcgaguucuccgugaacgccggggucaccacgcccgugagcaccuacaugcugaccaacuccgagcuccugagccugaucaacgacaugccgaucaccaacgaccagaagaagcucaugagcaacaacgugcagaucguccggcagcaguccuacagcaucaugugcaucaucaaggaggaggugcuggccuacgugguccagcugccccucuacggcgugaucgacacgcccugcuggaagcugcacaccagcccccugugcaccaccaacacgaaggaggggagcaacaucugccucacccgcaccgaccggggcugguacugcgacaacgcgggcuccgugagcuucuucccgcaggccgagaccugcaaggucugcuccaaccgcguguucugcgacacgaugaacagccugacccugcccuccgaggucaaccucugcaacguggacaucuucaaccccaaguacgacugcaagaucaugaccagcaagaccgacguguccagcuccgucaucacgagccugggggccaucguguccugcuacggcaagaccaagugcaccgccagcaacaagaacaaggggaucaucaagaccuucuccaacggcugcgacuacgugagcaacaagggcgucgacacgguguccguggggaacacccuguacuacgucaacaagcaggagggccagagccucuacgugaagggggagcccaucaucaacuucuacgacccgcugguguuccccagcgacgaguucgacgccuccaucagccaggucaacgagaagaucaaccagucccuggcguucauccggaaguccgacgagcuccugcacaacgugaacgccggcaaguccaccaccaacaucaugaucaccacgaucaucaucgugaucaucgucauccugcucagccugaucgccguggggcugcuccuguacugcaaggcccgcugaggacuagugaagggaacacccaaauuuaauucagccuuaagcacaauuaauuaagagugaaacguaauuguacaagcaguuggucacccaccauagggcaugaucaacaccgcaaccuuuccuuuuucccccagugauucugaaaaaccccucuucccuucagcuugcuuagauguuccaaauuuaguaagcuuaaggcggccuacagaagaaaaagaaaaaaaaggccacaaaaguucccucucacuuucaguaaauaaaauaaaagcagcaacagaaauaaagaaauaaaugaaauucaaaaugaaauaaauauuguguugugcagcauuaaaaaaucaauaaaaauuaaaaaugagcaagaucuaaaaaaaaaaaaaaaaaaaaaaaaaaaaaaaaaaaaaaaaaaaaaaaaaaaaaaaaaaaaaaaaugcaucccccccccccccccccccccccccccccccaaaggcucuuuucagagccaccagaauu

SEQ ID NO: 6708 - RNA, 2136 nt, Artificial Sequence
  mRNA product Design g-3 comprising derived and/or modified sequence from HRSV(A2)__F-del_DSCav1_mut6 (opt2)
gggagaguccgcucagccagguugcagaagcggcuuagcguguguccuaaucuucucucugcguguagguaggccugugccgcaaacaagcuuaccauggagcuccucauccucaaggccaacgccaucaccaccauccucaccgccgucaccuucugcuucgccuccggccagaacaucaccgaggaguucuaccaguccaccugcuccgccgucuccaagggcuaccucggcgcccuccgcaccggcugguacaccuccgucaucaccaucgagcucuccaacaucaaggagaacaagugcaacggcaccgacgccaaggucaagcucaucaagcaggagcucgacaaguacaagaacgccgucaccgaccuccagaugcucaugugcuccacccccgccaccggcuccggcuccgccaucgccuccggcgucgccgucugcaagguccuccaccucgagggcgaggucaacaagaucaaguccgcccuccucuccaccaacaaggccgucgucucccucuccaacggcgucuccguccucaccuucaagguccucgaccucaagaacuacaucgacaagcagcuccuccccauccucaacaagcaguccugcuccauccccaaccccgagaccgucauggaguuccagcagaagaacaaccgccuccucgagaucacccgcgaguucuccgucaacgccggcgucaccacccccgucuccaccuacaugcucaccaacuccgagcuccucucccucaucaacgacaugcccaucaccaacgaccagaagaagcucauguccaacaacguccagaucguccgccagcaguccuacuccaucaugugcaucaucaaggaggagguccucgccuacgucguccagcucccccucuacggcgucaucgacacccccugcuggaagcuccacaccuccccccucugcaccaccaacaccaaggagggcuccaacaucugccucacccgcaccgaccgcggcugguacugcgacaacgccggcuccgucuccuucuucccccaggccgagaccugcaaggucugcuccaaccgcgucuucugcgacaccaugaacucccucacccuccccuccgaggucaaccucugcaacgucgacaucuucaaccccaaguacgacugcaagaucaugaccuccaagaccgacgucuccuccuccgucaucaccucccucggcgccaucgucuccugcuacggcaagaccaagugcaccgccuccaacaagaacaagggcaucaucaagaccuucuccaacggcugcgacuacgucuccaacaagggcgucgacaccgucuccgucggcaacacccucuacuacgucaacaagcaggagggccagucccucuacgucaagggcgagcccaucaucaacuucuacgacccccucgucuuccccuccgacgaguucgacgccuccaucucccaggucaacgagaagaucaaccagucccucgccuucauccgcaaguccgacgagcuccuccacaacgucaacgccggcaaguccaccaccaacaucaugaucaccaccaucaucaucgucaucaucgucauccuccucucccucaucgccgucggccuccuccucuacugcaaggcccgcugaggacuagugaagggaacacccaaauuuaauucagccuuaagcacaauuaauuaagagugaaacguaauuguacaagcaguuggucacccaccauagggcaugaucaacaccgcaaccuuuccuuuuucccccagugauucugaaaaaccccucuucccuucagcuugcuuagauguuccaaauuuaguaagcuuaaggcggccuacagaagaaaaagaaaaaaaaggccacaaaaguucccucucacuuucaguaaauaaaauaaaagcagcaacagaaauaaagaaauaaaugaaauucaaaaugaaauaaauauuguguugugcagcauuaaaaaaucaauaaaaauuaaaaaugagcaagaucuaaaaaaaaaaaaaaaaaaaaaaaaaaaaaaaaaaaaaaaaaaaaaaaaaaaaaaaaaaaaaaaaugcaucccccccccccccccccccccccccccccccaaaggcucuuuucagagccaccagaauu

SEQ ID NO: 6709 - RNA, 2136 nt, Artificial Sequence
  mRNA product Design g-3 comprising derived and/or modified sequence from HRSV(A2)__F-del_DSCav1_mut6 (opt3)
gggagaguccgcucagccagguugcagaagcggcuuagcguguguccuaaucuucucucugcguguagguaggccugugccgcaaacaagcuuaccauggagcugcucauccuuaaggccaacgcuauuaccacaauacugacugcagugacguucugcuuugccagcggccagaauaucaccgaagaguucuaccaauccacauguucugcggucucaaaaggguauuugggagcuuuaagaacugguugguacaccaguguuauuacaaucgaacugagcaacauuaaggagaauaaaugcaacggcaccgacgccaaggugaaacuaaucaagcaggaacucgauaaguauaaaaaugcaguaacugaccugcagaugcuuauguguuccacacccgccaccgggucuggaucggcuauagcaucaggcguggccgucugcaaggugcugcacuuggagggugagguuaacaaaaucaagagcgcucuccugaguacgaauaaagccguggucucccugucuaacggggugagcguacucacuuuuaagguuuuagaucugaagaauuacauugacaaacagcuuuugccuauccugaacaagcaauccuguucaauuccaaauccggaaaccgugauggaguuccagcagaaaaacaauaggcuacucgaaaucacacgggaguuuagugucaacgcgggagugacuacccccgugagcacauauaugcugaccaauucugagcuucuguccuugauaaacgauaugccuauuacgaacgaccagaagaaacucaugucaaauaacguccaaaucguucgccagcagagcuacaguauuaugugcaucaucaaggaagaggugcuggcauauguagugcaguuaccacuguacggcgucauugauacucccuguuggaaacuccauacaucuccucuuugcaccacuaauacaaaggaaggcuccaacauaugucugacccgaacggaccgugggugguacugcgauaaugccggaagcgugucguucuuuccacaagcugagaccuguaagguuugcucuaacagaguguucugcgacacaaugaacuccuugacucuacccucagaagucaaucuguguaauguggauaucuuuaacccuaaauaugacugcaagauuaugaccaguaaaacagauguaagcuccucuguuaucacuagccucggugccauagugucauguuacggcaagaccaaaugcacagcaaguaauaagaacaaggggauuaucaaaaccuucuccaauggaugugacuaugucagcaacaagggcguggacacugucucuguggguaauacgcuguacuauguuaacaaacaggaggggcagucacuuuacgugaagggagagccaaucauuaacuuuuaugauccgcugguauuccccagugacgaauuugaugcuagcaucucccaagucaaugagaaaauuaaccagucuuuggccuucauaaggaagucggacgaacuccugcacaaugugaacgcgggcaagagcacaaccaauaucaugauuacuaccaucaucauuguuauaaucgugauuuuacugucccuaaucgccgucggccuccugcuuuacugcaaagcacggugaggacuagugaagggaacacccaaauuuaauucagccuuaagcacaauuaauuaagagugaaacguaauuguacaagcaguuggucacccaccauagggcaugaucaacaccgcaaccuuuccuuuuucccccagugauucugaaaaaccccucuucccuucagcuugcuuagauguuccaaauuuaguaagcuuaaggcggccuacagaagaaaaagaaaaaaaaggccacaaaaguucccucucacuuucaguaaauaaaauaaaagcagcaacagaaauaaagaaauaaaugaaauucaaaaugaaauaaauauuguguugugcagcauuaaaaaaucaauaaaaauuaaaaaugagcaagaucuaaaaaaaaaaaaaaaaaaaaaaaaaaaaaaaaaaaaaaaaaaaaaaaaaaaaaaaaaaaaaaaaugcaucccccccccccccccccccccccccccccccaaaggcucuuuucagagccaccagaauu

SEQ ID NO: 6710 - RNA, 2136 nt, Artificial Sequence
  mRNA product Design g-3 comprising derived and/or modified sequence from HRSV(A2)__F-del_DSCav1_mut6 (opt4)
gggagaguccgcucagccagguugcagaagcggcuuagcguguguccuaaucuucucucugcguguagguaggccugugccgcaaacaagcuuaccauggagcugcugauccugaaggccaacgccaucaccaccauccugaccgccgugaccuucugcuucgccagcggccagaacaucaccgaggaguucuaccagagcaccugcagcgccgugagcaagggcuaccugggcgcccugagaaccggcugguacaccagcgugaucaccaucgagcugagcaacaucaaggagaacaagugcaacggcaccgacgccaaggugaagcugaucaagcaggagcuggacaaguacaagaacgccgugaccgaccugcagaugcugaugugcagcacccccgccaccggcagcggcagcgccaucgccagcggcguggccgugugcaaggugcugcaccuggagggcgaggugaacaagaucaagagcgcccugcugagcaccaacaaggccguggugagccugagcaacggcgugagcgugcugaccuucaaggugcuggaccugaagaacuacaucgacaagcagcugcugcccauccugaacaagcagagcugcagcauccccaaccccgagaccgugauggaguuccagcagaagaacaacagacugcuggagaucaccagagaguucagcgugaacgccggcgugaccacccccgugagcaccuacaugcugaccaacagcgagcugcugagccugaucaacgacaugcccaucaccaacgaccagaagaagcugaugagcaacaacgugcagaucgugagacagcagagcuacagcaucaugugcaucaucaaggaggaggugcuggccuacguggugcagcugccccuguacggcgugaucgacacccccugcuggaagcugcacaccagcccccugugcaccaccaacaccaaggagggcagcaacaucugccugaccagaaccgacagaggcugguacugcgacaacgccggcagcgugagcuucuucccccaggccgagaccugcaaggugugcagcaacagaguguucugcgacaccaugaacagccugacccugcccagcgaggugaaccugugcaacguggacaucuucaaccccaaguacgacugcaagaucaugaccagcaagaccgacgugagcagcagcgugaucaccagccugggcgccaucgugagcugcuacggcaagaccaagugcaccgccagcaacaagaacaagggcaucaucaagaccuucagcaacggcugcgacuacgugagcaacaagggcguggacaccgugagcgugggcaacacccuguacuacgugaacaagcaggagggccagagccuguacgugaagggcgagcccaucaucaacuucuacgacccccugguguuccccagcgacgaguucgacgccagcaucagccaggugaacgagaagaucaaccagagccuggccuucaucagaaagagcgacgagcugcugcacaacgugaacgccggcaagagcaccaccaacaucaugaucaccaccaucaucaucgugaucaucgugauccugcugagccugaucgccgugggccugcugcuguacugcaaggccagaugaggacuagugaagggaacacccaaauuuaauucagccuuaagcacaauuaauuaagagugaaacguaauuguacaagcaguuggucacccaccauagggcaugaucaacaccgcaaccuuuccuuuuucccccagugauucugaaaaaccccucuucccuucagcuugcuuagauguuccaaauuuaguaagcuuaaggcggccuacagaagaaaaagaaaaaaaaggccacaaaaguucccucucacuuucaguaaauaaaauaaaagcagcaacagaaauaaagaaauaaaugaaauucaaaaugaaauaaauauuguguugugcagcauuaaaaaaucaauaaaaauuaaaaaugagcaagaucuaaaaaaaaaaaaaaaaaaaaaaaaaaaaaaaaaaaaaaaaaaaaaaaaaaaaaaaaaaaaaaaaugcaucccccccccccccccccccccccccccccccaaaggcucuuuucagagccaccagaauu

SEQ ID NO: 6711 - RNA, 2136 nt, Artificial Sequence
  mRNA product Design g-3 comprising derived and/or modified sequence from HRSV(A2)__F-del_DSCav1_mut6 (opt5)
gggagaguccgcucagccagguugcagaagcggcuuagcguguguccuaaucuucucucugcguguagguaggccugugccgcaaacaagcuuaccauggagcugcucauccugaaggccaacgcuauuaccacaauccuuacggccgugaccuucugcuuugcgagcggccagaauauuacagaagaguucuaccaauccaccuguucugcugucagcaaaggguaucugggagcccucagaacaggcugguacaccuccguuaucacaauugaacugucuaacaucaaggagaauaaaugcaacgggaccgacgccaaggugaaacuuaucaagcaggaacuggauaaguauaaaaaugcugugacggaccuccagaugcugauguguagcacccccgccacaggauccggcucugcuauugccagcggggucgcggugugcaagguucugcaccucgagggagaggugaacaaaaucaaguccgcccugcuuagcaccaauaaagcugucgugucucuguccaacggcguuagcgugcucacauuuaagguccuggaucuuaagaauuacauugacaaacagcugcucccuauccugaacaagcaaucuuguuccauuccgaaucccgaaaccgugauggaguuccagcagaaaaacaaucggcugcucgaaaucacgcgcgaguuuagcgugaacgccggcgucacaaccccuguuucuacauauaugcugaccaauuccgagcuucugagccucauuaacgauaugcccaucaccaacgaccagaagaaacugauguccaauaacgugcaaaucgugagacagcagucuuacagcauuaugugcaucauuaaggaagagguccuugcuuaugugguucagcugccucucuacggggugaucgauacacccuguuggaaacugcauacguccccucugugcaccacaaauaccaaggaaggaagcaacauuugucucacacggaccgaccgcggcugguacugcgauaaugccgggucugucuccuucuuuccgcaagcggagacguguaaggugugcagcaacagaguuuucugcgacacaaugaacucucugacccuucccagcgaagugaaucuguguaaugucgauaucuuuaacccuaaauaugacugcaagaucaugaccuccaaaacagaugugucuagcuccgucauuaccagccucggagccaucgugucuuguuacggcaagacaaaaugcacggcuuccaauaagaacaaggggauuaucaaaaccuucagcaauggaugugacuauguuucuaacaagggcguggacacagucuccgugggcaauacccuguacuauguuaacaaacaggaggggcagagccuuuacgugaagggagagcccauuaucaacuuuuaugauccucuggucuuccccuccgacgaauuugaugccucuaucagccaagugaaugagaaaauuaaccagucccucgcuuucauccggaagucugacgaacugcugcacaaugugaacgccggcaagagcacaaccaauauuaugaucacgaccauuaucauuguuaucaucgucauucuccugucccuuaucgccguggggcugcuccuguacugcaaagcucgcugaggacuagugaagggaacacccaaauuuaauucagccuuaagcacaauuaauuaagagugaaacguaauuguacaagcaguuggucacccaccauagggcaugaucaacaccgcaaccuuuccuuuuucccccagugauucugaaaaaccccucuucccuucagcuugcuuagauguuccaaauuuaguaagcuuaaggcggccuacagaagaaaaagaaaaaaaaggccacaaaaguucccucucacuuucaguaaauaaaauaaaagcagcaacagaaauaaagaaauaaaugaaauucaaaaugaaauaaauauuguguugugcagcauuaaaaaaucaauaaaaauuaaaaaugagcaagaucuaaaaaaaaaaaaaaaaaaaaaaaaaaaaaaaaaaaaaaaaaaaaaaaaaaaaaaaaaaaaaaaaugcaucccccccccccccccccccccccccccccccaaaggcucuuuucagagccaccagaauu

SEQ ID NO: 6712 - RNA, 2136 nt, Artificial Sequence
  mRNA product Design g-3 comprising derived and/or modified sequence from HRSV(A2)__F-del_DSCav1_mut6 (opt6)
gggagaguccgcucagccagguugcagaagcggcuuagcguguguccuaaucuucucucugcguguagguaggccugugccgcaaacaagcuuaccauggaacuacucauauuaaaagcaaacgcaauaacaacgauauuaacagcuguaacauucugcuuugcaucaggccaaaauaucaccgaagaauuuuaucaaagcacaugcucugcaguauccaaaggauacuuaggagcauuaagaacaggcugguacacauccguaauaacaauagaacuaucaaacaucaaagaaaacaaaugcaacggcacagacgccaaaguaaaacucauaaaacaagaacuagacaaauauaaaaacgcaguaacagaucuacaaaugcucaugugcuccacaccagcaaccggaucugguucagccauagcauccggcguagccgucugcaaaguauuacaccucgaaggagaaguaaacaaaauaaaaucugcccuauuaucuacaaauaaagccguaguaagucuaaguaacggaguaucaguacuaacauuuaaaguccuagaccugaaaaacuauaucgacaaacaacuauuaccaauacuaaacaaacaauccuguuccaucccuaacccagaaacaguuauggaauuucaacaaaaaaauaaccgccuuuuagaaauaacuagagaauuuucaguaaacgcaggaguuacaacaccaguaucaacauacaugcuaacaaauucagaauuauuaucccuuauaaaugacaugccuaucacaaacgaucaaaaaaaauuaauguccaacaacguacaaauaguaagacaacaaucauauuccaucaugugcaucauaaaagaagaaguccucgcauacguagugcaacuaccacuauacggagucauagauacacccuguuggaaacuucacacaucuccacuaugcacaacaaacacgaaagaaggauccaacauaugccuaacacgaacagacagaggaugguauugcgacaacgcuggaagugugagcuucuucccucaagcagaaacuugcaaaguaugcagcaaucguguauucugcgacacaaugaacucauuaacacucccaagcgaaguaaaccucugcaauguagacaucuuuaauccaaaauacgauuguaaaauaaugacuucaaaaacagacgucucaucaucuguaauaacaucuuuaggagcaauaguuucuugcuacgguaaaacaaaaugcaccgcauccaacaaaaacaaaggaauaauaaaaacauucucuaacggcugcgauuacguaucuaacaaaggaguugacacagucucaguaggaaacacacuauacuacguaaacaaacaagaaggacaaagccuauacguaaaaggagaaccaauaauaaacuucuaugacccauuaguauuuccaagcgaugaauuugacgcuucaauaucacaagucaaugaaaaaauaaaucagagcuuagcauucauaagaaaaucugaugaacuacuacacaauguaaaugcaggaaaauccacuaccaacauaaugauuaccacaauuauaauaguuaucauaguaauacuauuaucacuaauagccguuggauuacuacuauacugcaaagcaagauaaggacuagugaagggaacacccaaauuuaauucagccuuaagcacaauuaauuaagagugaaacguaauuguacaagcaguuggucacccaccauagggcaugaucaacaccgcaaccuuuccuuuuucccccagugauucugaaaaaccccucuucccuucagcuugcuuagauguuccaaauuuaguaagcuuaaggcggccuacagaagaaaaagaaaaaaaaggccacaaaaguucccucucacuuucaguaaauaaaauaaaagcagcaacagaaauaaagaaauaaaugaaauucaaaaugaaauaaauauuguguugugcagcauuaaaaaaucaauaaaaauuaaaaaugagcaagaucuaaaaaaaaaaaaaaaaaaaaaaaaaaaaaaaaaaaaaaaaaaaaaaaaaaaaaaaaaaaaaaaaugcaucccccccccccccccccccccccccccccccaaaggcucuuuucagagccaccagaauu

SEQ ID NO: 6713 - RNA, 2136 nt, Artificial Sequence
  mRNA product Design g-3 comprising derived and/or modified sequence from HRSV(A2)__F-del_DSCav1_mut6 (opt11)
gggagaguccgcucagccagguugcagaagcggcuuagcguguguccuaaucuucucucugcguguagguaggccugugccgcaaacaagcuuaccauggaacuacucauccuaaaagcaaacgccaucaccaccauacuaaccgccgucaccuucugcuucgccucgggacaaaacaucaccgaagaguucuaccagucaacgugcuccgccgucucaaaaggcuaccuaggcgcccuccgcaccgggugguauaccuccgucauaacuaucgaacucucuaacaucaaagaaaacaaauguaacggcaccgacgccaaagucaaacuaaucaaacaagaacuggacaaauacaaaaacgccgucaccgaccuacaaaugcucaugugcuccacuccagccaccggcuccgguagcgcaaucgccucaggcguagcuguaugcaaaguccuccaccuagaaggcgaaguaaacaaaauaaaauccgcccuccucucaaccaacaaggccgucgucucacucucaaacggcgucuccguacucaccuuuaaaguccuagaccuuaaaaacuacaucgacaaacaacugcuaccaauccucaacaaacaaucaugcagcaucccaaacccggaaacagucauggaguuccaacagaaaaacaaccgacuccucgaaaucacccgcgaguucuccgucaacgccggagucaccacaccuguaagcacauacaugcuuacuaauuccgaacuccuuucacuaauaaacgacaugccaauaaccaacgaccaaaagaaacucauguccaacaacguacaaaucguacgccaacaauccuacuccaucaugugcaucaucaaagaagaaguccuggccuaugucguacaacucccccuuuacggugucaucgacacacccugcuggaaacuacacaccagcccccucugcacaacaaacaccaaagaaggcuccaacaucugccucacccguaccgaccgaggcugguacugcgacaacgccggcuccgucuccuucuucccccaagccgaaaccugcaaagucugcagcaaccgcgucuucugcgauaccaugaacucccucacacucccaucugaagucaaccucugcaacgucgauauuuucaauccaaaauacgacugcaaaaucaugacuagcaaaaccgacguuagcuccuccgucaucaccucccucggcgccauaguuucaugcuacggcaaaaccaaaugcaccgccuccaacaaaaacaaaggcaucauaaaaaccuucuccaacgggugcgacuacguaucuaauaaaggagucgacaccgucucaguaggaaacacccucuacuaugucaacaaacaagaaggccaaucacuauacguuaaaggcgaaccaaucaucaacuucuacgacccacucgucuuccccagcgacgaguuugacgccucaaucucgcaagucaaugaaaagauuaaccaaucccuagccuucauccgaaaaagugacgaacuccuccacaacguuaacgccggcaaaucuacaaccaacaucaugaucaccacuauaaucaucgucaucauagucauacuucucagccucaucgcagucggacuccuccuuuauugcaaggcacgauaaggacuagugaagggaacacccaaauuuaauucagccuuaagcacaauuaauuaagagugaaacguaauuguacaagcaguuggucacccaccauagggcaugaucaacaccgcaaccuuuccuuuuucccccagugauucugaaaaaccccucuucccuucagcuugcuuagauguuccaaauuuaguaagcuuaaggcggccuacagaagaaaaagaaaaaaaaggccacaaaaguucccucucacuuucaguaaauaaaauaaaagcagcaacagaaauaaagaaauaaaugaaauucaaaaugaaauaaauauuguguugugcagcauuaaaaaaucaauaaaaauuaaaaaugagcaagaucuaaaaaaaaaaaaaaaaaaaaaaaaaaaaaaaaaaaaaaaaaaaaaaaaaaaaaaaaaaaaaaaaugcaucccccccccccccccccccccccccccccccaaaggcucuuuucagagccaccagaauu

SEQ ID NO: 6714 - RNA, 1931 nt, Artificial Sequence
  mRNA product Design g-4 comprising derived and/or modified sequence from HRSV(A2)__F-del_DSCav1_mut6 (opt1)
gggagacuccugucgggcggaaguaggaggaguagaguuuaaaaacaguacucuuuuuccgguucgggacguaguugaagcaacgacaagccggauaaccgcucuugagacaggaagcuuaccauggagcugcucauccugaaggccaacgccaucaccaccauccugacggcggugaccuucugcuucgccagcggccagaacaucaccgaggaguucuaccaguccacgugcagcgccgucuccaagggguaccucggcgcccugcggaccggcugguacaccuccgugaucaccaucgagcugagcaacaucaaggagaacaagugcaacgggaccgacgccaaggugaagcucaucaagcaggagcuggacaaguacaagaacgcggucacggaccugcagaugcugaugugcuccaccccggcaaccggcuccggcuccgccaucgcgagcggcgucgccgugugcaaggugcugcaccucgagggggaggucaacaagaucaagagcgcccugcuguccaccaacaaggccguggugagccucuccaacggcgucagcgugcugaccuucaaggugcuggaccucaagaacuacaucgacaagcagcugcugcccauccugaacaagcagagcugcuccauccccaaccccgagacggugauggaguuccagcagaagaacaaccggcuccuggagaucacccgcgaguucagcgugaacgccggggucaccacccccguguccacguacaugcugaccaacagcgagcuccugucccugaucaacgacaugccgaucaccaacgaccagaagaagcucaugagcaacaacgugcagaucguccggcagcaguccuacagcaucaugugcaucaucaaggaggaggugcuggcguacgugguccagcugccccucuacggcgugaucgacacccccugcuggaagcugcacacgagcccccugugcaccaccaacaccaaggagggguccaacaucugccucacgcgcaccgaccggggcugguacugcgacaacgccggcagcgucuccuucuucccgcaggccgagaccugcaaggugugcagcaaccgcguguucugcgacaccaugaacucccugacgcugcccagcgagguaaaccucugcaacgucgacaucuucaaccccaaguacgacugcaagaucaugaccuccaagaccgacgugagcuccagcgugaucaccucccugggggccaucgucagcugcuacggcaagacgaagugcaccgccagcaacaagaacaaggggaucaucaagaccuucuccaacggcugcgacuacgugagcaacaagggcguggacaccguguccgucgggaacacccuguacuacgugaacaagcaggagggccagagccucuacgugaagggggagcccaucaucaacuucuacgacccgcuggucuuccccuccgacgaguucgacgcgagcaucucccaggugaacgagaagaucaaccagagccuggccuucauccgcaaguccgacgagcugcuccacaacgugaacgccggcaagagcacgaccaacaucaugaucaccaccaucaucaucgucaucaucgugauccugcugucccucaucgccguggggcugcugcucuacugcaaggcccggugaggacuaguaauaaggaaacuguaugaaugucugugggcaggaagugaagagauccuucuguaaagguuuuuggaauuaugucugcugaauaauaaacuuuuuugaaauaauaaaucugguagaaaaaugagaucuaaaaaaaaaaaaaaaaaaaaaaaaaaaaaaaaaaaaaaaaaaaaaaaaaaaaaaaaaaaaaaaaugcaucccccccccccccccccccccccccccccccaaaggcucuuuucagagccaccagaauu

SEQ ID NO: 6715 - RNA, 1931 nt, Artificial Sequence
  mRNA product Design g-4 comprising derived and/or modified sequence from HRSV(A2)__F-del_DSCav1_mut6 (opt1)
gggagacuccugucgggcggaaguaggaggaguagaguuuaaaaacaguacucuuuuuccgguucgggacguaguugaagcaacgacaagccggauaaccgcucuugagacaggaagcuuaccauggagcugcucauccugaaggccaacgccaucaccaccauccugacggcggugaccuucugcuucgccagcggccagaacaucaccgaggaguucuaccaguccacgugcagcgccgucuccaagggguaccucggcgcccugcgcaccgggugguacaccagcgugaucaccaucgagcuguccaacaucaaggagaacaagugcaacggcaccgacgccaaggugaagcucaucaagcaggagcuggacaaguacaagaacgcggucacggaccugcagaugcucaugugcagcacccccgccaccggguccggcagcgccaucgccuccggcguggcggugugcaagguccugcaccuggagggggaggugaacaagaucaagagcgcccuccuguccaccaacaaggccguggucagccuguccaacggcgugagcgugcucacguucaagguccuggaccugaagaacuacaucgacaagcagcuccugccgauccugaacaagcaguccugcagcauccccaaccccgagaccgugauggaguuccagcagaagaacaaccggcuccuggagaucacccgcgaguucuccgugaacgccggggucaccacgcccgugagcaccuacaugcugaccaacuccgagcuccugagccugaucaacgacaugccgaucaccaacgaccagaagaagcucaugagcaacaacgugcagaucguccggcagcaguccuacagcaucaugugcaucaucaaggaggaggugcuggccuacgugguccagcugccccucuacggcgugaucgacacgcccugcuggaagcugcacaccagcccccugugcaccaccaacacgaaggaggggagcaacaucugccucacccgcaccgaccggggcugguacugcgacaacgcgggcuccgugagcuucuucccgcaggccgagaccugcaaggucugcuccaaccgcguguucugcgacacgaugaacagccugacccugcccuccgaggucaaccucugcaacguggacaucuucaaccccaaguacgacugcaagaucaugaccagcaagaccgacguguccagcuccgucaucacgagccugggggccaucguguccugcuacggcaagaccaagugcaccgccagcaacaagaacaaggggaucaucaagaccuucuccaacggcugcgacuacgugagcaacaagggcgucgacacgguguccguggggaacacccuguacuacgucaacaagcaggagggccagagccucuacgugaagggggagcccaucaucaacuucuacgacccgcugguguuccccagcgacgaguucgacgccuccaucagccaggucaacgagaagaucaaccagucccuggcguucauccggaaguccgacgagcuccugcacaacgugaacgccggcaaguccaccaccaacaucaugaucaccacgaucaucaucgugaucaucgucauccugcucagccugaucgccguggggcugcuccuguacugcaaggcccgcugaggacuaguaauaaggaaacuguaugaaugucugugggcaggaagugaagagauccuucuguaaagguuuuuggaauuaugucugcugaauaauaaacuuuuuugaaauaauaaaucugguagaaaaaugagaucuaaaaaaaaaaaaaaaaaaaaaaaaaaaaaaaaaaaaaaaaaaaaaaaaaaaaaaaaaaaaaaaaugcaucccccccccccccccccccccccccccccccaaaggcucuuuucagagccaccagaauu

SEQ ID NO: 6716 - RNA, 1931 nt, Artificial Sequence
  mRNA product Design g-4 comprising derived and/or modified sequence from HRSV(A2)__F-del_DSCav1_mut6 (opt2)
gggagacuccugucgggcggaaguaggaggaguagaguuuaaaaacaguacucuuuuuccgguucgggacguaguugaagcaacgacaagccggauaaccgcucuugagacaggaagcuuaccauggagcuccucauccucaaggccaacgccaucaccaccauccucaccgccgucaccuucugcuucgccuccggccagaacaucaccgaggaguucuaccaguccaccugcuccgccgucuccaagggcuaccucggcgcccuccgcaccggcugguacaccuccgucaucaccaucgagcucuccaacaucaaggagaacaagugcaacggcaccgacgccaaggucaagcucaucaagcaggagcucgacaaguacaagaacgccgucaccgaccuccagaugcucaugugcuccacccccgccaccggcuccggcuccgccaucgccuccggcgucgccgucugcaagguccuccaccucgagggcgaggucaacaagaucaaguccgcccuccucuccaccaacaaggccgucgucucccucuccaacggcgucuccguccucaccuucaagguccucgaccucaagaacuacaucgacaagcagcuccuccccauccucaacaagcaguccugcuccauccccaaccccgagaccgucauggaguuccagcagaagaacaaccgccuccucgagaucacccgcgaguucuccgucaacgccggcgucaccacccccgucuccaccuacaugcucaccaacuccgagcuccucucccucaucaacgacaugcccaucaccaacgaccagaagaagcucauguccaacaacguccagaucguccgccagcaguccuacuccaucaugugcaucaucaaggaggagguccucgccuacgucguccagcucccccucuacggcgucaucgacacccccugcuggaagcuccacaccuccccccucugcaccaccaacaccaaggagggcuccaacaucugccucacccgcaccgaccgcggcugguacugcgacaacgccggcuccgucuccuucuucccccaggccgagaccugcaaggucugcuccaaccgcgucuucugcgacaccaugaacucccucacccuccccuccgaggucaaccucugcaacgucgacaucuucaaccccaaguacgacugcaagaucaugaccuccaagaccgacgucuccuccuccgucaucaccucccucggcgccaucgucuccugcuacggcaagaccaagugcaccgccuccaacaagaacaagggcaucaucaagaccuucuccaacggcugcgacuacgucuccaacaagggcgucgacaccgucuccgucggcaacacccucuacuacgucaacaagcaggagggccagucccucuacgucaagggcgagcccaucaucaacuucuacgacccccucgucuuccccuccgacgaguucgacgccuccaucucccaggucaacgagaagaucaaccagucccucgccuucauccgcaaguccgacgagcuccuccacaacgucaacgccggcaaguccaccaccaacaucaugaucaccaccaucaucaucgucaucaucgucauccuccucucccucaucgccgucggccuccuccucuacugcaaggcccgcugaggacuaguaauaaggaaacuguaugaaugucugugggcaggaagugaagagauccuucuguaaagguuuuuggaauuaugucugcugaauaauaaacuuuuuugaaauaauaaaucugguagaaaaaugagaucuaaaaaaaaaaaaaaaaaaaaaaaaaaaaaaaaaaaaaaaaaaaaaaaaaaaaaaaaaaaaaaaaugcaucccccccccccccccccccccccccccccccaaaggcucuuuucagagccaccagaauu

SEQ ID NO: 6717 - RNA, 1931 nt, Artificial Sequence
  mRNA product Design g-4 comprising derived and/or modified sequence from HRSV(A2)__F-del_DSCav1_mut6 (opt3)
gggagacuccugucgggcggaaguaggaggaguagaguuuaaaaacaguacucuuuuuccgguucgggacguaguugaagcaacgacaagccggauaaccgcucuugagacaggaagcuuaccauggagcugcucauccuuaaggccaacgcuauuaccacaauacugacugcagugacguucugcuuugccagcggccagaauaucaccgaagaguucuaccaauccacauguucugcggucucaaaaggguauuugggagcuuuaagaacugguugguacaccaguguuauuacaaucgaacugagcaacauuaaggagaauaaaugcaacggcaccgacgccaaggugaaacuaaucaagcaggaacucgauaaguauaaaaaugcaguaacugaccugcagaugcuuauguguuccacacccgccaccgggucuggaucggcuauagcaucaggcguggccgucugcaaggugcugcacuuggagggugagguuaacaaaaucaagagcgcucuccugaguacgaauaaagccguggucucccugucuaacggggugagcguacucacuuuuaagguuuuagaucugaagaauuacauugacaaacagcuuuugccuauccugaacaagcaauccuguucaauuccaaauccggaaaccgugauggaguuccagcagaaaaacaauaggcuacucgaaaucacacgggaguuuagugucaacgcgggagugacuacccccgugagcacauauaugcugaccaauucugagcuucuguccuugauaaacgauaugccuauuacgaacgaccagaagaaacucaugucaaauaacguccaaaucguucgccagcagagcuacaguauuaugugcaucaucaaggaagaggugcuggcauauguagugcaguuaccacuguacggcgucauugauacucccuguuggaaacuccauacaucuccucuuugcaccacuaauacaaaggaaggcuccaacauaugucugacccgaacggaccgugggugguacugcgauaaugccggaagcgugucguucuuuccacaagcugagaccuguaagguuugcucuaacagaguguucugcgacacaaugaacuccuugacucuacccucagaagucaaucuguguaauguggauaucuuuaacccuaaauaugacugcaagauuaugaccaguaaaacagauguaagcuccucuguuaucacuagccucggugccauagugucauguuacggcaagaccaaaugcacagcaaguaauaagaacaaggggauuaucaaaaccuucuccaauggaugugacuaugucagcaacaagggcguggacacugucucuguggguaauacgcuguacuauguuaacaaacaggaggggcagucacuuuacgugaagggagagccaaucauuaacuuuuaugauccgcugguauuccccagugacgaauuugaugcuagcaucucccaagucaaugagaaaauuaaccagucuuuggccuucauaaggaagucggacgaacuccugcacaaugugaacgcgggcaagagcacaaccaauaucaugauuacuaccaucaucauuguuauaaucgugauuuuacugucccuaaucgccgucggccuccugcuuuacugcaaagcacggugaggacuaguaauaaggaaacuguaugaaugucugugggcaggaagugaagagauccuucuguaaagguuuuuggaauuaugucugcugaauaauaaacuuuuuugaaauaauaaaucugguagaaaaaugagaucuaaaaaaaaaaaaaaaaaaaaaaaaaaaaaaaaaaaaaaaaaaaaaaaaaaaaaaaaaaaaaaaaugcaucccccccccccccccccccccccccccccccaaaggcucuuuucagagccaccagaauu

SEQ ID NO: 6718 - RNA, 1931 nt, Artificial Sequence
  mRNA product Design g-4 comprising derived and/or modified sequence from HRSV(A2)__F-del_DSCav1_mut6 (opt4)
gggagacuccugucgggcggaaguaggaggaguagaguuuaaaaacaguacucuuuuuccgguucgggacguaguugaagcaacgacaagccggauaaccgcucuugagacaggaagcuuaccauggagcugcugauccugaaggccaacgccaucaccaccauccugaccgccgugaccuucugcuucgccagcggccagaacaucaccgaggaguucuaccagagcaccugcagcgccgugagcaagggcuaccugggcgcccugagaaccggcugguacaccagcgugaucaccaucgagcugagcaacaucaaggagaacaagugcaacggcaccgacgccaaggugaagcugaucaagcaggagcuggacaaguacaagaacgccgugaccgaccugcagaugcugaugugcagcacccccgccaccggcagcggcagcgccaucgccagcggcguggccgugugcaaggugcugcaccuggagggcgaggugaacaagaucaagagcgcccugcugagcaccaacaaggccguggugagccugagcaacggcgugagcgugcugaccuucaaggugcuggaccugaagaacuacaucgacaagcagcugcugcccauccugaacaagcagagcugcagcauccccaaccccgagaccgugauggaguuccagcagaagaacaacagacugcuggagaucaccagagaguucagcgugaacgccggcgugaccacccccgugagcaccuacaugcugaccaacagcgagcugcugagccugaucaacgacaugcccaucaccaacgaccagaagaagcugaugagcaacaacgugcagaucgugagacagcagagcuacagcaucaugugcaucaucaaggaggaggugcuggccuacguggugcagcugccccuguacggcgugaucgacacccccugcuggaagcugcacaccagcccccugugcaccaccaacaccaaggagggcagcaacaucugccugaccagaaccgacagaggcugguacugcgacaacgccggcagcgugagcuucuucccccaggccgagaccugcaaggugugcagcaacagaguguucugcgacaccaugaacagccugacccugcccagcgaggugaaccugugcaacguggacaucuucaaccccaaguacgacugcaagaucaugaccagcaagaccgacgugagcagcagcgugaucaccagccugggcgccaucgugagcugcuacggcaagaccaagugcaccgccagcaacaagaacaagggcaucaucaagaccuucagcaacggcugcgacuacgugagcaacaagggcguggacaccgugagcgugggcaacacccuguacuacgugaacaagcaggagggccagagccuguacgugaagggcgagcccaucaucaacuucuacgacccccugguguuccccagcgacgaguucgacgccagcaucagccaggugaacgagaagaucaaccagagccuggccuucaucagaaagagcgacgagcugcugcacaacgugaacgccggcaagagcaccaccaacaucaugaucaccaccaucaucaucgugaucaucgugauccugcugagccugaucgccgugggccugcugcuguacugcaaggccagaugaggacuaguaauaaggaaacuguaugaaugucugugggcaggaagugaagagauccuucuguaaagguuuuuggaauuaugucugcugaauaauaaacuuuuuugaaauaauaaaucugguagaaaaaugagaucuaaaaaaaaaaaaaaaaaaaaaaaaaaaaaaaaaaaaaaaaaaaaaaaaaaaaaaaaaaaaaaaaugcaucccccccccccccccccccccccccccccccaaaggcucuuuucagagccaccagaauu

SEQ ID NO: 6719 - RNA, 1931 nt, Artificial Sequence
  mRNA product Design g-4 comprising derived and/or modified sequence from HRSV(A2)__F-del_DSCav1_mut6 (opt5)
gggagacuccugucgggcggaaguaggaggaguagaguuuaaaaacaguacucuuuuuccgguucgggacguaguugaagcaacgacaagccggauaaccgcucuugagacaggaagcuuaccauggagcugcucauccugaaggccaacgcuauuaccacaauccuuacggccgugaccuucugcuuugcgagcggccagaauauuacagaagaguucuaccaauccaccuguucugcugucagcaaaggguaucugggagcccucagaacaggcugguacaccuccguuaucacaauugaacugucuaacaucaaggagaauaaaugcaacgggaccgacgccaaggugaaacuuaucaagcaggaacuggauaaguauaaaaaugcugugacggaccuccagaugcugauguguagcacccccgccacaggauccggcucugcuauugccagcggggucgcggugugcaagguucugcaccucgagggagaggugaacaaaaucaaguccgcccugcuuagcaccaauaaagcugucgugucucuguccaacggcguuagcgugcucacauuuaagguccuggaucuuaagaauuacauugacaaacagcugcucccuauccugaacaagcaaucuuguuccauuccgaaucccgaaaccgugauggaguuccagcagaaaaacaaucggcugcucgaaaucacgcgcgaguuuagcgugaacgccggcgucacaaccccuguuucuacauauaugcugaccaauuccgagcuucugagccucauuaacgauaugcccaucaccaacgaccagaagaaacugauguccaauaacgugcaaaucgugagacagcagucuuacagcauuaugugcaucauuaaggaagagguccuugcuuaugugguucagcugccucucuacggggugaucgauacacccuguuggaaacugcauacguccccucugugcaccacaaauaccaaggaaggaagcaacauuugucucacacggaccgaccgcggcugguacugcgauaaugccgggucugucuccuucuuuccgcaagcggagacguguaaggugugcagcaacagaguuuucugcgacacaaugaacucucugacccuucccagcgaagugaaucuguguaaugucgauaucuuuaacccuaaauaugacugcaagaucaugaccuccaaaacagaugugucuagcuccgucauuaccagccucggagccaucgugucuuguuacggcaagacaaaaugcacggcuuccaauaagaacaaggggauuaucaaaaccuucagcaauggaugugacuauguuucuaacaagggcguggacacagucuccgugggcaauacccuguacuauguuaacaaacaggaggggcagagccuuuacgugaagggagagcccauuaucaacuuuuaugauccucuggucuuccccuccgacgaauuugaugccucuaucagccaagugaaugagaaaauuaaccagucccucgcuuucauccggaagucugacgaacugcugcacaaugugaacgccggcaagagcacaaccaauauuaugaucacgaccauuaucauuguuaucaucgucauucuccugucccuuaucgccguggggcugcuccuguacugcaaagcucgcugaggacuaguaauaaggaaacuguaugaaugucugugggcaggaagugaagagauccuucuguaaagguuuuuggaauuaugucugcugaauaauaaacuuuuuugaaauaauaaaucugguagaaaaaugagaucuaaaaaaaaaaaaaaaaaaaaaaaaaaaaaaaaaaaaaaaaaaaaaaaaaaaaaaaaaaaaaaaaugcaucccccccccccccccccccccccccccccccaaaggcucuuuucagagccaccagaauu

SEQ ID NO: 6720 - RNA, 1931 nt, Artificial Sequence
  mRNA product Design g-4 comprising derived and/or modified sequence from HRSV(A2)__F-del_DSCav1_mut6 (opt6)
gggagacuccugucgggcggaaguaggaggaguagaguuuaaaaacaguacucuuuuuccgguucgggacguaguugaagcaacgacaagccggauaaccgcucuugagacaggaagcuuaccauggaacuacucauauuaaaagcaaacgcaauaacaacgauauuaacagcuguaacauucugcuuugcaucaggccaaaauaucaccgaagaauuuuaucaaagcacaugcucugcaguauccaaaggauacuuaggagcauuaagaacaggcugguacacauccguaauaacaauagaacuaucaaacaucaaagaaaacaaaugcaacggcacagacgccaaaguaaaacucauaaaacaagaacuagacaaauauaaaaacgcaguaacagaucuacaaaugcucaugugcuccacaccagcaaccggaucugguucagccauagcauccggcguagccgucugcaaaguauuacaccucgaaggagaaguaaacaaaauaaaaucugcccuauuaucuacaaauaaagccguaguaagucuaaguaacggaguaucaguacuaacauuuaaaguccuagaccugaaaaacuauaucgacaaacaacuauuaccaauacuaaacaaacaauccuguuccaucccuaacccagaaacaguuauggaauuucaacaaaaaaauaaccgccuuuuagaaauaacuagagaauuuucaguaaacgcaggaguuacaacaccaguaucaacauacaugcuaacaaauucagaauuauuaucccuuauaaaugacaugccuaucacaaacgaucaaaaaaaauuaauguccaacaacguacaaauaguaagacaacaaucauauuccaucaugugcaucauaaaagaagaaguccucgcauacguagugcaacuaccacuauacggagucauagauacacccuguuggaaacuucacacaucuccacuaugcacaacaaacacgaaagaaggauccaacauaugccuaacacgaacagacagaggaugguauugcgacaacgcuggaagugugagcuucuucccucaagcagaaacuugcaaaguaugcagcaaucguguauucugcgacacaaugaacucauuaacacucccaagcgaaguaaaccucugcaauguagacaucuuuaauccaaaauacgauuguaaaauaaugacuucaaaaacagacgucucaucaucuguaauaacaucuuuaggagcaauaguuucuugcuacgguaaaacaaaaugcaccgcauccaacaaaaacaaaggaauaauaaaaacauucucuaacggcugcgauuacguaucuaacaaaggaguugacacagucucaguaggaaacacacuauacuacguaaacaaacaagaaggacaaagccuauacguaaaaggagaaccaauaauaaacuucuaugacccauuaguauuuccaagcgaugaauuugacgcuucaauaucacaagucaaugaaaaaauaaaucagagcuuagcauucauaagaaaaucugaugaacuacuacacaauguaaaugcaggaaaauccacuaccaacauaaugauuaccacaauuauaauaguuaucauaguaauacuauuaucacuaauagccguuggauuacuacuauacugcaaagcaagauaaggacuaguaauaaggaaacuguaugaaugucugugggcaggaagugaagagauccuucuguaaagguuuuuggaauuaugucugcugaauaauaaacuuuuuugaaauaauaaaucugguagaaaaaugagaucuaaaaaaaaaaaaaaaaaaaaaaaaaaaaaaaaaaaaaaaaaaaaaaaaaaaaaaaaaaaaaaaaugcaucccccccccccccccccccccccccccccccaaaggcucuuuucagagccaccagaauu

SEQ ID NO: 6721 - RNA, 1931 nt, Artificial Sequence
  mRNA product Design g-4 comprising derived and/or modified sequence from HRSV(A2)__F-del_DSCav1_mut6 (opt11)
gggagacuccugucgggcggaaguaggaggaguagaguuuaaaaacaguacucuuuuuccgguucgggacguaguugaagcaacgacaagccggauaaccgcucuugagacaggaagcuuaccauggaacuacucauccuaaaagcaaacgccaucaccaccauacuaaccgccgucaccuucugcuucgccucgggacaaaacaucaccgaagaguucuaccagucaacgugcuccgccgucucaaaaggcuaccuaggcgcccuccgcaccgggugguauaccuccgucauaacuaucgaacucucuaacaucaaagaaaacaaauguaacggcaccgacgccaaagucaaacuaaucaaacaagaacuggacaaauacaaaaacgccgucaccgaccuacaaaugcucaugugcuccacuccagccaccggcuccgguagcgcaaucgccucaggcguagcuguaugcaaaguccuccaccuagaaggcgaaguaaacaaaauaaaauccgcccuccucucaaccaacaaggccgucgucucacucucaaacggcgucuccguacucaccuuuaaaguccuagaccuuaaaaacuacaucgacaaacaacugcuaccaauccucaacaaacaaucaugcagcaucccaaacccggaaacagucauggaguuccaacagaaaaacaaccgacuccucgaaaucacccgcgaguucuccgucaacgccggagucaccacaccuguaagcacauacaugcuuacuaauuccgaacuccuuucacuaauaaacgacaugccaauaaccaacgaccaaaagaaacucauguccaacaacguacaaaucguacgccaacaauccuacuccaucaugugcaucaucaaagaagaaguccuggccuaugucguacaacucccccuuuacggugucaucgacacacccugcuggaaacuacacaccagcccccucugcacaacaaacaccaaagaaggcuccaacaucugccucacccguaccgaccgaggcugguacugcgacaacgccggcuccgucuccuucuucccccaagccgaaaccugcaaagucugcagcaaccgcgucuucugcgauaccaugaacucccucacacucccaucugaagucaaccucugcaacgucgauauuuucaauccaaaauacgacugcaaaaucaugacuagcaaaaccgacguuagcuccuccgucaucaccucccucggcgccauaguuucaugcuacggcaaaaccaaaugcaccgccuccaacaaaaacaaaggcaucauaaaaaccuucuccaacgggugcgacuacguaucuaauaaaggagucgacaccgucucaguaggaaacacccucuacuaugucaacaaacaagaaggccaaucacuauacguuaaaggcgaaccaaucaucaacuucuacgacccacucgucuuccccagcgacgaguuugacgccucaaucucgcaagucaaugaaaagauuaaccaaucccuagccuucauccgaaaaagugacgaacuccuccacaacguuaacgccggcaaaucuacaaccaacaucaugaucaccacuauaaucaucgucaucauagucauacuucucagccucaucgcagucggacuccuccuuuauugcaaggcacgauaaggacuaguaauaaggaaacuguaugaaugucugugggcaggaagugaagagauccuucuguaaagguuuuuggaauuaugucugcugaauaauaaacuuuuuugaaauaauaaaucugguagaaaaaugagaucuaaaaaaaaaaaaaaaaaaaaaaaaaaaaaaaaaaaaaaaaaaaaaaaaaaaaaaaaaaaaaaaaugcaucccccccccccccccccccccccccccccccaaaggcucuuuucagagccaccagaauu

SEQ ID NO: 6722 - RNA, 1907 nt, Artificial Sequence
  mRNA product Design g-5 comprising derived and/or modified sequence from HRSV(A2)__F-del_DSCav1_mut6 (opt1)
gggagacccgugacccggaaguuguacggcuacgcgacuuucccucccacaaacccucgcgcccuuccuuuccuacuugggcccggcagaaagcuuaccauggagcugcucauccugaaggccaacgccaucaccaccauccugacggcggugaccuucugcuucgccagcggccagaacaucaccgaggaguucuaccaguccacgugcagcgccgucuccaagggguaccucggcgcccugcggaccggcugguacaccuccgugaucaccaucgagcugagcaacaucaaggagaacaagugcaacgggaccgacgccaaggugaagcucaucaagcaggagcuggacaaguacaagaacgcggucacggaccugcagaugcugaugugcuccaccccggcaaccggcuccggcuccgccaucgcgagcggcgucgccgugugcaaggugcugcaccucgagggggaggucaacaagaucaagagcgcccugcuguccaccaacaaggccguggugagccucuccaacggcgucagcgugcugaccuucaaggugcuggaccucaagaacuacaucgacaagcagcugcugcccauccugaacaagcagagcugcuccauccccaaccccgagacggugauggaguuccagcagaagaacaaccggcuccuggagaucacccgcgaguucagcgugaacgccggggucaccacccccguguccacguacaugcugaccaacagcgagcuccugucccugaucaacgacaugccgaucaccaacgaccagaagaagcucaugagcaacaacgugcagaucguccggcagcaguccuacagcaucaugugcaucaucaaggaggaggugcuggcguacgugguccagcugccccucuacggcgugaucgacacccccugcuggaagcugcacacgagcccccugugcaccaccaacaccaaggagggguccaacaucugccucacgcgcaccgaccggggcugguacugcgacaacgccggcagcgucuccuucuucccgcaggccgagaccugcaaggugugcagcaaccgcguguucugcgacaccaugaacucccugacgcugcccagcgagguaaaccucugcaacgucgacaucuucaaccccaaguacgacugcaagaucaugaccuccaagaccgacgugagcuccagcgugaucaccucccugggggccaucgucagcugcuacggcaagacgaagugcaccgccagcaacaagaacaaggggaucaucaagaccuucuccaacggcugcgacuacgugagcaacaagggcguggacaccguguccgucgggaacacccuguacuacgugaacaagcaggagggccagagccucuacgugaagggggagcccaucaucaacuucuacgacccgcuggucuuccccuccgacgaguucgacgcgagcaucucccaggugaacgagaagaucaaccagagccuggccuucauccgcaaguccgacgagcugcuccacaacgugaacgccggcaagagcacgaccaacaucaugaucaccaccaucaucaucgucaucaucgugauccugcugucccucaucgccguggggcugcugcucuacugcaaggcccggugaggacuaguaauaaggaaacuguaugaaugucugugggcaggaagugaagagauccuucuguaaagguuuuuggaauuaugucugcugaauaauaaacuuuuuugaaauaauaaaucugguagaaaaaugagaucuaaaaaaaaaaaaaaaaaaaaaaaaaaaaaaaaaaaaaaaaaaaaaaaaaaaaaaaaaaaaaaaaugcaucccccccccccccccccccccccccccccccaaaggcucuuuucagagccaccagaauu

SEQ ID NO: 6723 - RNA, 1907 nt, Artificial Sequence
  mRNA product Design g-5 comprising derived and/or modified sequence from HRSV(A2)__F-del_DSCav1_mut6 (opt1)
gggagacccgugacccggaaguuguacggcuacgcgacuuucccucccacaaacccucgcgcccuuccuuuccuacuugggcccggcagaaagcuuaccauggagcugcucauccugaaggccaacgccaucaccaccauccugacggcggugaccuucugcuucgccagcggccagaacaucaccgaggaguucuaccaguccacgugcagcgccgucuccaagggguaccucggcgcccugcgcaccgggugguacaccagcgugaucaccaucgagcuguccaacaucaaggagaacaagugcaacggcaccgacgccaaggugaagcucaucaagcaggagcuggacaaguacaagaacgcggucacggaccugcagaugcucaugugcagcacccccgccaccggguccggcagcgccaucgccuccggcguggcggugugcaagguccugcaccuggagggggaggugaacaagaucaagagcgcccuccuguccaccaacaaggccguggucagccuguccaacggcgugagcgugcucacguucaagguccuggaccugaagaacuacaucgacaagcagcuccugccgauccugaacaagcaguccugcagcauccccaaccccgagaccgugauggaguuccagcagaagaacaaccggcuccuggagaucacccgcgaguucuccgugaacgccggggucaccacgcccgugagcaccuacaugcugaccaacuccgagcuccugagccugaucaacgacaugccgaucaccaacgaccagaagaagcucaugagcaacaacgugcagaucguccggcagcaguccuacagcaucaugugcaucaucaaggaggaggugcuggccuacgugguccagcugccccucuacggcgugaucgacacgcccugcuggaagcugcacaccagcccccugugcaccaccaacacgaaggaggggagcaacaucugccucacccgcaccgaccggggcugguacugcgacaacgcgggcuccgugagcuucuucccgcaggccgagaccugcaaggucugcuccaaccgcguguucugcgacacgaugaacagccugacccugcccuccgaggucaaccucugcaacguggacaucuucaaccccaaguacgacugcaagaucaugaccagcaagaccgacguguccagcuccgucaucacgagccugggggccaucguguccugcuacggcaagaccaagugcaccgccagcaacaagaacaaggggaucaucaagaccuucuccaacggcugcgacuacgugagcaacaagggcgucgacacgguguccguggggaacacccuguacuacgucaacaagcaggagggccagagccucuacgugaagggggagcccaucaucaacuucuacgacccgcugguguuccccagcgacgaguucgacgccuccaucagccaggucaacgagaagaucaaccagucccuggcguucauccggaaguccgacgagcuccugcacaacgugaacgccggcaaguccaccaccaacaucaugaucaccacgaucaucaucgugaucaucgucauccugcucagccugaucgccguggggcugcuccuguacugcaaggcccgcugaggacuaguaauaaggaaacuguaugaaugucugugggcaggaagugaagagauccuucuguaaagguuuuuggaauuaugucugcugaauaauaaacuuuuuugaaauaauaaaucugguagaaaaaugagaucuaaaaaaaaaaaaaaaaaaaaaaaaaaaaaaaaaaaaaaaaaaaaaaaaaaaaaaaaaaaaaaaaugcaucccccccccccccccccccccccccccccccaaaggcucuuuucagagccaccagaauu

SEQ ID NO: 6724 - RNA, 1907 nt, Artificial Sequence
  mRNA product Design g-5 comprising derived and/or modified sequence from HRSV(A2)__F-del_DSCav1_mut6 (opt2)
gggagacccgugacccggaaguuguacggcuacgcgacuuucccucccacaaacccucgcgcccuuccuuuccuacuugggcccggcagaaagcuuaccauggagcuccucauccucaaggccaacgccaucaccaccauccucaccgccgucaccuucugcuucgccuccggccagaacaucaccgaggaguucuaccaguccaccugcuccgccgucuccaagggcuaccucggcgcccuccgcaccggcugguacaccuccgucaucaccaucgagcucuccaacaucaaggagaacaagugcaacggcaccgacgccaaggucaagcucaucaagcaggagcucgacaaguacaagaacgccgucaccgaccuccagaugcucaugugcuccacccccgccaccggcuccggcuccgccaucgccuccggcgucgccgucugcaagguccuccaccucgagggcgaggucaacaagaucaaguccgcccuccucuccaccaacaaggccgucgucucccucuccaacggcgucuccguccucaccuucaagguccucgaccucaagaacuacaucgacaagcagcuccuccccauccucaacaagcaguccugcuccauccccaaccccgagaccgucauggaguuccagcagaagaacaaccgccuccucgagaucacccgcgaguucuccgucaacgccggcgucaccacccccgucuccaccuacaugcucaccaacuccgagcuccucucccucaucaacgacaugcccaucaccaacgaccagaagaagcucauguccaacaacguccagaucguccgccagcaguccuacuccaucaugugcaucaucaaggaggagguccucgccuacgucguccagcucccccucuacggcgucaucgacacccccugcuggaagcuccacaccuccccccucugcaccaccaacaccaaggagggcuccaacaucugccucacccgcaccgaccgcggcugguacugcgacaacgccggcuccgucuccuucuucccccaggccgagaccugcaaggucugcuccaaccgcgucuucugcgacaccaugaacucccucacccuccccuccgaggucaaccucugcaacgucgacaucuucaaccccaaguacgacugcaagaucaugaccuccaagaccgacgucuccuccuccgucaucaccucccucggcgccaucgucuccugcuacggcaagaccaagugcaccgccuccaacaagaacaagggcaucaucaagaccuucuccaacggcugcgacuacgucuccaacaagggcgucgacaccgucuccgucggcaacacccucuacuacgucaacaagcaggagggccagucccucuacgucaagggcgagcccaucaucaacuucuacgacccccucgucuuccccuccgacgaguucgacgccuccaucucccaggucaacgagaagaucaaccagucccucgccuucauccgcaaguccgacgagcuccuccacaacgucaacgccggcaaguccaccaccaacaucaugaucaccaccaucaucaucgucaucaucgucauccuccucucccucaucgccgucggccuccuccucuacugcaaggcccgcugaggacuaguaauaaggaaacuguaugaaugucugugggcaggaagugaagagauccuucuguaaagguuuuuggaauuaugucugcugaauaauaaacuuuuuugaaauaauaaaucugguagaaaaaugagaucuaaaaaaaaaaaaaaaaaaaaaaaaaaaaaaaaaaaaaaaaaaaaaaaaaaaaaaaaaaaaaaaaugcaucccccccccccccccccccccccccccccccaaaggcucuuuucagagccaccagaauu

SEQ ID NO: 6725 - RNA, 1907 nt, Artificial Sequence
  mRNA product Design g-5 comprising derived and/or modified sequence from HRSV(A2)__F-del_DSCav1_mut6 (opt3)
gggagacccgugacccggaaguuguacggcuacgcgacuuucccucccacaaacccucgcgcccuuccuuuccuacuugggcccggcagaaagcuuaccauggagcugcucauccuuaaggccaacgcuauuaccacaauacugacugcagugacguucugcuuugccagcggccagaauaucaccgaagaguucuaccaauccacauguucugcggucucaaaaggguauuugggagcuuuaagaacugguugguacaccaguguuauuacaaucgaacugagcaacauuaaggagaauaaaugcaacggcaccgacgccaaggugaaacuaaucaagcaggaacucgauaaguauaaaaaugcaguaacugaccugcagaugcuuauguguuccacacccgccaccgggucuggaucggcuauagcaucaggcguggccgucugcaaggugcugcacuuggagggugagguuaacaaaaucaagagcgcucuccugaguacgaauaaagccguggucucccugucuaacggggugagcguacucacuuuuaagguuuuagaucugaagaauuacauugacaaacagcuuuugccuauccugaacaagcaauccuguucaauuccaaauccggaaaccgugauggaguuccagcagaaaaacaauaggcuacucgaaaucacacgggaguuuagugucaacgcgggagugacuacccccgugagcacauauaugcugaccaauucugagcuucuguccuugauaaacgauaugccuauuacgaacgaccagaagaaacucaugucaaauaacguccaaaucguucgccagcagagcuacaguauuaugugcaucaucaaggaagaggugcuggcauauguagugcaguuaccacuguacggcgucauugauacucccuguuggaaacuccauacaucuccucuuugcaccacuaauacaaaggaaggcuccaacauaugucugacccgaacggaccgugggugguacugcgauaaugccggaagcgugucguucuuuccacaagcugagaccuguaagguuugcucuaacagaguguucugcgacacaaugaacuccuugacucuacccucagaagucaaucuguguaauguggauaucuuuaacccuaaauaugacugcaagauuaugaccaguaaaacagauguaagcuccucuguuaucacuagccucggugccauagugucauguuacggcaagaccaaaugcacagcaaguaauaagaacaaggggauuaucaaaaccuucuccaauggaugugacuaugucagcaacaagggcguggacacugucucuguggguaauacgcuguacuauguuaacaaacaggaggggcagucacuuuacgugaagggagagccaaucauuaacuuuuaugauccgcugguauuccccagugacgaauuugaugcuagcaucucccaagucaaugagaaaauuaaccagucuuuggccuucauaaggaagucggacgaacuccugcacaaugugaacgcgggcaagagcacaaccaauaucaugauuacuaccaucaucauuguuauaaucgugauuuuacugucccuaaucgccgucggccuccugcuuuacugcaaagcacggugaggacuaguaauaaggaaacuguaugaaugucugugggcaggaagugaagagauccuucuguaaagguuuuuggaauuaugucugcugaauaauaaacuuuuuugaaauaauaaaucugguagaaaaaugagaucuaaaaaaaaaaaaaaaaaaaaaaaaaaaaaaaaaaaaaaaaaaaaaaaaaaaaaaaaaaaaaaaaugcaucccccccccccccccccccccccccccccccaaaggcucuuuucagagccaccagaauu

SEQ ID NO: 6726 - RNA, 1907 nt, Artificial Sequence
  mRNA product Design g-5 comprising derived and/or modified sequence from HRSV(A2)__F-del_DSCav1_mut6 (opt4)
gggagacccgugacccggaaguuguacggcuacgcgacuuucccucccacaaacccucgcgcccuuccuuuccuacuugggcccggcagaaagcuuaccauggagcugcugauccugaaggccaacgccaucaccaccauccugaccgccgugaccuucugcuucgccagcggccagaacaucaccgaggaguucuaccagagcaccugcagcgccgugagcaagggcuaccugggcgcccugagaaccggcugguacaccagcgugaucaccaucgagcugagcaacaucaaggagaacaagugcaacggcaccgacgccaaggugaagcugaucaagcaggagcuggacaaguacaagaacgccgugaccgaccugcagaugcugaugugcagcacccccgccaccggcagcggcagcgccaucgccagcggcguggccgugugcaaggugcugcaccuggagggcgaggugaacaagaucaagagcgcccugcugagcaccaacaaggccguggugagccugagcaacggcgugagcgugcugaccuucaaggugcuggaccugaagaacuacaucgacaagcagcugcugcccauccugaacaagcagagcugcagcauccccaaccccgagaccgugauggaguuccagcagaagaacaacagacugcuggagaucaccagagaguucagcgugaacgccggcgugaccacccccgugagcaccuacaugcugaccaacagcgagcugcugagccugaucaacgacaugcccaucaccaacgaccagaagaagcugaugagcaacaacgugcagaucgugagacagcagagcuacagcaucaugugcaucaucaaggaggaggugcuggccuacguggugcagcugccccuguacggcgugaucgacacccccugcuggaagcugcacaccagcccccugugcaccaccaacaccaaggagggcagcaacaucugccugaccagaaccgacagaggcugguacugcgacaacgccggcagcgugagcuucuucccccaggccgagaccugcaaggugugcagcaacagaguguucugcgacaccaugaacagccugacccugcccagcgaggugaaccugugcaacguggacaucuucaaccccaaguacgacugcaagaucaugaccagcaagaccgacgugagcagcagcgugaucaccagccugggcgccaucgugagcugcuacggcaagaccaagugcaccgccagcaacaagaacaagggcaucaucaagaccuucagcaacggcugcgacuacgugagcaacaagggcguggacaccgugagcgugggcaacacccuguacuacgugaacaagcaggagggccagagccuguacgugaagggcgagcccaucaucaacuucuacgacccccugguguuccccagcgacgaguucgacgccagcaucagccaggugaacgagaagaucaaccagagccuggccuucaucagaaagagcgacgagcugcugcacaacgugaacgccggcaagagcaccaccaacaucaugaucaccaccaucaucaucgugaucaucgugauccugcugagccugaucgccgugggccugcugcuguacugcaaggccagaugaggacuaguaauaaggaaacuguaugaaugucugugggcaggaagugaagagauccuucuguaaagguuuuuggaauuaugucugcugaauaauaaacuuuuuugaaauaauaaaucugguagaaaaaugagaucuaaaaaaaaaaaaaaaaaaaaaaaaaaaaaaaaaaaaaaaaaaaaaaaaaaaaaaaaaaaaaaaaugcaucccccccccccccccccccccccccccccccaaaggcucuuuucagagccaccagaauu

SEQ ID NO: 6727 - RNA, 1907 nt, Artificial Sequence
  mRNA product Design g-5 comprising derived and/or modified sequence from HRSV(A2)__F-del_DSCav1_mut6 (opt5)
gggagacccgugacccggaaguuguacggcuacgcgacuuucccucccacaaacccucgcgcccuuccuuuccuacuugggcccggcagaaagcuuaccauggagcugcucauccugaaggccaacgcuauuaccacaauccuuacggccgugaccuucugcuuugcgagcggccagaauauuacagaagaguucuaccaauccaccuguucugcugucagcaaaggguaucugggagcccucagaacaggcugguacaccuccguuaucacaauugaacugucuaacaucaaggagaauaaaugcaacgggaccgacgccaaggugaaacuuaucaagcaggaacuggauaaguauaaaaaugcugugacggaccuccagaugcugauguguagcacccccgccacaggauccggcucugcuauugccagcggggucgcggugugcaagguucugcaccucgagggagaggugaacaaaaucaaguccgcccugcuuagcaccaauaaagcugucgugucucuguccaacggcguuagcgugcucacauuuaagguccuggaucuuaagaauuacauugacaaacagcugcucccuauccugaacaagcaaucuuguuccauuccgaaucccgaaaccgugauggaguuccagcagaaaaacaaucggcugcucgaaaucacgcgcgaguuuagcgugaacgccggcgucacaaccccuguuucuacauauaugcugaccaauuccgagcuucugagccucauuaacgauaugcccaucaccaacgaccagaagaaacugauguccaauaacgugcaaaucgugagacagcagucuuacagcauuaugugcaucauuaaggaagagguccuugcuuaugugguucagcugccucucuacggggugaucgauacacccuguuggaaacugcauacguccccucugugcaccacaaauaccaaggaaggaagcaacauuugucucacacggaccgaccgcggcugguacugcgauaaugccgggucugucuccuucuuuccgcaagcggagacguguaaggugugcagcaacagaguuuucugcgacacaaugaacucucugacccuucccagcgaagugaaucuguguaaugucgauaucuuuaacccuaaauaugacugcaagaucaugaccuccaaaacagaugugucuagcuccgucauuaccagccucggagccaucgugucuuguuacggcaagacaaaaugcacggcuuccaauaagaacaaggggauuaucaaaaccuucagcaauggaugugacuauguuucuaacaagggcguggacacagucuccgugggcaauacccuguacuauguuaacaaacaggaggggcagagccuuuacgugaagggagagcccauuaucaacuuuuaugauccucuggucuuccccuccgacgaauuugaugccucuaucagccaagugaaugagaaaauuaaccagucccucgcuuucauccggaagucugacgaacugcugcacaaugugaacgccggcaagagcacaaccaauauuaugaucacgaccauuaucauuguuaucaucgucauucuccugucccuuaucgccguggggcugcuccuguacugcaaagcucgcugaggacuaguaauaaggaaacuguaugaaugucugugggcaggaagugaagagauccuucuguaaagguuuuuggaauuaugucugcugaauaauaaacuuuuuugaaauaauaaaucugguagaaaaaugagaucuaaaaaaaaaaaaaaaaaaaaaaaaaaaaaaaaaaaaaaaaaaaaaaaaaaaaaaaaaaaaaaaaugcaucccccccccccccccccccccccccccccccaaaggcucuuuucagagccaccagaauu

SEQ ID NO: 6728 - RNA, 1907 nt, Artificial Sequence
  mRNA product Design g-5 comprising derived and/or modified sequence from HRSV(A2)__F-del_DSCav1_mut6 (opt6)
gggagacccgugacccggaaguuguacggcuacgcgacuuucccucccacaaacccucgcgcccuuccuuuccuacuugggcccggcagaaagcuuaccauggaacuacucauauuaaaagcaaacgcaauaacaacgauauuaacagcuguaacauucugcuuugcaucaggccaaaauaucaccgaagaauuuuaucaaagcacaugcucugcaguauccaaaggauacuuaggagcauuaagaacaggcugguacacauccguaauaacaauagaacuaucaaacaucaaagaaaacaaaugcaacggcacagacgccaaaguaaaacucauaaaacaagaacuagacaaauauaaaaacgcaguaacagaucuacaaaugcucaugugcuccacaccagcaaccggaucugguucagccauagcauccggcguagccgucugcaaaguauuacaccucgaaggagaaguaaacaaaauaaaaucugcccuauuaucuacaaauaaagccguaguaagucuaaguaacggaguaucaguacuaacauuuaaaguccuagaccugaaaaacuauaucgacaaacaacuauuaccaauacuaaacaaacaauccuguuccaucccuaacccagaaacaguuauggaauuucaacaaaaaaauaaccgccuuuuagaaauaacuagagaauuuucaguaaacgcaggaguuacaacaccaguaucaacauacaugcuaacaaauucagaauuauuaucccuuauaaaugacaugccuaucacaaacgaucaaaaaaaauuaauguccaacaacguacaaauaguaagacaacaaucauauuccaucaugugcaucauaaaagaagaaguccucgcauacguagugcaacuaccacuauacggagucauagauacacccuguuggaaacuucacacaucuccacuaugcacaacaaacacgaaagaaggauccaacauaugccuaacacgaacagacagaggaugguauugcgacaacgcuggaagugugagcuucuucccucaagcagaaacuugcaaaguaugcagcaaucguguauucugcgacacaaugaacucauuaacacucccaagcgaaguaaaccucugcaauguagacaucuuuaauccaaaauacgauuguaaaauaaugacuucaaaaacagacgucucaucaucuguaauaacaucuuuaggagcaauaguuucuugcuacgguaaaacaaaaugcaccgcauccaacaaaaacaaaggaauaauaaaaacauucucuaacggcugcgauuacguaucuaacaaaggaguugacacagucucaguaggaaacacacuauacuacguaaacaaacaagaaggacaaagccuauacguaaaaggagaaccaauaauaaacuucuaugacccauuaguauuuccaagcgaugaauuugacgcuucaauaucacaagucaaugaaaaaauaaaucagagcuuagcauucauaagaaaaucugaugaacuacuacacaauguaaaugcaggaaaauccacuaccaacauaaugauuaccacaauuauaauaguuaucauaguaauacuauuaucacuaauagccguuggauuacuacuauacugcaaagcaagauaaggacuaguaauaaggaaacuguaugaaugucugugggcaggaagugaagagauccuucuguaaagguuuuuggaauuaugucugcugaauaauaaacuuuuuugaaauaauaaaucugguagaaaaaugagaucuaaaaaaaaaaaaaaaaaaaaaaaaaaaaaaaaaaaaaaaaaaaaaaaaaaaaaaaaaaaaaaaaugcaucccccccccccccccccccccccccccccccaaaggcucuuuucagagccaccagaauu

SEQ ID NO: 6729 - RNA, 1907 nt, Artificial Sequence
  mRNA product Design g-5 comprising derived and/or modified sequence from HRSV(A2)__F-del_DSCav1_mut6 (opt11)
gggagacccgugacccggaaguuguacggcuacgcgacuuucccucccacaaacccucgcgcccuuccuuuccuacuugggcccggcagaaagcuuaccauggaacuacucauccuaaaagcaaacgccaucaccaccauacuaaccgccgucaccuucugcuucgccucgggacaaaacaucaccgaagaguucuaccagucaacgugcuccgccgucucaaaaggcuaccuaggcgcccuccgcaccgggugguauaccuccgucauaacuaucgaacucucuaacaucaaagaaaacaaauguaacggcaccgacgccaaagucaaacuaaucaaacaagaacuggacaaauacaaaaacgccgucaccgaccuacaaaugcucaugugcuccacuccagccaccggcuccgguagcgcaaucgccucaggcguagcuguaugcaaaguccuccaccuagaaggcgaaguaaacaaaauaaaauccgcccuccucucaaccaacaaggccgucgucucacucucaaacggcgucuccguacucaccuuuaaaguccuagaccuuaaaaacuacaucgacaaacaacugcuaccaauccucaacaaacaaucaugcagcaucccaaacccggaaacagucauggaguuccaacagaaaaacaaccgacuccucgaaaucacccgcgaguucuccgucaacgccggagucaccacaccuguaagcacauacaugcuuacuaauuccgaacuccuuucacuaauaaacgacaugccaauaaccaacgaccaaaagaaacucauguccaacaacguacaaaucguacgccaacaauccuacuccaucaugugcaucaucaaagaagaaguccuggccuaugucguacaacucccccuuuacggugucaucgacacacccugcuggaaacuacacaccagcccccucugcacaacaaacaccaaagaaggcuccaacaucugccucacccguaccgaccgaggcugguacugcgacaacgccggcuccgucuccuucuucccccaagccgaaaccugcaaagucugcagcaaccgcgucuucugcgauaccaugaacucccucacacucccaucugaagucaaccucugcaacgucgauauuuucaauccaaaauacgacugcaaaaucaugacuagcaaaaccgacguuagcuccuccgucaucaccucccucggcgccauaguuucaugcuacggcaaaaccaaaugcaccgccuccaacaaaaacaaaggcaucauaaaaaccuucuccaacgggugcgacuacguaucuaauaaaggagucgacaccgucucaguaggaaacacccucuacuaugucaacaaacaagaaggccaaucacuauacguuaaaggcgaaccaaucaucaacuucuacgacccacucgucuuccccagcgacgaguuugacgccucaaucucgcaagucaaugaaaagauuaaccaaucccuagccuucauccgaaaaagugacgaacuccuccacaacguuaacgccggcaaaucuacaaccaacaucaugaucaccacuauaaucaucgucaucauagucauacuucucagccucaucgcagucggacuccuccuuuauugcaaggcacgauaaggacuaguaauaaggaaacuguaugaaugucugugggcaggaagugaagagauccuucuguaaagguuuuuggaauuaugucugcugaauaauaaacuuuuuugaaauaauaaaucugguagaaaaaugagaucuaaaaaaaaaaaaaaaaaaaaaaaaaaaaaaaaaaaaaaaaaaaaaaaaaaaaaaaaaaaaaaaaugcaucccccccccccccccccccccccccccccccaaaggcucuuuucagagccaccagaauu

SEQ ID NO: 6730 - RNA, 1923 nt, Artificial Sequence
  mRNA product Design h-1 comprising derived and/or modified sequence from HRSV(A2)__F-del_DSCav1_mut6 (opt1)
gggagacccgugacccggaaguuguacggcuacgcgacuuucccucccacaaacccucgcgcccuuccuuuccuacuugggcccggcagaaagcuuaccauggagcugcucauccugaaggccaacgccaucaccaccauccugacggcggugaccuucugcuucgccagcggccagaacaucaccgaggaguucuaccaguccacgugcagcgccgucuccaagggguaccucggcgcccugcggaccggcugguacaccuccgugaucaccaucgagcugagcaacaucaaggagaacaagugcaacgggaccgacgccaaggugaagcucaucaagcaggagcuggacaaguacaagaacgcggucacggaccugcagaugcugaugugcuccaccccggcaaccggcuccggcuccgccaucgcgagcggcgucgccgugugcaaggugcugcaccucgagggggaggucaacaagaucaagagcgcccugcuguccaccaacaaggccguggugagccucuccaacggcgucagcgugcugaccuucaaggugcuggaccucaagaacuacaucgacaagcagcugcugcccauccugaacaagcagagcugcuccauccccaaccccgagacggugauggaguuccagcagaagaacaaccggcuccuggagaucacccgcgaguucagcgugaacgccggggucaccacccccguguccacguacaugcugaccaacagcgagcuccugucccugaucaacgacaugccgaucaccaacgaccagaagaagcucaugagcaacaacgugcagaucguccggcagcaguccuacagcaucaugugcaucaucaaggaggaggugcuggcguacgugguccagcugccccucuacggcgugaucgacacccccugcuggaagcugcacacgagcccccugugcaccaccaacaccaaggagggguccaacaucugccucacgcgcaccgaccggggcugguacugcgacaacgccggcagcgucuccuucuucccgcaggccgagaccugcaaggugugcagcaaccgcguguucugcgacaccaugaacucccugacgcugcccagcgagguaaaccucugcaacgucgacaucuucaaccccaaguacgacugcaagaucaugaccuccaagaccgacgugagcuccagcgugaucaccucccugggggccaucgucagcugcuacggcaagacgaagugcaccgccagcaacaagaacaaggggaucaucaagaccuucuccaacggcugcgacuacgugagcaacaagggcguggacaccguguccgucgggaacacccuguacuacgugaacaagcaggagggccagagccucuacgugaagggggagcccaucaucaacuucuacgacccgcuggucuuccccuccgacgaguucgacgcgagcaucucccaggugaacgagaagaucaaccagagccuggccuucauccgcaaguccgacgagcugcuccacaacgugaacgccggcaagagcacgaccaacaucaugaucaccaccaucaucaucgucaucaucgugauccugcugucccucaucgccguggggcugcugcucuacugcaaggcccggugaggacuaguacuggcugcaucucccuuuccucuguccuccauccuucucccaggauggugaagggggaccugguacccagugauccccaccccaggauccuaaaucaugacuuaccugcuaauaaaaacucauuggaaaagugagaagaucuaaaaaaaaaaaaaaaaaaaaaaaaaaaaaaaaaaaaaaaaaaaaaaaaaaaaaaaaaaaaaaaaugcaucccccccccccccccccccccccccccccccaaaggcucuuuucagagccaccagaauu

SEQ ID NO: 6731 - RNA, 1923 nt, Artificial Sequence
  mRNA product Design h-1 comprising derived and/or modified sequence from HRSV(A2)__F-del_DSCav1_mut6 (opt1)
gggagacccgugacccggaaguuguacggcuacgcgacuuucccucccacaaacccucgcgcccuuccuuuccuacuugggcccggcagaaagcuuaccauggagcugcucauccugaaggccaacgccaucaccaccauccugacggcggugaccuucugcuucgccagcggccagaacaucaccgaggaguucuaccaguccacgugcagcgccgucuccaagggguaccucggcgcccugcgcaccgggugguacaccagcgugaucaccaucgagcuguccaacaucaaggagaacaagugcaacggcaccgacgccaaggugaagcucaucaagcaggagcuggacaaguacaagaacgcggucacggaccugcagaugcucaugugcagcacccccgccaccggguccggcagcgccaucgccuccggcguggcggugugcaagguccugcaccuggagggggaggugaacaagaucaagagcgcccuccuguccaccaacaaggccguggucagccuguccaacggcgugagcgugcucacguucaagguccuggaccugaagaacuacaucgacaagcagcuccugccgauccugaacaagcaguccugcagcauccccaaccccgagaccgugauggaguuccagcagaagaacaaccggcuccuggagaucacccgcgaguucuccgugaacgccggggucaccacgcccgugagcaccuacaugcugaccaacuccgagcuccugagccugaucaacgacaugccgaucaccaacgaccagaagaagcucaugagcaacaacgugcagaucguccggcagcaguccuacagcaucaugugcaucaucaaggaggaggugcuggccuacgugguccagcugccccucuacggcgugaucgacacgcccugcuggaagcugcacaccagcccccugugcaccaccaacacgaaggaggggagcaacaucugccucacccgcaccgaccggggcugguacugcgacaacgcgggcuccgugagcuucuucccgcaggccgagaccugcaaggucugcuccaaccgcguguucugcgacacgaugaacagccugacccugcccuccgaggucaaccucugcaacguggacaucuucaaccccaaguacgacugcaagaucaugaccagcaagaccgacguguccagcuccgucaucacgagccugggggccaucguguccugcuacggcaagaccaagugcaccgccagcaacaagaacaaggggaucaucaagaccuucuccaacggcugcgacuacgugagcaacaagggcgucgacacgguguccguggggaacacccuguacuacgucaacaagcaggagggccagagccucuacgugaagggggagcccaucaucaacuucuacgacccgcugguguuccccagcgacgaguucgacgccuccaucagccaggucaacgagaagaucaaccagucccuggcguucauccggaaguccgacgagcuccugcacaacgugaacgccggcaaguccaccaccaacaucaugaucaccacgaucaucaucgugaucaucgucauccugcucagccugaucgccguggggcugcuccuguacugcaaggcccgcugaggacuaguacuggcugcaucucccuuuccucuguccuccauccuucucccaggauggugaagggggaccugguacccagugauccccaccccaggauccuaaaucaugacuuaccugcuaauaaaaacucauuggaaaagugagaagaucuaaaaaaaaaaaaaaaaaaaaaaaaaaaaaaaaaaaaaaaaaaaaaaaaaaaaaaaaaaaaaaaaugcaucccccccccccccccccccccccccccccccaaaggcucuuuucagagccaccagaauu

SEQ ID NO: 6732 - RNA, 1923 nt, Artificial Sequence
  mRNA product Design h-1 comprising derived and/or modified sequence from HRSV(A2)__F-del_DSCav1_mut6 (opt2)
gggagacccgugacccggaaguuguacggcuacgcgacuuucccucccacaaacccucgcgcccuuccuuuccuacuugggcccggcagaaagcuuaccauggagcuccucauccucaaggccaacgccaucaccaccauccucaccgccgucaccuucugcuucgccuccggccagaacaucaccgaggaguucuaccaguccaccugcuccgccgucuccaagggcuaccucggcgcccuccgcaccggcugguacaccuccgucaucaccaucgagcucuccaacaucaaggagaacaagugcaacggcaccgacgccaaggucaagcucaucaagcaggagcucgacaaguacaagaacgccgucaccgaccuccagaugcucaugugcuccacccccgccaccggcuccggcuccgccaucgccuccggcgucgccgucugcaagguccuccaccucgagggcgaggucaacaagaucaaguccgcccuccucuccaccaacaaggccgucgucucccucuccaacggcgucuccguccucaccuucaagguccucgaccucaagaacuacaucgacaagcagcuccuccccauccucaacaagcaguccugcuccauccccaaccccgagaccgucauggaguuccagcagaagaacaaccgccuccucgagaucacccgcgaguucuccgucaacgccggcgucaccacccccgucuccaccuacaugcucaccaacuccgagcuccucucccucaucaacgacaugcccaucaccaacgaccagaagaagcucauguccaacaacguccagaucguccgccagcaguccuacuccaucaugugcaucaucaaggaggagguccucgccuacgucguccagcucccccucuacggcgucaucgacacccccugcuggaagcuccacaccuccccccucugcaccaccaacaccaaggagggcuccaacaucugccucacccgcaccgaccgcggcugguacugcgacaacgccggcuccgucuccuucuucccccaggccgagaccugcaaggucugcuccaaccgcgucuucugcgacaccaugaacucccucacccuccccuccgaggucaaccucugcaacgucgacaucuucaaccccaaguacgacugcaagaucaugaccuccaagaccgacgucuccuccuccgucaucaccucccucggcgccaucgucuccugcuacggcaagaccaagugcaccgccuccaacaagaacaagggcaucaucaagaccuucuccaacggcugcgacuacgucuccaacaagggcgucgacaccgucuccgucggcaacacccucuacuacgucaacaagcaggagggccagucccucuacgucaagggcgagcccaucaucaacuucuacgacccccucgucuuccccuccgacgaguucgacgccuccaucucccaggucaacgagaagaucaaccagucccucgccuucauccgcaaguccgacgagcuccuccacaacgucaacgccggcaaguccaccaccaacaucaugaucaccaccaucaucaucgucaucaucgucauccuccucucccucaucgccgucggccuccuccucuacugcaaggcccgcugaggacuaguacuggcugcaucucccuuuccucuguccuccauccuucucccaggauggugaagggggaccugguacccagugauccccaccccaggauccuaaaucaugacuuaccugcuaauaaaaacucauuggaaaagugagaagaucuaaaaaaaaaaaaaaaaaaaaaaaaaaaaaaaaaaaaaaaaaaaaaaaaaaaaaaaaaaaaaaaaugcaucccccccccccccccccccccccccccccccaaaggcucuuuucagagccaccagaauu

SEQ ID NO: 6733 - RNA, 1923 nt, Artificial Sequence
  mRNA product Design h-1 comprising derived and/or modified sequence from HRSV(A2)__F-del_DSCav1_mut6 (opt3)
gggagacccgugacccggaaguuguacggcuacgcgacuuucccucccacaaacccucgcgcccuuccuuuccuacuugggcccggcagaaagcuuaccauggagcugcucauccuuaaggccaacgcuauuaccacaauacugacugcagugacguucugcuuugccagcggccagaauaucaccgaagaguucuaccaauccacauguucugcggucucaaaaggguauuugggagcuuuaagaacugguugguacaccaguguuauuacaaucgaacugagcaacauuaaggagaauaaaugcaacggcaccgacgccaaggugaaacuaaucaagcaggaacucgauaaguauaaaaaugcaguaacugaccugcagaugcuuauguguuccacacccgccaccgggucuggaucggcuauagcaucaggcguggccgucugcaaggugcugcacuuggagggugagguuaacaaaaucaagagcgcucuccugaguacgaauaaagccguggucucccugucuaacggggugagcguacucacuuuuaagguuuuagaucugaagaauuacauugacaaacagcuuuugccuauccugaacaagcaauccuguucaauuccaaauccggaaaccgugauggaguuccagcagaaaaacaauaggcuacucgaaaucacacgggaguuuagugucaacgcgggagugacuacccccgugagcacauauaugcugaccaauucugagcuucuguccuugauaaacgauaugccuauuacgaacgaccagaagaaacucaugucaaauaacguccaaaucguucgccagcagagcuacaguauuaugugcaucaucaaggaagaggugcuggcauauguagugcaguuaccacuguacggcgucauugauacucccuguuggaaacuccauacaucuccucuuugcaccacuaauacaaaggaaggcuccaacauaugucugacccgaacggaccgugggugguacugcgauaaugccggaagcgugucguucuuuccacaagcugagaccuguaagguuugcucuaacagaguguucugcgacacaaugaacuccuugacucuacccucagaagucaaucuguguaauguggauaucuuuaacccuaaauaugacugcaagauuaugaccaguaaaacagauguaagcuccucuguuaucacuagccucggugccauagugucauguuacggcaagaccaaaugcacagcaaguaauaagaacaaggggauuaucaaaaccuucuccaauggaugugacuaugucagcaacaagggcguggacacugucucuguggguaauacgcuguacuauguuaacaaacaggaggggcagucacuuuacgugaagggagagccaaucauuaacuuuuaugauccgcugguauuccccagugacgaauuugaugcuagcaucucccaagucaaugagaaaauuaaccagucuuuggccuucauaaggaagucggacgaacuccugcacaaugugaacgcgggcaagagcacaaccaauaucaugauuacuaccaucaucauuguuauaaucgugauuuuacugucccuaaucgccgucggccuccugcuuuacugcaaagcacggugaggacuaguacuggcugcaucucccuuuccucuguccuccauccuucucccaggauggugaagggggaccugguacccagugauccccaccccaggauccuaaaucaugacuuaccugcuaauaaaaacucauuggaaaagugagaagaucuaaaaaaaaaaaaaaaaaaaaaaaaaaaaaaaaaaaaaaaaaaaaaaaaaaaaaaaaaaaaaaaaugcaucccccccccccccccccccccccccccccccaaaggcucuuuucagagccaccagaauu

SEQ ID NO: 6734 - RNA, 1923 nt, Artificial Sequence
  mRNA product Design h-1 comprising derived and/or modified sequence from HRSV(A2)__F-del_DSCav1_mut6 (opt4)
gggagacccgugacccggaaguuguacggcuacgcgacuuucccucccacaaacccucgcgcccuuccuuuccuacuugggcccggcagaaagcuuaccauggagcugcugauccugaaggccaacgccaucaccaccauccugaccgccgugaccuucugcuucgccagcggccagaacaucaccgaggaguucuaccagagcaccugcagcgccgugagcaagggcuaccugggcgcccugagaaccggcugguacaccagcgugaucaccaucgagcugagcaacaucaaggagaacaagugcaacggcaccgacgccaaggugaagcugaucaagcaggagcuggacaaguacaagaacgccgugaccgaccugcagaugcugaugugcagcacccccgccaccggcagcggcagcgccaucgccagcggcguggccgugugcaaggugcugcaccuggagggcgaggugaacaagaucaagagcgcccugcugagcaccaacaaggccguggugagccugagcaacggcgugagcgugcugaccuucaaggugcuggaccugaagaacuacaucgacaagcagcugcugcccauccugaacaagcagagcugcagcauccccaaccccgagaccgugauggaguuccagcagaagaacaacagacugcuggagaucaccagagaguucagcgugaacgccggcgugaccacccccgugagcaccuacaugcugaccaacagcgagcugcugagccugaucaacgacaugcccaucaccaacgaccagaagaagcugaugagcaacaacgugcagaucgugagacagcagagcuacagcaucaugugcaucaucaaggaggaggugcuggccuacguggugcagcugccccuguacggcgugaucgacacccccugcuggaagcugcacaccagcccccugugcaccaccaacaccaaggagggcagcaacaucugccugaccagaaccgacagaggcugguacugcgacaacgccggcagcgugagcuucuucccccaggccgagaccugcaaggugugcagcaacagaguguucugcgacaccaugaacagccugacccugcccagcgaggugaaccugugcaacguggacaucuucaaccccaaguacgacugcaagaucaugaccagcaagaccgacgugagcagcagcgugaucaccagccugggcgccaucgugagcugcuacggcaagaccaagugcaccgccagcaacaagaacaagggcaucaucaagaccuucagcaacggcugcgacuacgugagcaacaagggcguggacaccgugagcgugggcaacacccuguacuacgugaacaagcaggagggccagagccuguacgugaagggcgagcccaucaucaacuucuacgacccccugguguuccccagcgacgaguucgacgccagcaucagccaggugaacgagaagaucaaccagagccuggccuucaucagaaagagcgacgagcugcugcacaacgugaacgccggcaagagcaccaccaacaucaugaucaccaccaucaucaucgugaucaucgugauccugcugagccugaucgccgugggccugcugcuguacugcaaggccagaugaggacuaguacuggcugcaucucccuuuccucuguccuccauccuucucccaggauggugaagggggaccugguacccagugauccccaccccaggauccuaaaucaugacuuaccugcuaauaaaaacucauuggaaaagugagaagaucuaaaaaaaaaaaaaaaaaaaaaaaaaaaaaaaaaaaaaaaaaaaaaaaaaaaaaaaaaaaaaaaaugcaucccccccccccccccccccccccccccccccaaaggcucuuuucagagccaccagaauu

SEQ ID NO: 6735 - RNA, 1923 nt, Artificial Sequence
  mRNA product Design h-1 comprising derived and/or modified sequence from HRSV(A2)__F-del_DSCav1_mut6 (opt5)
gggagacccgugacccggaaguuguacggcuacgcgacuuucccucccacaaacccucgcgcccuuccuuuccuacuugggcccggcagaaagcuuaccauggagcugcucauccugaaggccaacgcuauuaccacaauccuuacggccgugaccuucugcuuugcgagcggccagaauauuacagaagaguucuaccaauccaccuguucugcugucagcaaaggguaucugggagcccucagaacaggcugguacaccuccguuaucacaauugaacugucuaacaucaaggagaauaaaugcaacgggaccgacgccaaggugaaacuuaucaagcaggaacuggauaaguauaaaaaugcugugacggaccuccagaugcugauguguagcacccccgccacaggauccggcucugcuauugccagcggggucgcggugugcaagguucugcaccucgagggagaggugaacaaaaucaaguccgcccugcuuagcaccaauaaagcugucgugucucuguccaacggcguuagcgugcucacauuuaagguccuggaucuuaagaauuacauugacaaacagcugcucccuauccugaacaagcaaucuuguuccauuccgaaucccgaaaccgugauggaguuccagcagaaaaacaaucggcugcucgaaaucacgcgcgaguuuagcgugaacgccggcgucacaaccccuguuucuacauauaugcugaccaauuccgagcuucugagccucauuaacgauaugcccaucaccaacgaccagaagaaacugauguccaauaacgugcaaaucgugagacagcagucuuacagcauuaugugcaucauuaaggaagagguccuugcuuaugugguucagcugccucucuacggggugaucgauacacccuguuggaaacugcauacguccccucugugcaccacaaauaccaaggaaggaagcaacauuugucucacacggaccgaccgcggcugguacugcgauaaugccgggucugucuccuucuuuccgcaagcggagacguguaaggugugcagcaacagaguuuucugcgacacaaugaacucucugacccuucccagcgaagugaaucuguguaaugucgauaucuuuaacccuaaauaugacugcaagaucaugaccuccaaaacagaugugucuagcuccgucauuaccagccucggagccaucgugucuuguuacggcaagacaaaaugcacggcuuccaauaagaacaaggggauuaucaaaaccuucagcaauggaugugacuauguuucuaacaagggcguggacacagucuccgugggcaauacccuguacuauguuaacaaacaggaggggcagagccuuuacgugaagggagagcccauuaucaacuuuuaugauccucuggucuuccccuccgacgaauuugaugccucuaucagccaagugaaugagaaaauuaaccagucccucgcuuucauccggaagucugacgaacugcugcacaaugugaacgccggcaagagcacaaccaauauuaugaucacgaccauuaucauuguuaucaucgucauucuccugucccuuaucgccguggggcugcuccuguacugcaaagcucgcugaggacuaguacuggcugcaucucccuuuccucuguccuccauccuucucccaggauggugaagggggaccugguacccagugauccccaccccaggauccuaaaucaugacuuaccugcuaauaaaaacucauuggaaaagugagaagaucuaaaaaaaaaaaaaaaaaaaaaaaaaaaaaaaaaaaaaaaaaaaaaaaaaaaaaaaaaaaaaaaaugcaucccccccccccccccccccccccccccccccaaaggcucuuuucagagccaccagaauu

SEQ ID NO: 6736 - RNA, 1923 nt, Artificial Sequence
  mRNA product Design h-1 comprising derived and/or modified sequence from HRSV(A2)__F-del_DSCav1_mut6 (opt6)
gggagacccgugacccggaaguuguacggcuacgcgacuuucccucccacaaacccucgcgcccuuccuuuccuacuugggcccggcagaaagcuuaccauggaacuacucauauuaaaagcaaacgcaauaacaacgauauuaacagcuguaacauucugcuuugcaucaggccaaaauaucaccgaagaauuuuaucaaagcacaugcucugcaguauccaaaggauacuuaggagcauuaagaacaggcugguacacauccguaauaacaauagaacuaucaaacaucaaagaaaacaaaugcaacggcacagacgccaaaguaaaacucauaaaacaagaacuagacaaauauaaaaacgcaguaacagaucuacaaaugcucaugugcuccacaccagcaaccggaucugguucagccauagcauccggcguagccgucugcaaaguauuacaccucgaaggagaaguaaacaaaauaaaaucugcccuauuaucuacaaauaaagccguaguaagucuaaguaacggaguaucaguacuaacauuuaaaguccuagaccugaaaaacuauaucgacaaacaacuauuaccaauacuaaacaaacaauccuguuccaucccuaacccagaaacaguuauggaauuucaacaaaaaaauaaccgccuuuuagaaauaacuagagaauuuucaguaaacgcaggaguuacaacaccaguaucaacauacaugcuaacaaauucagaauuauuaucccuuauaaaugacaugccuaucacaaacgaucaaaaaaaauuaauguccaacaacguacaaauaguaagacaacaaucauauuccaucaugugcaucauaaaagaagaaguccucgcauacguagugcaacuaccacuauacggagucauagauacacccuguuggaaacuucacacaucuccacuaugcacaacaaacacgaaagaaggauccaacauaugccuaacacgaacagacagaggaugguauugcgacaacgcuggaagugugagcuucuucccucaagcagaaacuugcaaaguaugcagcaaucguguauucugcgacacaaugaacucauuaacacucccaagcgaaguaaaccucugcaauguagacaucuuuaauccaaaauacgauuguaaaauaaugacuucaaaaacagacgucucaucaucuguaauaacaucuuuaggagcaauaguuucuugcuacgguaaaacaaaaugcaccgcauccaacaaaaacaaaggaauaauaaaaacauucucuaacggcugcgauuacguaucuaacaaaggaguugacacagucucaguaggaaacacacuauacuacguaaacaaacaagaaggacaaagccuauacguaaaaggagaaccaauaauaaacuucuaugacccauuaguauuuccaagcgaugaauuugacgcuucaauaucacaagucaaugaaaaaauaaaucagagcuuagcauucauaagaaaaucugaugaacuacuacacaauguaaaugcaggaaaauccacuaccaacauaaugauuaccacaauuauaauaguuaucauaguaauacuauuaucacuaauagccguuggauuacuacuauacugcaaagcaagauaaggacuaguacuggcugcaucucccuuuccucuguccuccauccuucucccaggauggugaagggggaccugguacccagugauccccaccccaggauccuaaaucaugacuuaccugcuaauaaaaacucauuggaaaagugagaagaucuaaaaaaaaaaaaaaaaaaaaaaaaaaaaaaaaaaaaaaaaaaaaaaaaaaaaaaaaaaaaaaaaugcaucccccccccccccccccccccccccccccccaaaggcucuuuucagagccaccagaauu

SEQ ID NO: 6737 - RNA, 1923 nt, Artificial Sequence
  mRNA product Design h-1 comprising derived and/or modified sequence from HRSV(A2)__F-del_DSCav1_mut6 (opt11)
gggagacccgugacccggaaguuguacggcuacgcgacuuucccucccacaaacccucgcgcccuuccuuuccuacuugggcccggcagaaagcuuaccauggaacuacucauccuaaaagcaaacgccaucaccaccauacuaaccgccgucaccuucugcuucgccucgggacaaaacaucaccgaagaguucuaccagucaacgugcuccgccgucucaaaaggcuaccuaggcgcccuccgcaccgggugguauaccuccgucauaacuaucgaacucucuaacaucaaagaaaacaaauguaacggcaccgacgccaaagucaaacuaaucaaacaagaacuggacaaauacaaaaacgccgucaccgaccuacaaaugcucaugugcuccacuccagccaccggcuccgguagcgcaaucgccucaggcguagcuguaugcaaaguccuccaccuagaaggcgaaguaaacaaaauaaaauccgcccuccucucaaccaacaaggccgucgucucacucucaaacggcgucuccguacucaccuuuaaaguccuagaccuuaaaaacuacaucgacaaacaacugcuaccaauccucaacaaacaaucaugcagcaucccaaacccggaaacagucauggaguuccaacagaaaaacaaccgacuccucgaaaucacccgcgaguucuccgucaacgccggagucaccacaccuguaagcacauacaugcuuacuaauuccgaacuccuuucacuaauaaacgacaugccaauaaccaacgaccaaaagaaacucauguccaacaacguacaaaucguacgccaacaauccuacuccaucaugugcaucaucaaagaagaaguccuggccuaugucguacaacucccccuuuacggugucaucgacacacccugcuggaaacuacacaccagcccccucugcacaacaaacaccaaagaaggcuccaacaucugccucacccguaccgaccgaggcugguacugcgacaacgccggcuccgucuccuucuucccccaagccgaaaccugcaaagucugcagcaaccgcgucuucugcgauaccaugaacucccucacacucccaucugaagucaaccucugcaacgucgauauuuucaauccaaaauacgacugcaaaaucaugacuagcaaaaccgacguuagcuccuccgucaucaccucccucggcgccauaguuucaugcuacggcaaaaccaaaugcaccgccuccaacaaaaacaaaggcaucauaaaaaccuucuccaacgggugcgacuacguaucuaauaaaggagucgacaccgucucaguaggaaacacccucuacuaugucaacaaacaagaaggccaaucacuauacguuaaaggcgaaccaaucaucaacuucuacgacccacucgucuuccccagcgacgaguuugacgccucaaucucgcaagucaaugaaaagauuaaccaaucccuagccuucauccgaaaaagugacgaacuccuccacaacguuaacgccggcaaaucuacaaccaacaucaugaucaccacuauaaucaucgucaucauagucauacuucucagccucaucgcagucggacuccuccuuuauugcaaggcacgauaaggacuaguacuggcugcaucucccuuuccucuguccuccauccuucucccaggauggugaagggggaccugguacccagugauccccaccccaggauccuaaaucaugacuuaccugcuaauaaaaacucauuggaaaagugagaagaucuaaaaaaaaaaaaaaaaaaaaaaaaaaaaaaaaaaaaaaaaaaaaaaaaaaaaaaaaaaaaaaaaugcaucccccccccccccccccccccccccccccccaaaggcucuuuucagagccaccagaauu

SEQ ID NO: 6738 - RNA, 2139 nt, Artificial Sequence
  mRNA product Design h-2 comprising derived and/or modified sequence from HRSV(A2)__F-del_DSCav1_mut6 (opt1)
gggagacccgugacccggaaguuguacggcuacgcgacuuucccucccacaaacccucgcgcccuuccuuuccuacuugggcccggcagaaagcuuaccauggagcugcucauccugaaggccaacgccaucaccaccauccugacggcggugaccuucugcuucgccagcggccagaacaucaccgaggaguucuaccaguccacgugcagcgccgucuccaagggguaccucggcgcccugcggaccggcugguacaccuccgugaucaccaucgagcugagcaacaucaaggagaacaagugcaacgggaccgacgccaaggugaagcucaucaagcaggagcuggacaaguacaagaacgcggucacggaccugcagaugcugaugugcuccaccccggcaaccggcuccggcuccgccaucgcgagcggcgucgccgugugcaaggugcugcaccucgagggggaggucaacaagaucaagagcgcccugcuguccaccaacaaggccguggugagccucuccaacggcgucagcgugcugaccuucaaggugcuggaccucaagaacuacaucgacaagcagcugcugcccauccugaacaagcagagcugcuccauccccaaccccgagacggugauggaguuccagcagaagaacaaccggcuccuggagaucacccgcgaguucagcgugaacgccggggucaccacccccguguccacguacaugcugaccaacagcgagcuccugucccugaucaacgacaugccgaucaccaacgaccagaagaagcucaugagcaacaacgugcagaucguccggcagcaguccuacagcaucaugugcaucaucaaggaggaggugcuggcguacgugguccagcugccccucuacggcgugaucgacacccccugcuggaagcugcacacgagcccccugugcaccaccaacaccaaggagggguccaacaucugccucacgcgcaccgaccggggcugguacugcgacaacgccggcagcgucuccuucuucccgcaggccgagaccugcaaggugugcagcaaccgcguguucugcgacaccaugaacucccugacgcugcccagcgagguaaaccucugcaacgucgacaucuucaaccccaaguacgacugcaagaucaugaccuccaagaccgacgugagcuccagcgugaucaccucccugggggccaucgucagcugcuacggcaagacgaagugcaccgccagcaacaagaacaaggggaucaucaagaccuucuccaacggcugcgacuacgugagcaacaagggcguggacaccguguccgucgggaacacccuguacuacgugaacaagcaggagggccagagccucuacgugaagggggagcccaucaucaacuucuacgacccgcuggucuuccccuccgacgaguucgacgcgagcaucucccaggugaacgagaagaucaaccagagccuggccuucauccgcaaguccgacgagcugcuccacaacgugaacgccggcaagagcacgaccaacaucaugaucaccaccaucaucaucgucaucaucgugauccugcugucccucaucgccguggggcugcugcucuacugcaaggcccggugaggacuagugaagggaacacccaaauuuaauucagccuuaagcacaauuaauuaagagugaaacguaauuguacaagcaguuggucacccaccauagggcaugaucaacaccgcaaccuuuccuuuuucccccagugauucugaaaaaccccucuucccuucagcuugcuuagauguuccaaauuuaguaagcuuaaggcggccuacagaagaaaaagaaaaaaaaggccacaaaaguucccucucacuuucaguaaauaaaauaaaagcagcaacagaaauaaagaaauaaaugaaauucaaaaugaaauaaauauuguguugugcagcauuaaaaaaucaauaaaaauuaaaaaugagcaagaucuaaaaaaaaaaaaaaaaaaaaaaaaaaaaaaaaaaaaaaaaaaaaaaaaaaaaaaaaaaaaaaaaugcaucccccccccccccccccccccccccccccccaaaggcucuuuucagagccaccagaauu

SEQ ID NO: 6739 - RNA, 2139 nt, Artificial Sequence
  mRNA product Design h-2 comprising derived and/or modified sequence from HRSV(A2)__F-del_DSCav1_mut6 (opt1)
gggagacccgugacccggaaguuguacggcuacgcgacuuucccucccacaaacccucgcgcccuuccuuuccuacuugggcccggcagaaagcuuaccauggagcugcucauccugaaggccaacgccaucaccaccauccugacggcggugaccuucugcuucgccagcggccagaacaucaccgaggaguucuaccaguccacgugcagcgccgucuccaagggguaccucggcgcccugcgcaccgggugguacaccagcgugaucaccaucgagcuguccaacaucaaggagaacaagugcaacggcaccgacgccaaggugaagcucaucaagcaggagcuggacaaguacaagaacgcggucacggaccugcagaugcucaugugcagcacccccgccaccggguccggcagcgccaucgccuccggcguggcggugugcaagguccugcaccuggagggggaggugaacaagaucaagagcgcccuccuguccaccaacaaggccguggucagccuguccaacggcgugagcgugcucacguucaagguccuggaccugaagaacuacaucgacaagcagcuccugccgauccugaacaagcaguccugcagcauccccaaccccgagaccgugauggaguuccagcagaagaacaaccggcuccuggagaucacccgcgaguucuccgugaacgccggggucaccacgcccgugagcaccuacaugcugaccaacuccgagcuccugagccugaucaacgacaugccgaucaccaacgaccagaagaagcucaugagcaacaacgugcagaucguccggcagcaguccuacagcaucaugugcaucaucaaggaggaggugcuggccuacgugguccagcugccccucuacggcgugaucgacacgcccugcuggaagcugcacaccagcccccugugcaccaccaacacgaaggaggggagcaacaucugccucacccgcaccgaccggggcugguacugcgacaacgcgggcuccgugagcuucuucccgcaggccgagaccugcaaggucugcuccaaccgcguguucugcgacacgaugaacagccugacccugcccuccgaggucaaccucugcaacguggacaucuucaaccccaaguacgacugcaagaucaugaccagcaagaccgacguguccagcuccgucaucacgagccugggggccaucguguccugcuacggcaagaccaagugcaccgccagcaacaagaacaaggggaucaucaagaccuucuccaacggcugcgacuacgugagcaacaagggcgucgacacgguguccguggggaacacccuguacuacgucaacaagcaggagggccagagccucuacgugaagggggagcccaucaucaacuucuacgacccgcugguguuccccagcgacgaguucgacgccuccaucagccaggucaacgagaagaucaaccagucccuggcguucauccggaaguccgacgagcuccugcacaacgugaacgccggcaaguccaccaccaacaucaugaucaccacgaucaucaucgugaucaucgucauccugcucagccugaucgccguggggcugcuccuguacugcaaggcccgcugaggacuagugaagggaacacccaaauuuaauucagccuuaagcacaauuaauuaagagugaaacguaauuguacaagcaguuggucacccaccauagggcaugaucaacaccgcaaccuuuccuuuuucccccagugauucugaaaaaccccucuucccuucagcuugcuuagauguuccaaauuuaguaagcuuaaggcggccuacagaagaaaaagaaaaaaaaggccacaaaaguucccucucacuuucaguaaauaaaauaaaagcagcaacagaaauaaagaaauaaaugaaauucaaaaugaaauaaauauuguguugugcagcauuaaaaaaucaauaaaaauuaaaaaugagcaagaucuaaaaaaaaaaaaaaaaaaaaaaaaaaaaaaaaaaaaaaaaaaaaaaaaaaaaaaaaaaaaaaaaugcaucccccccccccccccccccccccccccccccaaaggcucuuuucagagccaccagaauu

SEQ ID NO: 6740 - RNA, 2139 nt, Artificial Sequence
  mRNA product Design h-2 comprising derived and/or modified sequence from HRSV(A2)__F-del_DSCav1_mut6 (opt2)
gggagacccgugacccggaaguuguacggcuacgcgacuuucccucccacaaacccucgcgcccuuccuuuccuacuugggcccggcagaaagcuuaccauggagcuccucauccucaaggccaacgccaucaccaccauccucaccgccgucaccuucugcuucgccuccggccagaacaucaccgaggaguucuaccaguccaccugcuccgccgucuccaagggcuaccucggcgcccuccgcaccggcugguacaccuccgucaucaccaucgagcucuccaacaucaaggagaacaagugcaacggcaccgacgccaaggucaagcucaucaagcaggagcucgacaaguacaagaacgccgucaccgaccuccagaugcucaugugcuccacccccgccaccggcuccggcuccgccaucgccuccggcgucgccgucugcaagguccuccaccucgagggcgaggucaacaagaucaaguccgcccuccucuccaccaacaaggccgucgucucccucuccaacggcgucuccguccucaccuucaagguccucgaccucaagaacuacaucgacaagcagcuccuccccauccucaacaagcaguccugcuccauccccaaccccgagaccgucauggaguuccagcagaagaacaaccgccuccucgagaucacccgcgaguucuccgucaacgccggcgucaccacccccgucuccaccuacaugcucaccaacuccgagcuccucucccucaucaacgacaugcccaucaccaacgaccagaagaagcucauguccaacaacguccagaucguccgccagcaguccuacuccaucaugugcaucaucaaggaggagguccucgccuacgucguccagcucccccucuacggcgucaucgacacccccugcuggaagcuccacaccuccccccucugcaccaccaacaccaaggagggcuccaacaucugccucacccgcaccgaccgcggcugguacugcgacaacgccggcuccgucuccuucuucccccaggccgagaccugcaaggucugcuccaaccgcgucuucugcgacaccaugaacucccucacccuccccuccgaggucaaccucugcaacgucgacaucuucaaccccaaguacgacugcaagaucaugaccuccaagaccgacgucuccuccuccgucaucaccucccucggcgccaucgucuccugcuacggcaagaccaagugcaccgccuccaacaagaacaagggcaucaucaagaccuucuccaacggcugcgacuacgucuccaacaagggcgucgacaccgucuccgucggcaacacccucuacuacgucaacaagcaggagggccagucccucuacgucaagggcgagcccaucaucaacuucuacgacccccucgucuuccccuccgacgaguucgacgccuccaucucccaggucaacgagaagaucaaccagucccucgccuucauccgcaaguccgacgagcuccuccacaacgucaacgccggcaaguccaccaccaacaucaugaucaccaccaucaucaucgucaucaucgucauccuccucucccucaucgccgucggccuccuccucuacugcaaggcccgcugaggacuagugaagggaacacccaaauuuaauucagccuuaagcacaauuaauuaagagugaaacguaauuguacaagcaguuggucacccaccauagggcaugaucaacaccgcaaccuuuccuuuuucccccagugauucugaaaaaccccucuucccuucagcuugcuuagauguuccaaauuuaguaagcuuaaggcggccuacagaagaaaaagaaaaaaaaggccacaaaaguucccucucacuuucaguaaauaaaauaaaagcagcaacagaaauaaagaaauaaaugaaauucaaaaugaaauaaauauuguguugugcagcauuaaaaaaucaauaaaaauuaaaaaugagcaagaucuaaaaaaaaaaaaaaaaaaaaaaaaaaaaaaaaaaaaaaaaaaaaaaaaaaaaaaaaaaaaaaaaugcaucccccccccccccccccccccccccccccccaaaggcucuuuucagagccaccagaauu

SEQ ID NO: 6741 - RNA, 2139 nt, Artificial Sequence
  mRNA product Design h-2 comprising derived and/or modified sequence from HRSV(A2)__F-del_DSCav1_mut6 (opt3)
gggagacccgugacccggaaguuguacggcuacgcgacuuucccucccacaaacccucgcgcccuuccuuuccuacuugggcccggcagaaagcuuaccauggagcugcucauccuuaaggccaacgcuauuaccacaauacugacugcagugacguucugcuuugccagcggccagaauaucaccgaagaguucuaccaauccacauguucugcggucucaaaaggguauuugggagcuuuaagaacugguugguacaccaguguuauuacaaucgaacugagcaacauuaaggagaauaaaugcaacggcaccgacgccaaggugaaacuaaucaagcaggaacucgauaaguauaaaaaugcaguaacugaccugcagaugcuuauguguuccacacccgccaccgggucuggaucggcuauagcaucaggcguggccgucugcaaggugcugcacuuggagggugagguuaacaaaaucaagagcgcucuccugaguacgaauaaagccguggucucccugucuaacggggugagcguacucacuuuuaagguuuuagaucugaagaauuacauugacaaacagcuuuugccuauccugaacaagcaauccuguucaauuccaaauccggaaaccgugauggaguuccagcagaaaaacaauaggcuacucgaaaucacacgggaguuuagugucaacgcgggagugacuacccccgugagcacauauaugcugaccaauucugagcuucuguccuugauaaacgauaugccuauuacgaacgaccagaagaaacucaugucaaauaacguccaaaucguucgccagcagagcuacaguauuaugugcaucaucaaggaagaggugcuggcauauguagugcaguuaccacuguacggcgucauugauacucccuguuggaaacuccauacaucuccucuuugcaccacuaauacaaaggaaggcuccaacauaugucugacccgaacggaccgugggugguacugcgauaaugccggaagcgugucguucuuuccacaagcugagaccuguaagguuugcucuaacagaguguucugcgacacaaugaacuccuugacucuacccucagaagucaaucuguguaauguggauaucuuuaacccuaaauaugacugcaagauuaugaccaguaaaacagauguaagcuccucuguuaucacuagccucggugccauagugucauguuacggcaagaccaaaugcacagcaaguaauaagaacaaggggauuaucaaaaccuucuccaauggaugugacuaugucagcaacaagggcguggacacugucucuguggguaauacgcuguacuauguuaacaaacaggaggggcagucacuuuacgugaagggagagccaaucauuaacuuuuaugauccgcugguauuccccagugacgaauuugaugcuagcaucucccaagucaaugagaaaauuaaccagucuuuggccuucauaaggaagucggacgaacuccugcacaaugugaacgcgggcaagagcacaaccaauaucaugauuacuaccaucaucauuguuauaaucgugauuuuacugucccuaaucgccgucggccuccugcuuuacugcaaagcacggugaggacuagugaagggaacacccaaauuuaauucagccuuaagcacaauuaauuaagagugaaacguaauuguacaagcaguuggucacccaccauagggcaugaucaacaccgcaaccuuuccuuuuucccccagugauucugaaaaaccccucuucccuucagcuugcuuagauguuccaaauuuaguaagcuuaaggcggccuacagaagaaaaagaaaaaaaaggccacaaaaguucccucucacuuucaguaaauaaaauaaaagcagcaacagaaauaaagaaauaaaugaaauucaaaaugaaauaaauauuguguugugcagcauuaaaaaaucaauaaaaauuaaaaaugagcaagaucuaaaaaaaaaaaaaaaaaaaaaaaaaaaaaaaaaaaaaaaaaaaaaaaaaaaaaaaaaaaaaaaaugcaucccccccccccccccccccccccccccccccaaaggcucuuuucagagccaccagaauu

SEQ ID NO: 6742 - RNA, 2139 nt, Artificial Sequence
  mRNA product Design h-2 comprising derived and/or modified sequence from HRSV(A2)__F-del_DSCav1_mut6 (opt4)
gggagacccgugacccggaaguuguacggcuacgcgacuuucccucccacaaacccucgcgcccuuccuuuccuacuugggcccggcagaaagcuuaccauggagcugcugauccugaaggccaacgccaucaccaccauccugaccgccgugaccuucugcuucgccagcggccagaacaucaccgaggaguucuaccagagcaccugcagcgccgugagcaagggcuaccugggcgcccugagaaccggcugguacaccagcgugaucaccaucgagcugagcaacaucaaggagaacaagugcaacggcaccgacgccaaggugaagcugaucaagcaggagcuggacaaguacaagaacgccgugaccgaccugcagaugcugaugugcagcacccccgccaccggcagcggcagcgccaucgccagcggcguggccgugugcaaggugcugcaccuggagggcgaggugaacaagaucaagagcgcccugcugagcaccaacaaggccguggugagccugagcaacggcgugagcgugcugaccuucaaggugcuggaccugaagaacuacaucgacaagcagcugcugcccauccugaacaagcagagcugcagcauccccaaccccgagaccgugauggaguuccagcagaagaacaacagacugcuggagaucaccagagaguucagcgugaacgccggcgugaccacccccgugagcaccuacaugcugaccaacagcgagcugcugagccugaucaacgacaugcccaucaccaacgaccagaagaagcugaugagcaacaacgugcagaucgugagacagcagagcuacagcaucaugugcaucaucaaggaggaggugcuggccuacguggugcagcugccccuguacggcgugaucgacacccccugcuggaagcugcacaccagcccccugugcaccaccaacaccaaggagggcagcaacaucugccugaccagaaccgacagaggcugguacugcgacaacgccggcagcgugagcuucuucccccaggccgagaccugcaaggugugcagcaacagaguguucugcgacaccaugaacagccugacccugcccagcgaggugaaccugugcaacguggacaucuucaaccccaaguacgacugcaagaucaugaccagcaagaccgacgugagcagcagcgugaucaccagccugggcgccaucgugagcugcuacggcaagaccaagugcaccgccagcaacaagaacaagggcaucaucaagaccuucagcaacggcugcgacuacgugagcaacaagggcguggacaccgugagcgugggcaacacccuguacuacgugaacaagcaggagggccagagccuguacgugaagggcgagcccaucaucaacuucuacgacccccugguguuccccagcgacgaguucgacgccagcaucagccaggugaacgagaagaucaaccagagccuggccuucaucagaaagagcgacgagcugcugcacaacgugaacgccggcaagagcaccaccaacaucaugaucaccaccaucaucaucgugaucaucgugauccugcugagccugaucgccgugggccugcugcuguacugcaaggccagaugaggacuagugaagggaacacccaaauuuaauucagccuuaagcacaauuaauuaagagugaaacguaauuguacaagcaguuggucacccaccauagggcaugaucaacaccgcaaccuuuccuuuuucccccagugauucugaaaaaccccucuucccuucagcuugcuuagauguuccaaauuuaguaagcuuaaggcggccuacagaagaaaaagaaaaaaaaggccacaaaaguucccucucacuuucaguaaauaaaauaaaagcagcaacagaaauaaagaaauaaaugaaauucaaaaugaaauaaauauuguguugugcagcauuaaaaaaucaauaaaaauuaaaaaugagcaagaucuaaaaaaaaaaaaaaaaaaaaaaaaaaaaaaaaaaaaaaaaaaaaaaaaaaaaaaaaaaaaaaaaugcaucccccccccccccccccccccccccccccccaaaggcucuuuucagagccaccagaauu

SEQ ID NO: 6743 - RNA, 2139 nt, Artificial Sequence
  mRNA product Design h-2 comprising derived and/or modified sequence from HRSV(A2)__F-del_DSCav1_mut6 (opt5)
gggagacccgugacccggaaguuguacggcuacgcgacuuucccucccacaaacccucgcgcccuuccuuuccuacuugggcccggcagaaagcuuaccauggagcugcucauccugaaggccaacgcuauuaccacaauccuuacggccgugaccuucugcuuugcgagcggccagaauauuacagaagaguucuaccaauccaccuguucugcugucagcaaaggguaucugggagcccucagaacaggcugguacaccuccguuaucacaauugaacugucuaacaucaaggagaauaaaugcaacgggaccgacgccaaggugaaacuuaucaagcaggaacuggauaaguauaaaaaugcugugacggaccuccagaugcugauguguagcacccccgccacaggauccggcucugcuauugccagcggggucgcggugugcaagguucugcaccucgagggagaggugaacaaaaucaaguccgcccugcuuagcaccaauaaagcugucgugucucuguccaacggcguuagcgugcucacauuuaagguccuggaucuuaagaauuacauugacaaacagcugcucccuauccugaacaagcaaucuuguuccauuccgaaucccgaaaccgugauggaguuccagcagaaaaacaaucggcugcucgaaaucacgcgcgaguuuagcgugaacgccggcgucacaaccccuguuucuacauauaugcugaccaauuccgagcuucugagccucauuaacgauaugcccaucaccaacgaccagaagaaacugauguccaauaacgugcaaaucgugagacagcagucuuacagcauuaugugcaucauuaaggaagagguccuugcuuaugugguucagcugccucucuacggggugaucgauacacccuguuggaaacugcauacguccccucugugcaccacaaauaccaaggaaggaagcaacauuugucucacacggaccgaccgcggcugguacugcgauaaugccgggucugucuccuucuuuccgcaagcggagacguguaaggugugcagcaacagaguuuucugcgacacaaugaacucucugacccuucccagcgaagugaaucuguguaaugucgauaucuuuaacccuaaauaugacugcaagaucaugaccuccaaaacagaugugucuagcuccgucauuaccagccucggagccaucgugucuuguuacggcaagacaaaaugcacggcuuccaauaagaacaaggggauuaucaaaaccuucagcaauggaugugacuauguuucuaacaagggcguggacacagucuccgugggcaauacccuguacuauguuaacaaacaggaggggcagagccuuuacgugaagggagagcccauuaucaacuuuuaugauccucuggucuuccccuccgacgaauuugaugccucuaucagccaagugaaugagaaaauuaaccagucccucgcuuucauccggaagucugacgaacugcugcacaaugugaacgccggcaagagcacaaccaauauuaugaucacgaccauuaucauuguuaucaucgucauucuccugucccuuaucgccguggggcugcuccuguacugcaaagcucgcugaggacuagugaagggaacacccaaauuuaauucagccuuaagcacaauuaauuaagagugaaacguaauuguacaagcaguuggucacccaccauagggcaugaucaacaccgcaaccuuuccuuuuucccccagugauucugaaaaaccccucuucccuucagcuugcuuagauguuccaaauuuaguaagcuuaaggcggccuacagaagaaaaagaaaaaaaaggccacaaaaguucccucucacuuucaguaaauaaaauaaaagcagcaacagaaauaaagaaauaaaugaaauucaaaaugaaauaaauauuguguugugcagcauuaaaaaaucaauaaaaauuaaaaaugagcaagaucuaaaaaaaaaaaaaaaaaaaaaaaaaaaaaaaaaaaaaaaaaaaaaaaaaaaaaaaaaaaaaaaaugcaucccccccccccccccccccccccccccccccaaaggcucuuuucagagccaccagaauu

SEQ ID NO: 6744 - RNA, 2139 nt, Artificial Sequence
  mRNA product Design h-2 comprising derived and/or modified sequence from HRSV(A2)__F-del_DSCav1_mut6 (opt6)
gggagacccgugacccggaaguuguacggcuacgcgacuuucccucccacaaacccucgcgcccuuccuuuccuacuugggcccggcagaaagcuuaccauggaacuacucauauuaaaagcaaacgcaauaacaacgauauuaacagcuguaacauucugcuuugcaucaggccaaaauaucaccgaagaauuuuaucaaagcacaugcucugcaguauccaaaggauacuuaggagcauuaagaacaggcugguacacauccguaauaacaauagaacuaucaaacaucaaagaaaacaaaugcaacggcacagacgccaaaguaaaacucauaaaacaagaacuagacaaauauaaaaacgcaguaacagaucuacaaaugcucaugugcuccacaccagcaaccggaucugguucagccauagcauccggcguagccgucugcaaaguauuacaccucgaaggagaaguaaacaaaauaaaaucugcccuauuaucuacaaauaaagccguaguaagucuaaguaacggaguaucaguacuaacauuuaaaguccuagaccugaaaaacuauaucgacaaacaacuauuaccaauacuaaacaaacaauccuguuccaucccuaacccagaaacaguuauggaauuucaacaaaaaaauaaccgccuuuuagaaauaacuagagaauuuucaguaaacgcaggaguuacaacaccaguaucaacauacaugcuaacaaauucagaauuauuaucccuuauaaaugacaugccuaucacaaacgaucaaaaaaaauuaauguccaacaacguacaaauaguaagacaacaaucauauuccaucaugugcaucauaaaagaagaaguccucgcauacguagugcaacuaccacuauacggagucauagauacacccuguuggaaacuucacacaucuccacuaugcacaacaaacacgaaagaaggauccaacauaugccuaacacgaacagacagaggaugguauugcgacaacgcuggaagugugagcuucuucccucaagcagaaacuugcaaaguaugcagcaaucguguauucugcgacacaaugaacucauuaacacucccaagcgaaguaaaccucugcaauguagacaucuuuaauccaaaauacgauuguaaaauaaugacuucaaaaacagacgucucaucaucuguaauaacaucuuuaggagcaauaguuucuugcuacgguaaaacaaaaugcaccgcauccaacaaaaacaaaggaauaauaaaaacauucucuaacggcugcgauuacguaucuaacaaaggaguugacacagucucaguaggaaacacacuauacuacguaaacaaacaagaaggacaaagccuauacguaaaaggagaaccaauaauaaacuucuaugacccauuaguauuuccaagcgaugaauuugacgcuucaauaucacaagucaaugaaaaaauaaaucagagcuuagcauucauaagaaaaucugaugaacuacuacacaauguaaaugcaggaaaauccacuaccaacauaaugauuaccacaauuauaauaguuaucauaguaauacuauuaucacuaauagccguuggauuacuacuauacugcaaagcaagauaaggacuagugaagggaacacccaaauuuaauucagccuuaagcacaauuaauuaagagugaaacguaauuguacaagcaguuggucacccaccauagggcaugaucaacaccgcaaccuuuccuuuuucccccagugauucugaaaaaccccucuucccuucagcuugcuuagauguuccaaauuuaguaagcuuaaggcggccuacagaagaaaaagaaaaaaaaggccacaaaaguucccucucacuuucaguaaauaaaauaaaagcagcaacagaaauaaagaaauaaaugaaauucaaaaugaaauaaauauuguguugugcagcauuaaaaaaucaauaaaaauuaaaaaugagcaagaucuaaaaaaaaaaaaaaaaaaaaaaaaaaaaaaaaaaaaaaaaaaaaaaaaaaaaaaaaaaaaaaaaugcaucccccccccccccccccccccccccccccccaaaggcucuuuucagagccaccagaauu

SEQ ID NO: 6745 - RNA, 2139 nt, Artificial Sequence
  mRNA product Design h-2 comprising derived and/or modified sequence from HRSV(A2)__F-del_DSCav1_mut6 (opt11)
gggagacccgugacccggaaguuguacggcuacgcgacuuucccucccacaaacccucgcgcccuuccuuuccuacuugggcccggcagaaagcuuaccauggaacuacucauccuaaaagcaaacgccaucaccaccauacuaaccgccgucaccuucugcuucgccucgggacaaaacaucaccgaagaguucuaccagucaacgugcuccgccgucucaaaaggcuaccuaggcgcccuccgcaccgggugguauaccuccgucauaacuaucgaacucucuaacaucaaagaaaacaaauguaacggcaccgacgccaaagucaaacuaaucaaacaagaacuggacaaauacaaaaacgccgucaccgaccuacaaaugcucaugugcuccacuccagccaccggcuccgguagcgcaaucgccucaggcguagcuguaugcaaaguccuccaccuagaaggcgaaguaaacaaaauaaaauccgcccuccucucaaccaacaaggccgucgucucacucucaaacggcgucuccguacucaccuuuaaaguccuagaccuuaaaaacuacaucgacaaacaacugcuaccaauccucaacaaacaaucaugcagcaucccaaacccggaaacagucauggaguuccaacagaaaaacaaccgacuccucgaaaucacccgcgaguucuccgucaacgccggagucaccacaccuguaagcacauacaugcuuacuaauuccgaacuccuuucacuaauaaacgacaugccaauaaccaacgaccaaaagaaacucauguccaacaacguacaaaucguacgccaacaauccuacuccaucaugugcaucaucaaagaagaaguccuggccuaugucguacaacucccccuuuacggugucaucgacacacccugcuggaaacuacacaccagcccccucugcacaacaaacaccaaagaaggcuccaacaucugccucacccguaccgaccgaggcugguacugcgacaacgccggcuccgucuccuucuucccccaagccgaaaccugcaaagucugcagcaaccgcgucuucugcgauaccaugaacucccucacacucccaucugaagucaaccucugcaacgucgauauuuucaauccaaaauacgacugcaaaaucaugacuagcaaaaccgacguuagcuccuccgucaucaccucccucggcgccauaguuucaugcuacggcaaaaccaaaugcaccgccuccaacaaaaacaaaggcaucauaaaaaccuucuccaacgggugcgacuacguaucuaauaaaggagucgacaccgucucaguaggaaacacccucuacuaugucaacaaacaagaaggccaaucacuauacguuaaaggcgaaccaaucaucaacuucuacgacccacucgucuuccccagcgacgaguuugacgccucaaucucgcaagucaaugaaaagauuaaccaaucccuagccuucauccgaaaaagugacgaacuccuccacaacguuaacgccggcaaaucuacaaccaacaucaugaucaccacuauaaucaucgucaucauagucauacuucucagccucaucgcagucggacuccuccuuuauugcaaggcacgauaaggacuagugaagggaacacccaaauuuaauucagccuuaagcacaauuaauuaagagugaaacguaauuguacaagcaguuggucacccaccauagggcaugaucaacaccgcaaccuuuccuuuuucccccagugauucugaaaaaccccucuucccuucagcuugcuuagauguuccaaauuuaguaagcuuaaggcggccuacagaagaaaaagaaaaaaaaggccacaaaaguucccucucacuuucaguaaauaaaauaaaagcagcaacagaaauaaagaaauaaaugaaauucaaaaugaaauaaauauuguguugugcagcauuaaaaaaucaauaaaaauuaaaaaugagcaagaucuaaaaaaaaaaaaaaaaaaaaaaaaaaaaaaaaaaaaaaaaaaaaaaaaaaaaaaaaaaaaaaaaugcaucccccccccccccccccccccccccccccccaaaggcucuuuucagagccaccagaauu

SEQ ID NO: 6746 - RNA, 1919 nt, Artificial Sequence
  mRNA product Design h-3 comprising derived and/or modified sequence from HRSV(A2)__F-del_DSCav1_mut6 (opt1)
gggagacccgugacccggaaguuguacggcuacgcgacuuucccucccacaaacccucgcgcccuuccuuuccuacuugggcccggcagaaagcuuaccauggagcugcucauccugaaggccaacgccaucaccaccauccugacggcggugaccuucugcuucgccagcggccagaacaucaccgaggaguucuaccaguccacgugcagcgccgucuccaagggguaccucggcgcccugcggaccggcugguacaccuccgugaucaccaucgagcugagcaacaucaaggagaacaagugcaacgggaccgacgccaaggugaagcucaucaagcaggagcuggacaaguacaagaacgcggucacggaccugcagaugcugaugugcuccaccccggcaaccggcuccggcuccgccaucgcgagcggcgucgccgugugcaaggugcugcaccucgagggggaggucaacaagaucaagagcgcccugcuguccaccaacaaggccguggugagccucuccaacggcgucagcgugcugaccuucaaggugcuggaccucaagaacuacaucgacaagcagcugcugcccauccugaacaagcagagcugcuccauccccaaccccgagacggugauggaguuccagcagaagaacaaccggcuccuggagaucacccgcgaguucagcgugaacgccggggucaccacccccguguccacguacaugcugaccaacagcgagcuccugucccugaucaacgacaugccgaucaccaacgaccagaagaagcucaugagcaacaacgugcagaucguccggcagcaguccuacagcaucaugugcaucaucaaggaggaggugcuggcguacgugguccagcugccccucuacggcgugaucgacacccccugcuggaagcugcacacgagcccccugugcaccaccaacaccaaggagggguccaacaucugccucacgcgcaccgaccggggcugguacugcgacaacgccggcagcgucuccuucuucccgcaggccgagaccugcaaggugugcagcaaccgcguguucugcgacaccaugaacucccugacgcugcccagcgagguaaaccucugcaacgucgacaucuucaaccccaaguacgacugcaagaucaugaccuccaagaccgacgugagcuccagcgugaucaccucccugggggccaucgucagcugcuacggcaagacgaagugcaccgccagcaacaagaacaaggggaucaucaagaccuucuccaacggcugcgacuacgugagcaacaagggcguggacaccguguccgucgggaacacccuguacuacgugaacaagcaggagggccagagccucuacgugaagggggagcccaucaucaacuucuacgacccgcuggucuuccccuccgacgaguucgacgcgagcaucucccaggugaacgagaagaucaaccagagccuggccuucauccgcaaguccgacgagcugcuccacaacgugaacgccggcaagagcacgaccaacaucaugaucaccaccaucaucaucgucaucaucgugauccugcugucccucaucgccguggggcugcugcucuacugcaaggcccggugaggacuaguggaagcauuuuccuggcugauuaaaagaaauuacucagcuauggucaucuguuccuguuagaaggcuaugcagcauauuauauacuaugcgcauguuaugaaaugcauaauaaaaaauuuuaaaaaaucuaaaagaucuaaaaaaaaaaaaaaaaaaaaaaaaaaaaaaaaaaaaaaaaaaaaaaaaaaaaaaaaaaaaaaaaugcaucccccccccccccccccccccccccccccccaaaggcucuuuucagagccaccagaauu

SEQ ID NO: 6747 - RNA, 1919 nt, Artificial Sequence
  mRNA product Design h-3 comprising derived and/or modified sequence from HRSV(A2)__F-del_DSCav1_mut6 (opt1)
gggagacccgugacccggaaguuguacggcuacgcgacuuucccucccacaaacccucgcgcccuuccuuuccuacuugggcccggcagaaagcuuaccauggagcugcucauccugaaggccaacgccaucaccaccauccugacggcggugaccuucugcuucgccagcggccagaacaucaccgaggaguucuaccaguccacgugcagcgccgucuccaagggguaccucggcgcccugcgcaccgggugguacaccagcgugaucaccaucgagcuguccaacaucaaggagaacaagugcaacggcaccgacgccaaggugaagcucaucaagcaggagcuggacaaguacaagaacgcggucacggaccugcagaugcucaugugcagcacccccgccaccggguccggcagcgccaucgccuccggcguggcggugugcaagguccugcaccuggagggggaggugaacaagaucaagagcgcccuccuguccaccaacaaggccguggucagccuguccaacggcgugagcgugcucacguucaagguccuggaccugaagaacuacaucgacaagcagcuccugccgauccugaacaagcaguccugcagcauccccaaccccgagaccgugauggaguuccagcagaagaacaaccggcuccuggagaucacccgcgaguucuccgugaacgccggggucaccacgcccgugagcaccuacaugcugaccaacuccgagcuccugagccugaucaacgacaugccgaucaccaacgaccagaagaagcucaugagcaacaacgugcagaucguccggcagcaguccuacagcaucaugugcaucaucaaggaggaggugcuggccuacgugguccagcugccccucuacggcgugaucgacacgcccugcuggaagcugcacaccagcccccugugcaccaccaacacgaaggaggggagcaacaucugccucacccgcaccgaccggggcugguacugcgacaacgcgggcuccgugagcuucuucccgcaggccgagaccugcaaggucugcuccaaccgcguguucugcgacacgaugaacagccugacccugcccuccgaggucaaccucugcaacguggacaucuucaaccccaaguacgacugcaagaucaugaccagcaagaccgacguguccagcuccgucaucacgagccugggggccaucguguccugcuacggcaagaccaagugcaccgccagcaacaagaacaaggggaucaucaagaccuucuccaacggcugcgacuacgugagcaacaagggcgucgacacgguguccguggggaacacccuguacuacgucaacaagcaggagggccagagccucuacgugaagggggagcccaucaucaacuucuacgacccgcugguguuccccagcgacgaguucgacgccuccaucagccaggucaacgagaagaucaaccagucccuggcguucauccggaaguccgacgagcuccugcacaacgugaacgccggcaaguccaccaccaacaucaugaucaccacgaucaucaucgugaucaucgucauccugcucagccugaucgccguggggcugcuccuguacugcaaggcccgcugaggacuaguggaagcauuuuccuggcugauuaaaagaaauuacucagcuauggucaucuguuccuguuagaaggcuaugcagcauauuauauacuaugcgcauguuaugaaaugcauaauaaaaaauuuuaaaaaaucuaaaagaucuaaaaaaaaaaaaaaaaaaaaaaaaaaaaaaaaaaaaaaaaaaaaaaaaaaaaaaaaaaaaaaaaugcaucccccccccccccccccccccccccccccccaaaggcucuuuucagagccaccagaauu

SEQ ID NO: 6748 - RNA, 1919 nt, Artificial Sequence
  mRNA product Design h-3 comprising derived and/or modified sequence from HRSV(A2)__F-del_DSCav1_mut6 (opt2)
gggagacccgugacccggaaguuguacggcuacgcgacuuucccucccacaaacccucgcgcccuuccuuuccuacuugggcccggcagaaagcuuaccauggagcuccucauccucaaggccaacgccaucaccaccauccucaccgccgucaccuucugcuucgccuccggccagaacaucaccgaggaguucuaccaguccaccugcuccgccgucuccaagggcuaccucggcgcccuccgcaccggcugguacaccuccgucaucaccaucgagcucuccaacaucaaggagaacaagugcaacggcaccgacgccaaggucaagcucaucaagcaggagcucgacaaguacaagaacgccgucaccgaccuccagaugcucaugugcuccacccccgccaccggcuccggcuccgccaucgccuccggcgucgccgucugcaagguccuccaccucgagggcgaggucaacaagaucaaguccgcccuccucuccaccaacaaggccgucgucucccucuccaacggcgucuccguccucaccuucaagguccucgaccucaagaacuacaucgacaagcagcuccuccccauccucaacaagcaguccugcuccauccccaaccccgagaccgucauggaguuccagcagaagaacaaccgccuccucgagaucacccgcgaguucuccgucaacgccggcgucaccacccccgucuccaccuacaugcucaccaacuccgagcuccucucccucaucaacgacaugcccaucaccaacgaccagaagaagcucauguccaacaacguccagaucguccgccagcaguccuacuccaucaugugcaucaucaaggaggagguccucgccuacgucguccagcucccccucuacggcgucaucgacacccccugcuggaagcuccacaccuccccccucugcaccaccaacaccaaggagggcuccaacaucugccucacccgcaccgaccgcggcugguacugcgacaacgccggcuccgucuccuucuucccccaggccgagaccugcaaggucugcuccaaccgcgucuucugcgacaccaugaacucccucacccuccccuccgaggucaaccucugcaacgucgacaucuucaaccccaaguacgacugcaagaucaugaccuccaagaccgacgucuccuccuccgucaucaccucccucggcgccaucgucuccugcuacggcaagaccaagugcaccgccuccaacaagaacaagggcaucaucaagaccuucuccaacggcugcgacuacgucuccaacaagggcgucgacaccgucuccgucggcaacacccucuacuacgucaacaagcaggagggccagucccucuacgucaagggcgagcccaucaucaacuucuacgacccccucgucuuccccuccgacgaguucgacgccuccaucucccaggucaacgagaagaucaaccagucccucgccuucauccgcaaguccgacgagcuccuccacaacgucaacgccggcaaguccaccaccaacaucaugaucaccaccaucaucaucgucaucaucgucauccuccucucccucaucgccgucggccuccuccucuacugcaaggcccgcugaggacuaguggaagcauuuuccuggcugauuaaaagaaauuacucagcuauggucaucuguuccuguuagaaggcuaugcagcauauuauauacuaugcgcauguuaugaaaugcauaauaaaaaauuuuaaaaaaucuaaaagaucuaaaaaaaaaaaaaaaaaaaaaaaaaaaaaaaaaaaaaaaaaaaaaaaaaaaaaaaaaaaaaaaaugcaucccccccccccccccccccccccccccccccaaaggcucuuuucagagccaccagaauu

SEQ ID NO: 6749 - RNA, 1919 nt, Artificial Sequence
  mRNA product Design h-3 comprising derived and/or modified sequence from HRSV(A2)__F-del_DSCav1_mut6 (opt3)
gggagacccgugacccggaaguuguacggcuacgcgacuuucccucccacaaacccucgcgcccuuccuuuccuacuugggcccggcagaaagcuuaccauggagcugcucauccuuaaggccaacgcuauuaccacaauacugacugcagugacguucugcuuugccagcggccagaauaucaccgaagaguucuaccaauccacauguucugcggucucaaaaggguauuugggagcuuuaagaacugguugguacaccaguguuauuacaaucgaacugagcaacauuaaggagaauaaaugcaacggcaccgacgccaaggugaaacuaaucaagcaggaacucgauaaguauaaaaaugcaguaacugaccugcagaugcuuauguguuccacacccgccaccgggucuggaucggcuauagcaucaggcguggccgucugcaaggugcugcacuuggagggugagguuaacaaaaucaagagcgcucuccugaguacgaauaaagccguggucucccugucuaacggggugagcguacucacuuuuaagguuuuagaucugaagaauuacauugacaaacagcuuuugccuauccugaacaagcaauccuguucaauuccaaauccggaaaccgugauggaguuccagcagaaaaacaauaggcuacucgaaaucacacgggaguuuagugucaacgcgggagugacuacccccgugagcacauauaugcugaccaauucugagcuucuguccuugauaaacgauaugccuauuacgaacgaccagaagaaacucaugucaaauaacguccaaaucguucgccagcagagcuacaguauuaugugcaucaucaaggaagaggugcuggcauauguagugcaguuaccacuguacggcgucauugauacucccuguuggaaacuccauacaucuccucuuugcaccacuaauacaaaggaaggcuccaacauaugucugacccgaacggaccgugggugguacugcgauaaugccggaagcgugucguucuuuccacaagcugagaccuguaagguuugcucuaacagaguguucugcgacacaaugaacuccuugacucuacccucagaagucaaucuguguaauguggauaucuuuaacccuaaauaugacugcaagauuaugaccaguaaaacagauguaagcuccucuguuaucacuagccucggugccauagugucauguuacggcaagaccaaaugcacagcaaguaauaagaacaaggggauuaucaaaaccuucuccaauggaugugacuaugucagcaacaagggcguggacacugucucuguggguaauacgcuguacuauguuaacaaacaggaggggcagucacuuuacgugaagggagagccaaucauuaacuuuuaugauccgcugguauuccccagugacgaauuugaugcuagcaucucccaagucaaugagaaaauuaaccagucuuuggccuucauaaggaagucggacgaacuccugcacaaugugaacgcgggcaagagcacaaccaauaucaugauuacuaccaucaucauuguuauaaucgugauuuuacugucccuaaucgccgucggccuccugcuuuacugcaaagcacggugaggacuaguggaagcauuuuccuggcugauuaaaagaaauuacucagcuauggucaucuguuccuguuagaaggcuaugcagcauauuauauacuaugcgcauguuaugaaaugcauaauaaaaaauuuuaaaaaaucuaaaagaucuaaaaaaaaaaaaaaaaaaaaaaaaaaaaaaaaaaaaaaaaaaaaaaaaaaaaaaaaaaaaaaaaugcaucccccccccccccccccccccccccccccccaaaggcucuuuucagagccaccagaauu

SEQ ID NO: 6750 - RNA, 1919 nt, Artificial Sequence
  mRNA product Design h-3 comprising derived and/or modified sequence from HRSV(A2)__F-del_DSCav1_mut6 (opt4)
gggagacccgugacccggaaguuguacggcuacgcgacuuucccucccacaaacccucgcgcccuuccuuuccuacuugggcccggcagaaagcuuaccauggagcugcugauccugaaggccaacgccaucaccaccauccugaccgccgugaccuucugcuucgccagcggccagaacaucaccgaggaguucuaccagagcaccugcagcgccgugagcaagggcuaccugggcgcccugagaaccggcugguacaccagcgugaucaccaucgagcugagcaacaucaaggagaacaagugcaacggcaccgacgccaaggugaagcugaucaagcaggagcuggacaaguacaagaacgccgugaccgaccugcagaugcugaugugcagcacccccgccaccggcagcggcagcgccaucgccagcggcguggccgugugcaaggugcugcaccuggagggcgaggugaacaagaucaagagcgcccugcugagcaccaacaaggccguggugagccugagcaacggcgugagcgugcugaccuucaaggugcuggaccugaagaacuacaucgacaagcagcugcugcccauccugaacaagcagagcugcagcauccccaaccccgagaccgugauggaguuccagcagaagaacaacagacugcuggagaucaccagagaguucagcgugaacgccggcgugaccacccccgugagcaccuacaugcugaccaacagcgagcugcugagccugaucaacgacaugcccaucaccaacgaccagaagaagcugaugagcaacaacgugcagaucgugagacagcagagcuacagcaucaugugcaucaucaaggaggaggugcuggccuacguggugcagcugccccuguacggcgugaucgacacccccugcuggaagcugcacaccagcccccugugcaccaccaacaccaaggagggcagcaacaucugccugaccagaaccgacagaggcugguacugcgacaacgccggcagcgugagcuucuucccccaggccgagaccugcaaggugugcagcaacagaguguucugcgacaccaugaacagccugacccugcccagcgaggugaaccugugcaacguggacaucuucaaccccaaguacgacugcaagaucaugaccagcaagaccgacgugagcagcagcgugaucaccagccugggcgccaucgugagcugcuacggcaagaccaagugcaccgccagcaacaagaacaagggcaucaucaagaccuucagcaacggcugcgacuacgugagcaacaagggcguggacaccgugagcgugggcaacacccuguacuacgugaacaagcaggagggccagagccuguacgugaagggcgagcccaucaucaacuucuacgacccccugguguuccccagcgacgaguucgacgccagcaucagccaggugaacgagaagaucaaccagagccuggccuucaucagaaagagcgacgagcugcugcacaacgugaacgccggcaagagcaccaccaacaucaugaucaccaccaucaucaucgugaucaucgugauccugcugagccugaucgccgugggccugcugcuguacugcaaggccagaugaggacuaguggaagcauuuuccuggcugauuaaaagaaauuacucagcuauggucaucuguuccuguuagaaggcuaugcagcauauuauauacuaugcgcauguuaugaaaugcauaauaaaaaauuuuaaaaaaucuaaaagaucuaaaaaaaaaaaaaaaaaaaaaaaaaaaaaaaaaaaaaaaaaaaaaaaaaaaaaaaaaaaaaaaaugcaucccccccccccccccccccccccccccccccaaaggcucuuuucagagccaccagaauu

SEQ ID NO: 6751 - RNA, 1919 nt, Artificial Sequence
  mRNA product Design h-3 comprising derived and/or modified sequence from HRSV(A2)__F-del_DSCav1_mut6 (opt5)
gggagacccgugacccggaaguuguacggcuacgcgacuuucccucccacaaacccucgcgcccuuccuuuccuacuugggcccggcagaaagcuuaccauggagcugcucauccugaaggccaacgcuauuaccacaauccuuacggccgugaccuucugcuuugcgagcggccagaauauuacagaagaguucuaccaauccaccuguucugcugucagcaaaggguaucugggagcccucagaacaggcugguacaccuccguuaucacaauugaacugucuaacaucaaggagaauaaaugcaacgggaccgacgccaaggugaaacuuaucaagcaggaacuggauaaguauaaaaaugcugugacggaccuccagaugcugauguguagcacccccgccacaggauccggcucugcuauugccagcggggucgcggugugcaagguucugcaccucgagggagaggugaacaaaaucaaguccgcccugcuuagcaccaauaaagcugucgugucucuguccaacggcguuagcgugcucacauuuaagguccuggaucuuaagaauuacauugacaaacagcugcucccuauccugaacaagcaaucuuguuccauuccgaaucccgaaaccgugauggaguuccagcagaaaaacaaucggcugcucgaaaucacgcgcgaguuuagcgugaacgccggcgucacaaccccuguuucuacauauaugcugaccaauuccgagcuucugagccucauuaacgauaugcccaucaccaacgaccagaagaaacugauguccaauaacgugcaaaucgugagacagcagucuuacagcauuaugugcaucauuaaggaagagguccuugcuuaugugguucagcugccucucuacggggugaucgauacacccuguuggaaacugcauacguccccucugugcaccacaaauaccaaggaaggaagcaacauuugucucacacggaccgaccgcggcugguacugcgauaaugccgggucugucuccuucuuuccgcaagcggagacguguaaggugugcagcaacagaguuuucugcgacacaaugaacucucugacccuucccagcgaagugaaucuguguaaugucgauaucuuuaacccuaaauaugacugcaagaucaugaccuccaaaacagaugugucuagcuccgucauuaccagccucggagccaucgugucuuguuacggcaagacaaaaugcacggcuuccaauaagaacaaggggauuaucaaaaccuucagcaauggaugugacuauguuucuaacaagggcguggacacagucuccgugggcaauacccuguacuauguuaacaaacaggaggggcagagccuuuacgugaagggagagcccauuaucaacuuuuaugauccucuggucuuccccuccgacgaauuugaugccucuaucagccaagugaaugagaaaauuaaccagucccucgcuuucauccggaagucugacgaacugcugcacaaugugaacgccggcaagagcacaaccaauauuaugaucacgaccauuaucauuguuaucaucgucauucuccugucccuuaucgccguggggcugcuccuguacugcaaagcucgcugaggacuaguggaagcauuuuccuggcugauuaaaagaaauuacucagcuauggucaucuguuccuguuagaaggcuaugcagcauauuauauacuaugcgcauguuaugaaaugcauaauaaaaaauuuuaaaaaaucuaaaagaucuaaaaaaaaaaaaaaaaaaaaaaaaaaaaaaaaaaaaaaaaaaaaaaaaaaaaaaaaaaaaaaaaugcaucccccccccccccccccccccccccccccccaaaggcucuuuucagagccaccagaauu

SEQ ID NO: 6752 - RNA, 1919 nt, Artificial Sequence
  mRNA product Design h-3 comprising derived and/or modified sequence from HRSV(A2)__F-del_DSCav1_mut6 (opt6)
gggagacccgugacccggaaguuguacggcuacgcgacuuucccucccacaaacccucgcgcccuuccuuuccuacuugggcccggcagaaagcuuaccauggaacuacucauauuaaaagcaaacgcaauaacaacgauauuaacagcuguaacauucugcuuugcaucaggccaaaauaucaccgaagaauuuuaucaaagcacaugcucugcaguauccaaaggauacuuaggagcauuaagaacaggcugguacacauccguaauaacaauagaacuaucaaacaucaaagaaaacaaaugcaacggcacagacgccaaaguaaaacucauaaaacaagaacuagacaaauauaaaaacgcaguaacagaucuacaaaugcucaugugcuccacaccagcaaccggaucugguucagccauagcauccggcguagccgucugcaaaguauuacaccucgaaggagaaguaaacaaaauaaaaucugcccuauuaucuacaaauaaagccguaguaagucuaaguaacggaguaucaguacuaacauuuaaaguccuagaccugaaaaacuauaucgacaaacaacuauuaccaauacuaaacaaacaauccuguuccaucccuaacccagaaacaguuauggaauuucaacaaaaaaauaaccgccuuuuagaaauaacuagagaauuuucaguaaacgcaggaguuacaacaccaguaucaacauacaugcuaacaaauucagaauuauuaucccuuauaaaugacaugccuaucacaaacgaucaaaaaaaauuaauguccaacaacguacaaauaguaagacaacaaucauauuccaucaugugcaucauaaaagaagaaguccucgcauacguagugcaacuaccacuauacggagucauagauacacccuguuggaaacuucacacaucuccacuaugcacaacaaacacgaaagaaggauccaacauaugccuaacacgaacagacagaggaugguauugcgacaacgcuggaagugugagcuucuucccucaagcagaaacuugcaaaguaugcagcaaucguguauucugcgacacaaugaacucauuaacacucccaagcgaaguaaaccucugcaauguagacaucuuuaauccaaaauacgauuguaaaauaaugacuucaaaaacagacgucucaucaucuguaauaacaucuuuaggagcaauaguuucuugcuacgguaaaacaaaaugcaccgcauccaacaaaaacaaaggaauaauaaaaacauucucuaacggcugcgauuacguaucuaacaaaggaguugacacagucucaguaggaaacacacuauacuacguaaacaaacaagaaggacaaagccuauacguaaaaggagaaccaauaauaaacuucuaugacccauuaguauuuccaagcgaugaauuugacgcuucaauaucacaagucaaugaaaaaauaaaucagagcuuagcauucauaagaaaaucugaugaacuacuacacaauguaaaugcaggaaaauccacuaccaacauaaugauuaccacaauuauaauaguuaucauaguaauacuauuaucacuaauagccguuggauuacuacuauacugcaaagcaagauaaggacuaguggaagcauuuuccuggcugauuaaaagaaauuacucagcuauggucaucuguuccuguuagaaggcuaugcagcauauuauauacuaugcgcauguuaugaaaugcauaauaaaaaauuuuaaaaaaucuaaaagaucuaaaaaaaaaaaaaaaaaaaaaaaaaaaaaaaaaaaaaaaaaaaaaaaaaaaaaaaaaaaaaaaaugcaucccccccccccccccccccccccccccccccaaaggcucuuuucagagccaccagaauu

SEQ ID NO: 6753 - RNA, 1919 nt, Artificial Sequence
  mRNA product Design h-3 comprising derived and/or modified sequence from HRSV(A2)__F-del_DSCav1_mut6 (opt11)
gggagacccgugacccggaaguuguacggcuacgcgacuuucccucccacaaacccucgcgcccuuccuuuccuacuugggcccggcagaaagcuuaccauggaacuacucauccuaaaagcaaacgccaucaccaccauacuaaccgccgucaccuucugcuucgccucgggacaaaacaucaccgaagaguucuaccagucaacgugcuccgccgucucaaaaggcuaccuaggcgcccuccgcaccgggugguauaccuccgucauaacuaucgaacucucuaacaucaaagaaaacaaauguaacggcaccgacgccaaagucaaacuaaucaaacaagaacuggacaaauacaaaaacgccgucaccgaccuacaaaugcucaugugcuccacuccagccaccggcuccgguagcgcaaucgccucaggcguagcuguaugcaaaguccuccaccuagaaggcgaaguaaacaaaauaaaauccgcccuccucucaaccaacaaggccgucgucucacucucaaacggcgucuccguacucaccuuuaaaguccuagaccuuaaaaacuacaucgacaaacaacugcuaccaauccucaacaaacaaucaugcagcaucccaaacccggaaacagucauggaguuccaacagaaaaacaaccgacuccucgaaaucacccgcgaguucuccgucaacgccggagucaccacaccuguaagcacauacaugcuuacuaauuccgaacuccuuucacuaauaaacgacaugccaauaaccaacgaccaaaagaaacucauguccaacaacguacaaaucguacgccaacaauccuacuccaucaugugcaucaucaaagaagaaguccuggccuaugucguacaacucccccuuuacggugucaucgacacacccugcuggaaacuacacaccagcccccucugcacaacaaacaccaaagaaggcuccaacaucugccucacccguaccgaccgaggcugguacugcgacaacgccggcuccgucuccuucuucccccaagccgaaaccugcaaagucugcagcaaccgcgucuucugcgauaccaugaacucccucacacucccaucugaagucaaccucugcaacgucgauauuuucaauccaaaauacgacugcaaaaucaugacuagcaaaaccgacguuagcuccuccgucaucaccucccucggcgccauaguuucaugcuacggcaaaaccaaaugcaccgccuccaacaaaaacaaaggcaucauaaaaaccuucuccaacgggugcgacuacguaucuaauaaaggagucgacaccgucucaguaggaaacacccucuacuaugucaacaaacaagaaggccaaucacuauacguuaaaggcgaaccaaucaucaacuucuacgacccacucgucuuccccagcgacgaguuugacgccucaaucucgcaagucaaugaaaagauuaaccaaucccuagccuucauccgaaaaagugacgaacuccuccacaacguuaacgccggcaaaucuacaaccaacaucaugaucaccacuauaaucaucgucaucauagucauacuucucagccucaucgcagucggacuccuccuuuauugcaaggcacgauaaggacuaguggaagcauuuuccuggcugauuaaaagaaauuacucagcuauggucaucuguuccuguuagaaggcuaugcagcauauuauauacuaugcgcauguuaugaaaugcauaauaaaaaauuuuaaaaaaucuaaaagaucuaaaaaaaaaaaaaaaaaaaaaaaaaaaaaaaaaaaaaaaaaaaaaaaaaaaaaaaaaaaaaaaaugcaucccccccccccccccccccccccccccccccaaaggcucuuuucagagccaccagaauu

SEQ ID NO: 6754 - RNA, 1982 nt, Artificial Sequence
  mRNA product Design h-4 comprising derived and/or modified sequence from HRSV(A2)__F-del_DSCav1_mut6 (opt1)
gggagagggcgcuuggcuugcaaggacccugagcugcggcauugaagcacacccaacccaacucgacugaagucagccucacugaaccggaucugagaaucuucucucucugggcuugccagggcucuccgaaccuagcuagcauccucuucaauuccaacuagaaagcuuaccauggagcugcucauccugaaggccaacgccaucaccaccauccugacggcggugaccuucugcuucgccagcggccagaacaucaccgaggaguucuaccaguccacgugcagcgccgucuccaagggguaccucggcgcccugcggaccggcugguacaccuccgugaucaccaucgagcugagcaacaucaaggagaacaagugcaacgggaccgacgccaaggugaagcucaucaagcaggagcuggacaaguacaagaacgcggucacggaccugcagaugcugaugugcuccaccccggcaaccggcuccggcuccgccaucgcgagcggcgucgccgugugcaaggugcugcaccucgagggggaggucaacaagaucaagagcgcccugcuguccaccaacaaggccguggugagccucuccaacggcgucagcgugcugaccuucaaggugcuggaccucaagaacuacaucgacaagcagcugcugcccauccugaacaagcagagcugcuccauccccaaccccgagacggugauggaguuccagcagaagaacaaccggcuccuggagaucacccgcgaguucagcgugaacgccggggucaccacccccguguccacguacaugcugaccaacagcgagcuccugucccugaucaacgacaugccgaucaccaacgaccagaagaagcucaugagcaacaacgugcagaucguccggcagcaguccuacagcaucaugugcaucaucaaggaggaggugcuggcguacgugguccagcugccccucuacggcgugaucgacacccccugcuggaagcugcacacgagcccccugugcaccaccaacaccaaggagggguccaacaucugccucacgcgcaccgaccggggcugguacugcgacaacgccggcagcgucuccuucuucccgcaggccgagaccugcaaggugugcagcaaccgcguguucugcgacaccaugaacucccugacgcugcccagcgagguaaaccucugcaacgucgacaucuucaaccccaaguacgacugcaagaucaugaccuccaagaccgacgugagcuccagcgugaucaccucccugggggccaucgucagcugcuacggcaagacgaagugcaccgccagcaacaagaacaaggggaucaucaagaccuucuccaacggcugcgacuacgugagcaacaagggcguggacaccguguccgucgggaacacccuguacuacgugaacaagcaggagggccagagccucuacgugaagggggagcccaucaucaacuucuacgacccgcuggucuuccccuccgacgaguucgacgcgagcaucucccaggugaacgagaagaucaaccagagccuggccuucauccgcaaguccgacgagcugcuccacaacgugaacgccggcaagagcacgaccaacaucaugaucaccaccaucaucaucgucaucaucgugauccugcugucccucaucgccguggggcugcugcucuacugcaaggcccggugaggacuaguaauaaggaaacuguaugaaugucugugggcaggaagugaagagauccuucuguaaagguuuuuggaauuaugucugcugaauaauaaacuuuuuugaaauaauaaaucugguagaaaaaugagaucuaaaaaaaaaaaaaaaaaaaaaaaaaaaaaaaaaaaaaaaaaaaaaaaaaaaaaaaaaaaaaaaaugcaucccccccccccccccccccccccccccccccaaaggcucuuuucagagccaccagaauu

SEQ ID NO: 6755 - RNA, 1982 nt, Artificial Sequence
  mRNA product Design h-4 comprising derived and/or modified sequence from HRSV(A2)__F-del_DSCav1_mut6 (opt1)
gggagagggcgcuuggcuugcaaggacccugagcugcggcauugaagcacacccaacccaacucgacugaagucagccucacugaaccggaucugagaaucuucucucucugggcuugccagggcucuccgaaccuagcuagcauccucuucaauuccaacuagaaagcuuaccauggagcugcucauccugaaggccaacgccaucaccaccauccugacggcggugaccuucugcuucgccagcggccagaacaucaccgaggaguucuaccaguccacgugcagcgccgucuccaagggguaccucggcgcccugcgcaccgggugguacaccagcgugaucaccaucgagcuguccaacaucaaggagaacaagugcaacggcaccgacgccaaggugaagcucaucaagcaggagcuggacaaguacaagaacgcggucacggaccugcagaugcucaugugcagcacccccgccaccggguccggcagcgccaucgccuccggcguggcggugugcaagguccugcaccuggagggggaggugaacaagaucaagagcgcccuccuguccaccaacaaggccguggucagccuguccaacggcgugagcgugcucacguucaagguccuggaccugaagaacuacaucgacaagcagcuccugccgauccugaacaagcaguccugcagcauccccaaccccgagaccgugauggaguuccagcagaagaacaaccggcuccuggagaucacccgcgaguucuccgugaacgccggggucaccacgcccgugagcaccuacaugcugaccaacuccgagcuccugagccugaucaacgacaugccgaucaccaacgaccagaagaagcucaugagcaacaacgugcagaucguccggcagcaguccuacagcaucaugugcaucaucaaggaggaggugcuggccuacgugguccagcugccccucuacggcgugaucgacacgcccugcuggaagcugcacaccagcccccugugcaccaccaacacgaaggaggggagcaacaucugccucacccgcaccgaccggggcugguacugcgacaacgcgggcuccgugagcuucuucccgcaggccgagaccugcaaggucugcuccaaccgcguguucugcgacacgaugaacagccugacccugcccuccgaggucaaccucugcaacguggacaucuucaaccccaaguacgacugcaagaucaugaccagcaagaccgacguguccagcuccgucaucacgagccugggggccaucguguccugcuacggcaagaccaagugcaccgccagcaacaagaacaaggggaucaucaagaccuucuccaacggcugcgacuacgugagcaacaagggcgucgacacgguguccguggggaacacccuguacuacgucaacaagcaggagggccagagccucuacgugaagggggagcccaucaucaacuucuacgacccgcugguguuccccagcgacgaguucgacgccuccaucagccaggucaacgagaagaucaaccagucccuggcguucauccggaaguccgacgagcuccugcacaacgugaacgccggcaaguccaccaccaacaucaugaucaccacgaucaucaucgugaucaucgucauccugcucagccugaucgccguggggcugcuccuguacugcaaggcccgcugaggacuaguaauaaggaaacuguaugaaugucugugggcaggaagugaagagauccuucuguaaagguuuuuggaauuaugucugcugaauaauaaacuuuuuugaaauaauaaaucugguagaaaaaugagaucuaaaaaaaaaaaaaaaaaaaaaaaaaaaaaaaaaaaaaaaaaaaaaaaaaaaaaaaaaaaaaaaaugcaucccccccccccccccccccccccccccccccaaaggcucuuuucagagccaccagaauu

SEQ ID NO: 6756 - RNA, 1982 nt, Artificial Sequence
  mRNA product Design h-4 comprising derived and/or modified sequence from HRSV(A2)__F-del_DSCav1_mut6 (opt2)
gggagagggcgcuuggcuugcaaggacccugagcugcggcauugaagcacacccaacccaacucgacugaagucagccucacugaaccggaucugagaaucuucucucucugggcuugccagggcucuccgaaccuagcuagcauccucuucaauuccaacuagaaagcuuaccauggagcuccucauccucaaggccaacgccaucaccaccauccucaccgccgucaccuucugcuucgccuccggccagaacaucaccgaggaguucuaccaguccaccugcuccgccgucuccaagggcuaccucggcgcccuccgcaccggcugguacaccuccgucaucaccaucgagcucuccaacaucaaggagaacaagugcaacggcaccgacgccaaggucaagcucaucaagcaggagcucgacaaguacaagaacgccgucaccgaccuccagaugcucaugugcuccacccccgccaccggcuccggcuccgccaucgccuccggcgucgccgucugcaagguccuccaccucgagggcgaggucaacaagaucaaguccgcccuccucuccaccaacaaggccgucgucucccucuccaacggcgucuccguccucaccuucaagguccucgaccucaagaacuacaucgacaagcagcuccuccccauccucaacaagcaguccugcuccauccccaaccccgagaccgucauggaguuccagcagaagaacaaccgccuccucgagaucacccgcgaguucuccgucaacgccggcgucaccacccccgucuccaccuacaugcucaccaacuccgagcuccucucccucaucaacgacaugcccaucaccaacgaccagaagaagcucauguccaacaacguccagaucguccgccagcaguccuacuccaucaugugcaucaucaaggaggagguccucgccuacgucguccagcucccccucuacggcgucaucgacacccccugcuggaagcuccacaccuccccccucugcaccaccaacaccaaggagggcuccaacaucugccucacccgcaccgaccgcggcugguacugcgacaacgccggcuccgucuccuucuucccccaggccgagaccugcaaggucugcuccaaccgcgucuucugcgacaccaugaacucccucacccuccccuccgaggucaaccucugcaacgucgacaucuucaaccccaaguacgacugcaagaucaugaccuccaagaccgacgucuccuccuccgucaucaccucccucggcgccaucgucuccugcuacggcaagaccaagugcaccgccuccaacaagaacaagggcaucaucaagaccuucuccaacggcugcgacuacgucuccaacaagggcgucgacaccgucuccgucggcaacacccucuacuacgucaacaagcaggagggccagucccucuacgucaagggcgagcccaucaucaacuucuacgacccccucgucuuccccuccgacgaguucgacgccuccaucucccaggucaacgagaagaucaaccagucccucgccuucauccgcaaguccgacgagcuccuccacaacgucaacgccggcaaguccaccaccaacaucaugaucaccaccaucaucaucgucaucaucgucauccuccucucccucaucgccgucggccuccuccucuacugcaaggcccgcugaggacuaguaauaaggaaacuguaugaaugucugugggcaggaagugaagagauccuucuguaaagguuuuuggaauuaugucugcugaauaauaaacuuuuuugaaauaauaaaucugguagaaaaaugagaucuaaaaaaaaaaaaaaaaaaaaaaaaaaaaaaaaaaaaaaaaaaaaaaaaaaaaaaaaaaaaaaaaugcaucccccccccccccccccccccccccccccccaaaggcucuuuucagagccaccagaauu

SEQ ID NO: 6757 - RNA, 1982 nt, Artificial Sequence
  mRNA product Design h-4 comprising derived and/or modified sequence from HRSV(A2)__F-del_DSCav1_mut6 (opt3)
gggagagggcgcuuggcuugcaaggacccugagcugcggcauugaagcacacccaacccaacucgacugaagucagccucacugaaccggaucugagaaucuucucucucugggcuugccagggcucuccgaaccuagcuagcauccucuucaauuccaacuagaaagcuuaccauggagcugcucauccuuaaggccaacgcuauuaccacaauacugacugcagugacguucugcuuugccagcggccagaauaucaccgaagaguucuaccaauccacauguucugcggucucaaaaggguauuugggagcuuuaagaacugguugguacaccaguguuauuacaaucgaacugagcaacauuaaggagaauaaaugcaacggcaccgacgccaaggugaaacuaaucaagcaggaacucgauaaguauaaaaaugcaguaacugaccugcagaugcuuauguguuccacacccgccaccgggucuggaucggcuauagcaucaggcguggccgucugcaaggugcugcacuuggagggugagguuaacaaaaucaagagcgcucuccugaguacgaauaaagccguggucucccugucuaacggggugagcguacucacuuuuaagguuuuagaucugaagaauuacauugacaaacagcuuuugccuauccugaacaagcaauccuguucaauuccaaauccggaaaccgugauggaguuccagcagaaaaacaauaggcuacucgaaaucacacgggaguuuagugucaacgcgggagugacuacccccgugagcacauauaugcugaccaauucugagcuucuguccuugauaaacgauaugccuauuacgaacgaccagaagaaacucaugucaaauaacguccaaaucguucgccagcagagcuacaguauuaugugcaucaucaaggaagaggugcuggcauauguagugcaguuaccacuguacggcgucauugauacucccuguuggaaacuccauacaucuccucuuugcaccacuaauacaaaggaaggcuccaacauaugucugacccgaacggaccgugggugguacugcgauaaugccggaagcgugucguucuuuccacaagcugagaccuguaagguuugcucuaacagaguguucugcgacacaaugaacuccuugacucuacccucagaagucaaucuguguaauguggauaucuuuaacccuaaauaugacugcaagauuaugaccaguaaaacagauguaagcuccucuguuaucacuagccucggugccauagugucauguuacggcaagaccaaaugcacagcaaguaauaagaacaaggggauuaucaaaaccuucuccaauggaugugacuaugucagcaacaagggcguggacacugucucuguggguaauacgcuguacuauguuaacaaacaggaggggcagucacuuuacgugaagggagagccaaucauuaacuuuuaugauccgcugguauuccccagugacgaauuugaugcuagcaucucccaagucaaugagaaaauuaaccagucuuuggccuucauaaggaagucggacgaacuccugcacaaugugaacgcgggcaagagcacaaccaauaucaugauuacuaccaucaucauuguuauaaucgugauuuuacugucccuaaucgccgucggccuccugcuuuacugcaaagcacggugaggacuaguaauaaggaaacuguaugaaugucugugggcaggaagugaagagauccuucuguaaagguuuuuggaauuaugucugcugaauaauaaacuuuuuugaaauaauaaaucugguagaaaaaugagaucuaaaaaaaaaaaaaaaaaaaaaaaaaaaaaaaaaaaaaaaaaaaaaaaaaaaaaaaaaaaaaaaaugcaucccccccccccccccccccccccccccccccaaaggcucuuuucagagccaccagaauu

SEQ ID NO: 6758 - RNA, 1982 nt, Artificial Sequence
  mRNA product Design h-4 comprising derived and/or modified sequence from HRSV(A2)__F-del_DSCav1_mut6 (opt4)
gggagagggcgcuuggcuugcaaggacccugagcugcggcauugaagcacacccaacccaacucgacugaagucagccucacugaaccggaucugagaaucuucucucucugggcuugccagggcucuccgaaccuagcuagcauccucuucaauuccaacuagaaagcuuaccauggagcugcugauccugaaggccaacgccaucaccaccauccugaccgccgugaccuucugcuucgccagcggccagaacaucaccgaggaguucuaccagagcaccugcagcgccgugagcaagggcuaccugggcgcccugagaaccggcugguacaccagcgugaucaccaucgagcugagcaacaucaaggagaacaagugcaacggcaccgacgccaaggugaagcugaucaagcaggagcuggacaaguacaagaacgccgugaccgaccugcagaugcugaugugcagcacccccgccaccggcagcggcagcgccaucgccagcggcguggccgugugcaaggugcugcaccuggagggcgaggugaacaagaucaagagcgcccugcugagcaccaacaaggccguggugagccugagcaacggcgugagcgugcugaccuucaaggugcuggaccugaagaacuacaucgacaagcagcugcugcccauccugaacaagcagagcugcagcauccccaaccccgagaccgugauggaguuccagcagaagaacaacagacugcuggagaucaccagagaguucagcgugaacgccggcgugaccacccccgugagcaccuacaugcugaccaacagcgagcugcugagccugaucaacgacaugcccaucaccaacgaccagaagaagcugaugagcaacaacgugcagaucgugagacagcagagcuacagcaucaugugcaucaucaaggaggaggugcuggccuacguggugcagcugccccuguacggcgugaucgacacccccugcuggaagcugcacaccagcccccugugcaccaccaacaccaaggagggcagcaacaucugccugaccagaaccgacagaggcugguacugcgacaacgccggcagcgugagcuucuucccccaggccgagaccugcaaggugugcagcaacagaguguucugcgacaccaugaacagccugacccugcccagcgaggugaaccugugcaacguggacaucuucaaccccaaguacgacugcaagaucaugaccagcaagaccgacgugagcagcagcgugaucaccagccugggcgccaucgugagcugcuacggcaagaccaagugcaccgccagcaacaagaacaagggcaucaucaagaccuucagcaacggcugcgacuacgugagcaacaagggcguggacaccgugagcgugggcaacacccuguacuacgugaacaagcaggagggccagagccuguacgugaagggcgagcccaucaucaacuucuacgacccccugguguuccccagcgacgaguucgacgccagcaucagccaggugaacgagaagaucaaccagagccuggccuucaucagaaagagcgacgagcugcugcacaacgugaacgccggcaagagcaccaccaacaucaugaucaccaccaucaucaucgugaucaucgugauccugcugagccugaucgccgugggccugcugcuguacugcaaggccagaugaggacuaguaauaaggaaacuguaugaaugucugugggcaggaagugaagagauccuucuguaaagguuuuuggaauuaugucugcugaauaauaaacuuuuuugaaauaauaaaucugguagaaaaaugagaucuaaaaaaaaaaaaaaaaaaaaaaaaaaaaaaaaaaaaaaaaaaaaaaaaaaaaaaaaaaaaaaaaugcaucccccccccccccccccccccccccccccccaaaggcucuuuucagagccaccagaauu

SEQ ID NO: 6759 - RNA, 1982 nt, Artificial Sequence
  mRNA product Design h-4 comprising derived and/or modified sequence from HRSV(A2)__F-del_DSCav1_mut6 (opt5)
gggagagggcgcuuggcuugcaaggacccugagcugcggcauugaagcacacccaacccaacucgacugaagucagccucacugaaccggaucugagaaucuucucucucugggcuugccagggcucuccgaaccuagcuagcauccucuucaauuccaacuagaaagcuuaccauggagcugcucauccugaaggccaacgcuauuaccacaauccuuacggccgugaccuucugcuuugcgagcggccagaauauuacagaagaguucuaccaauccaccuguucugcugucagcaaaggguaucugggagcccucagaacaggcugguacaccuccguuaucacaauugaacugucuaacaucaaggagaauaaaugcaacgggaccgacgccaaggugaaacuuaucaagcaggaacuggauaaguauaaaaaugcugugacggaccuccagaugcugauguguagcacccccgccacaggauccggcucugcuauugccagcggggucgcggugugcaagguucugcaccucgagggagaggugaacaaaaucaaguccgcccugcuuagcaccaauaaagcugucgugucucuguccaacggcguuagcgugcucacauuuaagguccuggaucuuaagaauuacauugacaaacagcugcucccuauccugaacaagcaaucuuguuccauuccgaaucccgaaaccgugauggaguuccagcagaaaaacaaucggcugcucgaaaucacgcgcgaguuuagcgugaacgccggcgucacaaccccuguuucuacauauaugcugaccaauuccgagcuucugagccucauuaacgauaugcccaucaccaacgaccagaagaaacugauguccaauaacgugcaaaucgugagacagcagucuuacagcauuaugugcaucauuaaggaagagguccuugcuuaugugguucagcugccucucuacggggugaucgauacacccuguuggaaacugcauacguccccucugugcaccacaaauaccaaggaaggaagcaacauuugucucacacggaccgaccgcggcugguacugcgauaaugccgggucugucuccuucuuuccgcaagcggagacguguaaggugugcagcaacagaguuuucugcgacacaaugaacucucugacccuucccagcgaagugaaucuguguaaugucgauaucuuuaacccuaaauaugacugcaagaucaugaccuccaaaacagaugugucuagcuccgucauuaccagccucggagccaucgugucuuguuacggcaagacaaaaugcacggcuuccaauaagaacaaggggauuaucaaaaccuucagcaauggaugugacuauguuucuaacaagggcguggacacagucuccgugggcaauacccuguacuauguuaacaaacaggaggggcagagccuuuacgugaagggagagcccauuaucaacuuuuaugauccucuggucuuccccuccgacgaauuugaugccucuaucagccaagugaaugagaaaauuaaccagucccucgcuuucauccggaagucugacgaacugcugcacaaugugaacgccggcaagagcacaaccaauauuaugaucacgaccauuaucauuguuaucaucgucauucuccugucccuuaucgccguggggcugcuccuguacugcaaagcucgcugaggacuaguaauaaggaaacuguaugaaugucugugggcaggaagugaagagauccuucuguaaagguuuuuggaauuaugucugcugaauaauaaacuuuuuugaaauaauaaaucugguagaaaaaugagaucuaaaaaaaaaaaaaaaaaaaaaaaaaaaaaaaaaaaaaaaaaaaaaaaaaaaaaaaaaaaaaaaaugcaucccccccccccccccccccccccccccccccaaaggcucuuuucagagccaccagaauu

SEQ ID NO: 6760 - RNA, 1982 nt, Artificial Sequence
  mRNA product Design h-4 comprising derived and/or modified sequence from HRSV(A2)__F-del_DSCav1_mut6 (opt6)
gggagagggcgcuuggcuugcaaggacccugagcugcggcauugaagcacacccaacccaacucgacugaagucagccucacugaaccggaucugagaaucuucucucucugggcuugccagggcucuccgaaccuagcuagcauccucuucaauuccaacuagaaagcuuaccauggaacuacucauauuaaaagcaaacgcaauaacaacgauauuaacagcuguaacauucugcuuugcaucaggccaaaauaucaccgaagaauuuuaucaaagcacaugcucugcaguauccaaaggauacuuaggagcauuaagaacaggcugguacacauccguaauaacaauagaacuaucaaacaucaaagaaaacaaaugcaacggcacagacgccaaaguaaaacucauaaaacaagaacuagacaaauauaaaaacgcaguaacagaucuacaaaugcucaugugcuccacaccagcaaccggaucugguucagccauagcauccggcguagccgucugcaaaguauuacaccucgaaggagaaguaaacaaaauaaaaucugcccuauuaucuacaaauaaagccguaguaagucuaaguaacggaguaucaguacuaacauuuaaaguccuagaccugaaaaacuauaucgacaaacaacuauuaccaauacuaaacaaacaauccuguuccaucccuaacccagaaacaguuauggaauuucaacaaaaaaauaaccgccuuuuagaaauaacuagagaauuuucaguaaacgcaggaguuacaacaccaguaucaacauacaugcuaacaaauucagaauuauuaucccuuauaaaugacaugccuaucacaaacgaucaaaaaaaauuaauguccaacaacguacaaauaguaagacaacaaucauauuccaucaugugcaucauaaaagaagaaguccucgcauacguagugcaacuaccacuauacggagucauagauacacccuguuggaaacuucacacaucuccacuaugcacaacaaacacgaaagaaggauccaacauaugccuaacacgaacagacagaggaugguauugcgacaacgcuggaagugugagcuucuucccucaagcagaaacuugcaaaguaugcagcaaucguguauucugcgacacaaugaacucauuaacacucccaagcgaaguaaaccucugcaauguagacaucuuuaauccaaaauacgauuguaaaauaaugacuucaaaaacagacgucucaucaucuguaauaacaucuuuaggagcaauaguuucuugcuacgguaaaacaaaaugcaccgcauccaacaaaaacaaaggaauaauaaaaacauucucuaacggcugcgauuacguaucuaacaaaggaguugacacagucucaguaggaaacacacuauacuacguaaacaaacaagaaggacaaagccuauacguaaaaggagaaccaauaauaaacuucuaugacccauuaguauuuccaagcgaugaauuugacgcuucaauaucacaagucaaugaaaaaauaaaucagagcuuagcauucauaagaaaaucugaugaacuacuacacaauguaaaugcaggaaaauccacuaccaacauaaugauuaccacaauuauaauaguuaucauaguaauacuauuaucacuaauagccguuggauuacuacuauacugcaaagcaagauaaggacuaguaauaaggaaacuguaugaaugucugugggcaggaagugaagagauccuucuguaaagguuuuuggaauuaugucugcugaauaauaaacuuuuuugaaauaauaaaucugguagaaaaaugagaucuaaaaaaaaaaaaaaaaaaaaaaaaaaaaaaaaaaaaaaaaaaaaaaaaaaaaaaaaaaaaaaaaugcaucccccccccccccccccccccccccccccccaaaggcucuuuucagagccaccagaauu

SEQ ID NO: 6761 - RNA, 1982 nt, Artificial Sequence
  mRNA product Design h-4 comprising derived and/or modified sequence from HRSV(A2)__F-del_DSCav1_mut6 (opt11)
gggagagggcgcuuggcuugcaaggacccugagcugcggcauugaagcacacccaacccaacucgacugaagucagccucacugaaccggaucugagaaucuucucucucugggcuugccagggcucuccgaaccuagcuagcauccucuucaauuccaacuagaaagcuuaccauggaacuacucauccuaaaagcaaacgccaucaccaccauacuaaccgccgucaccuucugcuucgccucgggacaaaacaucaccgaagaguucuaccagucaacgugcuccgccgucucaaaaggcuaccuaggcgcccuccgcaccgggugguauaccuccgucauaacuaucgaacucucuaacaucaaagaaaacaaauguaacggcaccgacgccaaagucaaacuaaucaaacaagaacuggacaaauacaaaaacgccgucaccgaccuacaaaugcucaugugcuccacuccagccaccggcuccgguagcgcaaucgccucaggcguagcuguaugcaaaguccuccaccuagaaggcgaaguaaacaaaauaaaauccgcccuccucucaaccaacaaggccgucgucucacucucaaacggcgucuccguacucaccuuuaaaguccuagaccuuaaaaacuacaucgacaaacaacugcuaccaauccucaacaaacaaucaugcagcaucccaaacccggaaacagucauggaguuccaacagaaaaacaaccgacuccucgaaaucacccgcgaguucuccgucaacgccggagucaccacaccuguaagcacauacaugcuuacuaauuccgaacuccuuucacuaauaaacgacaugccaauaaccaacgaccaaaagaaacucauguccaacaacguacaaaucguacgccaacaauccuacuccaucaugugcaucaucaaagaagaaguccuggccuaugucguacaacucccccuuuacggugucaucgacacacccugcuggaaacuacacaccagcccccucugcacaacaaacaccaaagaaggcuccaacaucugccucacccguaccgaccgaggcugguacugcgacaacgccggcuccgucuccuucuucccccaagccgaaaccugcaaagucugcagcaaccgcgucuucugcgauaccaugaacucccucacacucccaucugaagucaaccucugcaacgucgauauuuucaauccaaaauacgacugcaaaaucaugacuagcaaaaccgacguuagcuccuccgucaucaccucccucggcgccauaguuucaugcuacggcaaaaccaaaugcaccgccuccaacaaaaacaaaggcaucauaaaaaccuucuccaacgggugcgacuacguaucuaauaaaggagucgacaccgucucaguaggaaacacccucuacuaugucaacaaacaagaaggccaaucacuauacguuaaaggcgaaccaaucaucaacuucuacgacccacucgucuuccccagcgacgaguuugacgccucaaucucgcaagucaaugaaaagauuaaccaaucccuagccuucauccgaaaaagugacgaacuccuccacaacguuaacgccggcaaaucuacaaccaacaucaugaucaccacuauaaucaucgucaucauagucauacuucucagccucaucgcagucggacuccuccuuuauugcaaggcacgauaaggacuaguaauaaggaaacuguaugaaugucugugggcaggaagugaagagauccuucuguaaagguuuuuggaauuaugucugcugaauaauaaacuuuuuugaaauaauaaaucugguagaaaaaugagaucuaaaaaaaaaaaaaaaaaaaaaaaaaaaaaaaaaaaaaaaaaaaaaaaaaaaaaaaaaaaaaaaaugcaucccccccccccccccccccccccccccccccaaaggcucuuuucagagccaccagaauu

SEQ ID NO: 6762 - RNA, 1998 nt, Artificial Sequence
  mRNA product Design h-5 comprising derived and/or modified sequence from HRSV(A2)__F-del_DSCav1_mut6 (opt1)
gggagagggcgcuuggcuugcaaggacccugagcugcggcauugaagcacacccaacccaacucgacugaagucagccucacugaaccggaucugagaaucuucucucucugggcuugccagggcucuccgaaccuagcuagcauccucuucaauuccaacuagaaagcuuaccauggagcugcucauccugaaggccaacgccaucaccaccauccugacggcggugaccuucugcuucgccagcggccagaacaucaccgaggaguucuaccaguccacgugcagcgccgucuccaagggguaccucggcgcccugcggaccggcugguacaccuccgugaucaccaucgagcugagcaacaucaaggagaacaagugcaacgggaccgacgccaaggugaagcucaucaagcaggagcuggacaaguacaagaacgcggucacggaccugcagaugcugaugugcuccaccccggcaaccggcuccggcuccgccaucgcgagcggcgucgccgugugcaaggugcugcaccucgagggggaggucaacaagaucaagagcgcccugcuguccaccaacaaggccguggugagccucuccaacggcgucagcgugcugaccuucaaggugcuggaccucaagaacuacaucgacaagcagcugcugcccauccugaacaagcagagcugcuccauccccaaccccgagacggugauggaguuccagcagaagaacaaccggcuccuggagaucacccgcgaguucagcgugaacgccggggucaccacccccguguccacguacaugcugaccaacagcgagcuccugucccugaucaacgacaugccgaucaccaacgaccagaagaagcucaugagcaacaacgugcagaucguccggcagcaguccuacagcaucaugugcaucaucaaggaggaggugcuggcguacgugguccagcugccccucuacggcgugaucgacacccccugcuggaagcugcacacgagcccccugugcaccaccaacaccaaggagggguccaacaucugccucacgcgcaccgaccggggcugguacugcgacaacgccggcagcgucuccuucuucccgcaggccgagaccugcaaggugugcagcaaccgcguguucugcgacaccaugaacucccugacgcugcccagcgagguaaaccucugcaacgucgacaucuucaaccccaaguacgacugcaagaucaugaccuccaagaccgacgugagcuccagcgugaucaccucccugggggccaucgucagcugcuacggcaagacgaagugcaccgccagcaacaagaacaaggggaucaucaagaccuucuccaacggcugcgacuacgugagcaacaagggcguggacaccguguccgucgggaacacccuguacuacgugaacaagcaggagggccagagccucuacgugaagggggagcccaucaucaacuucuacgacccgcuggucuuccccuccgacgaguucgacgcgagcaucucccaggugaacgagaagaucaaccagagccuggccuucauccgcaaguccgacgagcugcuccacaacgugaacgccggcaagagcacgaccaacaucaugaucaccaccaucaucaucgucaucaucgugauccugcugucccucaucgccguggggcugcugcucuacugcaaggcccggugaggacuaguacuggcugcaucucccuuuccucuguccuccauccuucucccaggauggugaagggggaccugguacccagugauccccaccccaggauccuaaaucaugacuuaccugcuaauaaaaacucauuggaaaagugagaagaucuaaaaaaaaaaaaaaaaaaaaaaaaaaaaaaaaaaaaaaaaaaaaaaaaaaaaaaaaaaaaaaaaugcaucccccccccccccccccccccccccccccccaaaggcucuuuucagagccaccagaauu

SEQ ID NO: 6763 - RNA, 1998 nt, Artificial Sequence
  mRNA product Design h-5 comprising derived and/or modified sequence from HRSV(A2)__F-del_DSCav1_mut6 (opt1)
gggagagggcgcuuggcuugcaaggacccugagcugcggcauugaagcacacccaacccaacucgacugaagucagccucacugaaccggaucugagaaucuucucucucugggcuugccagggcucuccgaaccuagcuagcauccucuucaauuccaacuagaaagcuuaccauggagcugcucauccugaaggccaacgccaucaccaccauccugacggcggugaccuucugcuucgccagcggccagaacaucaccgaggaguucuaccaguccacgugcagcgccgucuccaagggguaccucggcgcccugcgcaccgggugguacaccagcgugaucaccaucgagcuguccaacaucaaggagaacaagugcaacggcaccgacgccaaggugaagcucaucaagcaggagcuggacaaguacaagaacgcggucacggaccugcagaugcucaugugcagcacccccgccaccggguccggcagcgccaucgccuccggcguggcggugugcaagguccugcaccuggagggggaggugaacaagaucaagagcgcccuccuguccaccaacaaggccguggucagccuguccaacggcgugagcgugcucacguucaagguccuggaccugaagaacuacaucgacaagcagcuccugccgauccugaacaagcaguccugcagcauccccaaccccgagaccgugauggaguuccagcagaagaacaaccggcuccuggagaucacccgcgaguucuccgugaacgccggggucaccacgcccgugagcaccuacaugcugaccaacuccgagcuccugagccugaucaacgacaugccgaucaccaacgaccagaagaagcucaugagcaacaacgugcagaucguccggcagcaguccuacagcaucaugugcaucaucaaggaggaggugcuggccuacgugguccagcugccccucuacggcgugaucgacacgcccugcuggaagcugcacaccagcccccugugcaccaccaacacgaaggaggggagcaacaucugccucacccgcaccgaccggggcugguacugcgacaacgcgggcuccgugagcuucuucccgcaggccgagaccugcaaggucugcuccaaccgcguguucugcgacacgaugaacagccugacccugcccuccgaggucaaccucugcaacguggacaucuucaaccccaaguacgacugcaagaucaugaccagcaagaccgacguguccagcuccgucaucacgagccugggggccaucguguccugcuacggcaagaccaagugcaccgccagcaacaagaacaaggggaucaucaagaccuucuccaacggcugcgacuacgugagcaacaagggcgucgacacgguguccguggggaacacccuguacuacgucaacaagcaggagggccagagccucuacgugaagggggagcccaucaucaacuucuacgacccgcugguguuccccagcgacgaguucgacgccuccaucagccaggucaacgagaagaucaaccagucccuggcguucauccggaaguccgacgagcuccugcacaacgugaacgccggcaaguccaccaccaacaucaugaucaccacgaucaucaucgugaucaucgucauccugcucagccugaucgccguggggcugcuccuguacugcaaggcccgcugaggacuaguacuggcugcaucucccuuuccucuguccuccauccuucucccaggauggugaagggggaccugguacccagugauccccaccccaggauccuaaaucaugacuuaccugcuaauaaaaacucauuggaaaagugagaagaucuaaaaaaaaaaaaaaaaaaaaaaaaaaaaaaaaaaaaaaaaaaaaaaaaaaaaaaaaaaaaaaaaugcaucccccccccccccccccccccccccccccccaaaggcucuuuucagagccaccagaauu

SEQ ID NO: 6764 - RNA, 1998 nt, Artificial Sequence
  mRNA product Design h-5 comprising derived and/or modified sequence from HRSV(A2)__F-del_DSCav1_mut6 (opt2)
gggagagggcgcuuggcuugcaaggacccugagcugcggcauugaagcacacccaacccaacucgacugaagucagccucacugaaccggaucugagaaucuucucucucugggcuugccagggcucuccgaaccuagcuagcauccucuucaauuccaacuagaaagcuuaccauggagcuccucauccucaaggccaacgccaucaccaccauccucaccgccgucaccuucugcuucgccuccggccagaacaucaccgaggaguucuaccaguccaccugcuccgccgucuccaagggcuaccucggcgcccuccgcaccggcugguacaccuccgucaucaccaucgagcucuccaacaucaaggagaacaagugcaacggcaccgacgccaaggucaagcucaucaagcaggagcucgacaaguacaagaacgccgucaccgaccuccagaugcucaugugcuccacccccgccaccggcuccggcuccgccaucgccuccggcgucgccgucugcaagguccuccaccucgagggcgaggucaacaagaucaaguccgcccuccucuccaccaacaaggccgucgucucccucuccaacggcgucuccguccucaccuucaagguccucgaccucaagaacuacaucgacaagcagcuccuccccauccucaacaagcaguccugcuccauccccaaccccgagaccgucauggaguuccagcagaagaacaaccgccuccucgagaucacccgcgaguucuccgucaacgccggcgucaccacccccgucuccaccuacaugcucaccaacuccgagcuccucucccucaucaacgacaugcccaucaccaacgaccagaagaagcucauguccaacaacguccagaucguccgccagcaguccuacuccaucaugugcaucaucaaggaggagguccucgccuacgucguccagcucccccucuacggcgucaucgacacccccugcuggaagcuccacaccuccccccucugcaccaccaacaccaaggagggcuccaacaucugccucacccgcaccgaccgcggcugguacugcgacaacgccggcuccgucuccuucuucccccaggccgagaccugcaaggucugcuccaaccgcgucuucugcgacaccaugaacucccucacccuccccuccgaggucaaccucugcaacgucgacaucuucaaccccaaguacgacugcaagaucaugaccuccaagaccgacgucuccuccuccgucaucaccucccucggcgccaucgucuccugcuacggcaagaccaagugcaccgccuccaacaagaacaagggcaucaucaagaccuucuccaacggcugcgacuacgucuccaacaagggcgucgacaccgucuccgucggcaacacccucuacuacgucaacaagcaggagggccagucccucuacgucaagggcgagcccaucaucaacuucuacgacccccucgucuuccccuccgacgaguucgacgccuccaucucccaggucaacgagaagaucaaccagucccucgccuucauccgcaaguccgacgagcuccuccacaacgucaacgccggcaaguccaccaccaacaucaugaucaccaccaucaucaucgucaucaucgucauccuccucucccucaucgccgucggccuccuccucuacugcaaggcccgcugaggacuaguacuggcugcaucucccuuuccucuguccuccauccuucucccaggauggugaagggggaccugguacccagugauccccaccccaggauccuaaaucaugacuuaccugcuaauaaaaacucauuggaaaagugagaagaucuaaaaaaaaaaaaaaaaaaaaaaaaaaaaaaaaaaaaaaaaaaaaaaaaaaaaaaaaaaaaaaaaugcaucccccccccccccccccccccccccccccccaaaggcucuuuucagagccaccagaauu

SEQ ID NO: 6765 - RNA, 1998 nt, Artificial Sequence
  mRNA product Design h-5 comprising derived and/or modified sequence from HRSV(A2)__F-del_DSCav1_mut6 (opt3)
gggagagggcgcuuggcuugcaaggacccugagcugcggcauugaagcacacccaacccaacucgacugaagucagccucacugaaccggaucugagaaucuucucucucugggcuugccagggcucuccgaaccuagcuagcauccucuucaauuccaacuagaaagcuuaccauggagcugcucauccuuaaggccaacgcuauuaccacaauacugacugcagugacguucugcuuugccagcggccagaauaucaccgaagaguucuaccaauccacauguucugcggucucaaaaggguauuugggagcuuuaagaacugguugguacaccaguguuauuacaaucgaacugagcaacauuaaggagaauaaaugcaacggcaccgacgccaaggugaaacuaaucaagcaggaacucgauaaguauaaaaaugcaguaacugaccugcagaugcuuauguguuccacacccgccaccgggucuggaucggcuauagcaucaggcguggccgucugcaaggugcugcacuuggagggugagguuaacaaaaucaagagcgcucuccugaguacgaauaaagccguggucucccugucuaacggggugagcguacucacuuuuaagguuuuagaucugaagaauuacauugacaaacagcuuuugccuauccugaacaagcaauccuguucaauuccaaauccggaaaccgugauggaguuccagcagaaaaacaauaggcuacucgaaaucacacgggaguuuagugucaacgcgggagugacuacccccgugagcacauauaugcugaccaauucugagcuucuguccuugauaaacgauaugccuauuacgaacgaccagaagaaacucaugucaaauaacguccaaaucguucgccagcagagcuacaguauuaugugcaucaucaaggaagaggugcuggcauauguagugcaguuaccacuguacggcgucauugauacucccuguuggaaacuccauacaucuccucuuugcaccacuaauacaaaggaaggcuccaacauaugucugacccgaacggaccgugggugguacugcgauaaugccggaagcgugucguucuuuccacaagcugagaccuguaagguuugcucuaacagaguguucugcgacacaaugaacuccuugacucuacccucagaagucaaucuguguaauguggauaucuuuaacccuaaauaugacugcaagauuaugaccaguaaaacagauguaagcuccucuguuaucacuagccucggugccauagugucauguuacggcaagaccaaaugcacagcaaguaauaagaacaaggggauuaucaaaaccuucuccaauggaugugacuaugucagcaacaagggcguggacacugucucuguggguaauacgcuguacuauguuaacaaacaggaggggcagucacuuuacgugaagggagagccaaucauuaacuuuuaugauccgcugguauuccccagugacgaauuugaugcuagcaucucccaagucaaugagaaaauuaaccagucuuuggccuucauaaggaagucggacgaacuccugcacaaugugaacgcgggcaagagcacaaccaauaucaugauuacuaccaucaucauuguuauaaucgugauuuuacugucccuaaucgccgucggccuccugcuuuacugcaaagcacggugaggacuaguacuggcugcaucucccuuuccucuguccuccauccuucucccaggauggugaagggggaccugguacccagugauccccaccccaggauccuaaaucaugacuuaccugcuaauaaaaacucauuggaaaagugagaagaucuaaaaaaaaaaaaaaaaaaaaaaaaaaaaaaaaaaaaaaaaaaaaaaaaaaaaaaaaaaaaaaaaugcaucccccccccccccccccccccccccccccccaaaggcucuuuucagagccaccagaauu

SEQ ID NO: 6766 - RNA, 1998 nt, Artificial Sequence
  mRNA product Design h-5 comprising derived and/or modified sequence from HRSV(A2)__F-del_DSCav1_mut6 (opt4)
gggagagggcgcuuggcuugcaaggacccugagcugcggcauugaagcacacccaacccaacucgacugaagucagccucacugaaccggaucugagaaucuucucucucugggcuugccagggcucuccgaaccuagcuagcauccucuucaauuccaacuagaaagcuuaccauggagcugcugauccugaaggccaacgccaucaccaccauccugaccgccgugaccuucugcuucgccagcggccagaacaucaccgaggaguucuaccagagcaccugcagcgccgugagcaagggcuaccugggcgcccugagaaccggcugguacaccagcgugaucaccaucgagcugagcaacaucaaggagaacaagugcaacggcaccgacgccaaggugaagcugaucaagcaggagcuggacaaguacaagaacgccgugaccgaccugcagaugcugaugugcagcacccccgccaccggcagcggcagcgccaucgccagcggcguggccgugugcaaggugcugcaccuggagggcgaggugaacaagaucaagagcgcccugcugagcaccaacaaggccguggugagccugagcaacggcgugagcgugcugaccuucaaggugcuggaccugaagaacuacaucgacaagcagcugcugcccauccugaacaagcagagcugcagcauccccaaccccgagaccgugauggaguuccagcagaagaacaacagacugcuggagaucaccagagaguucagcgugaacgccggcgugaccacccccgugagcaccuacaugcugaccaacagcgagcugcugagccugaucaacgacaugcccaucaccaacgaccagaagaagcugaugagcaacaacgugcagaucgugagacagcagagcuacagcaucaugugcaucaucaaggaggaggugcuggccuacguggugcagcugccccuguacggcgugaucgacacccccugcuggaagcugcacaccagcccccugugcaccaccaacaccaaggagggcagcaacaucugccugaccagaaccgacagaggcugguacugcgacaacgccggcagcgugagcuucuucccccaggccgagaccugcaaggugugcagcaacagaguguucugcgacaccaugaacagccugacccugcccagcgaggugaaccugugcaacguggacaucuucaaccccaaguacgacugcaagaucaugaccagcaagaccgacgugagcagcagcgugaucaccagccugggcgccaucgugagcugcuacggcaagaccaagugcaccgccagcaacaagaacaagggcaucaucaagaccuucagcaacggcugcgacuacgugagcaacaagggcguggacaccgugagcgugggcaacacccuguacuacgugaacaagcaggagggccagagccuguacgugaagggcgagcccaucaucaacuucuacgacccccugguguuccccagcgacgaguucgacgccagcaucagccaggugaacgagaagaucaaccagagccuggccuucaucagaaagagcgacgagcugcugcacaacgugaacgccggcaagagcaccaccaacaucaugaucaccaccaucaucaucgugaucaucgugauccugcugagccugaucgccgugggccugcugcuguacugcaaggccagaugaggacuaguacuggcugcaucucccuuuccucuguccuccauccuucucccaggauggugaagggggaccugguacccagugauccccaccccaggauccuaaaucaugacuuaccugcuaauaaaaacucauuggaaaagugagaagaucuaaaaaaaaaaaaaaaaaaaaaaaaaaaaaaaaaaaaaaaaaaaaaaaaaaaaaaaaaaaaaaaaugcaucccccccccccccccccccccccccccccccaaaggcucuuuucagagccaccagaauu

SEQ ID NO: 6767 - RNA, 1998 nt, Artificial Sequence
  mRNA product Design h-5 comprising derived and/or modified sequence from HRSV(A2)__F-del_DSCav1_mut6 (opt5)
gggagagggcgcuuggcuugcaaggacccugagcugcggcauugaagcacacccaacccaacucgacugaagucagccucacugaaccggaucugagaaucuucucucucugggcuugccagggcucuccgaaccuagcuagcauccucuucaauuccaacuagaaagcuuaccauggagcugcucauccugaaggccaacgcuauuaccacaauccuuacggccgugaccuucugcuuugcgagcggccagaauauuacagaagaguucuaccaauccaccuguucugcugucagcaaaggguaucugggagcccucagaacaggcugguacaccuccguuaucacaauugaacugucuaacaucaaggagaauaaaugcaacgggaccgacgccaaggugaaacuuaucaagcaggaacuggauaaguauaaaaaugcugugacggaccuccagaugcugauguguagcacccccgccacaggauccggcucugcuauugccagcggggucgcggugugcaagguucugcaccucgagggagaggugaacaaaaucaaguccgcccugcuuagcaccaauaaagcugucgugucucuguccaacggcguuagcgugcucacauuuaagguccuggaucuuaagaauuacauugacaaacagcugcucccuauccugaacaagcaaucuuguuccauuccgaaucccgaaaccgugauggaguuccagcagaaaaacaaucggcugcucgaaaucacgcgcgaguuuagcgugaacgccggcgucacaaccccuguuucuacauauaugcugaccaauuccgagcuucugagccucauuaacgauaugcccaucaccaacgaccagaagaaacugauguccaauaacgugcaaaucgugagacagcagucuuacagcauuaugugcaucauuaaggaagagguccuugcuuaugugguucagcugccucucuacggggugaucgauacacccuguuggaaacugcauacguccccucugugcaccacaaauaccaaggaaggaagcaacauuugucucacacggaccgaccgcggcugguacugcgauaaugccgggucugucuccuucuuuccgcaagcggagacguguaaggugugcagcaacagaguuuucugcgacacaaugaacucucugacccuucccagcgaagugaaucuguguaaugucgauaucuuuaacccuaaauaugacugcaagaucaugaccuccaaaacagaugugucuagcuccgucauuaccagccucggagccaucgugucuuguuacggcaagacaaaaugcacggcuuccaauaagaacaaggggauuaucaaaaccuucagcaauggaugugacuauguuucuaacaagggcguggacacagucuccgugggcaauacccuguacuauguuaacaaacaggaggggcagagccuuuacgugaagggagagcccauuaucaacuuuuaugauccucuggucuuccccuccgacgaauuugaugccucuaucagccaagugaaugagaaaauuaaccagucccucgcuuucauccggaagucugacgaacugcugcacaaugugaacgccggcaagagcacaaccaauauuaugaucacgaccauuaucauuguuaucaucgucauucuccugucccuuaucgccguggggcugcuccuguacugcaaagcucgcugaggacuaguacuggcugcaucucccuuuccucuguccuccauccuucucccaggauggugaagggggaccugguacccagugauccccaccccaggauccuaaaucaugacuuaccugcuaauaaaaacucauuggaaaagugagaagaucuaaaaaaaaaaaaaaaaaaaaaaaaaaaaaaaaaaaaaaaaaaaaaaaaaaaaaaaaaaaaaaaaugcaucccccccccccccccccccccccccccccccaaaggcucuuuucagagccaccagaauu

SEQ ID NO: 6768 - RNA, 1998 nt, Artificial Sequence
  mRNA product Design h-5 comprising derived and/or modified sequence from HRSV(A2)__F-del_DSCav1_mut6 (opt6)
gggagagggcgcuuggcuugcaaggacccugagcugcggcauugaagcacacccaacccaacucgacugaagucagccucacugaaccggaucugagaaucuucucucucugggcuugccagggcucuccgaaccuagcuagcauccucuucaauuccaacuagaaagcuuaccauggaacuacucauauuaaaagcaaacgcaauaacaacgauauuaacagcuguaacauucugcuuugcaucaggccaaaauaucaccgaagaauuuuaucaaagcacaugcucugcaguauccaaaggauacuuaggagcauuaagaacaggcugguacacauccguaauaacaauagaacuaucaaacaucaaagaaaacaaaugcaacggcacagacgccaaaguaaaacucauaaaacaagaacuagacaaauauaaaaacgcaguaacagaucuacaaaugcucaugugcuccacaccagcaaccggaucugguucagccauagcauccggcguagccgucugcaaaguauuacaccucgaaggagaaguaaacaaaauaaaaucugcccuauuaucuacaaauaaagccguaguaagucuaaguaacggaguaucaguacuaacauuuaaaguccuagaccugaaaaacuauaucgacaaacaacuauuaccaauacuaaacaaacaauccuguuccaucccuaacccagaaacaguuauggaauuucaacaaaaaaauaaccgccuuuuagaaauaacuagagaauuuucaguaaacgcaggaguuacaacaccaguaucaacauacaugcuaacaaauucagaauuauuaucccuuauaaaugacaugccuaucacaaacgaucaaaaaaaauuaauguccaacaacguacaaauaguaagacaacaaucauauuccaucaugugcaucauaaaagaagaaguccucgcauacguagugcaacuaccacuauacggagucauagauacacccuguuggaaacuucacacaucuccacuaugcacaacaaacacgaaagaaggauccaacauaugccuaacacgaacagacagaggaugguauugcgacaacgcuggaagugugagcuucuucccucaagcagaaacuugcaaaguaugcagcaaucguguauucugcgacacaaugaacucauuaacacucccaagcgaaguaaaccucugcaauguagacaucuuuaauccaaaauacgauuguaaaauaaugacuucaaaaacagacgucucaucaucuguaauaacaucuuuaggagcaauaguuucuugcuacgguaaaacaaaaugcaccgcauccaacaaaaacaaaggaauaauaaaaacauucucuaacggcugcgauuacguaucuaacaaaggaguugacacagucucaguaggaaacacacuauacuacguaaacaaacaagaaggacaaagccuauacguaaaaggagaaccaauaauaaacuucuaugacccauuaguauuuccaagcgaugaauuugacgcuucaauaucacaagucaaugaaaaaauaaaucagagcuuagcauucauaagaaaaucugaugaacuacuacacaauguaaaugcaggaaaauccacuaccaacauaaugauuaccacaauuauaauaguuaucauaguaauacuauuaucacuaauagccguuggauuacuacuauacugcaaagcaagauaaggacuaguacuggcugcaucucccuuuccucuguccuccauccuucucccaggauggugaagggggaccugguacccagugauccccaccccaggauccuaaaucaugacuuaccugcuaauaaaaacucauuggaaaagugagaagaucuaaaaaaaaaaaaaaaaaaaaaaaaaaaaaaaaaaaaaaaaaaaaaaaaaaaaaaaaaaaaaaaaugcaucccccccccccccccccccccccccccccccaaaggcucuuuucagagccaccagaauu

SEQ ID NO: 6769 - RNA, 1998 nt, Artificial Sequence
  mRNA product Design h-5 comprising derived and/or modified sequence from HRSV(A2)__F-del_DSCav1_mut6 (opt11)
gggagagggcgcuuggcuugcaaggacccugagcugcggcauugaagcacacccaacccaacucgacugaagucagccucacugaaccggaucugagaaucuucucucucugggcuugccagggcucuccgaaccuagcuagcauccucuucaauuccaacuagaaagcuuaccauggaacuacucauccuaaaagcaaacgccaucaccaccauacuaaccgccgucaccuucugcuucgccucgggacaaaacaucaccgaagaguucuaccagucaacgugcuccgccgucucaaaaggcuaccuaggcgcccuccgcaccgggugguauaccuccgucauaacuaucgaacucucuaacaucaaagaaaacaaauguaacggcaccgacgccaaagucaaacuaaucaaacaagaacuggacaaauacaaaaacgccgucaccgaccuacaaaugcucaugugcuccacuccagccaccggcuccgguagcgcaaucgccucaggcguagcuguaugcaaaguccuccaccuagaaggcgaaguaaacaaaauaaaauccgcccuccucucaaccaacaaggccgucgucucacucucaaacggcgucuccguacucaccuuuaaaguccuagaccuuaaaaacuacaucgacaaacaacugcuaccaauccucaacaaacaaucaugcagcaucccaaacccggaaacagucauggaguuccaacagaaaaacaaccgacuccucgaaaucacccgcgaguucuccgucaacgccggagucaccacaccuguaagcacauacaugcuuacuaauuccgaacuccuuucacuaauaaacgacaugccaauaaccaacgaccaaaagaaacucauguccaacaacguacaaaucguacgccaacaauccuacuccaucaugugcaucaucaaagaagaaguccuggccuaugucguacaacucccccuuuacggugucaucgacacacccugcuggaaacuacacaccagcccccucugcacaacaaacaccaaagaaggcuccaacaucugccucacccguaccgaccgaggcugguacugcgacaacgccggcuccgucuccuucuucccccaagccgaaaccugcaaagucugcagcaaccgcgucuucugcgauaccaugaacucccucacacucccaucugaagucaaccucugcaacgucgauauuuucaauccaaaauacgacugcaaaaucaugacuagcaaaaccgacguuagcuccuccgucaucaccucccucggcgccauaguuucaugcuacggcaaaaccaaaugcaccgccuccaacaaaaacaaaggcaucauaaaaaccuucuccaacgggugcgacuacguaucuaauaaaggagucgacaccgucucaguaggaaacacccucuacuaugucaacaaacaagaaggccaaucacuauacguuaaaggcgaaccaaucaucaacuucuacgacccacucgucuuccccagcgacgaguuugacgccucaaucucgcaagucaaugaaaagauuaaccaaucccuagccuucauccgaaaaagugacgaacuccuccacaacguuaacgccggcaaaucuacaaccaacaucaugaucaccacuauaaucaucgucaucauagucauacuucucagccucaucgcagucggacuccuccuuuauugcaaggcacgauaaggacuaguacuggcugcaucucccuuuccucuguccuccauccuucucccaggauggugaagggggaccugguacccagugauccccaccccaggauccuaaaucaugacuuaccugcuaauaaaaacucauuggaaaagugagaagaucuaaaaaaaaaaaaaaaaaaaaaaaaaaaaaaaaaaaaaaaaaaaaaaaaaaaaaaaaaaaaaaaaugcaucccccccccccccccccccccccccccccccaaaggcucuuuucagagccaccagaauu

SEQ ID NO: 6770 - RNA, 1931 nt, Artificial Sequence
  mRNA product Design i-1 comprising derived and/or modified sequence from HRSV(A2)__F-del_DSCav1_mut6 (opt1)
gggagagggcgcuuggcuugcaaggacccugagcugcggcauugaagcacacccaacccaacucgacugaagucagccucacugaaccggaucugagaaucuucucucucugggcuugccagggcucuccgaaccuagcuagcauccucuucaauuccaacuagaaagcuuaccauggagcugcucauccugaaggccaacgccaucaccaccauccugacggcggugaccuucugcuucgccagcggccagaacaucaccgaggaguucuaccaguccacgugcagcgccgucuccaagggguaccucggcgcccugcggaccggcugguacaccuccgugaucaccaucgagcugagcaacaucaaggagaacaagugcaacgggaccgacgccaaggugaagcucaucaagcaggagcuggacaaguacaagaacgcggucacggaccugcagaugcugaugugcuccaccccggcaaccggcuccggcuccgccaucgcgagcggcgucgccgugugcaaggugcugcaccucgagggggaggucaacaagaucaagagcgcccugcuguccaccaacaaggccguggugagccucuccaacggcgucagcgugcugaccuucaaggugcuggaccucaagaacuacaucgacaagcagcugcugcccauccugaacaagcagagcugcuccauccccaaccccgagacggugauggaguuccagcagaagaacaaccggcuccuggagaucacccgcgaguucagcgugaacgccggggucaccacccccguguccacguacaugcugaccaacagcgagcuccugucccugaucaacgacaugccgaucaccaacgaccagaagaagcucaugagcaacaacgugcagaucguccggcagcaguccuacagcaucaugugcaucaucaaggaggaggugcuggcguacgugguccagcugccccucuacggcgugaucgacacccccugcuggaagcugcacacgagcccccugugcaccaccaacaccaaggagggguccaacaucugccucacgcgcaccgaccggggcugguacugcgacaacgccggcagcgucuccuucuucccgcaggccgagaccugcaaggugugcagcaaccgcguguucugcgacaccaugaacucccugacgcugcccagcgagguaaaccucugcaacgucgacaucuucaaccccaaguacgacugcaagaucaugaccuccaagaccgacgugagcuccagcgugaucaccucccugggggccaucgucagcugcuacggcaagacgaagugcaccgccagcaacaagaacaaggggaucaucaagaccuucuccaacggcugcgacuacgugagcaacaagggcguggacaccguguccgucgggaacacccuguacuacgugaacaagcaggagggccagagccucuacgugaagggggagcccaucaucaacuucuacgacccgcuggucuuccccuccgacgaguucgacgcgagcaucucccaggugaacgagaagaucaaccagagccuggccuucauccgcaaguccgacgagcugcuccacaacgugaacgccggcaagagcacgaccaacaucaugaucaccaccaucaucaucgucaucaucgugauccugcugucccucaucgccguggggcugcugcucuacugcaaggcccggugaggacuaguguccaccugucccuccugggcugcuggauugucucguuuuccugccaaauaaacaggaucagcgcuuuacagaucuaaaaaaaaaaaaaaaaaaaaaaaaaaaaaaaaaaaaaaaaaaaaaaaaaaaaaaaaaaaaaaaaugcaucccccccccccccccccccccccccccccccaaaggcucuuuucagagccaccagaauu

SEQ ID NO: 6771 - RNA, 1931 nt, Artificial Sequence
  mRNA product Design i-1 comprising derived and/or modified sequence from HRSV(A2)__F-del_DSCav1_mut6 (opt1)
gggagagggcgcuuggcuugcaaggacccugagcugcggcauugaagcacacccaacccaacucgacugaagucagccucacugaaccggaucugagaaucuucucucucugggcuugccagggcucuccgaaccuagcuagcauccucuucaauuccaacuagaaagcuuaccauggagcugcucauccugaaggccaacgccaucaccaccauccugacggcggugaccuucugcuucgccagcggccagaacaucaccgaggaguucuaccaguccacgugcagcgccgucuccaagggguaccucggcgcccugcgcaccgggugguacaccagcgugaucaccaucgagcuguccaacaucaaggagaacaagugcaacggcaccgacgccaaggugaagcucaucaagcaggagcuggacaaguacaagaacgcggucacggaccugcagaugcucaugugcagcacccccgccaccggguccggcagcgccaucgccuccggcguggcggugugcaagguccugcaccuggagggggaggugaacaagaucaagagcgcccuccuguccaccaacaaggccguggucagccuguccaacggcgugagcgugcucacguucaagguccuggaccugaagaacuacaucgacaagcagcuccugccgauccugaacaagcaguccugcagcauccccaaccccgagaccgugauggaguuccagcagaagaacaaccggcuccuggagaucacccgcgaguucuccgugaacgccggggucaccacgcccgugagcaccuacaugcugaccaacuccgagcuccugagccugaucaacgacaugccgaucaccaacgaccagaagaagcucaugagcaacaacgugcagaucguccggcagcaguccuacagcaucaugugcaucaucaaggaggaggugcuggccuacgugguccagcugccccucuacggcgugaucgacacgcccugcuggaagcugcacaccagcccccugugcaccaccaacacgaaggaggggagcaacaucugccucacccgcaccgaccggggcugguacugcgacaacgcgggcuccgugagcuucuucccgcaggccgagaccugcaaggucugcuccaaccgcguguucugcgacacgaugaacagccugacccugcccuccgaggucaaccucugcaacguggacaucuucaaccccaaguacgacugcaagaucaugaccagcaagaccgacguguccagcuccgucaucacgagccugggggccaucguguccugcuacggcaagaccaagugcaccgccagcaacaagaacaaggggaucaucaagaccuucuccaacggcugcgacuacgugagcaacaagggcgucgacacgguguccguggggaacacccuguacuacgucaacaagcaggagggccagagccucuacgugaagggggagcccaucaucaacuucuacgacccgcugguguuccccagcgacgaguucgacgccuccaucagccaggucaacgagaagaucaaccagucccuggcguucauccggaaguccgacgagcuccugcacaacgugaacgccggcaaguccaccaccaacaucaugaucaccacgaucaucaucgugaucaucgucauccugcucagccugaucgccguggggcugcuccuguacugcaaggcccgcugaggacuaguguccaccugucccuccugggcugcuggauugucucguuuuccugccaaauaaacaggaucagcgcuuuacagaucuaaaaaaaaaaaaaaaaaaaaaaaaaaaaaaaaaaaaaaaaaaaaaaaaaaaaaaaaaaaaaaaaugcaucccccccccccccccccccccccccccccccaaaggcucuuuucagagccaccagaauu

SEQ ID NO: 6772 - RNA, 1931 nt, Artificial Sequence
  mRNA product Design i-1 comprising derived and/or modified sequence from HRSV(A2)__F-del_DSCav1_mut6 (opt2)
gggagagggcgcuuggcuugcaaggacccugagcugcggcauugaagcacacccaacccaacucgacugaagucagccucacugaaccggaucugagaaucuucucucucugggcuugccagggcucuccgaaccuagcuagcauccucuucaauuccaacuagaaagcuuaccauggagcuccucauccucaaggccaacgccaucaccaccauccucaccgccgucaccuucugcuucgccuccggccagaacaucaccgaggaguucuaccaguccaccugcuccgccgucuccaagggcuaccucggcgcccuccgcaccggcugguacaccuccgucaucaccaucgagcucuccaacaucaaggagaacaagugcaacggcaccgacgccaaggucaagcucaucaagcaggagcucgacaaguacaagaacgccgucaccgaccuccagaugcucaugugcuccacccccgccaccggcuccggcuccgccaucgccuccggcgucgccgucugcaagguccuccaccucgagggcgaggucaacaagaucaaguccgcccuccucuccaccaacaaggccgucgucucccucuccaacggcgucuccguccucaccuucaagguccucgaccucaagaacuacaucgacaagcagcuccuccccauccucaacaagcaguccugcuccauccccaaccccgagaccgucauggaguuccagcagaagaacaaccgccuccucgagaucacccgcgaguucuccgucaacgccggcgucaccacccccgucuccaccuacaugcucaccaacuccgagcuccucucccucaucaacgacaugcccaucaccaacgaccagaagaagcucauguccaacaacguccagaucguccgccagcaguccuacuccaucaugugcaucaucaaggaggagguccucgccuacgucguccagcucccccucuacggcgucaucgacacccccugcuggaagcuccacaccuccccccucugcaccaccaacaccaaggagggcuccaacaucugccucacccgcaccgaccgcggcugguacugcgacaacgccggcuccgucuccuucuucccccaggccgagaccugcaaggucugcuccaaccgcgucuucugcgacaccaugaacucccucacccuccccuccgaggucaaccucugcaacgucgacaucuucaaccccaaguacgacugcaagaucaugaccuccaagaccgacgucuccuccuccgucaucaccucccucggcgccaucgucuccugcuacggcaagaccaagugcaccgccuccaacaagaacaagggcaucaucaagaccuucuccaacggcugcgacuacgucuccaacaagggcgucgacaccgucuccgucggcaacacccucuacuacgucaacaagcaggagggccagucccucuacgucaagggcgagcccaucaucaacuucuacgacccccucgucuuccccuccgacgaguucgacgccuccaucucccaggucaacgagaagaucaaccagucccucgccuucauccgcaaguccgacgagcuccuccacaacgucaacgccggcaaguccaccaccaacaucaugaucaccaccaucaucaucgucaucaucgucauccuccucucccucaucgccgucggccuccuccucuacugcaaggcccgcugaggacuaguguccaccugucccuccugggcugcuggauugucucguuuuccugccaaauaaacaggaucagcgcuuuacagaucuaaaaaaaaaaaaaaaaaaaaaaaaaaaaaaaaaaaaaaaaaaaaaaaaaaaaaaaaaaaaaaaaugcaucccccccccccccccccccccccccccccccaaaggcucuuuucagagccaccagaauu

SEQ ID NO: 6773 - RNA, 1931 nt, Artificial Sequence
  mRNA product Design i-1 comprising derived and/or modified sequence from HRSV(A2)__F-del_DSCav1_mut6 (opt3)
gggagagggcgcuuggcuugcaaggacccugagcugcggcauugaagcacacccaacccaacucgacugaagucagccucacugaaccggaucugagaaucuucucucucugggcuugccagggcucuccgaaccuagcuagcauccucuucaauuccaacuagaaagcuuaccauggagcugcucauccuuaaggccaacgcuauuaccacaauacugacugcagugacguucugcuuugccagcggccagaauaucaccgaagaguucuaccaauccacauguucugcggucucaaaaggguauuugggagcuuuaagaacugguugguacaccaguguuauuacaaucgaacugagcaacauuaaggagaauaaaugcaacggcaccgacgccaaggugaaacuaaucaagcaggaacucgauaaguauaaaaaugcaguaacugaccugcagaugcuuauguguuccacacccgccaccgggucuggaucggcuauagcaucaggcguggccgucugcaaggugcugcacuuggagggugagguuaacaaaaucaagagcgcucuccugaguacgaauaaagccguggucucccugucuaacggggugagcguacucacuuuuaagguuuuagaucugaagaauuacauugacaaacagcuuuugccuauccugaacaagcaauccuguucaauuccaaauccggaaaccgugauggaguuccagcagaaaaacaauaggcuacucgaaaucacacgggaguuuagugucaacgcgggagugacuacccccgugagcacauauaugcugaccaauucugagcuucuguccuugauaaacgauaugccuauuacgaacgaccagaagaaacucaugucaaauaacguccaaaucguucgccagcagagcuacaguauuaugugcaucaucaaggaagaggugcuggcauauguagugcaguuaccacuguacggcgucauugauacucccuguuggaaacuccauacaucuccucuuugcaccacuaauacaaaggaaggcuccaacauaugucugacccgaacggaccgugggugguacugcgauaaugccggaagcgugucguucuuuccacaagcugagaccuguaagguuugcucuaacagaguguucugcgacacaaugaacuccuugacucuacccucagaagucaaucuguguaauguggauaucuuuaacccuaaauaugacugcaagauuaugaccaguaaaacagauguaagcuccucuguuaucacuagccucggugccauagugucauguuacggcaagaccaaaugcacagcaaguaauaagaacaaggggauuaucaaaaccuucuccaauggaugugacuaugucagcaacaagggcguggacacugucucuguggguaauacgcuguacuauguuaacaaacaggaggggcagucacuuuacgugaagggagagccaaucauuaacuuuuaugauccgcugguauuccccagugacgaauuugaugcuagcaucucccaagucaaugagaaaauuaaccagucuuuggccuucauaaggaagucggacgaacuccugcacaaugugaacgcgggcaagagcacaaccaauaucaugauuacuaccaucaucauuguuauaaucgugauuuuacugucccuaaucgccgucggccuccugcuuuacugcaaagcacggugaggacuaguguccaccugucccuccugggcugcuggauugucucguuuuccugccaaauaaacaggaucagcgcuuuacagaucuaaaaaaaaaaaaaaaaaaaaaaaaaaaaaaaaaaaaaaaaaaaaaaaaaaaaaaaaaaaaaaaaugcaucccccccccccccccccccccccccccccccaaaggcucuuuucagagccaccagaauu

SEQ ID NO: 6774 - RNA, 1931 nt, Artificial Sequence
  mRNA product Design i-1 comprising derived and/or modified sequence from HRSV(A2)__F-del_DSCav1_mut6 (opt4)
gggagagggcgcuuggcuugcaaggacccugagcugcggcauugaagcacacccaacccaacucgacugaagucagccucacugaaccggaucugagaaucuucucucucugggcuugccagggcucuccgaaccuagcuagcauccucuucaauuccaacuagaaagcuuaccauggagcugcugauccugaaggccaacgccaucaccaccauccugaccgccgugaccuucugcuucgccagcggccagaacaucaccgaggaguucuaccagagcaccugcagcgccgugagcaagggcuaccugggcgcccugagaaccggcugguacaccagcgugaucaccaucgagcugagcaacaucaaggagaacaagugcaacggcaccgacgccaaggugaagcugaucaagcaggagcuggacaaguacaagaacgccgugaccgaccugcagaugcugaugugcagcacccccgccaccggcagcggcagcgccaucgccagcggcguggccgugugcaaggugcugcaccuggagggcgaggugaacaagaucaagagcgcccugcugagcaccaacaaggccguggugagccugagcaacggcgugagcgugcugaccuucaaggugcuggaccugaagaacuacaucgacaagcagcugcugcccauccugaacaagcagagcugcagcauccccaaccccgagaccgugauggaguuccagcagaagaacaacagacugcuggagaucaccagagaguucagcgugaacgccggcgugaccacccccgugagcaccuacaugcugaccaacagcgagcugcugagccugaucaacgacaugcccaucaccaacgaccagaagaagcugaugagcaacaacgugcagaucgugagacagcagagcuacagcaucaugugcaucaucaaggaggaggugcuggccuacguggugcagcugccccuguacggcgugaucgacacccccugcuggaagcugcacaccagcccccugugcaccaccaacaccaaggagggcagcaacaucugccugaccagaaccgacagaggcugguacugcgacaacgccggcagcgugagcuucuucccccaggccgagaccugcaaggugugcagcaacagaguguucugcgacaccaugaacagccugacccugcccagcgaggugaaccugugcaacguggacaucuucaaccccaaguacgacugcaagaucaugaccagcaagaccgacgugagcagcagcgugaucaccagccugggcgccaucgugagcugcuacggcaagaccaagugcaccgccagcaacaagaacaagggcaucaucaagaccuucagcaacggcugcgacuacgugagcaacaagggcguggacaccgugagcgugggcaacacccuguacuacgugaacaagcaggagggccagagccuguacgugaagggcgagcccaucaucaacuucuacgacccccugguguuccccagcgacgaguucgacgccagcaucagccaggugaacgagaagaucaaccagagccuggccuucaucagaaagagcgacgagcugcugcacaacgugaacgccggcaagagcaccaccaacaucaugaucaccaccaucaucaucgugaucaucgugauccugcugagccugaucgccgugggccugcugcuguacugcaaggccagaugaggacuaguguccaccugucccuccugggcugcuggauugucucguuuuccugccaaauaaacaggaucagcgcuuuacagaucuaaaaaaaaaaaaaaaaaaaaaaaaaaaaaaaaaaaaaaaaaaaaaaaaaaaaaaaaaaaaaaaaugcaucccccccccccccccccccccccccccccccaaaggcucuuuucagagccaccagaauu

SEQ ID NO: 6775 - RNA, 1931 nt, Artificial Sequence
  mRNA product Design i-1 comprising derived and/or modified sequence from HRSV(A2)__F-del_DSCav1_mut6 (opt5)
gggagagggcgcuuggcuugcaaggacccugagcugcggcauugaagcacacccaacccaacucgacugaagucagccucacugaaccggaucugagaaucuucucucucugggcuugccagggcucuccgaaccuagcuagcauccucuucaauuccaacuagaaagcuuaccauggagcugcucauccugaaggccaacgcuauuaccacaauccuuacggccgugaccuucugcuuugcgagcggccagaauauuacagaagaguucuaccaauccaccuguucugcugucagcaaaggguaucugggagcccucagaacaggcugguacaccuccguuaucacaauugaacugucuaacaucaaggagaauaaaugcaacgggaccgacgccaaggugaaacuuaucaagcaggaacuggauaaguauaaaaaugcugugacggaccuccagaugcugauguguagcacccccgccacaggauccggcucugcuauugccagcggggucgcggugugcaagguucugcaccucgagggagaggugaacaaaaucaaguccgcccugcuuagcaccaauaaagcugucgugucucuguccaacggcguuagcgugcucacauuuaagguccuggaucuuaagaauuacauugacaaacagcugcucccuauccugaacaagcaaucuuguuccauuccgaaucccgaaaccgugauggaguuccagcagaaaaacaaucggcugcucgaaaucacgcgcgaguuuagcgugaacgccggcgucacaaccccuguuucuacauauaugcugaccaauuccgagcuucugagccucauuaacgauaugcccaucaccaacgaccagaagaaacugauguccaauaacgugcaaaucgugagacagcagucuuacagcauuaugugcaucauuaaggaagagguccuugcuuaugugguucagcugccucucuacggggugaucgauacacccuguuggaaacugcauacguccccucugugcaccacaaauaccaaggaaggaagcaacauuugucucacacggaccgaccgcggcugguacugcgauaaugccgggucugucuccuucuuuccgcaagcggagacguguaaggugugcagcaacagaguuuucugcgacacaaugaacucucugacccuucccagcgaagugaaucuguguaaugucgauaucuuuaacccuaaauaugacugcaagaucaugaccuccaaaacagaugugucuagcuccgucauuaccagccucggagccaucgugucuuguuacggcaagacaaaaugcacggcuuccaauaagaacaaggggauuaucaaaaccuucagcaauggaugugacuauguuucuaacaagggcguggacacagucuccgugggcaauacccuguacuauguuaacaaacaggaggggcagagccuuuacgugaagggagagcccauuaucaacuuuuaugauccucuggucuuccccuccgacgaauuugaugccucuaucagccaagugaaugagaaaauuaaccagucccucgcuuucauccggaagucugacgaacugcugcacaaugugaacgccggcaagagcacaaccaauauuaugaucacgaccauuaucauuguuaucaucgucauucuccugucccuuaucgccguggggcugcuccuguacugcaaagcucgcugaggacuaguguccaccugucccuccugggcugcuggauugucucguuuuccugccaaauaaacaggaucagcgcuuuacagaucuaaaaaaaaaaaaaaaaaaaaaaaaaaaaaaaaaaaaaaaaaaaaaaaaaaaaaaaaaaaaaaaaugcaucccccccccccccccccccccccccccccccaaaggcucuuuucagagccaccagaauu

SEQ ID NO: 6776 - RNA, 1931 nt, Artificial Sequence
  mRNA product Design i-1 comprising derived and/or modified sequence from HRSV(A2)__F-del_DSCav1_mut6 (opt6)
gggagagggcgcuuggcuugcaaggacccugagcugcggcauugaagcacacccaacccaacucgacugaagucagccucacugaaccggaucugagaaucuucucucucugggcuugccagggcucuccgaaccuagcuagcauccucuucaauuccaacuagaaagcuuaccauggaacuacucauauuaaaagcaaacgcaauaacaacgauauuaacagcuguaacauucugcuuugcaucaggccaaaauaucaccgaagaauuuuaucaaagcacaugcucugcaguauccaaaggauacuuaggagcauuaagaacaggcugguacacauccguaauaacaauagaacuaucaaacaucaaagaaaacaaaugcaacggcacagacgccaaaguaaaacucauaaaacaagaacuagacaaauauaaaaacgcaguaacagaucuacaaaugcucaugugcuccacaccagcaaccggaucugguucagccauagcauccggcguagccgucugcaaaguauuacaccucgaaggagaaguaaacaaaauaaaaucugcccuauuaucuacaaauaaagccguaguaagucuaaguaacggaguaucaguacuaacauuuaaaguccuagaccugaaaaacuauaucgacaaacaacuauuaccaauacuaaacaaacaauccuguuccaucccuaacccagaaacaguuauggaauuucaacaaaaaaauaaccgccuuuuagaaauaacuagagaauuuucaguaaacgcaggaguuacaacaccaguaucaacauacaugcuaacaaauucagaauuauuaucccuuauaaaugacaugccuaucacaaacgaucaaaaaaaauuaauguccaacaacguacaaauaguaagacaacaaucauauuccaucaugugcaucauaaaagaagaaguccucgcauacguagugcaacuaccacuauacggagucauagauacacccuguuggaaacuucacacaucuccacuaugcacaacaaacacgaaagaaggauccaacauaugccuaacacgaacagacagaggaugguauugcgacaacgcuggaagugugagcuucuucccucaagcagaaacuugcaaaguaugcagcaaucguguauucugcgacacaaugaacucauuaacacucccaagcgaaguaaaccucugcaauguagacaucuuuaauccaaaauacgauuguaaaauaaugacuucaaaaacagacgucucaucaucuguaauaacaucuuuaggagcaauaguuucuugcuacgguaaaacaaaaugcaccgcauccaacaaaaacaaaggaauaauaaaaacauucucuaacggcugcgauuacguaucuaacaaaggaguugacacagucucaguaggaaacacacuauacuacguaaacaaacaagaaggacaaagccuauacguaaaaggagaaccaauaauaaacuucuaugacccauuaguauuuccaagcgaugaauuugacgcuucaauaucacaagucaaugaaaaaauaaaucagagcuuagcauucauaagaaaaucugaugaacuacuacacaauguaaaugcaggaaaauccacuaccaacauaaugauuaccacaauuauaauaguuaucauaguaauacuauuaucacuaauagccguuggauuacuacuauacugcaaagcaagauaaggacuaguguccaccugucccuccugggcugcuggauugucucguuuuccugccaaauaaacaggaucagcgcuuuacagaucuaaaaaaaaaaaaaaaaaaaaaaaaaaaaaaaaaaaaaaaaaaaaaaaaaaaaaaaaaaaaaaaaugcaucccccccccccccccccccccccccccccccaaaggcucuuuucagagccaccagaauu

SEQ ID NO: 6777 - RNA, 1931 nt, Artificial Sequence
  mRNA product Design i-1 comprising derived and/or modified sequence from HRSV(A2)__F-del_DSCav1_mut6 (opt11)
gggagagggcgcuuggcuugcaaggacccugagcugcggcauugaagcacacccaacccaacucgacugaagucagccucacugaaccggaucugagaaucuucucucucugggcuugccagggcucuccgaaccuagcuagcauccucuucaauuccaacuagaaagcuuaccauggaacuacucauccuaaaagcaaacgccaucaccaccauacuaaccgccgucaccuucugcuucgccucgggacaaaacaucaccgaagaguucuaccagucaacgugcuccgccgucucaaaaggcuaccuaggcgcccuccgcaccgggugguauaccuccgucauaacuaucgaacucucuaacaucaaagaaaacaaauguaacggcaccgacgccaaagucaaacuaaucaaacaagaacuggacaaauacaaaaacgccgucaccgaccuacaaaugcucaugugcuccacuccagccaccggcuccgguagcgcaaucgccucaggcguagcuguaugcaaaguccuccaccuagaaggcgaaguaaacaaaauaaaauccgcccuccucucaaccaacaaggccgucgucucacucucaaacggcgucuccguacucaccuuuaaaguccuagaccuuaaaaacuacaucgacaaacaacugcuaccaauccucaacaaacaaucaugcagcaucccaaacccggaaacagucauggaguuccaacagaaaaacaaccgacuccucgaaaucacccgcgaguucuccgucaacgccggagucaccacaccuguaagcacauacaugcuuacuaauuccgaacuccuuucacuaauaaacgacaugccaauaaccaacgaccaaaagaaacucauguccaacaacguacaaaucguacgccaacaauccuacuccaucaugugcaucaucaaagaagaaguccuggccuaugucguacaacucccccuuuacggugucaucgacacacccugcuggaaacuacacaccagcccccucugcacaacaaacaccaaagaaggcuccaacaucugccucacccguaccgaccgaggcugguacugcgacaacgccggcuccgucuccuucuucccccaagccgaaaccugcaaagucugcagcaaccgcgucuucugcgauaccaugaacucccucacacucccaucugaagucaaccucugcaacgucgauauuuucaauccaaaauacgacugcaaaaucaugacuagcaaaaccgacguuagcuccuccgucaucaccucccucggcgccauaguuucaugcuacggcaaaaccaaaugcaccgccuccaacaaaaacaaaggcaucauaaaaaccuucuccaacgggugcgacuacguaucuaauaaaggagucgacaccgucucaguaggaaacacccucuacuaugucaacaaacaagaaggccaaucacuauacguuaaaggcgaaccaaucaucaacuucuacgacccacucgucuuccccagcgacgaguuugacgccucaaucucgcaagucaaugaaaagauuaaccaaucccuagccuucauccgaaaaagugacgaacuccuccacaacguuaacgccggcaaaucuacaaccaacaucaugaucaccacuauaaucaucgucaucauagucauacuucucagccucaucgcagucggacuccuccuuuauugcaaggcacgauaaggacuaguguccaccugucccuccugggcugcuggauugucucguuuuccugccaaauaaacaggaucagcgcuuuacagaucuaaaaaaaaaaaaaaaaaaaaaaaaaaaaaaaaaaaaaaaaaaaaaaaaaaaaaaaaaaaaaaaaugcaucccccccccccccccccccccccccccccccaaaggcucuuuucagagccaccagaauu

SEQ ID NO: 6778 - RNA, 1931 nt, Artificial Sequence
  mRNA product Design i-2 comprising derived and/or modified sequence from HRSV(A2)__F-del_DSCav1_mut6 (opt1)
gggagaggcgcugccuacggagguggcagccaucuccuucucggcaucaagcuuaccauggagcugcucauccugaaggccaacgccaucaccaccauccugacggcggugaccuucugcuucgccagcggccagaacaucaccgaggaguucuaccaguccacgugcagcgccgucuccaagggguaccucggcgcccugcggaccggcugguacaccuccgugaucaccaucgagcugagcaacaucaaggagaacaagugcaacgggaccgacgccaaggugaagcucaucaagcaggagcuggacaaguacaagaacgcggucacggaccugcagaugcugaugugcuccaccccggcaaccggcuccggcuccgccaucgcgagcggcgucgccgugugcaaggugcugcaccucgagggggaggucaacaagaucaagagcgcccugcuguccaccaacaaggccguggugagccucuccaacggcgucagcgugcugaccuucaaggugcuggaccucaagaacuacaucgacaagcagcugcugcccauccugaacaagcagagcugcuccauccccaaccccgagacggugauggaguuccagcagaagaacaaccggcuccuggagaucacccgcgaguucagcgugaacgccggggucaccacccccguguccacguacaugcugaccaacagcgagcuccugucccugaucaacgacaugccgaucaccaacgaccagaagaagcucaugagcaacaacgugcagaucguccggcagcaguccuacagcaucaugugcaucaucaaggaggaggugcuggcguacgugguccagcugccccucuacggcgugaucgacacccccugcuggaagcugcacacgagcccccugugcaccaccaacaccaaggagggguccaacaucugccucacgcgcaccgaccggggcugguacugcgacaacgccggcagcgucuccuucuucccgcaggccgagaccugcaaggugugcagcaaccgcguguucugcgacaccaugaacucccugacgcugcccagcgagguaaaccucugcaacgucgacaucuucaaccccaaguacgacugcaagaucaugaccuccaagaccgacgugagcuccagcgugaucaccucccugggggccaucgucagcugcuacggcaagacgaagugcaccgccagcaacaagaacaaggggaucaucaagaccuucuccaacggcugcgacuacgugagcaacaagggcguggacaccguguccgucgggaacacccuguacuacgugaacaagcaggagggccagagccucuacgugaagggggagcccaucaucaacuucuacgacccgcuggucuuccccuccgacgaguucgacgcgagcaucucccaggugaacgagaagaucaaccagagccuggccuucauccgcaaguccgacgagcugcuccacaacgugaacgccggcaagagcacgaccaacaucaugaucaccaccaucaucaucgucaucaucgugauccugcugucccucaucgccguggggcugcugcucuacugcaaggcccggugaggacuagugcaucacauuuaaaagcaucucagccuaccaugagaauaagagaaagaaaaugaagaucaauagcuuauucaucucuuuuucuuuuucguugguguaaagccaacacccugucuaaaaaacauaaauuucuuuaaucauuuugccucuuuucucugugcuucaauuaauaaaaaauggaaagaaccuagaucuaaaaaaaaaaaaaaaaaaaaaaaaaaaaaaaaaaaaaaaaaaaaaaaaaaaaaaaaaaaaaaaaugcaucccccccccccccccccccccccccccccccaaaggcucuuuucagagccaccagaauu

SEQ ID NO: 6779 - RNA, 1931 nt, Artificial Sequence
  mRNA product Design i-2 comprising derived and/or modified sequence from HRSV(A2)__F-del_DSCav1_mut6 (opt1)
gggagaggcgcugccuacggagguggcagccaucuccuucucggcaucaagcuuaccauggagcugcucauccugaaggccaacgccaucaccaccauccugacggcggugaccuucugcuucgccagcggccagaacaucaccgaggaguucuaccaguccacgugcagcgccgucuccaagggguaccucggcgcccugcgcaccgggugguacaccagcgugaucaccaucgagcuguccaacaucaaggagaacaagugcaacggcaccgacgccaaggugaagcucaucaagcaggagcuggacaaguacaagaacgcggucacggaccugcagaugcucaugugcagcacccccgccaccggguccggcagcgccaucgccuccggcguggcggugugcaagguccugcaccuggagggggaggugaacaagaucaagagcgcccuccuguccaccaacaaggccguggucagccuguccaacggcgugagcgugcucacguucaagguccuggaccugaagaacuacaucgacaagcagcuccugccgauccugaacaagcaguccugcagcauccccaaccccgagaccgugauggaguuccagcagaagaacaaccggcuccuggagaucacccgcgaguucuccgugaacgccggggucaccacgcccgugagcaccuacaugcugaccaacuccgagcuccugagccugaucaacgacaugccgaucaccaacgaccagaagaagcucaugagcaacaacgugcagaucguccggcagcaguccuacagcaucaugugcaucaucaaggaggaggugcuggccuacgugguccagcugccccucuacggcgugaucgacacgcccugcuggaagcugcacaccagcccccugugcaccaccaacacgaaggaggggagcaacaucugccucacccgcaccgaccggggcugguacugcgacaacgcgggcuccgugagcuucuucccgcaggccgagaccugcaaggucugcuccaaccgcguguucugcgacacgaugaacagccugacccugcccuccgaggucaaccucugcaacguggacaucuucaaccccaaguacgacugcaagaucaugaccagcaagaccgacguguccagcuccgucaucacgagccugggggccaucguguccugcuacggcaagaccaagugcaccgccagcaacaagaacaaggggaucaucaagaccuucuccaacggcugcgacuacgugagcaacaagggcgucgacacgguguccguggggaacacccuguacuacgucaacaagcaggagggccagagccucuacgugaagggggagcccaucaucaacuucuacgacccgcugguguuccccagcgacgaguucgacgccuccaucagccaggucaacgagaagaucaaccagucccuggcguucauccggaaguccgacgagcuccugcacaacgugaacgccggcaaguccaccaccaacaucaugaucaccacgaucaucaucgugaucaucgucauccugcucagccugaucgccguggggcugcuccuguacugcaaggcccgcugaggacuagugcaucacauuuaaaagcaucucagccuaccaugagaauaagagaaagaaaaugaagaucaauagcuuauucaucucuuuuucuuuuucguugguguaaagccaacacccugucuaaaaaacauaaauuucuuuaaucauuuugccucuuuucucugugcuucaauuaauaaaaaauggaaagaaccuagaucuaaaaaaaaaaaaaaaaaaaaaaaaaaaaaaaaaaaaaaaaaaaaaaaaaaaaaaaaaaaaaaaaugcaucccccccccccccccccccccccccccccccaaaggcucuuuucagagccaccagaauu

SEQ ID NO: 6780 - RNA, 1931 nt, Artificial Sequence
  mRNA product Design i-2 comprising derived and/or modified sequence from HRSV(A2)__F-del_DSCav1_mut6 (opt2)
gggagaggcgcugccuacggagguggcagccaucuccuucucggcaucaagcuuaccauggagcuccucauccucaaggccaacgccaucaccaccauccucaccgccgucaccuucugcuucgccuccggccagaacaucaccgaggaguucuaccaguccaccugcuccgccgucuccaagggcuaccucggcgcccuccgcaccggcugguacaccuccgucaucaccaucgagcucuccaacaucaaggagaacaagugcaacggcaccgacgccaaggucaagcucaucaagcaggagcucgacaaguacaagaacgccgucaccgaccuccagaugcucaugugcuccacccccgccaccggcuccggcuccgccaucgccuccggcgucgccgucugcaagguccuccaccucgagggcgaggucaacaagaucaaguccgcccuccucuccaccaacaaggccgucgucucccucuccaacggcgucuccguccucaccuucaagguccucgaccucaagaacuacaucgacaagcagcuccuccccauccucaacaagcaguccugcuccauccccaaccccgagaccgucauggaguuccagcagaagaacaaccgccuccucgagaucacccgcgaguucuccgucaacgccggcgucaccacccccgucuccaccuacaugcucaccaacuccgagcuccucucccucaucaacgacaugcccaucaccaacgaccagaagaagcucauguccaacaacguccagaucguccgccagcaguccuacuccaucaugugcaucaucaaggaggagguccucgccuacgucguccagcucccccucuacggcgucaucgacacccccugcuggaagcuccacaccuccccccucugcaccaccaacaccaaggagggcuccaacaucugccucacccgcaccgaccgcggcugguacugcgacaacgccggcuccgucuccuucuucccccaggccgagaccugcaaggucugcuccaaccgcgucuucugcgacaccaugaacucccucacccuccccuccgaggucaaccucugcaacgucgacaucuucaaccccaaguacgacugcaagaucaugaccuccaagaccgacgucuccuccuccgucaucaccucccucggcgccaucgucuccugcuacggcaagaccaagugcaccgccuccaacaagaacaagggcaucaucaagaccuucuccaacggcugcgacuacgucuccaacaagggcgucgacaccgucuccgucggcaacacccucuacuacgucaacaagcaggagggccagucccucuacgucaagggcgagcccaucaucaacuucuacgacccccucgucuuccccuccgacgaguucgacgccuccaucucccaggucaacgagaagaucaaccagucccucgccuucauccgcaaguccgacgagcuccuccacaacgucaacgccggcaaguccaccaccaacaucaugaucaccaccaucaucaucgucaucaucgucauccuccucucccucaucgccgucggccuccuccucuacugcaaggcccgcugaggacuagugcaucacauuuaaaagcaucucagccuaccaugagaauaagagaaagaaaaugaagaucaauagcuuauucaucucuuuuucuuuuucguugguguaaagccaacacccugucuaaaaaacauaaauuucuuuaaucauuuugccucuuuucucugugcuucaauuaauaaaaaauggaaagaaccuagaucuaaaaaaaaaaaaaaaaaaaaaaaaaaaaaaaaaaaaaaaaaaaaaaaaaaaaaaaaaaaaaaaaugcaucccccccccccccccccccccccccccccccaaaggcucuuuucagagccaccagaauu

SEQ ID NO: 6781 - RNA, 1931 nt, Artificial Sequence
  mRNA product Design i-2 comprising derived and/or modified sequence from HRSV(A2)__F-del_DSCav1_mut6 (opt3)
gggagaggcgcugccuacggagguggcagccaucuccuucucggcaucaagcuuaccauggagcugcucauccuuaaggccaacgcuauuaccacaauacugacugcagugacguucugcuuugccagcggccagaauaucaccgaagaguucuaccaauccacauguucugcggucucaaaaggguauuugggagcuuuaagaacugguugguacaccaguguuauuacaaucgaacugagcaacauuaaggagaauaaaugcaacggcaccgacgccaaggugaaacuaaucaagcaggaacucgauaaguauaaaaaugcaguaacugaccugcagaugcuuauguguuccacacccgccaccgggucuggaucggcuauagcaucaggcguggccgucugcaaggugcugcacuuggagggugagguuaacaaaaucaagagcgcucuccugaguacgaauaaagccguggucucccugucuaacggggugagcguacucacuuuuaagguuuuagaucugaagaauuacauugacaaacagcuuuugccuauccugaacaagcaauccuguucaauuccaaauccggaaaccgugauggaguuccagcagaaaaacaauaggcuacucgaaaucacacgggaguuuagugucaacgcgggagugacuacccccgugagcacauauaugcugaccaauucugagcuucuguccuugauaaacgauaugccuauuacgaacgaccagaagaaacucaugucaaauaacguccaaaucguucgccagcagagcuacaguauuaugugcaucaucaaggaagaggugcuggcauauguagugcaguuaccacuguacggcgucauugauacucccuguuggaaacuccauacaucuccucuuugcaccacuaauacaaaggaaggcuccaacauaugucugacccgaacggaccgugggugguacugcgauaaugccggaagcgugucguucuuuccacaagcugagaccuguaagguuugcucuaacagaguguucugcgacacaaugaacuccuugacucuacccucagaagucaaucuguguaauguggauaucuuuaacccuaaauaugacugcaagauuaugaccaguaaaacagauguaagcuccucuguuaucacuagccucggugccauagugucauguuacggcaagaccaaaugcacagcaaguaauaagaacaaggggauuaucaaaaccuucuccaauggaugugacuaugucagcaacaagggcguggacacugucucuguggguaauacgcuguacuauguuaacaaacaggaggggcagucacuuuacgugaagggagagccaaucauuaacuuuuaugauccgcugguauuccccagugacgaauuugaugcuagcaucucccaagucaaugagaaaauuaaccagucuuuggccuucauaaggaagucggacgaacuccugcacaaugugaacgcgggcaagagcacaaccaauaucaugauuacuaccaucaucauuguuauaaucgugauuuuacugucccuaaucgccgucggccuccugcuuuacugcaaagcacggugaggacuagugcaucacauuuaaaagcaucucagccuaccaugagaauaagagaaagaaaaugaagaucaauagcuuauucaucucuuuuucuuuuucguugguguaaagccaacacccugucuaaaaaacauaaauuucuuuaaucauuuugccucuuuucucugugcuucaauuaauaaaaaauggaaagaaccuagaucuaaaaaaaaaaaaaaaaaaaaaaaaaaaaaaaaaaaaaaaaaaaaaaaaaaaaaaaaaaaaaaaaugcaucccccccccccccccccccccccccccccccaaaggcucuuuucagagccaccagaauu

SEQ ID NO: 6782 - RNA, 1931 nt, Artificial Sequence
  mRNA product Design i-2 comprising derived and/or modified sequence from HRSV(A2)__F-del_DSCav1_mut6 (opt4)
gggagaggcgcugccuacggagguggcagccaucuccuucucggcaucaagcuuaccauggagcugcugauccugaaggccaacgccaucaccaccauccugaccgccgugaccuucugcuucgccagcggccagaacaucaccgaggaguucuaccagagcaccugcagcgccgugagcaagggcuaccugggcgcccugagaaccggcugguacaccagcgugaucaccaucgagcugagcaacaucaaggagaacaagugcaacggcaccgacgccaaggugaagcugaucaagcaggagcuggacaaguacaagaacgccgugaccgaccugcagaugcugaugugcagcacccccgccaccggcagcggcagcgccaucgccagcggcguggccgugugcaaggugcugcaccuggagggcgaggugaacaagaucaagagcgcccugcugagcaccaacaaggccguggugagccugagcaacggcgugagcgugcugaccuucaaggugcuggaccugaagaacuacaucgacaagcagcugcugcccauccugaacaagcagagcugcagcauccccaaccccgagaccgugauggaguuccagcagaagaacaacagacugcuggagaucaccagagaguucagcgugaacgccggcgugaccacccccgugagcaccuacaugcugaccaacagcgagcugcugagccugaucaacgacaugcccaucaccaacgaccagaagaagcugaugagcaacaacgugcagaucgugagacagcagagcuacagcaucaugugcaucaucaaggaggaggugcuggccuacguggugcagcugccccuguacggcgugaucgacacccccugcuggaagcugcacaccagcccccugugcaccaccaacaccaaggagggcagcaacaucugccugaccagaaccgacagaggcugguacugcgacaacgccggcagcgugagcuucuucccccaggccgagaccugcaaggugugcagcaacagaguguucugcgacaccaugaacagccugacccugcccagcgaggugaaccugugcaacguggacaucuucaaccccaaguacgacugcaagaucaugaccagcaagaccgacgugagcagcagcgugaucaccagccugggcgccaucgugagcugcuacggcaagaccaagugcaccgccagcaacaagaacaagggcaucaucaagaccuucagcaacggcugcgacuacgugagcaacaagggcguggacaccgugagcgugggcaacacccuguacuacgugaacaagcaggagggccagagccuguacgugaagggcgagcccaucaucaacuucuacgacccccugguguuccccagcgacgaguucgacgccagcaucagccaggugaacgagaagaucaaccagagccuggccuucaucagaaagagcgacgagcugcugcacaacgugaacgccggcaagagcaccaccaacaucaugaucaccaccaucaucaucgugaucaucgugauccugcugagccugaucgccgugggccugcugcuguacugcaaggccagaugaggacuagugcaucacauuuaaaagcaucucagccuaccaugagaauaagagaaagaaaaugaagaucaauagcuuauucaucucuuuuucuuuuucguugguguaaagccaacacccugucuaaaaaacauaaauuucuuuaaucauuuugccucuuuucucugugcuucaauuaauaaaaaauggaaagaaccuagaucuaaaaaaaaaaaaaaaaaaaaaaaaaaaaaaaaaaaaaaaaaaaaaaaaaaaaaaaaaaaaaaaaugcaucccccccccccccccccccccccccccccccaaaggcucuuuucagagccaccagaauu

SEQ ID NO: 6783 - RNA, 1931 nt, Artificial Sequence
  mRNA product Design i-2 comprising derived and/or modified sequence from HRSV(A2)__F-del_DSCav1_mut6 (opt5)
gggagaggcgcugccuacggagguggcagccaucuccuucucggcaucaagcuuaccauggagcugcucauccugaaggccaacgcuauuaccacaauccuuacggccgugaccuucugcuuugcgagcggccagaauauuacagaagaguucuaccaauccaccuguucugcugucagcaaaggguaucugggagcccucagaacaggcugguacaccuccguuaucacaauugaacugucuaacaucaaggagaauaaaugcaacgggaccgacgccaaggugaaacuuaucaagcaggaacuggauaaguauaaaaaugcugugacggaccuccagaugcugauguguagcacccccgccacaggauccggcucugcuauugccagcggggucgcggugugcaagguucugcaccucgagggagaggugaacaaaaucaaguccgcccugcuuagcaccaauaaagcugucgugucucuguccaacggcguuagcgugcucacauuuaagguccuggaucuuaagaauuacauugacaaacagcugcucccuauccugaacaagcaaucuuguuccauuccgaaucccgaaaccgugauggaguuccagcagaaaaacaaucggcugcucgaaaucacgcgcgaguuuagcgugaacgccggcgucacaaccccuguuucuacauauaugcugaccaauuccgagcuucugagccucauuaacgauaugcccaucaccaacgaccagaagaaacugauguccaauaacgugcaaaucgugagacagcagucuuacagcauuaugugcaucauuaaggaagagguccuugcuuaugugguucagcugccucucuacggggugaucgauacacccuguuggaaacugcauacguccccucugugcaccacaaauaccaaggaaggaagcaacauuugucucacacggaccgaccgcggcugguacugcgauaaugccgggucugucuccuucuuuccgcaagcggagacguguaaggugugcagcaacagaguuuucugcgacacaaugaacucucugacccuucccagcgaagugaaucuguguaaugucgauaucuuuaacccuaaauaugacugcaagaucaugaccuccaaaacagaugugucuagcuccgucauuaccagccucggagccaucgugucuuguuacggcaagacaaaaugcacggcuuccaauaagaacaaggggauuaucaaaaccuucagcaauggaugugacuauguuucuaacaagggcguggacacagucuccgugggcaauacccuguacuauguuaacaaacaggaggggcagagccuuuacgugaagggagagcccauuaucaacuuuuaugauccucuggucuuccccuccgacgaauuugaugccucuaucagccaagugaaugagaaaauuaaccagucccucgcuuucauccggaagucugacgaacugcugcacaaugugaacgccggcaagagcacaaccaauauuaugaucacgaccauuaucauuguuaucaucgucauucuccugucccuuaucgccguggggcugcuccuguacugcaaagcucgcugaggacuagugcaucacauuuaaaagcaucucagccuaccaugagaauaagagaaagaaaaugaagaucaauagcuuauucaucucuuuuucuuuuucguugguguaaagccaacacccugucuaaaaaacauaaauuucuuuaaucauuuugccucuuuucucugugcuucaauuaauaaaaaauggaaagaaccuagaucuaaaaaaaaaaaaaaaaaaaaaaaaaaaaaaaaaaaaaaaaaaaaaaaaaaaaaaaaaaaaaaaaugcaucccccccccccccccccccccccccccccccaaaggcucuuuucagagccaccagaauu

SEQ ID NO: 6784 - RNA, 1931 nt, Artificial Sequence
  mRNA product Design i-2 comprising derived and/or modified sequence from HRSV(A2)__F-del_DSCav1_mut6 (opt6)
gggagaggcgcugccuacggagguggcagccaucuccuucucggcaucaagcuuaccauggaacuacucauauuaaaagcaaacgcaauaacaacgauauuaacagcuguaacauucugcuuugcaucaggccaaaauaucaccgaagaauuuuaucaaagcacaugcucugcaguauccaaaggauacuuaggagcauuaagaacaggcugguacacauccguaauaacaauagaacuaucaaacaucaaagaaaacaaaugcaacggcacagacgccaaaguaaaacucauaaaacaagaacuagacaaauauaaaaacgcaguaacagaucuacaaaugcucaugugcuccacaccagcaaccggaucugguucagccauagcauccggcguagccgucugcaaaguauuacaccucgaaggagaaguaaacaaaauaaaaucugcccuauuaucuacaaauaaagccguaguaagucuaaguaacggaguaucaguacuaacauuuaaaguccuagaccugaaaaacuauaucgacaaacaacuauuaccaauacuaaacaaacaauccuguuccaucccuaacccagaaacaguuauggaauuucaacaaaaaaauaaccgccuuuuagaaauaacuagagaauuuucaguaaacgcaggaguuacaacaccaguaucaacauacaugcuaacaaauucagaauuauuaucccuuauaaaugacaugccuaucacaaacgaucaaaaaaaauuaauguccaacaacguacaaauaguaagacaacaaucauauuccaucaugugcaucauaaaagaagaaguccucgcauacguagugcaacuaccacuauacggagucauagauacacccuguuggaaacuucacacaucuccacuaugcacaacaaacacgaaagaaggauccaacauaugccuaacacgaacagacagaggaugguauugcgacaacgcuggaagugugagcuucuucccucaagcagaaacuugcaaaguaugcagcaaucguguauucugcgacacaaugaacucauuaacacucccaagcgaaguaaaccucugcaauguagacaucuuuaauccaaaauacgauuguaaaauaaugacuucaaaaacagacgucucaucaucuguaauaacaucuuuaggagcaauaguuucuugcuacgguaaaacaaaaugcaccgcauccaacaaaaacaaaggaauaauaaaaacauucucuaacggcugcgauuacguaucuaacaaaggaguugacacagucucaguaggaaacacacuauacuacguaaacaaacaagaaggacaaagccuauacguaaaaggagaaccaauaauaaacuucuaugacccauuaguauuuccaagcgaugaauuugacgcuucaauaucacaagucaaugaaaaaauaaaucagagcuuagcauucauaagaaaaucugaugaacuacuacacaauguaaaugcaggaaaauccacuaccaacauaaugauuaccacaauuauaauaguuaucauaguaauacuauuaucacuaauagccguuggauuacuacuauacugcaaagcaagauaaggacuagugcaucacauuuaaaagcaucucagccuaccaugagaauaagagaaagaaaaugaagaucaauagcuuauucaucucuuuuucuuuuucguugguguaaagccaacacccugucuaaaaaacauaaauuucuuuaaucauuuugccucuuuucucugugcuucaauuaauaaaaaauggaaagaaccuagaucuaaaaaaaaaaaaaaaaaaaaaaaaaaaaaaaaaaaaaaaaaaaaaaaaaaaaaaaaaaaaaaaaugcaucccccccccccccccccccccccccccccccaaaggcucuuuucagagccaccagaauu

SEQ ID NO: 6785 - RNA, 1931 nt, Artificial Sequence
  mRNA product Design i-2 comprising derived and/or modified sequence from HRSV(A2)__F-del_DSCav1_mut6 (opt11)
gggagaggcgcugccuacggagguggcagccaucuccuucucggcaucaagcuuaccauggaacuacucauccuaaaagcaaacgccaucaccaccauacuaaccgccgucaccuucugcuucgccucgggacaaaacaucaccgaagaguucuaccagucaacgugcuccgccgucucaaaaggcuaccuaggcgcccuccgcaccgggugguauaccuccgucauaacuaucgaacucucuaacaucaaagaaaacaaauguaacggcaccgacgccaaagucaaacuaaucaaacaagaacuggacaaauacaaaaacgccgucaccgaccuacaaaugcucaugugcuccacuccagccaccggcuccgguagcgcaaucgccucaggcguagcuguaugcaaaguccuccaccuagaaggcgaaguaaacaaaauaaaauccgcccuccucucaaccaacaaggccgucgucucacucucaaacggcgucuccguacucaccuuuaaaguccuagaccuuaaaaacuacaucgacaaacaacugcuaccaauccucaacaaacaaucaugcagcaucccaaacccggaaacagucauggaguuccaacagaaaaacaaccgacuccucgaaaucacccgcgaguucuccgucaacgccggagucaccacaccuguaagcacauacaugcuuacuaauuccgaacuccuuucacuaauaaacgacaugccaauaaccaacgaccaaaagaaacucauguccaacaacguacaaaucguacgccaacaauccuacuccaucaugugcaucaucaaagaagaaguccuggccuaugucguacaacucccccuuuacggugucaucgacacacccugcuggaaacuacacaccagcccccucugcacaacaaacaccaaagaaggcuccaacaucugccucacccguaccgaccgaggcugguacugcgacaacgccggcuccgucuccuucuucccccaagccgaaaccugcaaagucugcagcaaccgcgucuucugcgauaccaugaacucccucacacucccaucugaagucaaccucugcaacgucgauauuuucaauccaaaauacgacugcaaaaucaugacuagcaaaaccgacguuagcuccuccgucaucaccucccucggcgccauaguuucaugcuacggcaaaaccaaaugcaccgccuccaacaaaaacaaaggcaucauaaaaaccuucuccaacgggugcgacuacguaucuaauaaaggagucgacaccgucucaguaggaaacacccucuacuaugucaacaaacaagaaggccaaucacuauacguuaaaggcgaaccaaucaucaacuucuacgacccacucgucuuccccagcgacgaguuugacgccucaaucucgcaagucaaugaaaagauuaaccaaucccuagccuucauccgaaaaagugacgaacuccuccacaacguuaacgccggcaaaucuacaaccaacaucaugaucaccacuauaaucaucgucaucauagucauacuucucagccucaucgcagucggacuccuccuuuauugcaaggcacgauaaggacuagugcaucacauuuaaaagcaucucagccuaccaugagaauaagagaaagaaaaugaagaucaauagcuuauucaucucuuuuucuuuuucguugguguaaagccaacacccugucuaaaaaacauaaauuucuuuaaucauuuugccucuuuucucugugcuucaauuaauaaaaaauggaaagaaccuagaucuaaaaaaaaaaaaaaaaaaaaaaaaaaaaaaaaaaaaaaaaaaaaaaaaaaaaaaaaaaaaaaaaugcaucccccccccccccccccccccccccccccccaaaggcucuuuucagagccaccagaauu

SEQ ID NO: 6786 - RNA, 1927 nt, Artificial Sequence
  mRNA product Design i-2 comprising derived and/or modified sequence from HRSV(A2)__F-del_DSCav1_mut6 (opt1)
ggggcgcugccuacggagguggcagccaucuccuucucggcaucaagcuuaccauggagcugcucauccugaaggccaacgccaucaccaccauccugacggcggugaccuucugcuucgccagcggccagaacaucaccgaggaguucuaccaguccacgugcagcgccgucuccaagggguaccucggcgcccugcggaccggcugguacaccuccgugaucaccaucgagcugagcaacaucaaggagaacaagugcaacgggaccgacgccaaggugaagcucaucaagcaggagcuggacaaguacaagaacgcggucacggaccugcagaugcugaugugcuccaccccggcaaccggcuccggcuccgccaucgcgagcggcgucgccgugugcaaggugcugcaccucgagggggaggucaacaagaucaagagcgcccugcuguccaccaacaaggccguggugagccucuccaacggcgucagcgugcugaccuucaaggugcuggaccucaagaacuacaucgacaagcagcugcugcccauccugaacaagcagagcugcuccauccccaaccccgagacggugauggaguuccagcagaagaacaaccggcuccuggagaucacccgcgaguucagcgugaacgccggggucaccacccccguguccacguacaugcugaccaacagcgagcuccugucccugaucaacgacaugccgaucaccaacgaccagaagaagcucaugagcaacaacgugcagaucguccggcagcaguccuacagcaucaugugcaucaucaaggaggaggugcuggcguacgugguccagcugccccucuacggcgugaucgacacccccugcuggaagcugcacacgagcccccugugcaccaccaacaccaaggagggguccaacaucugccucacgcgcaccgaccggggcugguacugcgacaacgccggcagcgucuccuucuucccgcaggccgagaccugcaaggugugcagcaaccgcguguucugcgacaccaugaacucccugacgcugcccagcgagguaaaccucugcaacgucgacaucuucaaccccaaguacgacugcaagaucaugaccuccaagaccgacgugagcuccagcgugaucaccucccugggggccaucgucagcugcuacggcaagacgaagugcaccgccagcaacaagaacaaggggaucaucaagaccuucuccaacggcugcgacuacgugagcaacaagggcguggacaccguguccgucgggaacacccuguacuacgugaacaagcaggagggccagagccucuacgugaagggggagcccaucaucaacuucuacgacccgcuggucuuccccuccgacgaguucgacgcgagcaucucccaggugaacgagaagaucaaccagagccuggccuucauccgcaaguccgacgagcugcuccacaacgugaacgccggcaagagcacgaccaacaucaugaucaccaccaucaucaucgucaucaucgugauccugcugucccucaucgccguggggcugcugcucuacugcaaggcccggugaggacuagugcaucacauuuaaaagcaucucagccuaccaugagaauaagagaaagaaaaugaagaucaauagcuuauucaucucuuuuucuuuuucguugguguaaagccaacacccugucuaaaaaacauaaauuucuuuaaucauuuugccucuuuucucugugcuucaauuaauaaaaaauggaaagaaccuagaucuaaaaaaaaaaaaaaaaaaaaaaaaaaaaaaaaaaaaaaaaaaaaaaaaaaaaaaaaaaaaaaaaugcaucccccccccccccccccccccccccccccccaaaggcucuuuucagagccaccagaauu

SEQ ID NO: 6787 - RNA, 1927 nt, Artificial Sequence
  mRNA product Design i-2 comprising derived and/or modified sequence from HRSV(A2)__F-del_DSCav1_mut6 (opt1)
ggggcgcugccuacggagguggcagccaucuccuucucggcaucaagcuuaccauggagcugcucauccugaaggccaacgccaucaccaccauccugacggcggugaccuucugcuucgccagcggccagaacaucaccgaggaguucuaccaguccacgugcagcgccgucuccaagggguaccucggcgcccugcgcaccgggugguacaccagcgugaucaccaucgagcuguccaacaucaaggagaacaagugcaacggcaccgacgccaaggugaagcucaucaagcaggagcuggacaaguacaagaacgcggucacggaccugcagaugcucaugugcagcacccccgccaccggguccggcagcgccaucgccuccggcguggcggugugcaagguccugcaccuggagggggaggugaacaagaucaagagcgcccuccuguccaccaacaaggccguggucagccuguccaacggcgugagcgugcucacguucaagguccuggaccugaagaacuacaucgacaagcagcuccugccgauccugaacaagcaguccugcagcauccccaaccccgagaccgugauggaguuccagcagaagaacaaccggcuccuggagaucacccgcgaguucuccgugaacgccggggucaccacgcccgugagcaccuacaugcugaccaacuccgagcuccugagccugaucaacgacaugccgaucaccaacgaccagaagaagcucaugagcaacaacgugcagaucguccggcagcaguccuacagcaucaugugcaucaucaaggaggaggugcuggccuacgugguccagcugccccucuacggcgugaucgacacgcccugcuggaagcugcacaccagcccccugugcaccaccaacacgaaggaggggagcaacaucugccucacccgcaccgaccggggcugguacugcgacaacgcgggcuccgugagcuucuucccgcaggccgagaccugcaaggucugcuccaaccgcguguucugcgacacgaugaacagccugacccugcccuccgaggucaaccucugcaacguggacaucuucaaccccaaguacgacugcaagaucaugaccagcaagaccgacguguccagcuccgucaucacgagccugggggccaucguguccugcuacggcaagaccaagugcaccgccagcaacaagaacaaggggaucaucaagaccuucuccaacggcugcgacuacgugagcaacaagggcgucgacacgguguccguggggaacacccuguacuacgucaacaagcaggagggccagagccucuacgugaagggggagcccaucaucaacuucuacgacccgcugguguuccccagcgacgaguucgacgccuccaucagccaggucaacgagaagaucaaccagucccuggcguucauccggaaguccgacgagcuccugcacaacgugaacgccggcaaguccaccaccaacaucaugaucaccacgaucaucaucgugaucaucgucauccugcucagccugaucgccguggggcugcuccuguacugcaaggcccgcugaggacuagugcaucacauuuaaaagcaucucagccuaccaugagaauaagagaaagaaaaugaagaucaauagcuuauucaucucuuuuucuuuuucguugguguaaagccaacacccugucuaaaaaacauaaauuucuuuaaucauuuugccucuuuucucugugcuucaauuaauaaaaaauggaaagaaccuagaucuaaaaaaaaaaaaaaaaaaaaaaaaaaaaaaaaaaaaaaaaaaaaaaaaaaaaaaaaaaaaaaaaugcaucccccccccccccccccccccccccccccccaaaggcucuuuucagagccaccagaauu

SEQ ID NO: 6788 - RNA, 1927 nt, Artificial Sequence
  mRNA product Design i-2 comprising derived and/or modified sequence from HRSV(A2)__F-del_DSCav1_mut6 (opt2)
ggggcgcugccuacggagguggcagccaucuccuucucggcaucaagcuuaccauggagcuccucauccucaaggccaacgccaucaccaccauccucaccgccgucaccuucugcuucgccuccggccagaacaucaccgaggaguucuaccaguccaccugcuccgccgucuccaagggcuaccucggcgcccuccgcaccggcugguacaccuccgucaucaccaucgagcucuccaacaucaaggagaacaagugcaacggcaccgacgccaaggucaagcucaucaagcaggagcucgacaaguacaagaacgccgucaccgaccuccagaugcucaugugcuccacccccgccaccggcuccggcuccgccaucgccuccggcgucgccgucugcaagguccuccaccucgagggcgaggucaacaagaucaaguccgcccuccucuccaccaacaaggccgucgucucccucuccaacggcgucuccguccucaccuucaagguccucgaccucaagaacuacaucgacaagcagcuccuccccauccucaacaagcaguccugcuccauccccaaccccgagaccgucauggaguuccagcagaagaacaaccgccuccucgagaucacccgcgaguucuccgucaacgccggcgucaccacccccgucuccaccuacaugcucaccaacuccgagcuccucucccucaucaacgacaugcccaucaccaacgaccagaagaagcucauguccaacaacguccagaucguccgccagcaguccuacuccaucaugugcaucaucaaggaggagguccucgccuacgucguccagcucccccucuacggcgucaucgacacccccugcuggaagcuccacaccuccccccucugcaccaccaacaccaaggagggcuccaacaucugccucacccgcaccgaccgcggcugguacugcgacaacgccggcuccgucuccuucuucccccaggccgagaccugcaaggucugcuccaaccgcgucuucugcgacaccaugaacucccucacccuccccuccgaggucaaccucugcaacgucgacaucuucaaccccaaguacgacugcaagaucaugaccuccaagaccgacgucuccuccuccgucaucaccucccucggcgccaucgucuccugcuacggcaagaccaagugcaccgccuccaacaagaacaagggcaucaucaagaccuucuccaacggcugcgacuacgucuccaacaagggcgucgacaccgucuccgucggcaacacccucuacuacgucaacaagcaggagggccagucccucuacgucaagggcgagcccaucaucaacuucuacgacccccucgucuuccccuccgacgaguucgacgccuccaucucccaggucaacgagaagaucaaccagucccucgccuucauccgcaaguccgacgagcuccuccacaacgucaacgccggcaaguccaccaccaacaucaugaucaccaccaucaucaucgucaucaucgucauccuccucucccucaucgccgucggccuccuccucuacugcaaggcccgcugaggacuagugcaucacauuuaaaagcaucucagccuaccaugagaauaagagaaagaaaaugaagaucaauagcuuauucaucucuuuuucuuuuucguugguguaaagccaacacccugucuaaaaaacauaaauuucuuuaaucauuuugccucuuuucucugugcuucaauuaauaaaaaauggaaagaaccuagaucuaaaaaaaaaaaaaaaaaaaaaaaaaaaaaaaaaaaaaaaaaaaaaaaaaaaaaaaaaaaaaaaaugcaucccccccccccccccccccccccccccccccaaaggcucuuuucagagccaccagaauu

SEQ ID NO: 6789 - RNA, 1927 nt, Artificial Sequence
  mRNA product Design i-2 comprising derived and/or modified sequence from HRSV(A2)__F-del_DSCav1_mut6 (opt3)
ggggcgcugccuacggagguggcagccaucuccuucucggcaucaagcuuaccauggagcugcucauccuuaaggccaacgcuauuaccacaauacugacugcagugacguucugcuuugccagcggccagaauaucaccgaagaguucuaccaauccacauguucugcggucucaaaaggguauuugggagcuuuaagaacugguugguacaccaguguuauuacaaucgaacugagcaacauuaaggagaauaaaugcaacggcaccgacgccaaggugaaacuaaucaagcaggaacucgauaaguauaaaaaugcaguaacugaccugcagaugcuuauguguuccacacccgccaccgggucuggaucggcuauagcaucaggcguggccgucugcaaggugcugcacuuggagggugagguuaacaaaaucaagagcgcucuccugaguacgaauaaagccguggucucccugucuaacggggugagcguacucacuuuuaagguuuuagaucugaagaauuacauugacaaacagcuuuugccuauccugaacaagcaauccuguucaauuccaaauccggaaaccgugauggaguuccagcagaaaaacaauaggcuacucgaaaucacacgggaguuuagugucaacgcgggagugacuacccccgugagcacauauaugcugaccaauucugagcuucuguccuugauaaacgauaugccuauuacgaacgaccagaagaaacucaugucaaauaacguccaaaucguucgccagcagagcuacaguauuaugugcaucaucaaggaagaggugcuggcauauguagugcaguuaccacuguacggcgucauugauacucccuguuggaaacuccauacaucuccucuuugcaccacuaauacaaaggaaggcuccaacauaugucugacccgaacggaccgugggugguacugcgauaaugccggaagcgugucguucuuuccacaagcugagaccuguaagguuugcucuaacagaguguucugcgacacaaugaacuccuugacucuacccucagaagucaaucuguguaauguggauaucuuuaacccuaaauaugacugcaagauuaugaccaguaaaacagauguaagcuccucuguuaucacuagccucggugccauagugucauguuacggcaagaccaaaugcacagcaaguaauaagaacaaggggauuaucaaaaccuucuccaauggaugugacuaugucagcaacaagggcguggacacugucucuguggguaauacgcuguacuauguuaacaaacaggaggggcagucacuuuacgugaagggagagccaaucauuaacuuuuaugauccgcugguauuccccagugacgaauuugaugcuagcaucucccaagucaaugagaaaauuaaccagucuuuggccuucauaaggaagucggacgaacuccugcacaaugugaacgcgggcaagagcacaaccaauaucaugauuacuaccaucaucauuguuauaaucgugauuuuacugucccuaaucgccgucggccuccugcuuuacugcaaagcacggugaggacuagugcaucacauuuaaaagcaucucagccuaccaugagaauaagagaaagaaaaugaagaucaauagcuuauucaucucuuuuucuuuuucguugguguaaagccaacacccugucuaaaaaacauaaauuucuuuaaucauuuugccucuuuucucugugcuucaauuaauaaaaaauggaaagaaccuagaucuaaaaaaaaaaaaaaaaaaaaaaaaaaaaaaaaaaaaaaaaaaaaaaaaaaaaaaaaaaaaaaaaugcaucccccccccccccccccccccccccccccccaaaggcucuuuucagagccaccagaauu

SEQ ID NO: 6790 - RNA, 1927 nt, Artificial Sequence
  mRNA product Design i-2 comprising derived and/or modified sequence from HRSV(A2)__F-del_DSCav1_mut6 (opt4)
ggggcgcugccuacggagguggcagccaucuccuucucggcaucaagcuuaccauggagcugcugauccugaaggccaacgccaucaccaccauccugaccgccgugaccuucugcuucgccagcggccagaacaucaccgaggaguucuaccagagcaccugcagcgccgugagcaagggcuaccugggcgcccugagaaccggcugguacaccagcgugaucaccaucgagcugagcaacaucaaggagaacaagugcaacggcaccgacgccaaggugaagcugaucaagcaggagcuggacaaguacaagaacgccgugaccgaccugcagaugcugaugugcagcacccccgccaccggcagcggcagcgccaucgccagcggcguggccgugugcaaggugcugcaccuggagggcgaggugaacaagaucaagagcgcccugcugagcaccaacaaggccguggugagccugagcaacggcgugagcgugcugaccuucaaggugcuggaccugaagaacuacaucgacaagcagcugcugcccauccugaacaagcagagcugcagcauccccaaccccgagaccgugauggaguuccagcagaagaacaacagacugcuggagaucaccagagaguucagcgugaacgccggcgugaccacccccgugagcaccuacaugcugaccaacagcgagcugcugagccugaucaacgacaugcccaucaccaacgaccagaagaagcugaugagcaacaacgugcagaucgugagacagcagagcuacagcaucaugugcaucaucaaggaggaggugcuggccuacguggugcagcugccccuguacggcgugaucgacacccccugcuggaagcugcacaccagcccccugugcaccaccaacaccaaggagggcagcaacaucugccugaccagaaccgacagaggcugguacugcgacaacgccggcagcgugagcuucuucccccaggccgagaccugcaaggugugcagcaacagaguguucugcgacaccaugaacagccugacccugcccagcgaggugaaccugugcaacguggacaucuucaaccccaaguacgacugcaagaucaugaccagcaagaccgacgugagcagcagcgugaucaccagccugggcgccaucgugagcugcuacggcaagaccaagugcaccgccagcaacaagaacaagggcaucaucaagaccuucagcaacggcugcgacuacgugagcaacaagggcguggacaccgugagcgugggcaacacccuguacuacgugaacaagcaggagggccagagccuguacgugaagggcgagcccaucaucaacuucuacgacccccugguguuccccagcgacgaguucgacgccagcaucagccaggugaacgagaagaucaaccagagccuggccuucaucagaaagagcgacgagcugcugcacaacgugaacgccggcaagagcaccaccaacaucaugaucaccaccaucaucaucgugaucaucgugauccugcugagccugaucgccgugggccugcugcuguacugcaaggccagaugaggacuagugcaucacauuuaaaagcaucucagccuaccaugagaauaagagaaagaaaaugaagaucaauagcuuauucaucucuuuuucuuuuucguugguguaaagccaacacccugucuaaaaaacauaaauuucuuuaaucauuuugccucuuuucucugugcuucaauuaauaaaaaauggaaagaaccuagaucuaaaaaaaaaaaaaaaaaaaaaaaaaaaaaaaaaaaaaaaaaaaaaaaaaaaaaaaaaaaaaaaaugcaucccccccccccccccccccccccccccccccaaaggcucuuuucagagccaccagaauu

SEQ ID NO: 6791 - RNA, 1927 nt, Artificial Sequence
  mRNA product Design i-2 comprising derived and/or modified sequence from HRSV(A2)__F-del_DSCav1_mut6 (opt5)
ggggcgcugccuacggagguggcagccaucuccuucucggcaucaagcuuaccauggagcugcucauccugaaggccaacgcuauuaccacaauccuuacggccgugaccuucugcuuugcgagcggccagaauauuacagaagaguucuaccaauccaccuguucugcugucagcaaaggguaucugggagcccucagaacaggcugguacaccuccguuaucacaauugaacugucuaacaucaaggagaauaaaugcaacgggaccgacgccaaggugaaacuuaucaagcaggaacuggauaaguauaaaaaugcugugacggaccuccagaugcugauguguagcacccccgccacaggauccggcucugcuauugccagcggggucgcggugugcaagguucugcaccucgagggagaggugaacaaaaucaaguccgcccugcuuagcaccaauaaagcugucgugucucuguccaacggcguuagcgugcucacauuuaagguccuggaucuuaagaauuacauugacaaacagcugcucccuauccugaacaagcaaucuuguuccauuccgaaucccgaaaccgugauggaguuccagcagaaaaacaaucggcugcucgaaaucacgcgcgaguuuagcgugaacgccggcgucacaaccccuguuucuacauauaugcugaccaauuccgagcuucugagccucauuaacgauaugcccaucaccaacgaccagaagaaacugauguccaauaacgugcaaaucgugagacagcagucuuacagcauuaugugcaucauuaaggaagagguccuugcuuaugugguucagcugccucucuacggggugaucgauacacccuguuggaaacugcauacguccccucugugcaccacaaauaccaaggaaggaagcaacauuugucucacacggaccgaccgcggcugguacugcgauaaugccgggucugucuccuucuuuccgcaagcggagacguguaaggugugcagcaacagaguuuucugcgacacaaugaacucucugacccuucccagcgaagugaaucuguguaaugucgauaucuuuaacccuaaauaugacugcaagaucaugaccuccaaaacagaugugucuagcuccgucauuaccagccucggagccaucgugucuuguuacggcaagacaaaaugcacggcuuccaauaagaacaaggggauuaucaaaaccuucagcaauggaugugacuauguuucuaacaagggcguggacacagucuccgugggcaauacccuguacuauguuaacaaacaggaggggcagagccuuuacgugaagggagagcccauuaucaacuuuuaugauccucuggucuuccccuccgacgaauuugaugccucuaucagccaagugaaugagaaaauuaaccagucccucgcuuucauccggaagucugacgaacugcugcacaaugugaacgccggcaagagcacaaccaauauuaugaucacgaccauuaucauuguuaucaucgucauucuccugucccuuaucgccguggggcugcuccuguacugcaaagcucgcugaggacuagugcaucacauuuaaaagcaucucagccuaccaugagaauaagagaaagaaaaugaagaucaauagcuuauucaucucuuuuucuuuuucguugguguaaagccaacacccugucuaaaaaacauaaauuucuuuaaucauuuugccucuuuucucugugcuucaauuaauaaaaaauggaaagaaccuagaucuaaaaaaaaaaaaaaaaaaaaaaaaaaaaaaaaaaaaaaaaaaaaaaaaaaaaaaaaaaaaaaaaugcaucccccccccccccccccccccccccccccccaaaggcucuuuucagagccaccagaauu

SEQ ID NO: 6792 - RNA, 1927 nt, Artificial Sequence
  mRNA product Design i-2 comprising derived and/or modified sequence from HRSV(A2)__F-del_DSCav1_mut6 (opt6)
ggggcgcugccuacggagguggcagccaucuccuucucggcaucaagcuuaccauggaacuacucauauuaaaagcaaacgcaauaacaacgauauuaacagcuguaacauucugcuuugcaucaggccaaaauaucaccgaagaauuuuaucaaagcacaugcucugcaguauccaaaggauacuuaggagcauuaagaacaggcugguacacauccguaauaacaauagaacuaucaaacaucaaagaaaacaaaugcaacggcacagacgccaaaguaaaacucauaaaacaagaacuagacaaauauaaaaacgcaguaacagaucuacaaaugcucaugugcuccacaccagcaaccggaucugguucagccauagcauccggcguagccgucugcaaaguauuacaccucgaaggagaaguaaacaaaauaaaaucugcccuauuaucuacaaauaaagccguaguaagucuaaguaacggaguaucaguacuaacauuuaaaguccuagaccugaaaaacuauaucgacaaacaacuauuaccaauacuaaacaaacaauccuguuccaucccuaacccagaaacaguuauggaauuucaacaaaaaaauaaccgccuuuuagaaauaacuagagaauuuucaguaaacgcaggaguuacaacaccaguaucaacauacaugcuaacaaauucagaauuauuaucccuuauaaaugacaugccuaucacaaacgaucaaaaaaaauuaauguccaacaacguacaaauaguaagacaacaaucauauuccaucaugugcaucauaaaagaagaaguccucgcauacguagugcaacuaccacuauacggagucauagauacacccuguuggaaacuucacacaucuccacuaugcacaacaaacacgaaagaaggauccaacauaugccuaacacgaacagacagaggaugguauugcgacaacgcuggaagugugagcuucuucccucaagcagaaacuugcaaaguaugcagcaaucguguauucugcgacacaaugaacucauuaacacucccaagcgaaguaaaccucugcaauguagacaucuuuaauccaaaauacgauuguaaaauaaugacuucaaaaacagacgucucaucaucuguaauaacaucuuuaggagcaauaguuucuugcuacgguaaaacaaaaugcaccgcauccaacaaaaacaaaggaauaauaaaaacauucucuaacggcugcgauuacguaucuaacaaaggaguugacacagucucaguaggaaacacacuauacuacguaaacaaacaagaaggacaaagccuauacguaaaaggagaaccaauaauaaacuucuaugacccauuaguauuuccaagcgaugaauuugacgcuucaauaucacaagucaaugaaaaaauaaaucagagcuuagcauucauaagaaaaucugaugaacuacuacacaauguaaaugcaggaaaauccacuaccaacauaaugauuaccacaauuauaauaguuaucauaguaauacuauuaucacuaauagccguuggauuacuacuauacugcaaagcaagauaaggacuagugcaucacauuuaaaagcaucucagccuaccaugagaauaagagaaagaaaaugaagaucaauagcuuauucaucucuuuuucuuuuucguugguguaaagccaacacccugucuaaaaaacauaaauuucuuuaaucauuuugccucuuuucucugugcuucaauuaauaaaaaauggaaagaaccuagaucuaaaaaaaaaaaaaaaaaaaaaaaaaaaaaaaaaaaaaaaaaaaaaaaaaaaaaaaaaaaaaaaaugcaucccccccccccccccccccccccccccccccaaaggcucuuuucagagccaccagaauu

SEQ ID NO: 6793 - RNA, 1927 nt, Artificial Sequence
  mRNA product Design i-2 comprising derived and/or modified sequence from HRSV(A2)__F-del_DSCav1_mut6 (opt11)
ggggcgcugccuacggagguggcagccaucuccuucucggcaucaagcuuaccauggaacuacucauccuaaaagcaaacgccaucaccaccauacuaaccgccgucaccuucugcuucgccucgggacaaaacaucaccgaagaguucuaccagucaacgugcuccgccgucucaaaaggcuaccuaggcgcccuccgcaccgggugguauaccuccgucauaacuaucgaacucucuaacaucaaagaaaacaaauguaacggcaccgacgccaaagucaaacuaaucaaacaagaacuggacaaauacaaaaacgccgucaccgaccuacaaaugcucaugugcuccacuccagccaccggcuccgguagcgcaaucgccucaggcguagcuguaugcaaaguccuccaccuagaaggcgaaguaaacaaaauaaaauccgcccuccucucaaccaacaaggccgucgucucacucucaaacggcgucuccguacucaccuuuaaaguccuagaccuuaaaaacuacaucgacaaacaacugcuaccaauccucaacaaacaaucaugcagcaucccaaacccggaaacagucauggaguuccaacagaaaaacaaccgacuccucgaaaucacccgcgaguucuccgucaacgccggagucaccacaccuguaagcacauacaugcuuacuaauuccgaacuccuuucacuaauaaacgacaugccaauaaccaacgaccaaaagaaacucauguccaacaacguacaaaucguacgccaacaauccuacuccaucaugugcaucaucaaagaagaaguccuggccuaugucguacaacucccccuuuacggugucaucgacacacccugcuggaaacuacacaccagcccccucugcacaacaaacaccaaagaaggcuccaacaucugccucacccguaccgaccgaggcugguacugcgacaacgccggcuccgucuccuucuucccccaagccgaaaccugcaaagucugcagcaaccgcgucuucugcgauaccaugaacucccucacacucccaucugaagucaaccucugcaacgucgauauuuucaauccaaaauacgacugcaaaaucaugacuagcaaaaccgacguuagcuccuccgucaucaccucccucggcgccauaguuucaugcuacggcaaaaccaaaugcaccgccuccaacaaaaacaaaggcaucauaaaaaccuucuccaacgggugcgacuacguaucuaauaaaggagucgacaccgucucaguaggaaacacccucuacuaugucaacaaacaagaaggccaaucacuauacguuaaaggcgaaccaaucaucaacuucuacgacccacucgucuuccccagcgacgaguuugacgccucaaucucgcaagucaaugaaaagauuaaccaaucccuagccuucauccgaaaaagugacgaacuccuccacaacguuaacgccggcaaaucuacaaccaacaucaugaucaccacuauaaucaucgucaucauagucauacuucucagccucaucgcagucggacuccuccuuuauugcaaggcacgauaaggacuagugcaucacauuuaaaagcaucucagccuaccaugagaauaagagaaagaaaaugaagaucaauagcuuauucaucucuuuuucuuuuucguugguguaaagccaacacccugucuaaaaaacauaaauuucuuuaaucauuuugccucuuuucucugugcuucaauuaauaaaaaauggaaagaaccuagaucuaaaaaaaaaaaaaaaaaaaaaaaaaaaaaaaaaaaaaaaaaaaaaaaaaaaaaaaaaaaaaaaaugcaucccccccccccccccccccccccccccccccaaaggcucuuuucagagccaccagaauu

SEQ ID NO: 6794 - RNA, 1762 nt, Artificial Sequence
  mRNA product Design i-3 comprising derived and/or modified sequence from HRSV(A2)__F-del_DSCav1_mut6 (opt1)
gggagaaagcuuaccauggagcugcucauccugaaggccaacgccaucaccaccauccugacggcggugaccuucugcuucgccagcggccagaacaucaccgaggaguucuaccaguccacgugcagcgccgucuccaagggguaccucggcgcccugcggaccggcugguacaccuccgugaucaccaucgagcugagcaacaucaaggagaacaagugcaacgggaccgacgccaaggugaagcucaucaagcaggagcuggacaaguacaagaacgcggucacggaccugcagaugcugaugugcuccaccccggcaaccggcuccggcuccgccaucgcgagcggcgucgccgugugcaaggugcugcaccucgagggggaggucaacaagaucaagagcgcccugcuguccaccaacaaggccguggugagccucuccaacggcgucagcgugcugaccuucaaggugcuggaccucaagaacuacaucgacaagcagcugcugcccauccugaacaagcagagcugcuccauccccaaccccgagacggugauggaguuccagcagaagaacaaccggcuccuggagaucacccgcgaguucagcgugaacgccggggucaccacccccguguccacguacaugcugaccaacagcgagcuccugucccugaucaacgacaugccgaucaccaacgaccagaagaagcucaugagcaacaacgugcagaucguccggcagcaguccuacagcaucaugugcaucaucaaggaggaggugcuggcguacgugguccagcugccccucuacggcgugaucgacacccccugcuggaagcugcacacgagcccccugugcaccaccaacaccaaggagggguccaacaucugccucacgcgcaccgaccggggcugguacugcgacaacgccggcagcgucuccuucuucccgcaggccgagaccugcaaggugugcagcaaccgcguguucugcgacaccaugaacucccugacgcugcccagcgagguaaaccucugcaacgucgacaucuucaaccccaaguacgacugcaagaucaugaccuccaagaccgacgugagcuccagcgugaucaccucccugggggccaucgucagcugcuacggcaagacgaagugcaccgccagcaacaagaacaaggggaucaucaagaccuucuccaacggcugcgacuacgugagcaacaagggcguggacaccguguccgucgggaacacccuguacuacgugaacaagcaggagggccagagccucuacgugaagggggagcccaucaucaacuucuacgacccgcuggucuuccccuccgacgaguucgacgcgagcaucucccaggugaacgagaagaucaaccagagccuggccuucauccgcaaguccgacgagcugcuccacaacgugaacgccggcaagagcacgaccaacaucaugaucaccaccaucaucaucgucaucaucgugauccugcugucccucaucgccguggggcugcugcucuacugcaaggcccggugaggacuaguuauaagacugacuagcccgaugggccucccaacgggcccuccuccccuccuugcaccgagauuaauaaaaaaaaaaaaaaaaaaaaaaaaaaaaaaaaaaaaaaaaaaaaaaaaaaaaaaaaaaaaaaaaugcaucccccccccccccccccccccccccccccccaaaggcucuuuucagagccaccagaauu

SEQ ID NO: 6795 - RNA, 1762 nt, Artificial Sequence
  mRNA product Design i-3 comprising derived and/or modified sequence from HRSV(A2)__F-del_DSCav1_mut6 (opt1)
gggagaaagcuuaccauggagcugcucauccugaaggccaacgccaucaccaccauccugacggcggugaccuucugcuucgccagcggccagaacaucaccgaggaguucuaccaguccacgugcagcgccgucuccaagggguaccucggcgcccugcgcaccgggugguacaccagcgugaucaccaucgagcuguccaacaucaaggagaacaagugcaacggcaccgacgccaaggugaagcucaucaagcaggagcuggacaaguacaagaacgcggucacggaccugcagaugcucaugugcagcacccccgccaccggguccggcagcgccaucgccuccggcguggcggugugcaagguccugcaccuggagggggaggugaacaagaucaagagcgcccuccuguccaccaacaaggccguggucagccuguccaacggcgugagcgugcucacguucaagguccuggaccugaagaacuacaucgacaagcagcuccugccgauccugaacaagcaguccugcagcauccccaaccccgagaccgugauggaguuccagcagaagaacaaccggcuccuggagaucacccgcgaguucuccgugaacgccggggucaccacgcccgugagcaccuacaugcugaccaacuccgagcuccugagccugaucaacgacaugccgaucaccaacgaccagaagaagcucaugagcaacaacgugcagaucguccggcagcaguccuacagcaucaugugcaucaucaaggaggaggugcuggccuacgugguccagcugccccucuacggcgugaucgacacgcccugcuggaagcugcacaccagcccccugugcaccaccaacacgaaggaggggagcaacaucugccucacccgcaccgaccggggcugguacugcgacaacgcgggcuccgugagcuucuucccgcaggccgagaccugcaaggucugcuccaaccgcguguucugcgacacgaugaacagccugacccugcccuccgaggucaaccucugcaacguggacaucuucaaccccaaguacgacugcaagaucaugaccagcaagaccgacguguccagcuccgucaucacgagccugggggccaucguguccugcuacggcaagaccaagugcaccgccagcaacaagaacaaggggaucaucaagaccuucuccaacggcugcgacuacgugagcaacaagggcgucgacacgguguccguggggaacacccuguacuacgucaacaagcaggagggccagagccucuacgugaagggggagcccaucaucaacuucuacgacccgcugguguuccccagcgacgaguucgacgccuccaucagccaggucaacgagaagaucaaccagucccuggcguucauccggaaguccgacgagcuccugcacaacgugaacgccggcaaguccaccaccaacaucaugaucaccacgaucaucaucgugaucaucgucauccugcucagccugaucgccguggggcugcuccuguacugcaaggcccgcugaggacuaguuauaagacugacuagcccgaugggccucccaacgggcccuccuccccuccuugcaccgagauuaauaaaaaaaaaaaaaaaaaaaaaaaaaaaaaaaaaaaaaaaaaaaaaaaaaaaaaaaaaaaaaaaaugcaucccccccccccccccccccccccccccccccaaaggcucuuuucagagccaccagaauu

SEQ ID NO: 6796 - RNA, 1762 nt, Artificial Sequence
  mRNA product Design i-3 comprising derived and/or modified sequence from HRSV(A2)__F-del_DSCav1_mut6 (opt2)
gggagaaagcuuaccauggagcuccucauccucaaggccaacgccaucaccaccauccucaccgccgucaccuucugcuucgccuccggccagaacaucaccgaggaguucuaccaguccaccugcuccgccgucuccaagggcuaccucggcgcccuccgcaccggcugguacaccuccgucaucaccaucgagcucuccaacaucaaggagaacaagugcaacggcaccgacgccaaggucaagcucaucaagcaggagcucgacaaguacaagaacgccgucaccgaccuccagaugcucaugugcuccacccccgccaccggcuccggcuccgccaucgccuccggcgucgccgucugcaagguccuccaccucgagggcgaggucaacaagaucaaguccgcccuccucuccaccaacaaggccgucgucucccucuccaacggcgucuccguccucaccuucaagguccucgaccucaagaacuacaucgacaagcagcuccuccccauccucaacaagcaguccugcuccauccccaaccccgagaccgucauggaguuccagcagaagaacaaccgccuccucgagaucacccgcgaguucuccgucaacgccggcgucaccacccccgucuccaccuacaugcucaccaacuccgagcuccucucccucaucaacgacaugcccaucaccaacgaccagaagaagcucauguccaacaacguccagaucguccgccagcaguccuacuccaucaugugcaucaucaaggaggagguccucgccuacgucguccagcucccccucuacggcgucaucgacacccccugcuggaagcuccacaccuccccccucugcaccaccaacaccaaggagggcuccaacaucugccucacccgcaccgaccgcggcugguacugcgacaacgccggcuccgucuccuucuucccccaggccgagaccugcaaggucugcuccaaccgcgucuucugcgacaccaugaacucccucacccuccccuccgaggucaaccucugcaacgucgacaucuucaaccccaaguacgacugcaagaucaugaccuccaagaccgacgucuccuccuccgucaucaccucccucggcgccaucgucuccugcuacggcaagaccaagugcaccgccuccaacaagaacaagggcaucaucaagaccuucuccaacggcugcgacuacgucuccaacaagggcgucgacaccgucuccgucggcaacacccucuacuacgucaacaagcaggagggccagucccucuacgucaagggcgagcccaucaucaacuucuacgacccccucgucuuccccuccgacgaguucgacgccuccaucucccaggucaacgagaagaucaaccagucccucgccuucauccgcaaguccgacgagcuccuccacaacgucaacgccggcaaguccaccaccaacaucaugaucaccaccaucaucaucgucaucaucgucauccuccucucccucaucgccgucggccuccuccucuacugcaaggcccgcugaggacuaguuauaagacugacuagcccgaugggccucccaacgggcccuccuccccuccuugcaccgagauuaauaaaaaaaaaaaaaaaaaaaaaaaaaaaaaaaaaaaaaaaaaaaaaaaaaaaaaaaaaaaaaaaaugcaucccccccccccccccccccccccccccccccaaaggcucuuuucagagccaccagaauu

SEQ ID NO: 6797 - RNA, 1762 nt, Artificial Sequence
  mRNA product Design i-3 comprising derived and/or modified sequence from HRSV(A2)__F-del_DSCav1_mut6 (opt3)
gggagaaagcuuaccauggagcugcucauccuuaaggccaacgcuauuaccacaauacugacugcagugacguucugcuuugccagcggccagaauaucaccgaagaguucuaccaauccacauguucugcggucucaaaaggguauuugggagcuuuaagaacugguugguacaccaguguuauuacaaucgaacugagcaacauuaaggagaauaaaugcaacggcaccgacgccaaggugaaacuaaucaagcaggaacucgauaaguauaaaaaugcaguaacugaccugcagaugcuuauguguuccacacccgccaccgggucuggaucggcuauagcaucaggcguggccgucugcaaggugcugcacuuggagggugagguuaacaaaaucaagagcgcucuccugaguacgaauaaagccguggucucccugucuaacggggugagcguacucacuuuuaagguuuuagaucugaagaauuacauugacaaacagcuuuugccuauccugaacaagcaauccuguucaauuccaaauccggaaaccgugauggaguuccagcagaaaaacaauaggcuacucgaaaucacacgggaguuuagugucaacgcgggagugacuacccccgugagcacauauaugcugaccaauucugagcuucuguccuugauaaacgauaugccuauuacgaacgaccagaagaaacucaugucaaauaacguccaaaucguucgccagcagagcuacaguauuaugugcaucaucaaggaagaggugcuggcauauguagugcaguuaccacuguacggcgucauugauacucccuguuggaaacuccauacaucuccucuuugcaccacuaauacaaaggaaggcuccaacauaugucugacccgaacggaccgugggugguacugcgauaaugccggaagcgugucguucuuuccacaagcugagaccuguaagguuugcucuaacagaguguucugcgacacaaugaacuccuugacucuacccucagaagucaaucuguguaauguggauaucuuuaacccuaaauaugacugcaagauuaugaccaguaaaacagauguaagcuccucuguuaucacuagccucggugccauagugucauguuacggcaagaccaaaugcacagcaaguaauaagaacaaggggauuaucaaaaccuucuccaauggaugugacuaugucagcaacaagggcguggacacugucucuguggguaauacgcuguacuauguuaacaaacaggaggggcagucacuuuacgugaagggagagccaaucauuaacuuuuaugauccgcugguauuccccagugacgaauuugaugcuagcaucucccaagucaaugagaaaauuaaccagucuuuggccuucauaaggaagucggacgaacuccugcacaaugugaacgcgggcaagagcacaaccaauaucaugauuacuaccaucaucauuguuauaaucgugauuuuacugucccuaaucgccgucggccuccugcuuuacugcaaagcacggugaggacuaguuauaagacugacuagcccgaugggccucccaacgggcccuccuccccuccuugcaccgagauuaauaaaaaaaaaaaaaaaaaaaaaaaaaaaaaaaaaaaaaaaaaaaaaaaaaaaaaaaaaaaaaaaaugcaucccccccccccccccccccccccccccccccaaaggcucuuuucagagccaccagaauu

SEQ ID NO: 6798 - RNA, 1762 nt, Artificial Sequence
  mRNA product Design i-3 comprising derived and/or modified sequence from HRSV(A2)__F-del_DSCav1_mut6 (opt4)
gggagaaagcuuaccauggagcugcugauccugaaggccaacgccaucaccaccauccugaccgccgugaccuucugcuucgccagcggccagaacaucaccgaggaguucuaccagagcaccugcagcgccgugagcaagggcuaccugggcgcccugagaaccggcugguacaccagcgugaucaccaucgagcugagcaacaucaaggagaacaagugcaacggcaccgacgccaaggugaagcugaucaagcaggagcuggacaaguacaagaacgccgugaccgaccugcagaugcugaugugcagcacccccgccaccggcagcggcagcgccaucgccagcggcguggccgugugcaaggugcugcaccuggagggcgaggugaacaagaucaagagcgcccugcugagcaccaacaaggccguggugagccugagcaacggcgugagcgugcugaccuucaaggugcuggaccugaagaacuacaucgacaagcagcugcugcccauccugaacaagcagagcugcagcauccccaaccccgagaccgugauggaguuccagcagaagaacaacagacugcuggagaucaccagagaguucagcgugaacgccggcgugaccacccccgugagcaccuacaugcugaccaacagcgagcugcugagccugaucaacgacaugcccaucaccaacgaccagaagaagcugaugagcaacaacgugcagaucgugagacagcagagcuacagcaucaugugcaucaucaaggaggaggugcuggccuacguggugcagcugccccuguacggcgugaucgacacccccugcuggaagcugcacaccagcccccugugcaccaccaacaccaaggagggcagcaacaucugccugaccagaaccgacagaggcugguacugcgacaacgccggcagcgugagcuucuucccccaggccgagaccugcaaggugugcagcaacagaguguucugcgacaccaugaacagccugacccugcccagcgaggugaaccugugcaacguggacaucuucaaccccaaguacgacugcaagaucaugaccagcaagaccgacgugagcagcagcgugaucaccagccugggcgccaucgugagcugcuacggcaagaccaagugcaccgccagcaacaagaacaagggcaucaucaagaccuucagcaacggcugcgacuacgugagcaacaagggcguggacaccgugagcgugggcaacacccuguacuacgugaacaagcaggagggccagagccuguacgugaagggcgagcccaucaucaacuucuacgacccccugguguuccccagcgacgaguucgacgccagcaucagccaggugaacgagaagaucaaccagagccuggccuucaucagaaagagcgacgagcugcugcacaacgugaacgccggcaagagcaccaccaacaucaugaucaccaccaucaucaucgugaucaucgugauccugcugagccugaucgccgugggccugcugcuguacugcaaggccagaugaggacuaguuauaagacugacuagcccgaugggccucccaacgggcccuccuccccuccuugcaccgagauuaauaaaaaaaaaaaaaaaaaaaaaaaaaaaaaaaaaaaaaaaaaaaaaaaaaaaaaaaaaaaaaaaaugcaucccccccccccccccccccccccccccccccaaaggcucuuuucagagccaccagaauu

SEQ ID NO: 6799 - RNA, 1762 nt, Artificial Sequence
  mRNA product Design i-3 comprising derived and/or modified sequence from HRSV(A2)__F-del_DSCav1_mut6 (opt5)
gggagaaagcuuaccauggagcugcucauccugaaggccaacgcuauuaccacaauccuuacggccgugaccuucugcuuugcgagcggccagaauauuacagaagaguucuaccaauccaccuguucugcugucagcaaaggguaucugggagcccucagaacaggcugguacaccuccguuaucacaauugaacugucuaacaucaaggagaauaaaugcaacgggaccgacgccaaggugaaacuuaucaagcaggaacuggauaaguauaaaaaugcugugacggaccuccagaugcugauguguagcacccccgccacaggauccggcucugcuauugccagcggggucgcggugugcaagguucugcaccucgagggagaggugaacaaaaucaaguccgcccugcuuagcaccaauaaagcugucgugucucuguccaacggcguuagcgugcucacauuuaagguccuggaucuuaagaauuacauugacaaacagcugcucccuauccugaacaagcaaucuuguuccauuccgaaucccgaaaccgugauggaguuccagcagaaaaacaaucggcugcucgaaaucacgcgcgaguuuagcgugaacgccggcgucacaaccccuguuucuacauauaugcugaccaauuccgagcuucugagccucauuaacgauaugcccaucaccaacgaccagaagaaacugauguccaauaacgugcaaaucgugagacagcagucuuacagcauuaugugcaucauuaaggaagagguccuugcuuaugugguucagcugccucucuacggggugaucgauacacccuguuggaaacugcauacguccccucugugcaccacaaauaccaaggaaggaagcaacauuugucucacacggaccgaccgcggcugguacugcgauaaugccgggucugucuccuucuuuccgcaagcggagacguguaaggugugcagcaacagaguuuucugcgacacaaugaacucucugacccuucccagcgaagugaaucuguguaaugucgauaucuuuaacccuaaauaugacugcaagaucaugaccuccaaaacagaugugucuagcuccgucauuaccagccucggagccaucgugucuuguuacggcaagacaaaaugcacggcuuccaauaagaacaaggggauuaucaaaaccuucagcaauggaugugacuauguuucuaacaagggcguggacacagucuccgugggcaauacccuguacuauguuaacaaacaggaggggcagagccuuuacgugaagggagagcccauuaucaacuuuuaugauccucuggucuuccccuccgacgaauuugaugccucuaucagccaagugaaugagaaaauuaaccagucccucgcuuucauccggaagucugacgaacugcugcacaaugugaacgccggcaagagcacaaccaauauuaugaucacgaccauuaucauuguuaucaucgucauucuccugucccuuaucgccguggggcugcuccuguacugcaaagcucgcugaggacuaguuauaagacugacuagcccgaugggccucccaacgggcccuccuccccuccuugcaccgagauuaauaaaaaaaaaaaaaaaaaaaaaaaaaaaaaaaaaaaaaaaaaaaaaaaaaaaaaaaaaaaaaaaaugcaucccccccccccccccccccccccccccccccaaaggcucuuuucagagccaccagaauu

SEQ ID NO: 6800 - RNA, 1762 nt, Artificial Sequence
  mRNA product Design i-3 comprising derived and/or modified sequence from HRSV(A2)__F-del_DSCav1_mut6 (opt6)
gggagaaagcuuaccauggaacuacucauauuaaaagcaaacgcaauaacaacgauauuaacagcuguaacauucugcuuugcaucaggccaaaauaucaccgaagaauuuuaucaaagcacaugcucugcaguauccaaaggauacuuaggagcauuaagaacaggcugguacacauccguaauaacaauagaacuaucaaacaucaaagaaaacaaaugcaacggcacagacgccaaaguaaaacucauaaaacaagaacuagacaaauauaaaaacgcaguaacagaucuacaaaugcucaugugcuccacaccagcaaccggaucugguucagccauagcauccggcguagccgucugcaaaguauuacaccucgaaggagaaguaaacaaaauaaaaucugcccuauuaucuacaaauaaagccguaguaagucuaaguaacggaguaucaguacuaacauuuaaaguccuagaccugaaaaacuauaucgacaaacaacuauuaccaauacuaaacaaacaauccuguuccaucccuaacccagaaacaguuauggaauuucaacaaaaaaauaaccgccuuuuagaaauaacuagagaauuuucaguaaacgcaggaguuacaacaccaguaucaacauacaugcuaacaaauucagaauuauuaucccuuauaaaugacaugccuaucacaaacgaucaaaaaaaauuaauguccaacaacguacaaauaguaagacaacaaucauauuccaucaugugcaucauaaaagaagaaguccucgcauacguagugcaacuaccacuauacggagucauagauacacccuguuggaaacuucacacaucuccacuaugcacaacaaacacgaaagaaggauccaacauaugccuaacacgaacagacagaggaugguauugcgacaacgcuggaagugugagcuucuucccucaagcagaaacuugcaaaguaugcagcaaucguguauucugcgacacaaugaacucauuaacacucccaagcgaaguaaaccucugcaauguagacaucuuuaauccaaaauacgauuguaaaauaaugacuucaaaaacagacgucucaucaucuguaauaacaucuuuaggagcaauaguuucuugcuacgguaaaacaaaaugcaccgcauccaacaaaaacaaaggaauaauaaaaacauucucuaacggcugcgauuacguaucuaacaaaggaguugacacagucucaguaggaaacacacuauacuacguaaacaaacaagaaggacaaagccuauacguaaaaggagaaccaauaauaaacuucuaugacccauuaguauuuccaagcgaugaauuugacgcuucaauaucacaagucaaugaaaaaauaaaucagagcuuagcauucauaagaaaaucugaugaacuacuacacaauguaaaugcaggaaaauccacuaccaacauaaugauuaccacaauuauaauaguuaucauaguaauacuauuaucacuaauagccguuggauuacuacuauacugcaaagcaagauaaggacuaguuauaagacugacuagcccgaugggccucccaacgggcccuccuccccuccuugcaccgagauuaauaaaaaaaaaaaaaaaaaaaaaaaaaaaaaaaaaaaaaaaaaaaaaaaaaaaaaaaaaaaaaaaaugcaucccccccccccccccccccccccccccccccaaaggcucuuuucagagccaccagaauu

SEQ ID NO: 6801 - RNA, 1762 nt, Artificial Sequence
  mRNA product Design i-3 comprising derived and/or modified sequence from HRSV(A2)__F-del_DSCav1_mut6 (opt11)
gggagaaagcuuaccauggaacuacucauccuaaaagcaaacgccaucaccaccauacuaaccgccgucaccuucugcuucgccucgggacaaaacaucaccgaagaguucuaccagucaacgugcuccgccgucucaaaaggcuaccuaggcgcccuccgcaccgggugguauaccuccgucauaacuaucgaacucucuaacaucaaagaaaacaaauguaacggcaccgacgccaaagucaaacuaaucaaacaagaacuggacaaauacaaaaacgccgucaccgaccuacaaaugcucaugugcuccacuccagccaccggcuccgguagcgcaaucgccucaggcguagcuguaugcaaaguccuccaccuagaaggcgaaguaaacaaaauaaaauccgcccuccucucaaccaacaaggccgucgucucacucucaaacggcgucuccguacucaccuuuaaaguccuagaccuuaaaaacuacaucgacaaacaacugcuaccaauccucaacaaacaaucaugcagcaucccaaacccggaaacagucauggaguuccaacagaaaaacaaccgacuccucgaaaucacccgcgaguucuccgucaacgccggagucaccacaccuguaagcacauacaugcuuacuaauuccgaacuccuuucacuaauaaacgacaugccaauaaccaacgaccaaaagaaacucauguccaacaacguacaaaucguacgccaacaauccuacuccaucaugugcaucaucaaagaagaaguccuggccuaugucguacaacucccccuuuacggugucaucgacacacccugcuggaaacuacacaccagcccccucugcacaacaaacaccaaagaaggcuccaacaucugccucacccguaccgaccgaggcugguacugcgacaacgccggcuccgucuccuucuucccccaagccgaaaccugcaaagucugcagcaaccgcgucuucugcgauaccaugaacucccucacacucccaucugaagucaaccucugcaacgucgauauuuucaauccaaaauacgacugcaaaaucaugacuagcaaaaccgacguuagcuccuccgucaucaccucccucggcgccauaguuucaugcuacggcaaaaccaaaugcaccgccuccaacaaaaacaaaggcaucauaaaaaccuucuccaacgggugcgacuacguaucuaauaaaggagucgacaccgucucaguaggaaacacccucuacuaugucaacaaacaagaaggccaaucacuauacguuaaaggcgaaccaaucaucaacuucuacgacccacucgucuuccccagcgacgaguuugacgccucaaucucgcaagucaaugaaaagauuaaccaaucccuagccuucauccgaaaaagugacgaacuccuccacaacguuaacgccggcaaaucuacaaccaacaucaugaucaccacuauaaucaucgucaucauagucauacuucucagccucaucgcagucggacuccuccuuuauugcaaggcacgauaaggacuaguuauaagacugacuagcccgaugggccucccaacgggcccuccuccccuccuugcaccgagauuaauaaaaaaaaaaaaaaaaaaaaaaaaaaaaaaaaaaaaaaaaaaaaaaaaaaaaaaaaaaaaaaaaugcaucccccccccccccccccccccccccccccccaaaggcucuuuucagagccaccagaauu
